United States Patent Application Publication US 2023/0026259 A1 - sequence listing, part 62

SEQ ID NO: 159165 - DNA, 1336 bp, Homo sapiens
  Payload ID: 11148
  Gene Symbol: NTF3
  Gene Name: neurotrophin 3
  Uniprot ID: P20783
  ENST ID: ENST00000423158
  CDS Start-End: 213-1025
gagttgaagctcctctcccttccgaacagctccgcgcaccgccccgcgacgcagcccggcgcaactactttcttctctctcctttctttcttcctctcctttttcccctgctgggtagtggctgcggcggggtgggggagactttgaatgaccgagctcgcgtccacctttctcttcatgtcgacgtccctggaaacggccacacggatgccatggttacttttgccacgatcttacaggtgaacaaggtgatgtccatcttgttttatgtgatatttctcgcttatctccgtggcatccaaggtaacaacatggatcaaaggagtttgccagaagactcgctcaattccctcattattaagctgatccaggcagatattttgaaaaacaagctctccaagcagatggtggacgttaaggaaaattaccagagcaccctgcccaaagctgaggctccccgagagccggagcggggagggcccgccaagtcagcattccagccggtgattgcaatggacaccgaactgctgcgacaacagagacgctacaactcaccgcgggtcctgctgagcgacagcacccccttggagcccccgcccttgtatctcatggaggattacgtgggcagccccgtggtggcgaacagaacatcacggcggaaacggtacgcggagcataagagtcaccgaggggagtactcggtatgtgacagtgagagtctgtgggtgaccgacaagtcatcggccatcgacattcggggacaccaggtcacggtgctgggggagatcaaaacgggcaactctcccgtcaaacaatatttttatgaaacgcgatgtaaggaagccaggccggtcaaaaacggttgcaggggtattgatgataaacactggaactctcagtgcaaaacatcccaaacctacgtccgagcactgacttcagagaacaataaactcgtgggctggcggtggatacggatagacacgtcctgtgtgtgtgccttgtcgagaaaaatcggaagaacatgaattggcatctctccccatatataaattattactttaaattatatgatatgcatgtagcatataaatgtttatattgtttttatatattataagttgacctttatttattaaacttcagcaaccctacagtatataagcttttttctcaataaaatcagtgtgcttgccttccctcaggcctctcccatctgttaaaacttgttttgtgatccggctctcaggagtcactctgtaaaatctgtgtacaccagtattttgcattcagtattgtcaaggccatgactgttgttttagtaaacttgttaaaatca

SEQ ID NO: 159166 - DNA, 932 bp, Homo sapiens
  Payload ID: 11149
  Gene Symbol: NTF4
  Gene Name: neurotrophin 4
  Uniprot ID: P34130
  ENST ID: ENST00000593537
  CDS Start-End: 1-633
atgctccctctcccctcatgctccctccccatcctcctccttttcctcctccccagtgtgccaattgagtcccaacccccaccctcaacattgcccccttttctggcccctgagtgggaccttctctccccccgagtagtcctgtctaggggtgcccctgctgggccccctctgctcttcctgctggaggctggggcctttcgggagtcagcaggtgccccggccaaccgcagccggcgtggggtgagcgaaactgcaccagcgagtcgtcggggtgagctggctgtgtgcgatgcagtcagtggctgggtgacagaccgccggaccgctgtggacttgcgtgggcgcgaggtggaggtgttgggcgaggtgcctgcagctggcggcagtcccctccgccagtacttctttgaaacccgctgcaaggctgataacgctgaggaaggtggcccgggggcaggtggagggggctgccggggagtggacaggaggcactgggtatctgagtgcaaggccaagcagtcctatgtgcgggcattgaccgctgatgcccagggccgtgtgggctggcgatggattcgaattgacactgcctgcgtctgcacactcctcagccggactggccgggcctgagacccatgcccaggaaaataacagagctggatgctgagagacctcagggatggcccagctgatctaaggaccccagtttgggaactcatcaaataatcacaaaatcacaattctctgattttgagctcaatctctgcaggatgggtgaaaccacatggggttttggaggttgaataggagttctcctggagcaacttgagggtaataatgatgatgatataataataatagccactatttactgagtgtttactgtttcttatccctaatacataactcctcagatcaactctcatgga

SEQ ID NO: 159167 - DNA, 1748 bp, Homo sapiens
  Payload ID: 11149
  Gene Symbol: NTF4
  Gene Name: neurotrophin 4
  ENST ID: ENST00000599795
  CDS Start-End: 263-724
ccgggccctgcggagcgtgagcagctagcacccggcgggccagcgagcgtccctgcagccagcgagcaggaggaggagctgctgccgggcggagggcagccgcgggagccgaagagggcgccccaggtggttgccccctccctctcctgagatgtcaggaaggagggggccacctgtgtcctccacaggggccccccgaagcctggggactcccagccccagagctccgaggcggaggaggtgctgacaggtgctccgagagatgctccctctcccctcatgctccctccccatcctcctccttttcctcctccccagtgtgccaattgagtcccaacccccaccctcaacattgcccccttttctggcccctgagtgggaccttctctccccccgagtagtcctgtctaggggtgcccctgctgggccccctctgctcttcctgctggaggctggggcctttcgggagtcagcaggtgccccggccaaccgcagccggcgtgggtccacggtcgcggaccctctacctccgactgcaaagcaggattctcgcatctgggctttcgacgaggtcctcagcagatgggagacaacctctggctcggcctacgtgcccaagacccatggcgggccctgcgcccagcccagagccccagagcctgcagaccccacgcggactgtggggatcaaggattcaggagaaaagctcagacaccgcagctgaaccctcctactgaccacaaagtaccagagcagcgagacgagggcgcagtacacttgctctcccggcccggacgcgcgcgcccccaaatacgtcgggccccagcccctcacaactctcggaccaccaccgcggggggccttcccagtatccgaccggggcgtcctgaaccgccgccagctctatctgaccacctcggcgcgggactttcggttctatcccaagacggagccgtccggatacccccgcaaggactacctgacctactggagcttagaagagacgccccaactctggagtcacgacccgcagcggcagccctgtctctgctcttccaggccgcctcgagcgccgcacggcgggccatgtctccggctcaggaaacctacagctcctcgccgcacccgctccgccggctcgaccgcttccgcccgctggaggcgacttggggtggcccccactggaagcccctgccgggcatacacagcgtcccgaaagcctacagcaccgagaactcccgctcaggccgctgtaagccggggctagtgggagcctgccgggccagccccaccccagacacgccccctggcgtgggggcggagcagagctctgggcagccgctcactacgcggtgtcggacctaggtgggctcgcactcattaagtctatccgcagtgtggggacaggactagcccagacacgcccactcagctgcggctggatcgcggggaagggactaagtccagacaatgtcctccgaggctgcggccccgcgggcaggacacacctcctgcgggcctattcaataatcagttaaatcacctgaagcacacgcatttccggggaccgctccgggcatcctggcttgagggtagggtgggcggaggttcctaagggagaggtggggctcgggctgaatccctcgttggggggcatctgggtcaagtggcttccctggcagcacagtcacggggagaccctctctcactgggcagaagctaagtccgaagccgcgcccctcctgtta

SEQ ID NO: 159168 - DNA, 813 bp, Homo sapiens
  Payload ID: 11149
  Gene Symbol: NTF4
  Gene Name: neurotrophin 4
  ENST ID: ENST00000595857
  CDS Start-End: 384-813
agctagcacccggcgggccagcgagcgtccctgcagccagcgagcaggaggaggagctgctgccgggcggagggcagccgcgggagccgaagagggcgccccaggagccagggcaggcagccactccaggtatgtgcagaagtcttgggcgggccctggcctgtcctgtgaggagggaacattccaggaagcagcttggggaaccagggcttcttgagtgtgggccctcagggacccgggtgtccaggtggttgccccctccctctcctgagatgtcaggaaggagggggccacctgtgtcctccacaggggccccccgaagcctggggactcccagccccagagctccgaggcggaggaggtgctgacaggtgctccgagagatgctccctctcccctcatgctccctccccatcctcctccttttcctcctccccagtgtgccaattgagtcccaacccccaccctcaacattgcccccttttctggcccctgagtgggaccttctctccccccgagtagtcctgtctaggggtgcccctgctgggccccctctgctcttcctgctggaggctggggcctttcgggagtcagcaggtgccccggccaaccgcagccggcgtggggtgagcgaaactgcaccagcgagtcgtcggggtgagctggctgtgtgcgatgcagtcagtggctgggtgacagaccgccggaccgctgtggacttgcgtgggcgcgaggtggaggtgttgggcgaggtgcctgcagctggcggcagtcccctccgccagtacttctttgaaacccgctgcaaggctg

SEQ ID NO: 159169 - DNA, 1109 bp, Homo sapiens
  Payload ID: 11150
  Gene Symbol: NRTN
  Gene Name: neurturin
  Uniprot ID: Q99748
  ENST ID: ENST00000303212
  CDS Start-End: 365-958
atacgccacactcagtctggcctcggggcctttgcactggctgtgtcccctgcctgtgatgccattctcctctgcctggccaactcctacgtttattcaagtctggaccttgtcatcggctcctcaggaaggcactccgggacccccagatgggggcggttccctgtgactcctggcacggaggccaaccccttccttgttcaatggttccttgagggaccattcccatgtgattatcgaccattcggcaggcgttcaaagtcaaaggccccacactgagtcctggcccagcgccctgtgcccgttggctgctggagggacagacggggcgtgcggctgaccatcccgtgcccgcaggctgaggatgcagcgctggaaggcggcggccttggcctcagtgctctgcagctccgtgctgtccatctggatgtgtcgagagggcctgcttctcagccaccgcctcggacctgcgctggtccccctgcaccgcctgcctcgaaccctggacgcccggattgcccgcctggcccagtaccgtgcactcctgcagggggccccggatgcgatggagctgcgcgagctgacgccctgggctgggcggcccccaggtccgcgccgtcgggcggggccccggcggcggcgcgcgcgtgcgcggttgggggcgcggccttgcgggctgcgcgagctggaggtgcgcgtgagcgagctgggcctgggctacgcgtccgacgagacggtgctgttccgctactgcgcaggcgcctgcgaggctgccgcgcgcgtctacgacctcgggctgcgacgactgcgccagcggcggcgcctgcggcgggagcgggtgcgcgcgcagccctgctgccgcccgacggcctacgaggacgaggtgtccttcctggacgcgcacagccgctaccacacggtgcacgagctgtcggcgcgcgagtgcgcctgcgtgtgaccctacctcactcggccggcgcggcggccactccccccgcctcgacggcaccactggccggccccgcgaaagactgcgcgtgcgtagagcacgccggcgcggccccgggactctcgcgataactgtactgagataaagtgtggcaactcga

SEQ ID NO: 159170 - DNA, 921 bp, Homo sapiens
  Payload ID: 11151
  Gene Symbol: NCEH1
  Gene Name: neutral cholesterol ester hydrolase 1
  ENST ID: ENST00000424772
  CDS Start-End: 1-921
ccggaggtctccgggtggtatcgccctttcctctttgccagcccgctggcgagccgagccagggcaagatgaggtcgtcctgtgtcctgctcaccgccctggtggcgctggccgcctattacgtctacatcccgctgcctggctccgtgtccgacccctggaagctgatgctgctggacgccactttccggggtgcacagcaagtgagtaacctgatccactacctgggactgagccatcacctgctggcactgaattttatcattgtttcttttggcaaaaaaagcgcgtggtcttctgcccaagtgaaggtgaccgacacagactttgatggtgtggaagtcagagtgtttgaaggccctccgaagcccgaagagccactgaaacgcagcgtcgtttatatccacggaggaggctgggccttggcaagtgcaagtgcgtcctggtcaccttcagatgaaatcaggtattatgatgagctgtgtacagcaatggctgaggaattgaatgctgtcattgtttccattgaatacaggctagttccaaaggtttattttcctgagcaaattcatgatgttgtacgggccacaaagtatttcctgaagccagaagtcttacagaagtatatggttgatccaggcagaatttgcatttctggtgacagtgctggtggaaatctggctgctgcccttggacaacagtttactcaagatgccagcctaaaaaataagctcaaactacaagctttaatttatccagttcttcaagctttagattttaacacaccatcttatcagcaaaatgtgaacaccccaatcctgccccgctatgtcatggtgaagtattgggtggactacttcaaaggcaactatgactttgtgcaggcaatgatcgttaacaatcacacttcacttgatgtgg

SEQ ID NO: 159171 - DNA, 602 bp, Homo sapiens
  Payload ID: 11151
  Gene Symbol: NCEH1
  Gene Name: neutral cholesterol ester hydrolase 1
  ENST ID: ENST00000421723
  CDS Start-End: 33-314
gattggctcctgggcttataagaaacgcgtgaatgagcagctgccgcgggcagaaagttgccggaggtctccgggtggtatcgccctttcctctttgccagcccgctggcgagccgagccagggcaagatgaggtcgtcctgtgtcctgctcaccgccctggtggcgctggccgcctattacgtctacatcccgctgcctggctccgtgtccgacccctggaagctgatgctgctggacgccactttccggggtgcacagcaagtgaaatcaggtattatgatgagctgtgtacagcaatggctgaggaattgaatgctgtcattgtttccattgaatacaggctagttccaaaggtttattttcctgagcaaattcatgatgttgtacgggccacaaagtatttcctgaagccagaagtcttacagaagtatatggttgatccaggcagaatttgcatttctggtgacagtgctggtggaaatctggctgctgcccttggacaacagtttactcaagatgccagcctaaaaaataagctcaaactacaagctttaatttatccagttcttcaagctttagattttaacacaccatcttatc

SEQ ID NO: 159172 - DNA, 4687 bp, Homo sapiens
  Payload ID: 11151
  Gene Symbol: NCEH1
  Gene Name: neutral cholesterol ester hydrolase 1
  ENST ID: ENST00000475381
  CDS Start-End: 139-1461
agagcagcgacagagccttcctcaaacctgtagtgactgccacactttgcaaggacaccgtagagggggcatgtccgcgctccaacttcctcccgacgcagcctctgattggctcctgggcttataagaaacgcgtgaatgagcagctgccgcgggcagaaagttgccggaggtctccgggtggtatcgccctttcctctttgccagcccgctggcgagccgagccagggcaagatgaggtcgtcctgtgtcctgctcaccgccctggtggcgctggccgcctattacgtctacatcccgctgcctggctccgtgtccgacccctggaagctgatgctgctggacgccactttccggggtgcacagcaagtgagtaacctgatccactacctgggactgagccatcacctgctggcactgaattttatcattgtttcttttggcaaaaaaagcgcgtggtcttctgcccaagtgaaggtgaccgacacagactttgatggtgtggaagtcagagtgtttgaaggccctccgaagcccgaagagccactgaaacgcagcgtcgtttatatccacggaggaggctgggccttggcaagtgcaaaaatcaggtattatgatgagctgtgtacagcaatggctgaggaattgaatgctgtcattgtttccattgaatacaggctagttccaaaggtttattttcctgagcaaattcatgatgttgtacgggccacaaagtatttcctgaagccagaagtcttacagaagtatatggttgatccaggcagaatttgcatttctggtgacagtgctggtggaaatctggctgctgcccttggacaacagtttactcaagatgccagcctaaaaaataagctcaaactacaagctttaatttatccagttcttcaagctttagattttaacacaccatcttatcagcaaaatgtgaacaccccaatcctgccccgctatgtcatggtgaagtattgggtggactacttcaaaggcaactatgactttgtgcaggcaatgatcgttaacaatcacacttcacttgatgtggaagaggctgctgctgtcagggcccgtctaaactggacatccctcttgcctgcatccttcacaaagaactacaagcctgttgtacagaccacaggcaatgccaggattgtccaggagcttcctcagttgctggatgcccgctccgccccactcattgcagaccaggcagtgctgcagctcctcccaaagacctacattctgacgtgtgagcatgatgtcctcagagacgatggcatcatgtatgccaagcgtttggagagtgccggtgtggaggtgaccctggatcactttgaggatggctttcacggatgtatgattttcactagctggcccaccaacttctcagtgggaatccggactaggaatagttacatcaagtggctagatcaaaacctgtaaaggagcaaaacttccagaagcctcgagcccctcttgacctcctacacctgctttggaaagacatgcactttttagttgactaattcttcctcccattcccctctacttgcgagttatggaatttctattccataactgaagtctttatgataacctaatttttaaaaatgaatttgactaacttaagtgcaaaacatgtaaatttggttcccagagtgggccaatctctctgttcttgttatcttagccaactatactgatacctacagctacagaaagcaggactaggaactggaaataactttgggtcctgccttcattaggacgttctttttagaagcagttcttccagctctggatcatagagtgacctttaataagttaaaaaaacgaggactccttaattctgctagagttaaccttgagttcagagcagtattaaatgcgtgcactttcaggtcagtactggggaccaagtaccctctggtcttttgtgaatggatggttttgtttcctatgggaattttggcaaaggttttctggaaagaacaagtttctcaaaggactttcttcctctagaatgttcattttatgagatcgctatctgtaagtccagttggattacaggaatacttgaaagttactttctaccactattagaaaatatgaagtcgcatgcactggatatctatatatcattaggtttttgttgtgtttttggttatgctgtcccccttctccttggggagatatttgggagcaaacttatttagatttagagtaaacttttcattatagagcaagtaaaaacagacaaatgaaacaacctagtgtttcacataaaaatacttctgacataaagtaccaagagcagtgtgaatatacttggcatagtcaaaaaagaaaatacatttaatattagttcaaaattgttaaaaatacctttagaaggtctagtctattattgaaaactcaattttttcacttatatggctttaaaatggagctattttgctacaatataatgtattgtttatttttttaagttatttaatgttaatatacatagctagacttaaggtttttcagaaagatgtccataataaatattaaaaacaatggtattttttaaaaaactgccttagggttttaaaaccttccctacagttataaccacgtgtaattttgtggaaatgatataacagctattaatactactataacataggcataaatattttcgtgtttatatgcatatacaagttaaaataattagaaactatgactgcgcctagtaaagtcatctaggtttatagttcagtagcttaggcaaggcacacactgctcatctccgctttttagggtcagaggaacacaagctcatgttctgagtgaagggcgtacactggcacctggtgttgcctagatcccccatctcctccttccagccaggtctggaagtttcaacagcccaagcttaacttcatgtaaagtcttcactgccagtgggaacatctttgacacaacaagacactccaattgtgatttgagttgaggatctctgcctgccttcctgccgtccttccttcttccccgatccatgctacttttaggggctgcggagagcagcagcagagctgagtaatgatacagggcaccacggagagaaagtagaaccatttcactcctgggaagatggggtatttcccacttccagcaacgaaataacaaatgaaaagttgcatacttattgatgtattgtatgagccagtagcattttatgtacaaaacagaagtcaatgcaacagtatgtatgtgtgcctgtgtgtgtataaaaataaccattgaagctaacttgctaatgtacttaggcaagccacttcccatctctgggcctcgtctttcctccctctaaaatcaaagagctgaattatgtgatccttgaggtctcttccacttataataccaactgtcttgtcagactggcaaattatattggcctctccttatgtggtggtttttttggtaggtcatagttccttatacacagacacctgcatcatcgaaggtctttttttcctaaaaaaaaaaaatgggattttagttcttattctgtgataactatcctcctcatataatactattctttttgacaccatttgaaggaaccaatatttggaccttattttgaggttgtctgtctcgaagaaaaagaaaataaaatgtataggcagggttccttcaattggcattttccccagaattgtgagccaaagcctatagtaattgcagacagcaaatgattccggatctctaaaaggctctctcagatgaaaagggagtaaaggaaaaaagaggtcaaccactgtttctgataatgtacttgagtttcattgttcttttagtttgtattcttataaaaaatgtttacactctgcagattgattttttttttttagtactgtggctttcttttcctattttatgaaaaaaatgataatctttttgtaaaattgtctgtgaaatataaacattaatatataaagaaaaaccttgaagtgctgtatagtgaagtataaattaatgttttattgatttgtgaagaatttaagactattatataattatcttggtggatctattttatgcatgaccttttaacctttgactttgcttatttcccactacgaaggggaaggtagattttatgaatgattttaatagcaaatatattttataaagtgaaaatccagtgtggaggtagcaaagcatctatctattctgaatcatgtttggaaataaaattgctccatctgggaatgtgctttcattttcccgtctcattttctgtttcccatttgaaaacagtgttctcttctcttctttctgtatgccaaattgccagccacaattctttcccaatcttctgcccagtggagtactccagctgtctttcctttagagaggtggttcagtggcctccttgatgacatttgtttcatgtctggatacagtatgtgttgccctcctttggactggctagaatattcataaaagccaggcaggccctgggactattttgggaccttcaatacacatgttaggaaaaggatgatcataatgccaagagtttgagctgaattgtttcagccaaagcatcactatcactgaaggcaggttctcaaactgaccttgtcattacaaataaatctaatttcacacttga

SEQ ID NO: 159173 - DNA, 4315 bp, Homo sapiens
  Payload ID: 11151
  Gene Symbol: NCEH1
  Gene Name: neutral cholesterol ester hydrolase 1
  ENST ID: ENST00000538775
  CDS Start-End: 139-1485
agagcagcgacagagccttcctcaaacctgtagtgactgccacactttgcaaggacaccgtagagggggcatgtccgcgctccaacttcctcccgacgcagcctctgattggctcctgggcttataagaaacgcgtgaatgagcagctgccgcgggcagaaagttgccggaggtctccgggtggtatcgccctttcctctttgccagcccgctggcgagccgagccagggcaagatgaggtcgtcctgtgtcctgctcaccgccctggtggcgctggccgcctattacgtctacatcccgctgcctggctccgtgtccgacccctggaagctgatgctgctggacgccactttccggggtgcacagcaagtgagtaacctgatccactacctgggactgagccatcacctgctggcactgaattttatcattgtttcttttggcaaaaaaagcgcgtggtcttctgcccaagtgaaggtgaccgacacagactttgatggtgtggaagtcagagtgtttgaaggccctccgaagcccgaagagccactgaaacgcagcgtcgtttatatccacggaggaggctgggccttggcaagtgcaagtgcgtcctggtcaccttcagatgaaatcaggtattatgatgagctgtgtacagcaatggctgaggaattgaatgctgtcattgtttccattgaatacaggctagttccaaaggtttattttcctgagcaaattcatgatgttgtacgggccacaaagtatttcctgaagccagaagtcttacagaagtatatggttgatccaggcagaatttgcatttctggtgacagtgctggtggaaatctggctgctgcccttggacaacagtttactcaagatgccagcctaaaaaataagctcaaactacaagctttaatttatccagttcttcaagctttagattttaacacaccatcttatcagcaaaatgtgaacaccccaatcctgccccgctatgtcatggtgaagtattgggtggactacttcaaaggcaactatgactttgtgcaggcaatgatcgttaacaatcacacttcacttgatgtggaagaggctgctgctgtcagggcccgtctaaactggacatccctcttgcctgcatccttcacaaagaactacaagcctgttgtacagaccacaggcaatgccaggattgtccaggagcttcctcagttgctggatgcccgctccgccccactcattgcagaccaggcagtgctgcagctcctcccaaagacctacattctgacgtgtgagcatgatgtcctcagagacgatggcatcatgtatgccaagcgtttggagagtgccggtgtggaggtgaccctggatcactttgaggatggctttcacggatgtatgattttcactagctggcccaccaacttctcagtgggaatccggactaggaatagttacatcaagtggctagatcaaaacctgtaaaggagcaaaacttccagaagcctcgagcccctcttgacctcctacacctgctttggaaagacatgcactttttagttgactaattcttcctcccattcccctctacttgcgagttatggaatttctattccataactgaagtctttatgataacctaatttttaaaaatgaatttgactaacttaagtgcaaaacatgtaaatttggttcccagagtgggccaatctctctgttcttgttatcttagccaactatactgatacctacagctacagaaagcaggactaggaactggaaataactttgggtcctgccttcattaggacgttctttttagaagcagttcttccagctctggatcatagagtgacctttaataagttaaaaaaacgaggactccttaattctgctagagttaaccttgagttcagagcagtattaaatgcgtgcactttcaggtcagtactggggaccaagtaccctctggtcttttgtgaatggatggttttgtttcctatgggaattttggcaaaggttttctggaaagaacaagtttctcaaaggactttcttcctctagaatgttcattttatgagatcgctatctgtaagtccagttggattacaggaatacttgaaagttactttctaccactattagaaaatatgaagtcgcatgcactggatatctatatatcattaggtttttgttgtgtttttggttatgctgtcccccttctccttggggagatatttgggagcaaacttatttagatttagagtaaacttttcattatagagcaagtaaaaacagacaaatgaaacaacctagtgtttcacataaaaatacttctgacataaagtaccaagagcagtgtgaatatacttggcatagtcaaaaaagaaaatacatttaatattagttcaaaattgttaaaaatacctttagaaggtctagtctattattgaaaactcaattttttcacttatatggctttaaaatggagctattttgctacaatataatgtattgtttatttttttaagttatttaatgttaatatacatagctagacttaaggtttttcagaaagatgtccataataaatattaaaaacaatggtattttttaaaaaactgccttagggttttaaaaccttccctacagttataaccacgtgtaattttgtggaaatgatataacagctattaatactactataacataggcataaatattttcgtgtttatatgcatatacaagttaaaataattagaaactatgactgcgcctagtaaagtcatctaggtttatagttcagtagcttaggcaaggcacacactgctcatctccgctttttagggtcagaggaacacaagctcatgttctgagtgaagggcgtacactggcacctggtgttgcctagatcccccatctcctccttccagccaggtctggaagtttcaacagcccaagcttaacttcatgtaaagtcttcactgccagtgggaacatctttgacacaacaagacactccaattgtgatttgagttgaggatctctgcctgccttcctgccgtccttccttcttccccgatccatgctacttttaggggctgcggagagcagcagcagagctgagtaatgatacagggcaccacggagagaaagtagaaccatttcactcctgggaagatggggtatttcccacttccagcaacgaaataacaaatgaaaagttgcatacttattgatgtattgtatgagccagtagcattttatgtacaaaacagaagtcaatgcaacagtatgtatgtgtgcctgtgtgtgtataaaaataaccattgaagctaacttgctaatgtacttaggcaagccacttcccatctctgggcctcgtctttcctccctctaaaatcaaagagctgaattatgtgatccttgaggtctcttccacttataataccaactgtcttgtcagactggcaaattatattggcctctccttatgtggtggtttttttggtaggtcatagttccttatacacagacacctgcatcatcgaaggtctttttttcctaaaaaaaaaaaatgggattttagttcttattctgtgataactatcctcctcatataatactattctttttgacaccatttgaaggaaccaatatttggaccttattttgaggttgtctgtctcgaagaaaaagaaaataaaatgtataggcagggttccttcaattggcattttccccagaattgtgagccaaagcctatagtaattgcagacagcaaatgattccggatctctaaaaggctctctcagatgaaaagggagtaaaggaaaaaagaggtcaaccactgtttctgataatgtacttgagtttcattgttcttttagtttgtattcttataaaaaatgtttacactctgcagattgattttttttttttagtactgtggctttcttttcctattttatgaaaaaaatgataatctttttgtaaaattgtctgtgaaatataaacattaatatataaagaaaaaccttgaagtgctgtatagtgaagtataaattaatgttttattgatttgtgaagaatttaagactattatataattatcttggtggatctattttatgcatgaccttttaacctttgactttgcttatttcccactacgaaggggaaggtagattttatgaatgattttaatagcaaatatattttataaagtgaaaatccagtgtggaggtagcaaagcatctatctattctgaatcatgtttggaaataaaattgctccatctgggaatgtgctttca

SEQ ID NO: 159174 - DNA, 4062 bp, Homo sapiens
  Payload ID: 11151
  Gene Symbol: NCEH1
  Gene Name: neutral cholesterol ester hydrolase 1
  Uniprot ID: Q6PIU2
  ENST ID: ENST00000543711
  CDS Start-End: 405-1232
agagcagcgacagagccttcctcaaacctgtagtgactgccacactttgcaaggacaccgtagagggggcatgtccgcgctccaacttcctcccgacgcagcctctgattggctcctgggcttataagaaacgcgtgaatgagcagctgccgcgggcagaaagttgccggaggtctccgggtggtatcgccctttcctctttgccagcccgctggcgagccgagccagggcaagatgaggtcgtcctgtgtcctgctcaccgccctggtggcgctggccgcctattacgtctacatcccgctgcctggctccgtgtccgacccctggaagctgatgctgctggacgccactttccggggtgcacagcaagtgaaatcaggtattatgatgagctgtgtacagcaatggctgaggaattgaatgctgtcattgtttccattgaatacaggctagttccaaaggtttattttcctgagcaaattcatgatgttgtacgggccacaaagtatttcctgaagccagaagtcttacagaagtatatggttgatccaggcagaatttgcatttctggtgacagtgctggtggaaatctggctgctgcccttggacaacagtttactcaagatgccagcctaaaaaataagctcaaactacaagctttaatttatccagttcttcaagctttagattttaacacaccatcttatcagcaaaatgtgaacaccccaatcctgccccgctatgtcatggtgaagtattgggtggactacttcaaaggcaactatgactttgtgcaggcaatgatcgttaacaatcacacttcacttgatgtggaagaggctgctgctgtcagggcccgtctaaactggacatccctcttgcctgcatccttcacaaagaactacaagcctgttgtacagaccacaggcaatgccaggattgtccaggagcttcctcagttgctggatgcccgctccgccccactcattgcagaccaggcagtgctgcagctcctcccaaagacctacattctgacgtgtgagcatgatgtcctcagagacgatggcatcatgtatgccaagcgtttggagagtgccggtgtggaggtgaccctggatcactttgaggatggctttcacggatgtatgattttcactagctggcccaccaacttctcagtgggaatccggactaggaatagttacatcaagtggctagatcaaaacctgtaaaggagcaaaacttccagaagcctcgagcccctcttgacctcctacacctgctttggaaagacatgcactttttagttgactaattcttcctcccattcccctctacttgcgagttatggaatttctattccataactgaagtctttatgataacctaatttttaaaaatgaatttgactaacttaagtgcaaaacatgtaaatttggttcccagagtgggccaatctctctgttcttgttatcttagccaactatactgatacctacagctacagaaagcaggactaggaactggaaataactttgggtcctgccttcattaggacgttctttttagaagcagttcttccagctctggatcatagagtgacctttaataagttaaaaaaacgaggactccttaattctgctagagttaaccttgagttcagagcagtattaaatgcgtgcactttcaggtcagtactggggaccaagtaccctctggtcttttgtgaatggatggttttgtttcctatgggaattttggcaaaggttttctggaaagaacaagtttctcaaaggactttcttcctctagaatgttcattttatgagatcgctatctgtaagtccagttggattacaggaatacttgaaagttactttctaccactattagaaaatatgaagtcgcatgcactggatatctatatatcattaggtttttgttgtgtttttggttatgctgtcccccttctccttggggagatatttgggagcaaacttatttagatttagagtaaacttttcattatagagcaagtaaaaacagacaaatgaaacaacctagtgtttcacataaaaatacttctgacataaagtaccaagagcagtgtgaatatacttggcatagtcaaaaaagaaaatacatttaatattagttcaaaattgttaaaaatacctttagaaggtctagtctattattgaaaactcaattttttcacttatatggctttaaaatggagctattttgctacaatataatgtattgtttatttttttaagttatttaatgttaatatacatagctagacttaaggtttttcagaaagatgtccataataaatattaaaaacaatggtattttttaaaaaactgccttagggttttaaaaccttccctacagttataaccacgtgtaattttgtggaaatgatataacagctattaatactactataacataggcataaatattttcgtgtttatatgcatatacaagttaaaataattagaaactatgactgcgcctagtaaagtcatctaggtttatagttcagtagcttaggcaaggcacacactgctcatctccgctttttagggtcagaggaacacaagctcatgttctgagtgaagggcgtacactggcacctggtgttgcctagatcccccatctcctccttccagccaggtctggaagtttcaacagcccaagcttaacttcatgtaaagtcttcactgccagtgggaacatctttgacacaacaagacactccaattgtgatttgagttgaggatctctgcctgccttcctgccgtccttccttcttccccgatccatgctacttttaggggctgcggagagcagcagcagagctgagtaatgatacagggcaccacggagagaaagtagaaccatttcactcctgggaagatggggtatttcccacttccagcaacgaaataacaaatgaaaagttgcatacttattgatgtattgtatgagccagtagcattttatgtacaaaacagaagtcaatgcaacagtatgtatgtgtgcctgtgtgtgtataaaaataaccattgaagctaacttgctaatgtacttaggcaagccacttcccatctctgggcctcgtctttcctccctctaaaatcaaagagctgaattatgtgatccttgaggtctcttccacttataataccaactgtcttgtcagactggcaaattatattggcctctccttatgtggtggtttttttggtaggtcatagttccttatacacagacacctgcatcatcgaaggtctttttttcctaaaaaaaaaaaatgggattttagttcttattctgtgataactatcctcctcatataatactattctttttgacaccatttgaaggaaccaatatttggaccttattttgaggttgtctgtctcgaagaaaaagaaaataaaatgtataggcagggttccttcaattggcattttccccagaattgtgagccaaagcctatagtaattgcagacagcaaatgattccggatctctaaaaggctctctcagatgaaaagggagtaaaggaaaaaagaggtcaaccactgtttctgataatgtacttgagtttcattgttcttttagtttgtattcttataaaaaatgtttacactctgcagattgattttttttttttagtactgtggctttcttttcctattttatgaaaaaaatgataatctttttgtaaaattgtctgtgaaatataaacattaatatataaagaaaaaccttgaagtgctgtatagtgaagtataaattaatgttttattgatttgtgaagaatttaagactattatataattatcttggtggatctattttatgcatgaccttttaacctttgactttgcttatttcccactacgaaggggaaggtagattttatgaatgattttaatagcaaatatattttataaagtgaaaatccagtgtggaggtagcaaagcatctatctattctgaatcatgtttggaaataaaattgctccatctgggaatgtgctttca

SEQ ID NO: 159175 - DNA, 3569 bp, Homo sapiens
  Payload ID: 11152
  Gene Symbol: NSMAF
  Gene Name: neutral sphingomyelinase (N-SMase) activation associated factor
  Uniprot ID: Q92636
  ENST ID: ENST00000038176
  CDS Start-End: 214-2967
ccggagtccccacgcgaggatgctgcggtgagcgcggccgggacgccgcgtcgggctctcggccgcccagcggcgccgcaggggaagccaggccggcagccgcgcgctccccagccggccaccaatcccgccctccccggctcctccggacctcctcggcaggcggcggcggggcctgcctgtgcgctctgcgcccgcccgcgcctaccctccatggcgtttatccggaagaagcagcaggagcagcagctgcagctctactccaaggagagattttccttgctgctgcttaacttggaggagtactactttgaacagcatagagccaatcacattttgcacaagggcagtcaccatgaaaggaaaatcagaggctccttaaaaatatgttcaaaatcggtgatttttgaaccagattcaatatcccagcccatcatcaagattcctttgagagactgtataaaaataggaaagcatggagaaaatggagccaatagacacttcacaaaggcaaaatctgggggtatttcactcattttcagtcaggtatatttcattaaagaacataatgttgttgcaccatataaaatagaaaggggcaaaatggaatatgtttttgaattggatgttcccgggaaagtggaagatgttgtggagacgttgcttcagcttcacagagcatcctgccttgacaaattgggtgaccaaaccgccatgataacagctattttgcagtctcgtttagctagaacatcatttgacaaaaacaggttccaaaacatttctgaaaagctgcacatggaatgcaaagcagaaatggtgacgcctctggtgactaatcctggacacgtgtgcatcacggacacaaacctgtattttcagcccctcaacggctacccgaaacctgtggtccagataacactccaagatgtccgccgcatctacaaaaggaggcacggcctcatgcctctgggcttggaagtattttgcacagaagatgatctgtgttccgacatctacctaaagttctatgaacctcaagatagagatgatctctatttttacattgccacatacctagagcaccatgtggcggagcacactgctgagagctacatgctgcagtggcagcgtggacacctttccaactatcagtacctccttcacctcaacaacctggccgaccgcagctgcaacgacctctcccagtaccctgtgtttccatggataatacatgattattccagctcagaactagatttgtcaaatccaggaaccttccgggatctcagtaagccagtaggggccctaaataaggaacggctggagagactactgacacgctaccaggaaatgcctgaaccaaagttcatgtatgggagtcactactcttccccgggttatgtacttttttatcttgttaggattgcaccagagtatatgctgtgcctgcagaatggaagatttgataatgcagatagaatgttcaacagtattgcagaaacttggaaaaactgtctggatggtgcaacggattttaaagagttaattccagaattctatggtgatgatgtgagctttctagtcaatagcctgaagttggatttgggaaagagacaaggaggacagatggttgacgacgtggagcttcccccttgggcttccagtcccgaggactttctccagaagagcaaagatgcattggaaagcaattatgtgtctgaacaccttcacgagtggattgatctaatatttggctacaaacaaaaagggagtgatgcagttggggcccataatgtatttcatcccctgacctatgaaggaggtgtagacttgaacagcatccaggatcctgatgagaaggtagccatgcttacgcaaatcttggaatttgggcagacaccaaaacaactatttgtgacaccacatcctcgaaggatcaccccaaagtttaaaagtttgtcccagacctccagttataatgcttctatggcagattccccaggtgaagagtcttttgaagacctgaccgaagaaagcaaaacactggcctggaataacatcaccaaactgcagttacacgagcactataaaatccacaaagaagcagttactggaatcacggtctctcgcaatggatcttcagtattcacaacatcccaagattccaccttgaagatgttttctaaagaatcaaaaatgctacaaagaagtatatcattttcaaatatggctttatcgtcttgtttacttttaccaggagatgccactgtcataacttcttcatgggataataatgtctatttttattccatagcatttggaagacgccaggacacgttaatgggacatgatgatgctgttagtaagatctgttggcatgacaacaggctatattctgcatcgtgggactctacagtgaaggtgtggtctggtgttcctgcagagatgccaggcaccaaaagacaccactttgacttgctggccgagctggaacatgatgtcagtgtagatacaatcagtttaaatgctgcaagcacactgttagtttccggcaccaaagaaggcacagtgaatatttgggacctcacaacggccaccttaatgcaccagattccatgccattcagggattgtatgtgacactgcttttagcccagatagtcgccatgtcctcagcacaggaacagatggctgtcttaatgtcattgatgtgcagacaggaatgctcatctcctccatgacatcagatgagccccagaggtgctttgtctgggatggaaattccgttttatctggcagtcagtctggtgaactgctcgtttgggacctccttggagcaaaaatcagtgagagaatacagggccacacaggtgctgtgacatgtatatggatgaatgaacagtgtagcagtatcatcacaggaggggaagacagacaaattatattctggaaattgcagtattaagtgccttttcctctcctgaatattaaattgaactctatttaatgcatttttaaaccaaacttttaaacggactggtgaatgtgcaatgttagtaattagaagttttaccacatggaaaatttgtggttttaaactttctaaatcatggtgacttcattgaaagccattagttgctattctcttagggcagataaaatgcggctgtgttaggaaaaacatgttacactgtaaggcagatgatcgtccccgtatgatgattgtcagaagacaggactaagtagcagagaatagctaagagataaattgggctggggaaacttgtcagaaagcactgaacaattaagaaattttccaagaaaatgtgcagtattctctgctacttctgaatctgttttgtcttcctaatctatcacaattgccacccatcgggttttgggtgtgtgttttcatagcgtggttactttctataatgctgtacccagattctaagaacctggagaaggattagcagttcttagtaagtttactgtgtataggaacggtttgtatttcattacagctattcatcttttctacattaaaaatatttttctctaaagaaa

SEQ ID NO: 159176 - DNA, 3371 bp, Homo sapiens
  Payload ID: 11152
  Gene Symbol: NSMAF
  Gene Name: neutral sphingomyelinase (N-SMase) activation associated factor
  Uniprot ID: Q92636
  ENST ID: ENST00000427130
  CDS Start-End: 189-3035
agtcggggccggtcgtggggacgccggccggagatctgagggacgggaggcggcgtgggggccgggcacggaggcaggggccggacgcgtgtccagggcctgggctgggggctgtggcggaaacctgaggtcggggtgagaggccgggggcctggtctgggccggagcctgccggggacaggaactggatgacgggccaggccagattccaccgcggagccgaggcatgccgagctatccggcagtgcaggtcccggcggccgcgggcagctcacccggaaggccgcgcggggtccgggcgtggatcccggcacgcgagcccgggcgttcgcaggggaggattttccttgctgctgcttaacttggaggagtactactttgaacagcatagagccaatcacattttgcacaagggcagtcaccatgaaaggaaaatcagaggctccttaaaaatatgttcaaaatcggtgatttttgaaccagattcaatatcccagcccatcatcaagattcctttgagagactgtataaaaataggaaagcatggagaaaatggagccaatagacacttcacaaaggcaaaatctgggggtatttcactcattttcagtcaggtatatttcattaaagaacataatgttgttgcaccatataaaatagaaaggggcaaaatggaatatgtttttgaattggatgttcccgggaaagtggaagatgttgtggagacgttgcttcagcttcacagagcatcctgccttgacaaattgggtgaccaaaccgccatgataacagctattttgcagtctcgtttagctagaacatcatttgacaaaaacaggttccaaaacatttctgaaaagctgcacatggaatgcaaagcagaaatggtgacgcctctggtgactaatcctggacacgtgtgcatcacggacacaaacctgtattttcagcccctcaacggctacccgaaacctgtggtccagataacactccaagatgtccgccgcatctacaaaaggaggcacggcctcatgcctctgggcttggaagtattttgcacagaagatgatctgtgttccgacatctacctaaagttctatgaacctcaagatagagatgatctctatttttacattgccacatacctagagcaccatgtggcggagcacactgctgagagctacatgctgcagtggcagcgtggacacctttccaactatcagtacctccttcacctcaacaacctggccgaccgcagctgcaacgacctctcccagtaccctgtgtttccatggataatacatgattattccagctcagaactagatttgtcaaatccaggaaccttccgggatctcagtaagccagtaggggccctaaataaggaacggctggagagactactgacacgctaccaggaaatgcctgaaccaaagttcatgtatgggagtcactactcttccccgggttatgtacttttttatcttgttaggattgcaccagagtatatgctgtgcctgcagaatggaagatttgataatgcagatagaatgttcaacagtattgcagaaacttggaaaaactgtctggatggtgcaacggattttaaagagttaattccagaattctatggtgatgatgtgagctttctagtcaatagcctgaagttggatttgggaaagagacaaggaggacagatggttgacgacgtggagcttcccccttgggcttccagtcccgaggactttctccagaagagcaaagatgcattggaaagcaattatgtgtctgaacaccttcacgagtggattgatctaatatttggctacaaacaaaaagggagtgatgcagttggggcccataatgtatttcatcccctgacctatgaaggaggtgtagacttgaacagcatccaggatcctgatgagaaggtagccatgcttacgcaaatcttggaatttgggcagacaccaaaacaactatttgtgacaccacatcctcgaaggatcaccccaaagtttaaaagtttgtcccagacctccagttataatgcttctatggcagattccccaggtgaagagtcttttgaagacctgaccgaagaaagcaaaacactggcctggaataacatcaccaaactgcagttacacgagcactataaaatccacaaagaagcagttactggaatcacggtctctcgcaatggatcttcagtattcacaacatcccaagattccaccttgaagatgttttctaaagaatcaaaaatgctacaaagaagtatatcattttcaaatatggctttatcgtcttgtttacttttaccaggagatgccactgtcataacttcttcatgggataataatgtctatttttattccatagcatttggaagacgccaggacacgttaatgggacatgatgatgctgttagtaagatctgttggcatgacaacaggctatattctgcatcgtgggactctacagtgaaggtgtggtctggtgttcctgcagagatgccaggcaccaaaagacaccactttgacttgctggccgagctggaacatgatgtcagtgtagatacaatcagtttaaatgctgcaagcacactgttagtttccggcaccaaagaaggcacagtgaatatttgggacctcacaacggccaccttaatgcaccagattccatgccattcagggattgtatgtgacactgcttttagcccagatagtcgccatgtcctcagcacaggaacagatggctgtcttaatgtcattgatgtgcagacaggaatgctcatctcctccatgacatcagatgagccccagaggtgctttgtctgggatggaaattccgttttatctggcagtcagtctggtgaactgctcgtttgggacctccttggagcaaaaatcagtgagagaatacagggccacacaggtgctgtgacatgtatatggatgaatgaacagtgtagcagtatcatcacaggaggggaagacagacaaattatattctggaaattgcagtattaagtgccttttcctctcctgaatattaaattgaactctatttaatgcatttttaaaccaaacttttaaacggactggtgaatgtgcaatgttagtaattagaagttttaccacatggaaaatttgtggttttaaactttctaaatcatggtgacttcattgaaagccattagttgctattctcttagggcagataaaatgcggctgtgttaggaaaaacatgttacactgtaaggcagatgatcgtccccgtatgatgattgtcagaagacaggactaagtagcagagaatagctaagagataaattgggctggggaaacttgtcagaaagcactgaa

SEQ ID NO: 159177 - DNA, 581 bp, Homo sapiens
  Payload ID: 11152
  Gene Symbol: NSMAF
  Gene Name: neutral sphingomyelinase (N-SMase) activation associated factor
  ENST ID: ENST00000518229
  CDS Start-End: 8-205
accctccatggcgtttatccggaagaagcagcaggagcagcagctgcagctctactccaaggagagattttccttgctgctgcttaacttggaggagtactactttgaacagcatagagccaatcacattttgcacaagggcagtcaccatgaaaggcctagaaataactcagttgcaatcagcaccaagaatctggtctcttaataccacttcccactgaaaggatgggggttctttggagaaattgctgattctaagtcagaggcaggaaatctgtgagatgaacctgggacatcctgtcatactggcaagaaaatcagaggctccttaaaaatatgttcaaaatcggtgatttttgaaccagattcaatatcccagcccatcatcaagattcctttgagagactgtataaaaataggaaagcatggagaaaatggagccaatagacacttcacaaaggcaaaatctgggggtatttcactcattttcagtcaggtatatttcattaaagaacataatgttgttgcaccatataaaatagaaaggggcaaaatggaatatgtttttgaattggatgttc

SEQ ID NO: 159178 - DNA, 582 bp, Homo sapiens
  Payload ID: 11152
  Gene Symbol: NSMAF
  Gene Name: neutral sphingomyelinase (N-SMase) activation associated factor
  ENST ID: ENST00000518159
  CDS Start-End: 34-198
tgtgcgctctgcgcccgcccgcgcctaccctccatggcgtttatccggaagaagcagcaggagcagcagctgcagctctactccaaggagagattttccttgctgctgcttaacttggaggagtactactttgaacagcatagagccaatcacattttgcacaagggcagtcaccatgaaagaacttatcctggataatggacaacttgtgcactttgcccagcatctccccatttcttccaccccctttaatttcgtgaagtttaacttactcttgcctgaacaaagctctgagctttcccacctaaaaaattttcgaaaatcagaggctccttaaaaatatgttcaaaatcggtgatttttgaaccagattcaatatcccagcccatcatcaagattcctttgagagactgtataaaaataggaaagcatggagaaaatggagccaatagacacttcacaaaggcaaaatctgggggtatttcactcattttcagtcaggtatatttcattaaagaacataatgttgttgcaccatataaaatagaaaggggcaaaatggaatatgtttttgaattggat

SEQ ID NO: 159179 - DNA, 1396 bp, Homo sapiens
  Payload ID: 11153
  Gene Symbol: NCF1
  Gene Name: neutrophil cytosolic factor 1
  Uniprot ID: P14598
  ENST ID: ENST00000289473
  CDS Start-End: 71-1243
cgacttcctctttccagtgcatttaaggcgcagcctggaagtgccagggagcactggaggccacccagtcatgggggacaccttcatccgtcacatcgccctgctgggctttgagaagcgcttcgtacccagccagcactatgtgtacatgttcctggtgaaatggcaggacctgtcggagaaggtggtctaccggcgcttcaccgagatctacgagttccataaaaccttaaaagaaatgttccctattgaggcaggggcgatcaatccagagaacaggatcatcccccacctcccagctcccaagtggtttgacgggcagcgggccgccgagaaccgccagggcacacttaccgagtactgcagcacgctcatgagcctgcccaccaagatctcccgctgtccccacctcctcgacttcttcaaggtgcgccctgatgacctcaagctccccacggacaaccagacaaaaaagccagagacatacttgatgcccaaagatggcaagagtaccgcgacagacatcaccggccccatcatcctgcagacgtaccgcgccattgccaactacgagaagacctcgggctccgagatggctctgtccacgggggacgtggtggaggtcgtagagaagagcgagagcggttggtggttctgtcagatgaaagcaaagcgaggctggatcccagcgtccttcctcgagcccctggacagtcctgacgagacggaagaccctgagcccaactatgcaggtgagccatacgtcgccatcaaggcctacactgctgtggagggggacgaggtgtccctgctcgagggtgaagctgttgaggtcattcacaagctcctggacggctggtgggtcatcaggaaagacgacgtcacaggctacttcccgtccatgtacctgcaaaagtcagggcaagacgtgtcccaggcccaacgccagatcaagcggggggcgccgccccgcaggtcgtccatccgcaacgcgcacagcatccaccagcggtcgcggaagcgcctcagccaggacgcctatcgccgcaacagcgtccgttttctgcagcagcgacgccgccaggcgcggccgggaccgcagagccccgggagcccgctcgaggaggagcggcagacgcagcgctctaaaccgcagccggcggtgcccccgcggccgagcgccgacctcatcctgaaccgctgcagcgagagcaccaagcggaagctggcgtctgccgtctgaggctggagcgcagtccccagctagcgtctcggcccttgccgccccgtgcctgtatatacgtgttctatagagcctggcgtctggacgccgagggcagccccgacccctgtccagcgcggctcccgccaccctcaataaatgttgcttggagtg

SEQ ID NO: 159180 - DNA, 489 bp, Homo sapiens
  Payload ID: 11153
  Gene Symbol: NCF1
  Gene Name: neutrophil cytosolic factor 1
  ENST ID: ENST00000433458
  CDS Start-End: 1-489
gtacatgttcctggtgaaatggcaggacctgtcggagaaggtggtctaccggcgcttcaccgagatctacgagttccataaaaccttaaaagaaatgttccctattgaggcaggggcgatcaatccagagaacaggatcatcccccacctcccagctcccaagtggtttgacgggcagcgggccgccgagaaccgccagggcacacttaccgagtactgcagcacgctcatgagcctgcccaccaagatctcccgctgtccccacctcctcgacttcttcaaggtgcgccctgatgacctcaagctccccacggacaaccaggctccagaaggaggaagaggccgggcacagtggctcacacgtataatcccagcactttggaaggtcgaggacaaaaaagccagagacatacttgatgcccaaagatggcaagagtaccgcgacagacatcaccggccccatcatcctgcagacgtaccgcgccattg

SEQ ID NO: 159181 - DNA, 437 bp, Homo sapiens
  Payload ID: 11153
  Gene Symbol: NCF1
  Gene Name: neutrophil cytosolic factor 1
  ENST ID: ENST00000442021
  CDS Start-End: 1-437
gtacatgttcctggtgaaatggcaggacctgtcggagaaggtggtctaccggcgcttcaccgagatctacgagttccatagatgggatttcgctatgttgcccaggctggtctctaactcctggactcaagtgatcctcccgcctcagcctcccaaattgctaggattacagaaaaccttaaaagaaatgttccctattgaggcaggggcgatcaatccagagaacaggatcatcccccacctcccagctcccaagtggtttgacgggcagcgggccgccgagaaccgccagggcacacttaccgagtactgcagcacgctcatgagcctgcccaccaagatctcccgctgtccccacctcctcgacttcttcaaggtgcgccctgatgacctcaagctccccacggacaaccagacaaaaaagccagagacatact

SEQ ID NO: 159182 - DNA, 946 bp, Homo sapiens
  Payload ID: 11153
  Gene Symbol: NCF1
  Gene Name: neutrophil cytosolic factor 1
  ENST ID: ENST00000464878
  CDS Start-End: 1-157
gtacatgttcctggtgaaatggcaggacctgtcggagaaggtggtctaccggcgcttcaccgagatctacgagttccatctcccaagtggtttgacgggcagcgggccgccgagaaccgccagggcacacttaccgagtactgcagcacgctcatgagcctgcccaccaagatctcccgctgtccccacctcctcgacttcttcaaggtgcgccctgatgacctcaagctccccacggacaaccagacaaaaaagccagagacatacttgatgcccaaagatggcaagagtaccgcgacagacatcaccggccccatcatcctgcagacgtaccgcgccattgccaactacgagaagacctcgggctccgagatggctctgtccacgggggacgtggtggaggtcgtagagaagagcgagagcggtcagacctcccaccttacggggctccttcccctggtgctcaggaacccacagccacaagccccctgccaaggctcaggcagccttgcccctgggaggactccggctctgttaggggccctaaatgtcctccccacactgtgggtcgccttctgtcttagtgtgcaccctgtggtggctgtgggcatctgtgcatggcaggccggggcggggcatgtctgcgtgttctgtctggatgggtatgggaccgtctgttcattatgaagtgggctcagagctgtgattctgtgagcatgtgtgcatgcatgcatgtgacctcattgtccagtgtggtgaaggtgacatttccaaatctgagcattggacatcagtgtgtctgtgtccctgtgtcctcaccatccctgatggctgcagggagccgctgggccctgcccctcagtcacattcccgcacctctggcacaggttggtggttctgtcagatgaaagcaaagcgaggctggatcccagcgtccttcctcgag

SEQ ID NO: 159183 - DNA, 2226 bp, Homo sapiens
  Payload ID: 11154
  Gene Symbol: NCF2
  Gene Name: neutrophil cytosolic factor 2
  Uniprot ID: P19878
  ENST ID: ENST00000367535
  CDS Start-End: 253-1833
tctctctctgcttctttccttttctctctcatggtagggttatgagtcagttgccaaaaggtggggacatttcctgatgcatttgcaacactgagaagttatcttaagggaggctgggccccattctactcatctggcccagaaagtgaacaccttgggggccactaaggcagccctgctaggggagacgctccaacctgtcttctctctgtctcctggcagctctcttggcctcctagtttctacctaatcatgtccctggtggaggccatcagcctctggaatgaaggggtgctggcagcggacaagaaggactggaagggagccctggatgccttcagtgccgtccaggacccccactcccggatttgcttcaacattggctgcatgtacactatcctgaagaacatgactgaagcagagaaggcctttaccagaagcattaaccgagacaagcacttggcagtggcttacttccaacgagggatgctctactaccagacagagaaatatgatttggctatcaaagaccttaaagaagccttgattcagcttcgagggaaccagctgatagactataagatcctggggctccagttcaagctgtttgcctgtgaggtgttatataacattgctttcatgtatgccaagaaggaggaatggaaaaaagctgaagaacagttagcattggccacgagcatgaagtctgagcccagacattccaaaatcgacaaggcgatggagtgtgtctggaagcagaagctatatgagccagtggtgatccctgtgggcaagctgtttcgaccaaatgagagacaagtggctcagctggccaagaaggattacctaggcaaggcgacggtcgtggcatctgtggtggatcaagacagtttctctgggtttgcccctctgcaaccacaggcagctgagcctccacccagaccgaaaaccccagagatcttcagggctctggaaggggaggctcaccgtgtgctatttgggtttgtgcctgagacaaaagaagagctccaggtcatgccagggaacattgtctttgtcttgaagaagggcaatgataactgggccacggtcatgttcaacgggcagaaggggcttgttccctgcaactaccttgaaccagttgagctgcggatccaccctcagcagcagccccaggaggaaagctctccgcagtccgacatcccagctcctcctagttccaaagcccctggaagaccccagctgtcaccaggccagaaacaaaaagaagagcctaaggaagtgaagctcagtgttcccatgccctacacactcaaggtgcactacaagtacacggtagtcatgaagactcagcccgggctcccctacagccaggtccgggacatggtgtctaagaaactggagctccggctggaacacactaagctgagctatcggcctcgggacagcaatgagctggtgcccctttcagaagacagcatgaaggatgcctggggccaggtgaaaaactactgcctgactctgtggtgtgagaacacagtgggtgaccaaggctttccagatgaacccaaggaaagtgaaaaagctgatgctaataaccagacaacagaacctcagcttaagaaaggcagccaagtggaggcactcttcagttatgaggctacccaaccagaggacctggagtttcaggaaggggatataatcctggtgttatcaaaggtgaatgaagaatggctggaaggggagtgcaaagggaaggtgggcattttccccaaagtttttgttgaagactgcgcaactacagatttggaaagcactcggagagaagtctaggatgtttcacaaactacaaagctgaagaaaatgaagccctattacttgtttgtaagatttagcacccttctgctgtatactgtactgagacattacagtttggaagtgttaactatttattccctgttaaaatttaacctactagacaatgatgtgagtacccaggatgatttcctggggcacagtgggtgaggagatggggacaggtgaatggaggagttaggggagaggaaaagtggatggaagtgtctggaaagggcacgagagagtcttccaggtactgatcctgtttcttgctctgagtgctagctagccagctgtgttcacactgtaaacattcatcaagctgtacatttggtgcacttttctgtgtcataccacaataaaaaaaaa

SEQ ID NO: 159184 - DNA, 2203 bp, Homo sapiens
  Payload ID: 11154
  Gene Symbol: NCF2
  Gene Name: neutrophil cytosolic factor 2
  Uniprot ID: P19878
  ENST ID: ENST00000367536
  CDS Start-End: 68-1648
ctagtctttcagccttcaggctgtttttggcttgaagctctcttggcctcctagtttctacctaatcatgtccctggtggaggccatcagcctctggaatgaaggggtgctggcagcggacaagaaggactggaagggagccctggatgccttcagtgccgtccaggacccccactcccggatttgcttcaacattggctgcatgtacactatcctgaagaacatgactgaagcagagaaggcctttaccagaagcattaaccgagacaagcacttggcagtggcttacttccaacgagggatgctctactaccagacagagaaatatgatttggctatcaaagaccttaaagaagccttgattcagcttcgagggaaccagctgatagactataagatcctggggctccagttcaagctgtttgcctgtgaggtgttatataacattgctttcatgtatgccaagaaggaggaatggaaaaaagctgaagaacagttagcattggccacgagcatgaagtctgagcccagacattccaaaatcgacaaggcgatggagtgtgtctggaagcagaagctatatgagccagtggtgatccctgtgggcaagctgtttcgaccaaatgagagacaagtggctcagctggccaagaaggattacctaggcaaggcgacggtcgtggcatctgtggtggatcaagacagtttctctgggtttgcccctctgcaaccacaggcagctgagcctccacccagaccgaaaaccccagagatcttcagggctctggaaggggaggctcaccgtgtgctatttgggtttgtgcctgagacaaaagaagagctccaggtcatgccagggaacattgtctttgtcttgaagaagggcaatgataactgggccacggtcatgttcaacgggcagaaggggcttgttccctgcaactaccttgaaccagttgagctgcggatccaccctcagcagcagccccaggaggaaagctctccgcagtccgacatcccagctcctcctagttccaaagcccctggaagaccccagctgtcaccaggccagaaacaaaaagaagagcctaaggaagtgaagctcagtgttcccatgccctacacactcaaggtgcactacaagtacacggtagtcatgaagactcagcccgggctcccctacagccaggtccgggacatggtgtctaagaaactggagctccggctggaacacactaagctgagctatcggcctcgggacagcaatgagctggtgcccctttcagaagacagcatgaaggatgcctggggccaggtgaaaaactactgcctgactctgtggtgtgagaacacagtgggtgaccaaggctttccagatgaacccaaggaaagtgaaaaagctgatgctaataaccagacaacagaacctcagcttaagaaaggcagccaagtggaggcactcttcagttatgaggctacccaaccagaggacctggagtttcaggaaggggatataatcctggtgttatcaaaggtgaatgaagaatggctggaaggggagtgcaaagggaaggtgggcattttccccaaagtttttgttgaagactgcgcaactacagatttggaaagcactcggagagaagtctaggatgtttcacaaactacaaagctgaagaaaatgaagccctattacttgtttgtaagatttagcacccttctgctgtatactgtactgagacattacagtttggaagtgttaactatttattccctgttaaaatttaacctactagacaatgatgtgagtacccaggatgatttcctggggcacagtgggtgaggagatggggacaggtgaatggaggagttaggggagaggaaaagtggatggaagtgtctggaaagggcacgagagagtcttccaggtactgatcctgtttcttgctctgagtgctagctagccagctgtgttcacactgtaaacattcatcaagctgtacatttggtgcacttttctgtgtcataccacaataaaaaaaaacctagcatcttacaaaaacaagacacccaagtccaggcccaaggagtaagtacaaatattcctgtttctgaaccattactgtaattggctcttaaggcttgaagtaaccttataggttactcataaggcatatacaaataaacttgtttgttttcttttttc

SEQ ID NO: 159185 - DNA, 376 bp, Homo sapiens
  Payload ID: 11154
  Gene Symbol: NCF2
  Gene Name: neutrophil cytosolic factor 2
  ENST ID: ENST00000420553
  CDS Start-End: 208-376
attgccttttccgttttcacttctcctgaatgttcaataggcagctgagcctccacccagaccgaaaaccccagagatcttcaggaggaaagctctccgcagtccgacatcccagctcctcctagttccaaagcccctggaagaccccagctgtcaccaggccagaaacaaaaagaagagcctaaggaagtgaagctcagtgttcccatgccctacacactcaaggtgcactacaagtacacggtagtcatgaagactcagcccgggctcccctacagccaggtccgggacatggtgtctaagaaactggagctccggctggaacacactaagctgagctatcggcctcgggacagcaatgagctggtgccccttt

SEQ ID NO: 159186 - DNA, 2276 bp, Homo sapiens
  Payload ID: 11154
  Gene Symbol: NCF2
  Gene Name: neutrophil cytosolic factor 2
  Uniprot ID: P19878
  ENST ID: ENST00000413720
  CDS Start-End: 276-1721
acactccacccctactcgccctctctctctctgcttctttccttttctctctcatggtagggttatgagtcagttgccaaaaggtggggacatttcctgatgcatttgcaacactgagaagttatcttaagggaggctgggccccattctactcatctggcccagaaagtgaacaccttgggggccactaaggcagccctgctaggggagacgctccaacctgtcttctctctgtctcctggcagctctcttggcctcctagtttctacctaatcatgtccctggtggaggccatcagcctctggaatgaaggggtgctggcagcggacaagaaggactggaagggagccctggatgccttcagtgccgtccaggacccccactcccggatttgcttcaacattggctgcatgtacactatcctgaagaacatgactgaagcagagaaggcctttaccagaagcattaaccgagacaagcacttggcagtggcttacttccaacgagggatgctctactaccagacagagaaatatgatttggctatcaaagaccttaaagaagccttgattcagcttcgagggaaccagctgatagactataagatcctggggctccagttcaagctgtttgcctgtgagaagcagaagctatatgagccagtggtgatccctgtgggcaagctgtttcgaccaaatgagagacaagtggctcagctggccaagaaggattacctaggcaaggcgacggtcgtggcatctgtggtggatcaagacagtttctctgggtttgcccctctgcaaccacaggcagctgagcctccacccagaccgaaaaccccagagatcttcagggctctggaaggggaggctcaccgtgtgctatttgggtttgtgcctgagacaaaagaagagctccaggtcatgccagggaacattgtctttgtcttgaagaagggcaatgataactgggccacggtcatgttcaacgggcagaaggggcttgttccctgcaactaccttgaaccagttgagctgcggatccaccctcagcagcagccccaggaggaaagctctccgcagtccgacatcccagctcctcctagttccaaagcccctggaagaccccagctgtcaccaggccagaaacaaaaagaagagcctaaggaagtgaagctcagtgttcccatgccctacacactcaaggtgcactacaagtacacggtagtcatgaagactcagcccgggctcccctacagccaggtccgggacatggtgtctaagaaactggagctccggctggaacacactaagctgagctatcggcctcgggacagcaatgagctggtgcccctttcagaagacagcatgaaggatgcctggggccaggtgaaaaactactgcctgactctgtggtgtgagaacacagtgggtgaccaaggctttccagatgaacccaaggaaagtgaaaaagctgatgctaataaccagacaacagaacctcagcttaagaaaggcagccaagtggaggcactcttcagttatgaggctacccaaccagaggacctggagtttcaggaaggggatataatcctggtgttatcaaaggtgaatgaagaatggctggaaggggagtgcaaagggaaggtgggcattttccccaaagtttttgttgaagactgcgcaactacagatttggaaagcactcggagagaagtctaggatgtttcacaaactacaaagctgaagaaaatgaagccctattacttgtttgtaagatttagcacccttctgctgtatactgtactgagacattacagtttggaagtgttaactatttattccctgttaaaatttaacctactagacaatgatgtgagtacccaggatgatttcctggggcacagtgggtgaggagatggggacaggtgaatggaggagttaggggagaggaaaagtggatggaagtgtctggaaagggcacgagagagtcttccaggtactgatcctgtttcttgctctgagtgctagctagccagctgtgttcacactgtaaacattcatcaagctgtacatttggtgcacttttctgtgtcataccacaataaaaaaaaacctagcatcttacaaaaacaagacacccaagtccaggcccaaggagtaagtacaaatattcctgtttctgaaccattactgtaattggctcttaaggcttgaagtaaccttataggttactcataaggcatatacaaataaacttgtttgttttcttttttc

SEQ ID NO: 159187 - DNA, 584 bp, Homo sapiens
  Payload ID: 11154
  Gene Symbol: NCF2
  Gene Name: neutrophil cytosolic factor 2
  ENST ID: ENST00000419402
  CDS Start-End: 155-584
attgccttttccgttttcacttctcctgaatgttcaataggcagctgagcctccacccagaccgaaaaccccagagatcttcagggctctggaaggggaggctcaccgtgtgctatttgggtttgtgcctgagacaaaagaagagctccaggtcatgccagggaacattgtctttgtcttgaagaagggcaatgataactgggccacggtcatgttcaacgggcagaaggggcttgttccctgcaactaccttgaaccagttgagctgcggatccaccctcagcagcagccccaggaggaaagctctccgcagtccgacatcccagctcctcctagttccaaagcccctggaagaccccagctgtcaccaggccagaaacaaaaagaagagcctaaggaagtgaagctcagtgttcccatgccctacacactcaaggtgcactacaagtacacggtagtcatgaagactcagcccgggctcccctacagccaggtccgggacatggtgtctaagaaactggagctccggctggaacacactaagctgagctatcggcctcgggacagcaatgagctggtgcccc

SEQ ID NO: 159188 - DNA, 2168 bp, Homo sapiens
  Payload ID: 11154
  Gene Symbol: NCF2
  Gene Name: neutrophil cytosolic factor 2
  Uniprot ID: P19878
  ENST ID: ENST00000418089
  CDS Start-End: 276-1613
acactccacccctactcgccctctctctctctgcttctttccttttctctctcatggtagggttatgagtcagttgccaaaaggtggggacatttcctgatgcatttgcaacactgagaagttatcttaagggaggctgggccccattctactcatctggcccagaaagtgaacaccttgggggccactaaggcagccctgctaggggagacgctccaacctgtcttctctctgtctcctggcagctctcttggcctcctagtttctacctaatcatgtccctggtggaggccatcagcctctggaatgaaggggtgctggcagcggacaagaaggactggaagggagccctggatgccttcagtgccgtccaggacccccactcccggatttgcttcaacattggctgcatgtacactatcctgaagaacatgactgaagcagagaaggcctttaccagaagcattaaccgagacaagcacttggcagtggcttacttccaacgagggatgctctactaccagacagagaaatatgatttggctatcaaagaccttaaagaagccttgattcagcttcgagggaaccagctgatagactataagatcctggggctccagttcaagctgtttgcctgtgaggtcgtggcatctgtggtggatcaagacagtttctctgggtttgcccctctgcaaccacaggcagctgagcctccacccagaccgaaaaccccagagatcttcagggctctggaaggggaggctcaccgtgtgctatttgggtttgtgcctgagacaaaagaagagctccaggtcatgccagggaacattgtctttgtcttgaagaagggcaatgataactgggccacggtcatgttcaacgggcagaaggggcttgttccctgcaactaccttgaaccagttgagctgcggatccaccctcagcagcagccccaggaggaaagctctccgcagtccgacatcccagctcctcctagttccaaagcccctggaagaccccagctgtcaccaggccagaaacaaaaagaagagcctaaggaagtgaagctcagtgttcccatgccctacacactcaaggtgcactacaagtacacggtagtcatgaagactcagcccgggctcccctacagccaggtccgggacatggtgtctaagaaactggagctccggctggaacacactaagctgagctatcggcctcgggacagcaatgagctggtgcccctttcagaagacagcatgaaggatgcctggggccaggtgaaaaactactgcctgactctgtggtgtgagaacacagtgggtgaccaaggctttccagatgaacccaaggaaagtgaaaaagctgatgctaataaccagacaacagaacctcagcttaagaaaggcagccaagtggaggcactcttcagttatgaggctacccaaccagaggacctggagtttcaggaaggggatataatcctggtgttatcaaaggtgaatgaagaatggctggaaggggagtgcaaagggaaggtgggcattttccccaaagtttttgttgaagactgcgcaactacagatttggaaagcactcggagagaagtctaggatgtttcacaaactacaaagctgaagaaaatgaagccctattacttgtttgtaagatttagcacccttctgctgtatactgtactgagacattacagtttggaagtgttaactatttattccctgttaaaatttaacctactagacaatgatgtgagtacccaggatgatttcctggggcacagtgggtgaggagatggggacaggtgaatggaggagttaggggagaggaaaagtggatggaagtgtctggaaagggcacgagagagtcttccaggtactgatcctgtttcttgctctgagtgctagctagccagctgtgttcacactgtaaacattcatcaagctgtacatttggtgcacttttctgtgtcataccacaataaaaaaaaacctagcatcttacaaaaacaagacacccaagtccaggcccaaggagtaagtacaaatattcctgtttctgaaccattactgtaattggctcttaaggcttgaagtaaccttataggttactcataaggcatatacaaataaacttgtttgttttcttttttc

SEQ ID NO: 159189 - DNA, 1396 bp, Homo sapiens
  Payload ID: 11155
  Gene Symbol: NCF4
  Gene Name: neutrophil cytosolic factor 4, 40kDa
  Uniprot ID: Q15080
  ENST ID: ENST00000248899
  CDS Start-End: 185-1204
ggaggaggagcctctgccagactggagagaagcaggcctgagcctccccaaaggcagctcctggggactcccaggaccacaggctgagacgagacgcagggtggctggaggaagtgagaggtgaactcagcctgggactggctgggcgagactctccacctgctccctgggaccatcgcccaccatggctgtggcccagcagctgcgggccgagagtgactttgaacagcttccggatgatgttgccatctcggccaacattgctgacatcgaggagaagagaggcttcaccagccactttgttttcgtcatcgaggtgaagacaaaaggaggatccaagtacctcatctaccgccgctaccgccagttccatgctttgcagagcaagctggaggagcgcttcgggccagacagcaagagcagtgccctggcctgtaccctgcccacactcccagccaaagtctacgtgggtgtgaaacaggagatcgccgagatgcggatacctgccctcaacgcctacatgaagagcctgctcagcctgccggtctgggtgctgatggatgaggacgtccggatcttcttttaccagtcgccctatgactcagagcaggtgccccaggcactccgccggctccgcccgcgcacccggaaagtcaagagcgtgtccccacagggcaacagcgttgaccgcatggcagctccgagagcagaggctctatttgacttcactggaaacagcaaactggagctgaatttcaaagctggagatgtgatcttcctcctcagtcggatcaacaaagactggctggagggcactgtccggggagccacgggcatcttccctctctccttcgtgaagatcctcaaagacttccctgaggaggacgaccccaccaactggctgcgttgctactactacgaagacaccatcagcaccatcaaggacatcgcggtggaggaagatctcagcagcactcccctattgaaagacctgctggagctcacaaggcgggagttccagagagaggacatagctctgaattaccgggacgctgagggggatctggttcggctgctgtcggatgaggacgtagcgctcatggtgcggcaggctcgtggcctcccctcccagaagcgcctcttcccctggaagctgcacatcacgcagaaggacaactacagggtctacaacacgatgccatgagctgacggtgtccctggagcagtgaggggacaccagcaaaaaccttcagctctcagaggagattgggaccaggaaaacctgggaggatgggcagacttcctgtctttgaggctaatggacccgtggggcttgtaatctgtctctttctactatttacatctgatttaaataaaccattccatctgaaagggg

SEQ ID NO: 159190 - DNA, 1641 bp, Homo sapiens
  Payload ID: 11155
  Gene Symbol: NCF4
  Gene Name: neutrophil cytosolic factor 4, 40kDa
  Uniprot ID: Q15080
  ENST ID: ENST00000397147
  CDS Start-End: 185-1231
ggaggaggagcctctgccagactggagagaagcaggcctgagcctccccaaaggcagctcctggggactcccaggaccacaggctgagacgagacgcagggtggctggaggaagtgagaggtgaactcagcctgggactggctgggcgagactctccacctgctccctgggaccatcgcccaccatggctgtggcccagcagctgcgggccgagagtgactttgaacagcttccggatgatgttgccatctcggccaacattgctgacatcgaggagaagagaggcttcaccagccactttgttttcgtcatcgaggtgaagacaaaaggaggatccaagtacctcatctaccgccgctaccgccagttccatgctttgcagagcaagctggaggagcgcttcgggccagacagcaagagcagtgccctggcctgtaccctgcccacactcccagccaaagtctacgtgggtgtgaaacaggagatcgccgagatgcggatacctgccctcaacgcctacatgaagagcctgctcagcctgccggtctgggtgctgatggatgaggacgtccggatcttcttttaccagtcgccctatgactcagagcaggtgccccaggcactccgccggctccgcccgcgcacccggaaagtcaagagcgtgtccccacagggcaacagcgttgaccgcatggcagctccgagagcagaggctctatttgacttcactggaaacagcaaactggagctgaatttcaaagctggagatgtgatcttcctcctcagtcggatcaacaaagactggctggagggcactgtccggggagccacgggcatcttccctctctccttcgtgaagatcctcaaagacttccctgaggaggacgaccccaccaactggctgcgttgctactactacgaagacaccatcagcaccatcaagtctgtggcctgggagggaggggcctgtccagccttcctgccatccctacgaccactgcccctcacatcaccttctcatgggtccctctcccactccaaagcccccagtggctcccagatgagccacaatgctgtaacaagccatcaacgtccagggtggcctggccagcctcattcccctttcccccaccccacaccccacttccagcctgatgcctccttactccagcctgtcacccccttagggacatcgcggtggaggaagatctcagcagcactcccctattgaaagacctgctggagctcacaaggcgggagttccagagagaggacatagctctgaattaccgggacgctgagggggatctggttcggctgctgtcggatgaggacgtagcgctcatggtgcggcaggctcgtggcctcccctcccagaagcgcctcttcccctggaagctgcacatcacgcagaaggacaactacagggtctacaacacgatgccatgagctgacggtgtccctggagcagtgaggggacaccagcaaaaaccttcagctctcagaggagattgggaccaggaaaacctgggaggatgggcagacttcctgtctttgaggctaatggacccgtggggcttgtaatctgtctctttctactatttacatctgatttaaataaaccattccatctgaaagggg

SEQ ID NO: 159191 - DNA, 906 bp, Homo sapiens
  Payload ID: 11155
  Gene Symbol: NCF4
  Gene Name: neutrophil cytosolic factor 4, 40kDa
  ENST ID: ENST00000447071
  CDS Start-End: 409-906
ggaggaggagcctctgccagactggagagaagcaggcctgagcctccccaaaggcagctcctggggactcccaggaccacaggctgagacgagacgcagggtggctggaggaagtgagaggtgaactcagcctgggactggctgggcgagactctccacctgctccctgggaccatcgcccaccatggctgtggcccagcagctgcgggccgagaggttttcgtcatcgaggtgaagacaaaaggaggatccaagtacctcatctaccgccgctaccgccagttccatgctttgcagagcaagctggaggagcgcttcgggccagacagcaagagcagtgccctggcctgtaccctgcccacactcccagccaaagtctacgtgggtgtgaaacaggagatcgccgagatgcggatacctgccctcaacgcctacatgaagagcctgctcagcctgccggtctgggtgctgatggatgaggacgtccggatcttcttttaccagtcgccctatgactcagagcaggtgccccaggcactccgccggctccgcccgcgcacccggaaagtcaagagcgtgtccccacagggcaacagcgttgaccgcatggcagctccgagagcagaggctctatttgacttcactggaaacagcaaactggagctgaatttcaaagctggagatgtgatcttcctcctcagtcggatcaacaaagactggctggagggcactgtccggggagccacgggcatcttccctctctccttcgtgaagatcctcaaagacttccctgaggaggacgaccccaccaactggctgcgttgctactactacgaagacaccatcagcaccatcaagtctgtggcctgggagggaggggcctgtccagccttcctgccatcccta

SEQ ID NO: 159192 - DNA, 1047 bp, Homo sapiens
  Payload ID: 11155
  Gene Symbol: NCF4
  Gene Name: neutrophil cytosolic factor 4, 40kDa
  Uniprot ID: Q15080
  ENST ID: ENST00000614157
  CDS Start-End: 1-1047
atggctgtggcccagcagctgcgggccgagagtgactttgaacagcttccggatgatgttgccatctcggccaacattgctgacatcgaggagaagagaggcttcaccagccactttgttttcgtcatcgaggtgaagacaaaaggaggatccaagtacctcatctaccgccgctaccgccagttccatgctttgcagagcaagctggaggagcgcttcgggccagacagcaagagcagtgccctggcctgtaccctgcccacactcccagccaaagtctacgtgggtgtgaaacaggagatcgccgagatgcggatacctgccctcaacgcctacatgaagagcctgctcagcctgccggtctgggtgctgatggatgaggacgtccggatcttcttttaccagtcgccctatgactcagagcaggtgccccaggcactccgccggctccgcccgcgcacccggaaagtcaagagcgtgtccccacagggcaacagcgttgaccgcatggcagctccgagagcagaggctctatttgacttcactggaaacagcaaactggagctgaatttcaaagctggagatgtgatcttcctcctcagtcggatcaacaaagactggctggagggcactgtccggggagccacgggcatcttccctctctccttcgtgaagatcctcaaagacttccctgaggaggacgaccccaccaactggctgcgttgctactactacgaagacaccatcagcaccatcaagtctgtggcctgggagggaggggcctgtccagccttcctgccatccctacgaccaccgcccctcacatcaccttctcatgggtccctctcccactccaaagcccccagtggctcccagatgagccacaatgctgtaacaagccatcaacgtccagggtggcctggccagcctcattcccctttcccccaccccacaccccacttccagcctgatgcctccttactccagcctgtcacccccttagggacatcgcggtggaggaagatctcagcagcactcccctattga

SEQ ID NO: 159193 - DNA, 1085 bp, Homo sapiens
  Payload ID: 11155
  Gene Symbol: NCF4
  Gene Name: neutrophil cytosolic factor 4, 40kDa
  ENST ID: ENST00000628938
  CDS Start-End: 185-1085
ggaggaggagcctctgccagactggagagaagcaggcctgagcctccccaaaggcagctcctggggactcccaggaccacaggctgagacgagacgcagggtggctggaggaagtgagaggtgaactcagcctgggactggctgggcgagactctccacctgctccctgggaccatcgcccaccatggctgtggcccagcagctgcgggccgagagtgactttgaacagcttccggatgatgttgccatctcggccaacattgctgacatcgaggagaagagaggcttcaccagccactttgttttcgtcatcgaggtgaagacaaaaggaggatccaagtacctcatctaccgccgctaccgccagttccatgctttgcagagcaagctggaggagcgcttcgggccagacagcaagagcagtgccctggcctgtaccctgcccacactcccagccaaagtctacgtgggtgtgaaacaggagatcgccgagatgcggatacctgccctcaacgcctacatgaagagcctgctcagcctgccggtctgggtgctgatggatgaggacgtccggatcttcttttaccagtcgccctatgactcagagcaggtgccccaggcactccgccggctccgcccgcgcacccggaaagtcaagagcgtgtccccacagggcaacagcgttgaccgcatggcagctccgagagcagaggctctatttgacttcactggaaacagcaaactggagctgaatttcaaagctggagatgtgatcttcctcctcagtcggatcaacaaagactggctggagggcactgtccggggagccacgggcatcttccctctctccttcgtgaagatcctcaaagacttccctgaggaggacgaccccaccaactggctgcgttgctactactacgaagacaccatcagcaccatcaaggacatcgcggtggaggaagatctcagcagcactcccctattgaaagacctgctggagctcacaaggcgggagttccagagagaggacatagctctgaattaccgggacgctgagggggatctggttcggctgctgtcggatg

SEQ ID NO: 159194 - DNA, 1330 bp, Homo sapiens
  Payload ID: 11155
  Gene Symbol: NCF4
  Gene Name: neutrophil cytosolic factor 4, 40kDa
  Uniprot ID: Q15080
  ENST ID: ENST00000625504
  CDS Start-End: 185-1231
ggaggaggagcctctgccagactggagagaagcaggcctgagcctccccaaaggcagctcctggggactcccaggaccacaggctgagacgagacgcagggtggctggaggaagtgagaggtgaactcagcctgggactggctgggcgagactctccacctgctccctgggaccatcgcccaccatggctgtggcccagcagctgcgggccgagagtgactttgaacagcttccggatgatgttgccatctcggccaacattgctgacatcgaggagaagagaggcttcaccagccactttgttttcgtcatcgaggtgaagacaaaaggaggatccaagtacctcatctaccgccgctaccgccagttccatgctttgcagagcaagctggaggagcgcttcgggccagacagcaagagcagtgccctggcctgtaccctgcccacactcccagccaaagtctacgtgggtgtgaaacaggagatcgccgagatgcggatacctgccctcaacgcctacatgaagagcctgctcagcctgccggtctgggtgctgatggatgaggacgtccggatcttcttttaccagtcgccctatgactcagagcaggtgccccaggcactccgccggctccgcccgcgcacccggaaagtcaagagcgtgtccccacagggcaacagcgttgaccgcatggcagctccgagagcagaggctctatttgacttcactggaaacagcaaactggagctgaatttcaaagctggagatgtgatcttcctcctcagtcggatcaacaaagactggctggagggcactgtccggggagccacgggcatcttccctctctccttcgtgaagatcctcaaagacttccctgaggaggacgaccccaccaactggctgcgttgctactactacgaagacaccatcagcaccatcaagtctgtggcctgggagggaggggcctgtccagccttcctgccatccctacgaccaccgcccctcacatcaccttctcatgggtccctctcccactccaaagcccccagtggctcccagatgagccacaatgctgtaacaagccatcaacgtccagggtggcctggccagcctcattcccctttcccccaccccacaccccacttccagcctgatgcctccttactccagcctgtcacccccttagggacatcgcggtggaggaagatctcagcagcactcccctattgaaagacctgctggagctcacaaggcgggagttccagagagaggacatagctctgaattaccgggacgctgagggggatctggttcggctgctgtcggatg

SEQ ID NO: 159195 - DNA, 906 bp, Homo sapiens; identical to SEQ ID NO: 159191
  Payload ID: 11155
  Gene Symbol: NCF4
  Gene Name: neutrophil cytosolic factor 4, 40kDa
  ENST ID: ENST00000626011
  CDS Start-End: 409-906

SEQ ID NO: 159196 - DNA, 3195 bp, Homo sapiens
  Payload ID: 11156
  Gene Symbol: NEXN
  Gene Name: nexilin (F actin binding protein)
  Uniprot ID: Q0ZGT2
  ENST ID: ENST00000330010
  CDS Start-End: 298-2133
aacagctgcagccggcgctgggcccgcctggaatgcgggaacaggctgcacaccaggacttttatggaaacttgctgctggagacggcggcggcggcggcggcagcggcagccagaggactcccagcggctggagcagaagtgttagcggccagagctcccagacccctacccacagccaggcgggacgcgcacagtccctccacgcggaaagaagtaccttcgccggtcaccggctcctgcagggtgcaaatatatacagagcttcataatcagcccaagaccacatagagcaaacatgaatgatatttcccaaaaggctgagattaaagaaatgcttgcttctgatgatgaggaagatgtatcttctaaagtagaaaaggcttatgttccaaaattaacaggaactgtgaagggtagatttgctgaaatggagaaacaaagacaagaggaacaaaggaagagaacggaggaggaacgaaaacgcagaattgagcaggatatgttagaaaagaggaaaatacagcgtgaattagcaaaaagggctgaacagattgaggacataaacaatacgggaactgaatcagcatcagaggaaggagatgattcactacttataactgtggtacctgtcaaatcatataaaacatctggaaaaatgaaaaagaattttgaggatctagaaaaagaacgtgaagagaaagaaaggatcaagtacgaggaagataaaagaataagatatgaagaacaacgaccatctctcaaggaagcaaagtgtctttcattagttatggatgatgaaatagaaagtgaagcaaaaaaagaatcactttctcccggaaaattgaaactaacttttgaagaactggagcgacaaagacaagaaaaccgaaagaagcaagctgaagaggaagcaagaaaacgtttagaagaagagaagcgtgcttttgaagaagcaaggcggcaaatggtaaatgaagatgaggaaaaccaagacacagcaaaaatttttaaagggtaccgccctggtaaactcaaactcagttttgaagaaatggaaaggcaaagaagagaagatgaaaaaaggaaagcagaagaagaagccagaaggagaatagaggaagaaaagaaggcgtttgctgaagcaaggagaaatatggtagtagatgatgactccccagagatgtataagacaatctctcaagaatttcttacaccgggaaaactggaaattaattttgaagaattattaaaacaaaaaatggaagaagaaaaacgacgaacagaggaggaacggaagcataagctagaaatggagaaacaagaatttgaacaactgagacaggaaatgggagaggaagaggaagaaaatgaaacctttggattgagcagagaatatgaagaactgatcaaattaaaaaggagtggctctattcaagctaaaaacctaaaaagcaagtttgaaaaaattggacagttgtctgaaaaagaaatacagaaaaaaatagaagaagagcgagcaagaaggagagcaattgaccttgaaattaaagagcgagaagctgaaaattttcatgaggaagatgatgttgatgttaggcctgcaagaaaaagcgaggctccatttactcacaaagtgaatatgaaagctagatttgaacaaatggctaaggcaagagaagaagaagaacaaagaagaattgaagaacaaaagttactacgcatgcagtttgaacaaagggaaattgatgcagcactacaaaagaaaagagaagaggaggaggaggaagaaggtagcatcatgaatggctccactgctgaagatgaagagcaaaccagatcaggagctccatggttcaagaagcctcttaaaaacacatcagttgtagacagtgagccagtcagatttacggttaaagtaacaggagaacccaaaccagaaattacatggtggtttgaaggagaaatactgcaggatggagaagactatcaatatattgaaaggggagaaacttactgcctttacttaccagaaactttcccagaagatggaggagagtatatgtgtaaagcagtcaacaataaaggatctgcagctagtacctgtattcttaccattgaaagtaagaattaatcactctttttatcttttattctattaatttttttttccttaaaatcacttttcttcttctcttttttagctgatgactactagctcccctcccctctccctggaactttctctttcactccaactttcttactacatccatcttttctgtggcggggccaaaaaaggaaaccaggagtgccactatgctgacttcttattccttttcataacagtcttcaaagcacagctcatctaaagaatgcctacttcttttccaaataagcatcagatttatcgcctattatgcagtaacagtcaataaaatgtacttatgggggggaattactcaattattctatcagaacctattataaagactgtatttcccatagacgtttacagcaactatgtttaaaaaacaaaaacaaaaaaaaaacacacaaacctaagtagaatacattattttgcatgaaggaatgtcatttctgagctttttacacctaaaattaggctgaaatagctgagataattaatttggaacctatcaatttgagtggactttttctttagtagtacaccattttggttgttgtagtttcaaagtctttctgaagcagatatattgggattggagcggggtggggaaaactgtcactcctttcagaggaaaaggggaggagcatggagaaaaacaaaaattaaaggacttaaagaatggctatacagtgttgagtgttgaggatattaaacatgttatttttcaaacgtatgtaatatatattaaatttataaagcaaatttatgttgtgatcttgcctgaacaaattatattttaatgaaaaaactttctattaatagttcacgcaagagaaaacactttcaacatagtcgaaggcttcaagatctaagtgtatcagacttagggaaaaagtggcacaaccttcgatttaaaattctagtctttaaaatgagtttgtaaataattagctattacgttctattaagttgttttatattttaattttctggaagacaattttattttacaacgtgaacccaaataaagtaacttctgtattt

SEQ ID NO: 159197 - DNA, 2607 bp, Homo sapiens
  Payload ID: 11156
  Gene Symbol: NEXN
  Gene Name: nexilin (F actin binding protein)
  Uniprot ID: Q0ZGT2
  ENST ID: ENST00000334785
  CDS Start-End: 185-2212
agaggactcccagcggctggagcagaagtgttagcggccagagctcccagacccctacccacagccaggcgggacgcgcacagtccctccacgcggaaagaagtaccttcgccggtcaccggctcctgcagggtgcaaatatatacagagcttcataatcagcccaagaccacatagagcaaacatgaatgatatttcccaaaaggctgagattctgctttcttcatctaaacctgtcccaaaaacctatgtaccaaaacttggcaagggtgatgtaaaggataagtttgaagccatgcagagagccagggaagaaagaaatcaaaggagatctagagacgaaaaacaaagaagaaaagaacaatatattagagagagagaatggaacaggagaaagcaggagattaaagaaatgcttgcttctgatgatgaggaagatgtatcttctaaagtagaaaaggcttatgttccaaaattaacaggaactgtgaagggtagatttgctgaaatggagaaacaaagacaagaggaacaaaggaagagaacggaggaggaacgaaaacgcagaattgagcaggatatgttagaaaagaggaaaatacagcgtgaattagcaaaaagggctgaacagattgaggacataaacaatacgggaactgaatcagcatcagaggaaggagatgattcactacttataactgtggtacctgtcaaatcatataaaacatctggaaaaatgaaaaagaattttgaggatctagaaaaagaacgtgaagagaaagaaaggatcaagtacgaggaagataaaagaataagatatgaagaacaacgaccatctctcaaggaagcaaagtgtctttcattagttatggatgatgaaatagaaagtgaagcaaaaaaagaatcactttctcccggaaaattgaaactaacttttgaagaactggagcgacaaagacaagaaaaccgaaagaagcaagctgaagaggaagcaagaaaacgtttagaagaagagaagcgtgcttttgaagaagcaaggcggcaaatggtaaatgaagatgaggaaaaccaagacacagcaaaaatttttaaagggtaccgccctggtaaactcaaactcagttttgaagaaatggaaaggcaaagaagagaagatgaaaaaaggaaagcagaagaagaagccagaaggagaatagaggaagaaaagaaggcgtttgctgaagcaaggagaaatatggtagtagatgatgactccccagagatgtataagacaatctctcaagaatttcttacaccgggaaaactggaaattaattttgaagaattattaaaacaaaaaatggaagaagaaaaacgacgaacagaggaggaacggaagcataagctagaaatggagaaacaagaatttgaacaactgagacaggaaatgggagaggaagaggaagaaaatgaaacctttggattgagcagagaatatgaagaactgatcaaattaaaaaggagtggctctattcaagctaaaaacctaaaaagcaagtttgaaaaaattggacagttgtctgaaaaagaaatacagaaaaaaatagaagaagagcgagcaagaaggagagcaattgaccttgaaattaaagagcgagaagctgaaaattttcatgaggaagatgatgttgatgttaggcctgcaagaaaaagcgaggctccatttactcacaaagtgaatatgaaagctagatttgaacaaatggctaaggcaagagaagaagaagaacaaagaagaattgaagaacaaaagttactacgcatgcagtttgaacaaagggaaattgatgcagcactacaaaagaaaagagaagaggaggaggaggaagaaggtagcatcatgaatggctccactgctgaagatgaagagcaaaccagatcaggagctccatggttcaagaagcctcttaaaaacacatcagttgtagacagtgagccagtcagatttacggttaaagtaacaggagaacccaaaccagaaattacatggtggtttgaaggagaaatactgcaggatggagaagactatcaatatattgaaaggggagaaacttactgcctttacttaccagaaactttcccagaagatggaggagagtatatgtgtaaagcagtcaacaataaaggatctgcagctagtacctgtattcttaccattgaaagtaagaattaatcactctttttatcttttattctattaatttttttttccttaaaatcacttttcttcttctcttttttagctgatgactactagctcccctcccctctccctggaactttctctttcactccaactttcttactacatccatcttttctgtggcggggccaaaaaaggaaaccaggagtgccactatgctgacttcttattccttttcataacagtcttcaaagcacagctcatctaaagaatgcctacttcttttccaaataagcatcagatttatcgcctattatgcagtaacagtcaataaaatgtacttatgggggggaattactcaattattctatcagaacctattataaagactgtatttcccatagacgtttacagcaactatgttt

SEQ ID NO: 159198 - DNA, 2712 bp, Homo sapiens
  Payload ID: 11156
  Gene Symbol: NEXN
  Gene Name: nexilin (F actin binding protein)
  ENST ID: ENST00000342754
  CDS Start-End: 1-1730
ctgtgaagggtagatttgctgaaatggagaaacaaagacaagaggaacaaaggaagagaacggaggaggaacgaaaacgcagaattgagcaggatatgttagaaaagaggaaaatacagcgtgaattagcaaaaagggctgaacagattgaggacataaacaatacgggaactgaatcagcatcagaggaaggagatgattcactacttataactgtggtacctgtcaaatcatataaaacatctggaaaaatgaaaaagaattttgaggatctagaaaaagaacgtgaagagaaagaaaggatcaagtacgaggaagataaaagaataagatatgaagaacaacgaccatctctcaaggaagcaaagtgtctttcattagttatggatgatgaaatagaaagtgaagcaaaaaaagaatcactttctcccggaaaattgaaactaacttttgaagaactggagcgacaaagacaagaaaaccgaaagaagcaagctgaagaggaagcaagaaaacgtttagaagaagagaagcgtgcttttgaagaagcaaggcggcaaatggtaaatgaagatgaggaaaaccaagacacagcaaaaatttttaaagggtaccgccctggtaaactcaaactcagttttgaagaaatggaaaggcaaagaagagaagatgaaaaaaggaaagcagaagaagaagccagaaggagaatagaggaagaaaagaaggcgtttgctgaagcaaggagaaatatggtagtagatgatgactccccagagatgtataagacaatctctcaagaatttcttacaccgggaaaactggaaattaattttgaagaattattaaaacaaaaaatggaagaagaaaaacgacgaacagaggaggaacggaagcataagctagaaatggagaaacaagaatttgaacaactgagacaggaaatgggagaggaagaggaagaaaatgaaacctttggattgagcagagaatatgaagaactgatcaaattaaaaaggagtggctctattcaagctaaaaacctaaaaagcaagtttgaaaaaattggacagttgtctgaaaaagaaatacagaaaaaaatagaagaagagcgagcaagaaggagagcaattgaccttgaaattaaagagcgagaagctgaaaattttcatgaggaagatgatgttgatgttaggcctgcaagaaaaagcgaggctccatttactcacaaagtgaatatgaaagctagatttgaacaaatggctaaggcaagagaagaagaagaacaaagaagaattgaagaacaaaagttactacgcatgcagtttgaacaaagggaaattgatgcagcactacaaaagaaaagagaagaggaggaggaggaagaaggtagcatcatgaatggctccactgctgaagatgaagagcaaaccagatcaggagctccatggttcaagaagcctcttaaaaacacatcagttgtagacagtgagccagtcagatttacggttaaagtaacaggagaacccaaaccagaaattacatggtggtttgaaggagaaatactgcaggatggagaagactatcaatatattgaaaggggagaaacttactgcctttacttaccagaaactttcccagaagatggaggagagtatatgtgtaaagcagtcaacaataaaggatctgcagctagtacctgtattcttaccattgaaactgatgactactagctcccctcccctctccctggaactttctctttcactccaactttcttactacatccatcttttctgtggcggggccaaaaaaggaaaccaggagtgccactatgctgacttcttattccttttcataacagtcttcaaagcacagctcatctaaagaatgcctacttcttttccaaataagcatcagatttatcgcctattatgcagtaacagtcaataaaatgtacttatgggggggaattactcaattattctatcagaacctattataaagactgtatttcccatagacgtttacagcaactatgtttaaaaaacaaaaacaaaaaaaaaacacacaaacctaagtagaatacattattttgcatgaaggaatgtcatttctgagctttttacacctaaaattaggctgaaatagctgagataattaatttggaacctatcaatttgagtggactttttctttagtagtacaccattttggttgttgtagtttcaaagtctttctgaagcagatatattgggattggagcggggtggggaaaactgtcactcctttcagaggaaaaggggaggagcatggagaaaaacaaaaattaaaggacttaaagaatggctatacagtgttgagtgttgaggatattaaacatgttatttttcaaacgtatgtaatatatattaaatttataaagcaaatttatgttgtgatcttgcctgaacaaattatattttaatgaaaaaactttctattaatagttcacgcaagagaaaacactttcaacatagtcgaaggcttcaagatctaagtgtatcagacttagggaaaaagtggcacaaccttcgatttaaaattctagtctttaaaatgagtttgtaaataattagctattacgttctattaagttgttttatattttaattttctggaagacaattttattttacaacgtgaacccaaataaagtaacttctgtatttaaaa

SEQ ID NO: 159199 - DNA, 1263 bp, Homo sapiens
  Payload ID: 11156
  Gene Symbol: NEXN
  Gene Name: nexilin (F actin binding protein)
  ENST ID: ENST00000401035
  CDS Start-End: 300-1263
ggaacagctgcagccggcgctgggcccgcctggaatgcgggaacaggctgcacaccaggacttttatggaaacttgctgctggagacggcggcggcggcggcggcagcggcagccagaggactcccagcggctggagcagaagtgttagcggccagagctcccagacccctacccacagccaggcgggacgcgcacagtccctccacgcggaaagaagtaccttcgccggtcaccggctcctgcagggtgcaaatatatacagagcttcataatcagcccaagaccacatagagcaaacatgaatgatatttcccaaaaggctgagattaaagaaatgcttgcttctgatgatgaggaagatgtatcttctaaagtagaaaaggcttatgttccaaaattaacaggaactgtgaagggtagatttgctgaaatggagaaacaaagacaagaggaacaaaggaagagaacggaggaggaacgaaaacgcagaattgagcaggatatgttagaaaagaggaaaatacagcgtgaattagcaaaaagggctgaacagattgaggacataaacaatacgggaactgaatcagcatcagaggaaggagatgattcactacttataactgtggtacctgtcaaatcatataaaacatctggaaaaatgaaaaagaattttgaggatctagaaaaagaacgtgaagagaaagaaaggatcaagtacgaggaagataaaagaataagatatgaagaacaacgaccatctctcaaggaagcaaagtgtctttcattagttatggatgatgaaatagaaagtgaagcaaaaaaagaatcactttctcccggaaaattgaaactaacttttgaagaactggagcgacaaagacaagaaaaccgaaagaagcaagctgaagaggaagcaagaaaacgtttagaagaagagaagcgtgcttttgaagaagcaaggcggcaaatggtaaatgaagatgaggaaaaccaagacacagcaaaaatttttaaagggtaccgccctggtaaactcaaactcagttttgaagaaatggaaaggcaaagaagagaagatgaaaaaaggaaagcagaagaagaagccagaaggagaatagaggaagaaaagaaggcgtttgctgaagcaaggagaaatatggtagtagatgatgactccccagagatgtataagacaatctctcaagaatttcttacaccgggaaaactggaaattaattttgaagaattattaaaacaaaaaa

SEQ ID NO: 159200 - DNA, 1456 bp, Homo sapiens
  Payload ID: 11156
  Gene Symbol: NEXN
  Gene Name: nexilin (F actin binding protein)
  ENST ID: ENST00000440324
  CDS Start-End: 151-1456
cggccagagctcccagacccctacccacagccaggcgggacgcgcacagtccctccacgcggaaagaagtaccttcgccggtcaccggctcctgcagggtgcaaatatatacagagcttcataatcagcccaagaccacatagagcaaacatgaatgatatttcccaaaaggctgagattctgctttcttcatctaaacctgtcccaaaaacctatgtaccaaaacttggcaagggtgatgtaaaggataagtttgaagccatgcagagagccagggaagaaagaaatcaaaggagatctagagacgaaaaacaaagaagaaaagaacaatatattagagagagagaatggaacaggagaaagcaggagattaaagaaatgcttgcttctgatgatgaggaagatgtatcttctaaagtagaaaaggcttatgttccaaaattaacaggaactgtgaagggtagatttgctgaaatggagaaacaaagacaagaggaacaaaggaagagaacggaggaggaacgaaaacgcagaattgagcaggatatgttagaaaagaggaaaatacagcgtgaattagcaaaaagggctgaacaggaaggagatgattcactacttataactgtggtacctgtcaaatcatataaaacatctggaaaaatgaaaaagaattttgaggatctagaaaaagaacgtgaagagaaagaaaggatcaagtacgaggaagataaaagaataagatatgaagaacaacgaccatctctcaaggaagcaaagtgtctttcattagttatggatgatgaaatagaaagtgaagcaaaaaaagaatcactttctcccggaaaattgaaactaacttttgaagaactggagcgacaaagacaagaaaaccgaaagaagcaagctgaagaggaagcaagaaaacgtttagaagaagagaagcgtgcttttgaagaagcaaggcggcaaatggtaaatgaagatgaggaaaaccaagacacagcaaaaatttttaaagggtaccgccctggtaaactcaaactcagttttgaagaaatggaaaggcaaagaagagaagatgaaaaaaggaaagcagaagaagaagccagaaggagaatagaggaagaaaagaaggcgtttgctgaagcaaggagaaatatggtagtagatgatgactccccagagatgtataagacaatctctcaagaatttcttacaccgggaaaactggaaattaattttgaagaattattaaaacaaaaaatggaagaagaaaaacgacgaacagaggaggaacggaagcataagctagaaatggagaaacaagaatttgaacaactgagacaggaaatgggagaggaagaggaagaaaatgaaacctttggattgagcagagaatatgaagaactgatcaaattaaaaaggagtggctctattcaagctaaaaacctaaaaa

SEQ ID NO: 159201 - DNA, 5602 bp, Homo sapiens
  Payload ID: 11157
  Gene Symbol: NFAM1
  Gene Name: NFAT activating protein with ITAM motif 1
  Uniprot ID: Q8NET5
  ENST ID: ENST00000329021
  CDS Start-End: 39-851
gtgaactaaagagtcgccgcagacaagcaggcccccagatggagaaccagcctgtgaggtggcgggccctgccaggcctcccacgccctcctgggctccccgcagccccctggctcctccttggcgtgctgctgctgcccgggaccctgcgactggcaggaggacagtcagtgacccacaccggcctgcccatcatggcctccctggccaacacagctatctccttcagctgcaggatcacctatccatacactccccaattcaaggttttcacagtcagctactttcatgaagatctccagggacagaggagccctaagaagccaacaaactgccaccctggactgggcacagagaaccagagccacaccctggactgccaggtcacccttgtgctgccgggagcatcggccactggcacctactactgctctgtccactggccacactccacggtgagaggcagcggcaccttcatcctggtcagagacgcagggtaccgagagcccccgcagagtccacagaagctcctgctctttggcttcaccggcctcctgagtgtcctgagtgtagtgggcacggccctgctgctctggaacaagaagcggatgcggggtccagggaaggaccccaccaggaagtgcccagatccaagatctgccagcagccccaagcagcatccttcagaatctgtctacacagctctgcagcgccgcgagaccgaggtctatgcctgcatcgagaatgaggatggcagctcacccaccgccaagcagagccccctctcccaggagagaccgcatagattcgaagatgatggcgaacttaacctggtctatgaaaatctctaggatgggctccaccgctcatagagcttgccctgggtcagaggaccggggcagcccctgccaccaaaggacttgatctgagttgggagtaaggcccccagggacaccccatcatttcaccctcacattcaaggcccttcctgtcttggccggccccactgcccccccattctatgccccaaccaccaaggctttcccatcttggggcctttgcccaggctgttccttctgccaggcaggcccttcctcccttggcccaaccagcaaagcgcccctcagtcttcaagggctttcctggatgccacccttgcccagagccctgctcactgcctcatgctgacagagcagcatgctctcttggcaccagcctgcacctcagccagtagggcagcctctgagctgagggaggaccctgcaggggcgcctagcagtgctgtgtggggagccgaggtatggaggagctggggagcagctatgcaaatccctacctacccagctgggccagaggcacgaggcagccaggcagggtgggagcaggggctggcgtgggaggtctgggggacagacaaggatgatggacccctcagaggcaagactaggatcagggacagatctggaggcccaggacatggctgagaggtggtcagcaggctgggggcatggagcagagagggcttgggtacaagctggagaggaaggagattctggcatgttggggtgagggcagagggacagatgaggggaggagggtgctggctaaacaggaactgaatgaatggcctgaagctccctctcccaagggttcccactcccattggcctggccctgtacgtgcactctgtcatctccttggtcaccctctgctccaggccttctccaccacaggacctcagctgtccctccttctacccaaggtggagtcccccaaagtcccttctgtctggcctatcctgtgcccaccacctgtggcttcatccagccctcctcctctatctttatctgccataggccgcagccctggccccctgtggattgaggtcccaagtggtccagctgtggggtttggtgctgggaccctcaatggcagccggaaggtccctctgaggcagaagctcaagccccatggggacagtggctccccagtgcctggccctgagccatttctgctgtttcaggtgcccacatcaccctcatttcctcctcgcagtagccctgcaccgtggccagaaacccatccacaggcaggcagtggctggggtccgggtgccccgggctgttgggctctgcttcctccctctgctcccccatgtctccctgagttctcccacctttgctcatttgtaaaatgggcaggtcaatcttcccaccccaccgtgtgggctgccccaaccccaaatgtgcccagggaggggggggaacccaaggcacaggccccgcccctgcccccaagcagcactgggctactggctcacagaagcacctttggttctgcaggtcatgcccctccctgcagggaagggaaagctggtggtagaggctgggcacagactgacgtccagaagaagtcccttggccctgctagggtggcaccagacttctctggtcccacaggacagccagtggcctcccaacttggttctgggcccccgcctgcaagcacacatggcaaggagggctttagcaggctcacataaccgagtggcaaggcccctgctcccagaggctggatttgaatgaactccgggcctgtttggggaggtgaagctgccaggtgtgcacaggggcctcccaggctcctggctccaccagccaaggaggtgggggcaagggtcagggcaatgggggacaatgccgctcagggtgcagtgagctcccctgggaaaaccgaagccagcaagaccaggagagggccacctcactgggcctgcctcccccacctcctgggcctctctgacctcagctcctagaccctggacccttggctgggactcagcattttccagtctttttcaggggtagacaggggagcctgggttaaactttaccactgtgccctggcccaggcatcaccaacacggcctccctgcagctgccctgccaccgacagaccccgattaaacccacacctggccttggcctcccctgctctataccttgcatggtttttgcctcacttggaataaaattccaactcctccctgtggcgtaggaggttcttgggggctgacccatcacccctctggtggacagagacattgccagcgtggtggtcgtctgtgcttggttcagggcaaggctgggaggcagtgggtgctgaggtcttcagtgagcaaggagagaggcagggaggaggaggaggaggaggagagcacagcatgaaaggacgggaccctaaagggctttggcccaagggagggtggggcaagaatgttctgagacttctgtgggcagcaaagaggactgagcacctgttctccagcccccaggactgagagcctgcagagacaagctggcacagggcgaggggtggcagggaacttcagggtgggaggtgcatggggcaggcgggaggaggaagaacagagaggggacagagagggtatgaatgggagctcctggggtgcaggcttgctttccactatgaatgggtggaggagggaagagaagaaaattgcttttgagacccacccaggctgggtggcctcagggcctcccttgaatccctgctccacctcccacagccttgtggacttgggcaagtcactggccacctgagcctcagtttgcagtgacagtcaagacagctcaggccaggcgtagtggcttatgcctgtaatcccagcatgttgggaggccgaggcgggtggatcacttgaggccaggagtttgagaccagcctggccaacgtggtgaaaccccgtctctactaaaaatacaaaaattagcctggtgtggtggcacgcacctgtagtcccagctactcgagaggctaaggcaggagaatctcttgaacctgggagacagaggttgcagtgagccgaagtggcaccactgcacaccagcctgggctacagagcacgctctgtccaaataaacaaacaaacaaacactactcagtgtctcagaaaggacagaaggggactccctggctcaggcagaagctcagtgggtgtgcatttccttcaagactcgtccttcagaaggaataggcttctggggcagtacagaggagtctaagtgagaggcaggcctccctgggagctgggcccaggctctctgcagccatgcctttaaggagtgcctacggggtagcacgatcagatggacaggccagggctgcccagagctgggggtgggagcaaggtaagcagagaggtgagggaaggagggtgctggcttagcaggagctgaatgaatgggcctggaggggaaaagctaagggggatggggtggcttgagtggagtaggtgaggcctaggtgaaggggagctgtggaccttccaggacggacggatgtgagcagtcctgagtggggactggagttagggtggggaagggaagccccaggcagcccctgcaggcccctgcccctgggccctaccgcagcagggcagccctgtctctgggtctcagctgatgcttccctctgcccactggcccctgacctggtgggatttcccaccatctctcccggcccagcctgccctgccctcctaggtcttcccaacctcccctctgcagaaacatctcagccacgtctggcacccccaggcatccctgcctgcctctaggaagttgaccccttcaatgggtttcagcctccaaccccacccccgcttgactcctgctctgtcagcacttgcttgagaaaatcatcctgggaaaccagcttctgggagcaggggccttgccactcggttctgcgagcctgctgaagccctccttgccacgtgtgcttgcaggcgggggcccagaactaagctaggaggccactggctgtcctgtgggaccagggaagtctggtgccaccctagcagagggcccatggacttcttctggaggtcagtctgtgcccagcctctaccaccagtccagaacttgcagtgggtgcggtaaacggtggcccctcctcagcaaacatttccaggggattctggcagcagagtttccatgggaacatgtgctggttctgcgctgaacccggtgtggctggggttcccttcacagccaatattgcaggaactgagcctggtggcctcggccagggtaggcagtgctctttggccacccagtgtcacaaacctgaactcaagttacaggcaaaacctgcttttcctttttctttctctctctctctctttttttttttgttaaagcacattctaatgtaaagtccatgctccattctaaagatgcctctgggatttcagggatggatttttatgtagttcaatagttttcttggcagacagcttatgcaggagaggtgggccgttggctcagtccagccaggctgagtggcgtcactccattccttgcaatgccaggggatgtcatttgtccacctgagggggcttccccagtctcccttccctgacctgtggtcagaatgatggcctcagccttgactgagcgcgggtcaggccagactctctgaacttggtgttggcgtgtgttttgtgtgtgtctggaggtgacatatgtgggtgacagaagcatatgttacagtgaaacattaaaactacagcaaagtg

SEQ ID NO: 159202 - DNA, 671 bp, Homo sapiens
  Payload ID: 11157
  Gene Symbol: NFAM1
  Gene Name: NFAT activating protein with ITAM motif 1
  ENST ID: ENST00000355469
  CDS Start-End: 6-500
cccagatggagaaccagcctgtgaggtggcgggccctgccaggcctcccacgccctcctgggctccccgcagccccctggctcctccttggcgtgctgctgctgcccgggaccctgcgactggcaggaggacagtcagtgacccacaccggcctgcccatcatggcctccctggccaacacagctatctccttcagctgcaggatcacctatccatacactccccaattcaaggttttcacagtcagctactttcatgaagatctccagggacagaggagccctaagaagccaacaaactgccaccctggactgggcacagagaaccagagccacaccctggactgccaggtcacccttgtgctgccgggagcatcggccactggcacctactactgctctgtccactggccacactccacggtgagaggcagcggcaccttcatcctggtcagagagacaagatttcgccatgttggccaggctggtctcgaatcctgacctcaagtgatccgcccacctcagcctccaagagtgttgggattacaggcatgagccagcacacccagccagttttcatcacattctcaaaggagtgatgatcccaaaagttatgagtgagcccatcaccaaagccctgattctctgacctacctctgcgatcccctggaa

SEQ ID NO: 159203 - DNA, 5963 bp, Homo sapiens
  Payload ID: 11158
  Gene Symbol: NKAP
  Gene Name: NFKB activating protein
  Uniprot ID: Q8N5F7
  ENST ID: ENST00000371410
  CDS Start-End: 168-1415
ctagatccggggaagggttttgcagaagtacccagaactgtgtccaaggtttcctcagatttgggctgttccgcagcggcaggtcccgggaaccaaggcaacagacatcttcctaggctcgcgagagcgcccccttgtcccacggctgctggggccccccagtagccatggctccggtgtccggctcacgcagcccggatagggaggcctcgggctcggggggaagacgtcgcagttcgtcgaagagtccgaagcccagcaaatctgcccgctccccgcggggccgccgctctcgctcgcactcttgctctcggtccggggaccggaatggactcacccatcagctgggtggcctcagccaaggctcccgaaaccagtcctaccgctcacgctcgcggtcgcgttctagagagcggccctctgcgccccggggcatccccttcgcttctgcctcctcgtcagtctattacggcagctactcgcgcccctacgggagcgacaagccttggcctagcctcctcgacaaggagagggaggagagcctgcggcagaagagattaagtgagagagagagaattggagaattgggagctcctgaagtatggggactttctccaaagaatcctgaaccagattctgatgaacatacaccagtggaggatgaagagccaaagaaaagcactacttcagcttctacttcagaagaagaaaaaaagaagaagtctagccgttcaaaagaaaggtccaagaaaaggagaaagaaaaaatcatcgaaaagaaaacataagaagtattctgaagatagcgacagtgactctgattctgaaacagactccagtgatgaagataacaaaaggagagcaaagaaagccaagaaaaaggaaaagaagaagaaacacagatcgaagaaatataagaaaaagaggtctaagaagagcagaaaagagtccagtgattcaagctctaaagaatcccaagaagagtttctggaaaatccctggaaggatcgaacaaaggctgaagaaccatcagatttaattggcccagaggctccaaaaacacttacctctcaagatgataaacctttgaactatggccatgctctgttacctggtgaaggtgcagctatggctgaatatgtaaaagctggaaaacgtatcccacgaagaggtgaaattggcttgacaagtgaagaaattgcatcatttgaatgctcaggttatgtaatgagtggtagcaggcatcgccgaatggaggctgtgcgactgcgaaaagagaaccagatctacagtgctgatgagaagagagcccttgcatcctttaaccaagaagagagacgaaagagagagaacaagattctggccagttttcgagaaatggtttacagaaagaccaaagggaaggatgacaaataaagattttctgattgtccagaagacatttttaacaacaaaaaagaaagtctgggttccacacatacatagaaaaagattattatgttctgagaaagctttacagtgctactgtgccttctatttaattctttcagtccttcaataaaaagctgcttattgatataactttagcaagttctttgggttattttggattgaccatagtaactttctggtttaaaaatccaaattatgggctgggcacggttgctcacgcctgtaatcccagcactttgggaggctgaggcgggtggatcacttgaggccaggagttcgagaccagcctggccaacatggtgaaaccctgtccctactgaaaatacaaaatcagccaggagtggtggcgcacacctgtagtcccagctactcgagaggaagaggcaggagaattgcttgaacctaggaggtggaggttgcagtgagccgagattgtgccactgcactccagcctgggcgacaaagcaagactgtgtctcagaaaaaaataaaaggccaggcacggtggctcacgcctgtaatcccagcactttgggaggccaaggcgggtggatcacctgaggtcaggagtcgagaccagcctggccaacatggtgaaaccctgtctctaccaaaaaatacaaaaattagccgggcgtggtggtgggcgcctgtaatcccaactactcgggaggctgaggcaggagaattgcttgaatccaggaggcggaggttgcagtgagccgagattgtgacattgcactccagcctgggcaagaagagtgaaactctgtctcaaaaaaaaaaaatccaaattatgaataaaatgctactgtattggaggaggtggcttgaacaaaaagtgttagtgagatgagaaacttcaatctcacaccatgagacagtgctactattagctctatgtgatgcctgccccaccccgacctctaccccagctgaacttttgggaaattatcactcctctgtgttgaatgtgttataaatggacttgataggaacatataggaggccacttttgttaacaaaatgaaggcattgctgcgaaaagcaaatctggaatttgaaaactgacttgtgtactataatatatgatctaccctggaaataatgggttttgatttaagtccctacctccactctaaaaccaacaaacaaaccaaaaagcaaactaacccacagatttgttgaattgaaaatgtgaacattagatattttaaattgttttttttgagatggaatctcgctcttgttgcccaggctggagtacaatggggtgatctcggctcaccacaacctccacctcctaagttcaagcagttctcctgcctcagcctcctgagtagctgggattacaggcatgtgccaccatgcctggctaattttgtatttttagtagagatggggtttctccatgttggtcaggctggtctcgaactcccaaccccaggtgatccgcccgccttggcctcccaaagtgctgggattacaggcatgagccactgcgtccagcctaaattcttaataagttacttaaaaatagttatttgaaatataaagtcttaagaagtctactcttatccccatgtaaatactttatttcaatctgagctgatatgagcttgaggataggataacatccaaaagaataggagtcaactatggtcaagagttttgataaggaaaaatataatgagtcagtattttagcttaattgtttcataagagaaactaaaatgatattaaatatttttaactgtctttcatatactaagtagatttcattttaaacacttaaacctttctgtttgtttttaagttggggagaaatggaaaattgtgggactatgatatcgtggtcttgttcctttgtttatttcgttcaattttaattaggtcagaagagtgaatgggggagggaacccaggaagttttggctgttttcattaaggttggttttctgttttttgttttttgagatagagtctcactctgtcactcaggctggagcccagtggtgtgatctcggctcactgtaacctctgcctcctgggttcaagtgatcctcccacctcagcctcccaagtagctgggattacaggcactcaccaccacaactggctaatttttgtattttcaatagagatggggtttcgccatcttggccaggctggtctcgaactcctgacctcaagtgatctgcccgcctcagcctcctgaaatgctgggattacaggtgtgagcaaccgtgcctggccgtttttgttaaggttatttgatctgcattattattacatgcctatgataaatttaaattacctgagtgataaggacattctgattatactattgtaaaatgcccgcttgccttatatttttaagtggttgtttttcaaaagtgtttaaataaggcagtcatatttcaaagtatagagcaaaagtttttttattattatttttgagacagggtctccctctgtcacccaggctagagttcagtggtgcaatctcggctcactgcaacctccacctcctgggctcaagcaatcctccacctcagcctcccgagcagctgggactaccagtgtgcaccaccatgcccagctaatttttgtatagttagtagagacaaggtttcaccttattgcccaggctggtctcaaactccagacctcaaacaatccgcccgcctcggcctcccaaagtgctaggattataggcgtgagccaccacacccggcccaaagttttataattaaacagtattaacagtcttaaatactattaaatatatgttccaggaaatgtctacttttaacccgcaactactgaaaataagagtcagcatgtagcagcattaatgacccctgaatttgaaatgatttctgtttatttatacctaattgtagttgctgcctagcctaataaatctgtagttttcaaaagttaaaagaaactagttcccaaagttttgagtctcaatccatctacttccctgaataataaaacctgaattttgtaatacccacttaaaaattttattctcagctgggcgtggtggctcacacctataatcccagcactttgggaggccgaggtgggcggaccatgaggtcaggagatcaagaccatcctggctaacatggtgaaaccccatctctactaaaaatacaaaaaatgtagccgggcatggtggcacgtgcctgtagtcccagctactcgggaggctgaggcaggagaattgcttgaacctgggaggtggaggttgcagtgagccgagatcaagccactgcactccggcctgggagacagaatgagactccgtctctaaataaacaaacaaataaaaatgtattctctaaggacattttttttttggttactggttcctagagatgaaatgattatcttattttcagtaggcaaggtagtttaaatgcagaaattctgcgatatatgaatattgtgacatcaagaacagcttcattggcatattctttgggaaagaggcaagaagaataaaagggctaaaagtattttattttcagcttatgagtgttgttactgcttcaaattgtgtttagtcacctgagccataaatcagttgtagtagggctattgtattttaaatatattttttgttctccaaggagacttatctagtttgccacctccttgcctattgctctgatgtggttttccctccttttttatttattgcacaaatatctaacagttaaaaaagaaaaatttcagtaccatatcaattgtctttcatattttgtgttcctcctttccagtgcttttctatgtaagtaaatattctgatgtacttgtaagtaatcactcagagcataatgtaattttgtctttggtgtcttaaaattttgcagccaggcaagagaggttcacagggaaggtaggaacaagtgattattcagtgtgaggatgggaagaagatcaaagataagtaagggcaatgattgtatccttcccgtgtcattgcccctagtccccaagccaccctcctgcaatcatgagtatagtggtgtattgtggaaggcagcatgcccagttttccagtttcaaaatatattatttagcagtgaggcttaactcccagtaaatgaaggggtctgtgagtaggggaacccttcagactggttatattatgagctgtagaactgttgccattttgttgttcccagttgtgcccataaagagatgtgtctgagctggagacttaggctcagatggggaacaaacagccaagtaccaaccttagtttggtccaataggtgaattttagcaactctctaaactcagctctatacctgtaagactcagaagtgatacatatagtgatagaaaaaaatactttagaaaatagaaaacaacttactggttactctgctaatgtgatggaggttgcagaatggaaaatgaatgaatgcaaaaaaatacagctggattgtgtgccacaagtttattactcaataaatattctgtggtttga

SEQ ID NO: 159204 - DNA, 1639 bp, Homo sapiens
  Payload ID: 11159
  Gene Symbol: NKAPL
  Gene Name: NFKB activating protein-like
  Uniprot ID: Q5M9Q1
  ENST ID: ENST00000343684
  CDS Start-End: 53-1261
caccagccagcctctgggtctgtagcaaccgcccagcgttgaggcgcggctcatgcccccagtatcccggtccagctattccgaggacatcgtgggctctcggagaaggcgacgcagctcctcggggagcccaccatccccgcagagcagatgttcctcttgggatggctgttcccgctctcactcccgcggccgtgagggcctcaggcctccttggagtgagttggacgtgggcgctctttacccctttagtcgctctgggtcgcgagggcggctcccaagattccgcaactacgccttcgcgtcctcctggtcgacctcgtatagtggatatcgctaccatcgtcactgctatgcagaagaacggcagtcagcggaagactacgagaaggaagagagccatcggcagaggaggctgaaggagagagagaggattggggaattgggagcgcctgaagtgtgggggccgtctccaaagttccctcagctagattctgacgaacataccccagttgaggatgaagaagaggtaacgcatcagaaaagcagcagttcagattccaactcggaagaacataggaaaaagaagaccagtcgttcaagaaacaagaaaaaaagaaagaataagtcgtctaaaagaaagcataggaaatattctgatagtgacagtaactcagagtctgacacaaattctgactctgatgatgataaaaagagagttaaagccaagaagaaaaagaagaaaaagaaacacaaaacaaagaaaaagaagaataagaaaaccaaaaaagaatccagtgactcaagctgtaaagactcagaagaggacttgtcagaagctacctggatggagcagccaaatgtggcagatactatggatttaatagggccagaagcacctataatacatacctctcaagatgaaaaacctttgaagtatggccatgctttgcttcccggtgaaggtgcagctatggctgagtatgtaaaagctggaaagcgaatcccacgaagaggtgaaattgggttgacaagtgaagagatcggttcttttgaatgctcaggttatgtcatgagtggtagcaggcatcgcagaatggaggctgtacgactgcgtaaggagaaccagatctacagtgctgatgagaagagagctcttgcatcctttaaccaagaagagagacgaaagagagaaagtaagattttagccagtttccgagagatggtgcacaaaaagacaaaagagaaagatgacaagtaaggacttacttgttgcacagcaggaattttaacaacaaaaattttatgtgaccaaaagtgttaaaaggctttacagtgctactgtacttaccatattagtaagtccctcaggaaaaagcttcttttgagatatctttagcagcttattttttgttattttaactttaaaaagtaatatgtgcacatggttttaaaaatattcaaccattataggaggagagttagtaaaaagtgaatctttcactttagcccctgacacctttcccccaaaaatatatattttggtgtcttatatacagaatatacattctgtgcatatacaagagtatatgttgcagcataaagattaaaagctattaaagttttttttcgctcgtta

SEQ ID NO: 159205 - DNA, 2335 bp, Homo sapiens
  Payload ID: 11160
  Gene Symbol: NKIRAS1
  Gene Name: NFKB inhibitor interacting Ras-like 1
  Uniprot ID: Q9NYS0
  ENST ID: ENST00000388759
  CDS Start-End: 322-900
caagattcgagcctgagcggcctgggcgtctcgagaggtgagagagttggcggcgaggtctcggcggctaagcgagcgtcggcgactgtctctccgcgagaggaggcaagttggggtccaggctccaaagccggtggccgcgtaccgcggtggagccgctgtctttgaggtctgaggagagaacagagtctagctctttcacccaggctggagtgaagtggtgcaatctcagctcagtgcaacctccgccccctgggttcaagtgattctcctgcctcagcctccccagtagctgggattacagtgatatcctgagagaagatgggaaagggctgcaaggttgtggtttgtggattgttatctgtggggaaaactgcaattttggagcagctcctttatggaaatcatactattggaatggaagattgcgaaacaatggaagatgtatacatggcttcagtagaaacagaccgaggagtaaaagaacagttacatctttatgacaccagaggtctacaggaaggcgtggagctgccaaagcattatttttcatttgctgatggcttcgttcttgtgtacagtgtgaataaccttgaatcctttcaaagagtggagcttctgaagaaagaaatcgataagttcaaagacaaaaaagaggtagcaattgtggtattaggaaacaaaatcgacctttctgagcagagacaagtggacgctgaagtggcacagcagtgggcaaaaagtgagaaagtaagactgtgggaggtgactgttacagatcggaaaactctgattgaaccattcactttattagccagtaaactttctcaaccccagagcaaatcaagctttcctttgcctgggaggaaaaacaaagggaactctaattctgagaactaaaaatcagtaatttccacaattgtatgttgaatagtgattgcctttaagtgtctgtgaacatggagtaatattactatttaaaataggccatttgtatctacctttggtccttaggaaaattcctaaggaagtcaattaatgcactttagatgttaaaagtatttgggctaaggttattattgcctgatatgaaataatatattcttattctcattgtttgaaacctgtctttgaaattagcacctttgttatttatgttgtacttgtgaaaacagtaaaatagtttggatagttatgcaaatgcacctatgtgtaacttccccccaaccccaagctgtttcggaagatatcataatcattctgtgtaacattatgcaaacttctaagcccaaacatgactttgtttttaaaaagttcattaatctaatgtctaggattataaaacatttttttgtgtctaaattggacccaaaacattgaacagtttggggtagtaagctaaatttcatcttgtggagattttgctaaacagactaagacccatgatttagctttgctcaaattagaatgtttagcatgagttgaggtaccaggtagtgttaagtaggttcatcacgctctaaggccgttttttccttagccagacccctgttgatagaccagatacttgagggcaaactgtttgctcctcctcttgaaaatgattaggcacttaaggacagtaaagctgtattttctggaaggaagactgtatcttctggaatagttttctagaaaactagtcatatacaataaaagtatcaaaaatattgggctctaatttgatctgacttagatgtctgagtttgtgttgtttctctaaagattttggcaagactcaagcaatgtggctgactgtaactttattaatttaaaaggtaggaagtaagctacttagtggtttcacctgtgaaataactattttgactgaaatgtaaaataagctattcaacaaagaacatattaaaacatcaagtaatttgtaacatcttaaatggaatacttttttcatgagctctagtgaagaactactacatataaaagacgatacttacaaatcagctattgctgctacagtataattcttcaaaatttctcatcataaattcattttttggtaaaaaaaaattaccagacactaactcacccccttacccttttcccccggttattgaatattaatctagcttcccacccatgcatgttacatagatggacaaatgctttcataatgatttttaaataagtaccttccagtttgctttgtttcctactaatgcaacttagtctatattagtacaaacagttaccaattctttttaaattctgtaatgaatgtatgtgtatccagataagtttctctgaaagagacatacagaaacagaactgctgggtc

SEQ ID NO: 159206 - DNA, 2018 bp, Homo sapiens
  Payload ID: 11160
  Gene Symbol: NKIRAS1
  Gene Name: NFKB inhibitor interacting Ras-like 1
  Uniprot ID: Q9NYS0
  ENST ID: ENST00000421515
  CDS Start-End: 409-987
aaaactccagcccgaagggatctggaagcagtttttaagactgtgtgtgtatgagacaggtcgcgtcctagagcaaacggttttttttgtaaacagacggcatcctaacaggggcggtgctacccagtctgcggggagtcgctcgggatcgaagcacctcagagctccttcgagcgtatcccttcgggaaagccccacgccttccccgaggcgcctcctccggcctgcagcacgccctcgtcctgcacttcctcctcggaatctgcaagacagagtctagctctttcacccaggctggagtgaagtggtgcaatctcagctcagtgcaacctccgccccctgggttcaagtgattctcctgcctcagcctccccagtagctgggattacagtgatatcctgagagaagatgggaaagggctgcaaggttgtggtttgtggattgttatctgtggggaaaactgcaattttggagcagctcctttatggaaatcatactattggaatggaagattgcgaaacaatggaagatgtatacatggcttcagtagaaacagaccgaggagtaaaagaacagttacatctttatgacaccagaggtctacaggaaggcgtggagctgccaaagcattatttttcatttgctgatggcttcgttcttgtgtacagtgtgaataaccttgaatcctttcaaagagtggagcttctgaagaaagaaatcgataagttcaaagacaaaaaagaggtagcaattgtggtattaggaaacaaaatcgacctttctgagcagagacaagtggacgctgaagtggcacagcagtgggcaaaaagtgagaaagtaagactgtgggaggtgactgttacagatcggaaaactctgattgaaccattcactttattagccagtaaactttctcaaccccagagcaaatcaagctttcctttgcctgggaggaaaaacaaagggaactctaattctgagaactaaaaatcagtaatttccacaattgtatgttgaatagtgattgcctttaagtgtctgtgaacatggagtaatattactatttaaaataggccatttgtatctacctttggtccttaggaaaattcctaaggaagtcaattaatgcactttagatgttaaaagtatttgggctaaggttattattgcctgatatgaaataatatattcttattctcattgtttgaaacctgtctttgaaattagcacctttgttatttatgttgtacttgtgaaaacagtaaaatagtttggatagttatgcaaatgcacctatgtgtaacttccccccaaccccaagctgtttcggaagatatcataatcattctgtgtaacattatgcaaacttctaagcccaaacatgactttgtttttaaaaagttcattaatctaatgtctaggattataaaacatttttttgtgtctaaattggacccaaaacattgaacagtttggggtagtaagctaaatttcatcttgtggagattttgctaaacagactaagacccatgatttagctttgctcaaattagaatgtttagcatgagttgaggtaccaggtagtgttaagtaggttcatcacgctctaaggccgttttttccttagccagacccctgttgatagaccagatacttgagggcaaactgtttgctcctcctcttgaaaatgattaggcacttaaggacagtaaagctgtattttctggaaggaagactgtatcttctggaatagttttctagaaaactagtcatatacaataaaagtatcaaaaatattgggctctaatttgatctgacttagatgtctgagtttgtgttgtttctctaaagattttggcaagactcaagcaatgtggctgactgtaactttattaatttaaaaggtaggaagtaagctacttagtggtttcacctgtgaaataactattttgactgaaatgtaaaataagctattcaacaaagaacatattaaaacatcaagtaatttgtaacatctt

SEQ ID NO: 159207 - DNA, 2391 bp, Homo sapiens
  Payload ID: 11160
  Gene Symbol: NKIRAS1
  Gene Name: NFKB inhibitor interacting Ras-like 1
  Uniprot ID: Q9NYS0
  ENST ID: ENST00000443659
  CDS Start-End: 779-1357
gtccctctctggccaccgcacgacgggcgcagaaatctgggccccagagctgcgctgagagatcccccgacgcttccccagcctcccagggaggccttcgcggagtcggggcgtcgcgggtcggggcgctcgctgtgtcccttcagctccagactgcgtgaagctcctccagcaggccccagcgcccagggattttgtcctaaaaaagggtcatggagtgggtggattgcgggcggcccggcgctttttctgcatacggatttcgtcccaaatttgctaacatgagaaccacagtttttcagaagagcagaatgtttatttgccaagacctgtttggcaggtgtgaatgttttagagaagaaatgccgagaaaatgctggcattttgcgttgcgggtttttttttaaattgagaaataggttactggcttactttgtttctccagaatattttcacttggctttaatttaagtcatgtggctttaatttccttccagattatgcgttcagatgtggcaaaggcttaagagaatcattatctcttaatcgtagcggttttgattatcttttttcccacatcatatttttctttctttctttttaaatcacagctttacgtttttaagagtctctatctggttcattgattgattcaacaaatatttattaagtgtctaatatgtgccaggcatagttgctggggatgcagcaggaaacaacgcagaatttttggccttcttggaaatgggcagtaagcagaatgatatcctgagagaagatgggaaagggctgcaaggttgtggtttgtggattgttatctgtggggaaaactgcaattttggagcagctcctttatggaaatcatactattggaatggaagattgcgaaacaatggaagatgtatacatggcttcagtagaaacagaccgaggagtaaaagaacagttacatctttatgacaccagaggtctacaggaaggcgtggagctgccaaagcattatttttcatttgctgatggcttcgttcttgtgtacagtgtgaataaccttgaatcctttcaaagagtggagcttctgaagaaagaaatcgataagttcaaagacaaaaaagaggtagcaattgtggtattaggaaacaaaatcgacctttctgagcagagacaagtggacgctgaagtggcacagcagtgggcaaaaagtgagaaagtaagactgtgggaggtgactgttacagatcggaaaactctgattgaaccattcactttattagccagtaaactttctcaaccccagagcaaatcaagctttcctttgcctgggaggaaaaacaaagggaactctaattctgagaactaaaaatcagtaatttccacaattgtatgttgaatagtgattgcctttaagtgtctgtgaacatggagtaatattactatttaaaataggccatttgtatctacctttggtccttaggaaaattcctaaggaagtcaattaatgcactttagatgttaaaagtatttgggctaaggttattattgcctgatatgaaataatatattcttattctcattgtttgaaacctgtctttgaaattagcacctttgttatttatgttgtacttgtgaaaacagtaaaatagtttggatagttatgcaaatgcacctatgtgtaacttccccccaaccccaagctgtttcggaagatatcataatcattctgtgtaacattatgcaaacttctaagcccaaacatgactttgtttttaaaaagttcattaatctaatgtctaggattataaaacatttttttgtgtctaaattggacccaaaacattgaacagtttggggtagtaagctaaatttcatcttgtggagattttgctaaacagactaagacccatgatttagctttgctcaaattagaatgtttagcatgagttgaggtaccaggtagtgttaagtaggttcatcacgctctaaggccgttttttccttagccagacccctgttgatagaccagatacttgagggcaaactgtttgctcctcctcttgaaaatgattaggcacttaaggacagtaaagctgtattttctggaaggaagactgtatcttctggaatagttttctagaaaactagtcatatacaataaaagtatcaaaaatattgggctctaatttgatctgacttagatgtctgagtttgtgttgtttctctaaagattttggcaagactcaagcaatgtggctgactgtaactttattaatttaaaaggtaggaagtaagctacttagtggtttcacctgtgaaataactattttgactgaaatgtaaaataagctattcaacaaagaacatattaaaacatcaagtaatttgtaacatcttaaa

SEQ ID NO: 159208 - DNA, 795 bp, Homo sapiens
  Payload ID: 11160
  Gene Symbol: NKIRAS1
  Gene Name: NFKB inhibitor interacting Ras-like 1
  Uniprot ID: Q9NYS0
  ENST ID: ENST00000416026
  CDS Start-End: 187-765
cggcctgggcgtctcgagaggtgagagagttggcggcgaggtctcggcggctaagcgagcgtcggcgactgtctctccgcgagaggaggcaagttggggtccaggctccaaagccggtggccgcgtaccgcggtggagccgctgtctttgaggtctgaggagagaacagtgatatcctgagagaagatgggaaagggctgcaaggttgtggtttgtggattgttatctgtggggaaaactgcaattttggagcagctcctttatggaaatcatactattggaatggaagattgcgaaacaatggaagatgtatacatggcttcagtagaaacagaccgaggagtaaaagaacagttacatctttatgacaccagaggtctacaggaaggcgtggagctgccaaagcattatttttcatttgctgatggcttcgttcttgtgtacagtgtgaataaccttgaatcctttcaaagagtggagcttctgaagaaagaaatcgataagttcaaagacaaaaaagaggtagcaattgtggtattaggaaacaaaatcgacctttctgagcagagacaagtggacgctgaagtggcacagcagtgggcaaaaagtgagaaagtaagactgtgggaggtgactgttacagatcggaaaactctgattgaaccattcactttattagccagtaaactttctcaaccccagagcaaatcaagctttcctttgcctgggaggaaaaacaaagggaactctaattctgagaactaaaaatcagtaatttccacaattgtatgttga

SEQ ID NO: 159209 - DNA, 1605 bp, Homo sapiens
  Payload ID: 11160
  Gene Symbol: NKIRAS1
  Gene Name: NFKB inhibitor interacting Ras-like 1
  ENST ID: ENST00000412028
  CDS Start-End: 239-817
tcgagcctgagcggcctgggcgtctcgagaggtgagagagttggcggcgaggtctcggcggctaagcgagcgtcggcgactgtctctccgcgagaggaggcaaagtctagctctttcacccaggctggagtgaagtggtgcaatctcagctcagtgcaacctccgccccctgggttcaagtgattctcctgcctcagcctccccagtagctgggattacagtgatatcctgagagaagatgggaaagggctgcaaggttgtggtttgtggattgttatctgtggggaaaactgcaattttggagcagctcctttatggaaatcatactattggaatggaagattgcgaaacaatggaagatgtatacatggcttcagtagaaacagaccgaggagtaaaagaacagttacatctttatgacaccagaggtctacaggaaggcgtggagctgccaaagcattatttttcatttgctgatggcttcgttcttgtgtacagtgtgaataaccttgaatcctttcaaagagtggagcttctgaagaaagaaatcgataagttcaaagacaaaaaagaggcaacaattgtggtattaggaaacaaaatcgacctttctgagcagagacaagtggacgctgaagtggcacagcagtgggcaaaaagtgagaaagtaagactgtgggaggtgactgttacagatcggaaaactctgattgaaccattcactttattagccagtaaactttctcaaccccagagcaaatcaagctttcctttgcctgggaggaaaaacaaagggaactctaattctgagaactaaaaatcagtaatttccacaattgtatgttgaatagtgattgcctttaagtgtctgtgaacatggagtaatattactatttaaaataggccatttgtatctacctttggtccttaggaaaattcctaaggaagtcaattaatgcactttagatgttaaaagtatttgggctaaggttattattgcctgatatgaaataatatattcttattctcattgtttgaaacctgtctttgaaattagcacctttgttatttatgttgtacttgtgaaaacagtaaaatagtttggatagttatgcaaatgcacctatgtgtaacttccccccaaccccaagctgtttcggaagatatcataatcattctgtgtaacattatgcaaacttctaagcccaaacatgactttgtttttaaaaagttcattaatctaatgtctaggattataaaacatttttttgtgtctaaattggacccaaaacattgaacagtttggggtagtaagctaaatttcatcttgtggagattttgctaaacagactaagacccatgatttagctttgctcaaattagaatgtttagcatgagttgaggtaccaggtagtgttaagtaggttcatcacgctctaaggccgttttttccttagccagacccctgttgatagaccagatacttgagggcaaactgtttgctcctcctcttgaaaatgattaggcacttaaggacagtaaagctgtattttctggaaggaagactgtatcttctggaatagttttctagaaaactagtcatat

SEQ ID NO: 159210 - DNA, 2014 bp, Homo sapiens
  Payload ID: 11160
  Gene Symbol: NKIRAS1
  Gene Name: NFKB inhibitor interacting Ras-like 1
  Uniprot ID: Q9NYS0
  ENST ID: ENST00000425478
  CDS Start-End: 422-1000
agagcgtcatgggacatgtagttccggcatcgcgcctggtggcggagttctgccgagtggggcgccgcggccgctattgtcccgccccctgctccgcaagattcgagcctgagcggcctgggcgtctcgagaggtgagagagttggcggcgaggtctcggcggctaagcgagcgtcggcgactgtctctccgcgagaggaggcaagttggggtccaggctccaaagccggtggccgcgtaccgcggtggagccgctgtctttgaggtctgaggagagaacagacagagtctagctctttcacccaggctggagtgaagtggtgcaatctcagctcagtgcaacctccgccccctgggttcaagtgattctcctgcctcagcctccccagtagctgggattacagtgatatcctgagagaagatgggaaagggctgcaaggttgtggtttgtggattgttatctgtggggaaaactgcaattttggagcagctcctttatggaaatcatactattggaatggaagattgcgaaacaatggaagatgtatacatggcttcagtagaaacagaccgaggagtaaaagaacagttacatctttatgacaccagaggtctacaggaaggcgtggagctgccaaagcattatttttcatttgctgatggcttcgttcttgtgtacagtgtgaataaccttgaatcctttcaaagagtggagcttctgaagaaagaaatcgataagttcaaagacaaaaaagaggtagcaattgtggtattaggaaacaaaatcgacctttctgagcagagacaagtggacgctgaagtggcacagcagtgggcaaaaagtgagaaagtaagactgtgggaggtgactgttacagatcggaaaactctgattgaaccattcactttattagccagtaaactttctcaaccccagagcaaatcaagctttcctttgcctgggaggaaaaacaaagggaactctaattctgagaactaaaaatcagtaatttccacaattgtatgttgaatagtgattgcctttaagtgtctgtgaacatggagtaatattactatttaaaataggccatttgtatctacctttggtccttaggaaaattcctaaggaagtcaattaatgcactttagatgttaaaagtatttgggctaaggttattattgcctgatatgaaataatatattcttattctcattgtttgaaacctgtctttgaaattagcacctttgttatttatgttgtacttgtgaaaacagtaaaatagtttggatagttatgcaaatgcacctatgtgtaacttccccccaaccccaagctgtttcggaagatatcataatcattctgtgtaacattatgcaaacttctaagcccaaacatgactttgtttttaaaaagttcattaatctaatgtctaggattataaaacatttttttgtgtctaaattggacccaaaacattgaacagtttggggtagtaagctaaatttcatcttgtggagattttgctaaacagactaagacccatgatttagctttgctcaaattagaatgtttagcatgagttgaggtaccaggtagtgttaagtaggttcatcacgctctaaggccgttttttccttagccagacccctgttgatagaccagatacttgagggcaaactgtttgctcctcctcttgaaaatgattaggcacttaaggacagtaaagctgtattttctggaaggaagactgtatcttctggaatagttttctagaaaactagtcatatacaataaaagtatcaaaaatattgggctctaatttgatctgacttagatgtctgagtttgtgttgtttctctaaagattttggcaagactcaagcaatgtggctgactgtaactttattaatttaaaaggtaggaagtaagctacttagtggtttcacctgtgaaataactattttgactgaaatgtaaaataagctattcaacaaagaacatattaaaacatcaa

SEQ ID NO: 159211 - DNA, 1898 bp, Homo sapiens
  Payload ID: 11160
  Gene Symbol: NKIRAS1
  Gene Name: NFKB inhibitor interacting Ras-like 1
  ENST ID: ENST00000437230
  CDS Start-End: 322-900
caagattcgagcctgagcggcctgggcgtctcgagaggtgagagagttggcggcgaggtctcggcggctaagcgagcgtcggcgactgtctctccgcgagaggaggcaagttggggtccaggctccaaagccggtggccgcgtaccgcggtggagccgctgtctttgaggtctgaggagagaacagagtctagctctttcacccaggctggagtgaagtggtgcaatctcagctcagtgcaacctccgccccctgggttcaagtgattctcctgcctcagcctccccagtagctgggattacagtgatatcctgagagaagatgggaaagggctgcaaggttgtggtttgtggattgttatctgtggggaaaactgcaattttggagcagctcctttatggaaatcatactattggaatggaagattgcgaaacaatggaagatgtatacatggcttcagtagaaacagaccgaggagtaaaagaacagttacatctttatgacaccagaggtctacaggaaggcgtggagctgccaaagcattatttttcatttgctgatggcttcgttcttgtgtacagtgtgaataaccttgaatcctttcaaagagtggagcttctgaagaaagaaatcgataagttcaaagacaaaaaagaggcaacaattgtggtattaggaaacaaaatcgacctttctgagcagagacaagtggacgctgaagtggcacagcagtgggcaaaaagtgagaaagtaagactgtgggaggtgactgttacagatcggaaaactctgattgaaccattcactttattagccagtaaactttctcaaccccagagcaaatcaagctttcctttgcctgggaggaaaaacaaagggaactctaattctgagaactaaaaatcagtaatttccacaattgtatgttgaatagtgattgcctttaagtgtctgtgaacatggagtaatattactatttaaaataggccatttgtatctacctttggtccttaggaaaattcctaaggaagtcaattaatgcactttagatgttaaaagtatttgggctaaggttattattgcctgatatgaaataatatattcttattctcattgtttgaaacctgtctttgaaattagcacctttgttatttatgttgtacttgtgaaaacagtaaaatagtttggatagttatgcaaatgcacctatgtgtaacttccccccaaccccaagctgtttcggaagatatcataatcattctgtgtaacattatgcaaacttctaagcccaaacatgactttgtttttaaaaagttcattaatctaatgtctaggattataaaacatttttttgtgtctaaattggacccaaaacattgaacagtttggggtagtaagctaaatttcatcttgtggagattttgctaaacagactaagacccatgatttagctttgctcaaattagaatgtttagcatgagttgaggtaccaggtagtgttaagtaggttcatcacgctctaaggccgttttttccttagccagacccctgttgatagaccagatacttgagggcaaactgtttgctcctcctcttgaaaatgattaggcacttaaggacagtaaagctgtattttctggaaggaagactgtatcttctggaatagttttctagaaaactagtcatatacaataaaagtatcaaaaatattgggctctaatttgatctgacttagatgtctgagtttgtgttgtttctctaaagattttggcaagactcaagcaatgtggctgactgtaactttattaatttaaaaggtaggaagtaagctacttagtggtttcacctgtgaaataactattttgactgaaatgtaaaataagctattcaacaaagaa

SEQ ID NO: 159212 - DNA, 1644 bp, Homo sapiens
  Payload ID: 11160
  Gene Symbol: NKIRAS1
  Gene Name: NFKB inhibitor interacting Ras-like 1
  ENST ID: ENST00000415901
  CDS Start-End: 281-859
gttggcggcgaggtctcggcggctaagcgagcgtcggcgactgtctctccgcgagaggaggcaagttggggtccaggctccaaagccggtggccgcgtaccgcggtggagccgctgtctttgaggtctgaggagagaacagacagagtctagctctttcacccaggctggagtgaagtggtgcaatctcagctcagtgcaacctccgccccctgggttcaagtgattctcctgcctcagcctccccagtagctgggattacagtgatatcctgagagaagatgggaaagggctgcaaggttgtggtttgtggattgttatctgtggggaaaactgcaattttggagcagctcctttatggaaatcatactattggaatggaagattgcgaaacaatggaagatgtatacatggcttcagtagaaacagaccgaggagtaaaagaacagttacatctttatgacaccagaggtctacaggaaggcgtggagctgccaaagcattatttttcatttgctgatggcttcgttcttgtgtacagtgtgaataaccttgaatcctttcaaagagtggagcttctgaagaaagaaatcgataagttcaaagacaaaaaagaggcaacaattgtggtattaggaaacaaaatcgacctttctgagcagagacaagtggacgctgaagtggcacagcagtgggcaaaaagtgagaaagtaagactgtgggaggtgactgttacagatcggaaaactctgattgaaccattcactttattagccagtaaactttctcaaccccagagcaaatcaagctttcctttgcctgggaggaaaaacaaagggaactctaattctgagaactaaaaatcagtaatttccacaattgtatgttgaatagtgattgcctttaagtgtctgtgaacatggagtaatattactatttaaaataggccatttgtatctacctttggtccttaggaaaattcctaaggaagtcaattaatgcactttagatgttaaaagtatttgggctaaggttattattgcctgatatgaaataatatattcttattctcattgtttgaaacctgtctttgaaattagcacctttgttatttatgttgtacttgtgaaaacagtaaaatagtttggatagttatgcaaatgcacctatgtgtaacttccccccaaccccaagctgtttcggaagatatcataatcattctgtgtaacattatgcaaacttctaagcccaaacatgactttgtttttaaaaagttcattaatctaatgtctaggattataaaacatttttttgtgtctaaattggacccaaaacattgaacagtttggggtagtaagctaaatttcatcttgtggagattttgctaaacagactaagacccatgatttagctttgctcaaattagaatgtttagcatgagttgaggtaccaggtagtgttaagtaggttcatcacgctctaaggccgttttttccttagccagacccctgttgatagaccagatacttgagggcaaactgtttgctcctcctcttgaaaatgattaggcacttaaggacagtaaagctgtattttctggaaggaagactgtatcttctggaatagttttctagaaaactagtca

SEQ ID NO: 159213 - DNA, 1612 bp, Homo sapiens
  Payload ID: 11160
  Gene Symbol: NKIRAS1
  Gene Name: NFKB inhibitor interacting Ras-like 1
  Uniprot ID: Q9NYS0
  ENST ID: ENST00000614374
  CDS Start-End: 22-600
acagtgatatcctgagagaagatgggaaagggctgcaaggttgtggtttgtggattgttatctgtggggaaaactgcaattttggagcagctcctttatggaaatcatactattggaatggaagattgcgaaacaatggaagatgtatacatggcttcagtagaaacagaccgaggagtaaaagaacagttacatctttatgacaccagaggtctacaggaaggcgtggagctgccaaagcattatttttcatttgctgatggcttcgttcttgtgtacagtgtgaataaccttgaatcctttcaaagagtggagcttctgaagaaagaaatcgataagttcaaagacaaaaaagaggtagcaattgtggtattaggaaacaaaatcgacctttctgagcagagacaagtggacgctgaagtggcacagcagtgggcaaaaagtgagaaagtaagactgtgggaggtgactgttacagatcggaaaactctgattgaaccattcactttattagccagtaaactttctcaaccccagagcaaatcaagctttcctttgcctgggaggaaaaacaaagggaactctaattctgagaactaaaaatcagtaatttccacaattgtatgttgaatagtgattgcctttaagtgtctgtgaacatggagtaatattactatttaaaataggccatttgtatctacctttggtccttaggaaaattcctaaggaagtcaattaatgcactttagatgttaaaagtatttgggctaaggttattattgcctgatatgaaataatatattcttattctcattgtttgaaacctgtctttgaaattagcacctttgttatttatgttgtacttgtgaaaacagtaaaatagtttggatagttatgcaaatgcacctatgtgtaacttccccccaaccccaagctgtttcggaagatatcataatcattctgtgtaacattatgcaaacttctaagcccaaacatgactttgtttttaaaaagttcattaatctaatgtctaggattataaaacatttttttgtgtctaaattggacccaaaacattgaacagtttggggtagtaagctaaatttcatcttgtggagattttgctaaacagactaagacccatgatttagctttgctcaaattagaatgtttagcatgagttgaggtaccaggtagtgttaagtaggttcatcacgctctaaggccgttttttccttagccagacccctgttgatagaccagatacttgagggcaaactgtttgctcctcctcttgaaaatgattaggcacttaaggacagtaaagctgtattttctggaaggaagactgtatcttctggaatagttttctagaaaactagtcatatacaataaaagtatcaaaaatattgggctctaatttgatctgacttagatgtctgagtttgtgttgtttctctaaagattttggcaagactcaagcaatgtggctgactgtaactttattaatttaaaaggtaggaagtaagctacttagtggtttcacctgtgaaataactattttgactgaaatgtaaaataagctattcaacaaagaacatattaaaacatc

SEQ ID NO: 159214 - DNA, 2948 bp, Homo sapiens
  Payload ID: 11161
  Gene Symbol: NKIRAS2
  Gene Name: NFKB inhibitor interacting Ras-like 2
  Uniprot ID: Q9NYR9
  ENST ID: ENST00000307641
  CDS Start-End: 622-1197
cgccgcgccgcttcccccacctcgcaccagacctctgaaattgccctcggagactcggcctctcctataaggacgatcgtcctctcagctggagaacaaggccatgcctcagctcctacgccaggcggaagcgggagaggaaggccgacccccaagagcgccccttcagggggtccatccggccttgatctcagatgggggggtgtttgcggagggcggggcatcgcctcaacagctgggggctgcatcatggcaggaacgagtttccctgagccacggagctgcaggtcgcctcctctactaccctgctacccggttacctcttcgcctcttggtcgtcgagcagctccggctcggtcgccgccattaccacatcgcactccgcggcagccgccatcttaccgccgggaccagagagctgggtgggaggccggcggtgaagagcacttccggttggagcatagagcagctccgcggcgccgcgcccagaagggctccctcgggctcgtctaccagagagaggctccgcttggggccagagcggcctcccgcccccggatgtccacggtggtctccgcgccggggcgggagcccaggggctgtgccggttgaaaactaagcatggggaagagctgcaaggtggtcgtgtgtggccaggcgtctgtgggcaaaacttcaatcctggagcagcttctgtatgggaaccatgtagtgggttcggagatgatcgagacgcaggaggacatctacgtgggctccattgagacagaccggggggtgcgagagcaggtgcgtttctatgacacccgggggctccgagatggggccgaactgccccgacactgcttctcttgcactgatggctacgtcctggtctatagcacagatagcagagagtcttttcagcgtgtggagctgctcaagaaggagattgacaaatccaaggacaagaaggaggtcaccatcgtggtccttggcaacaagtgtgacttacaggagcagcggcgtgtagacccagatgtggctcagcactgggccaagtcagagaaggtgaagctgtgggaggtgtcagtggcggaccggcgctccctcctggagccctttgtctacttggccagcaagatgacgcaaccccagagcaagtctgccttccccctcagccggaagaacaagggcagcggctccttggatggctgaagagctgccgttcctctttcacgatcccagccccatttcagtgtctggggctctggtagatgtgttgagggcaaagtagaggacaagctgtctttcccagtcagccagggagctccccgccaggccacgccccagccactttgctccctctcacctctgggaagtgcaaatactcttggttgacatccccttcctcagccctcccagcctactccccatcccagcttttagaggatctgctccactgtctcctggggcagttgtgggtcactgtcccttccagctgccccagacaggaagcagagtcaccacgcagcagtgtcccttcttgggtctgagttcctattataggtaggggccccaccctctgggcttcccatcagcgacacacacacacttatggcaccagcctggactccagaaaaagggtgtccaggtattgtgtgtatgcatttagttgtgcacacacaaatatgctcctatactggcattaggcgtctcctcatccctcaccctgacctttctcctgtccttttcttggctggaagaagttggcctcctgggagtgtagttttctgttttaaatcccccacccctggctgggctcagtggctcacccctgtaatcccagcactttgggaggccaaggcgggtcgattacttgaggtcaggagttcacgaccagcctggccaacattgtgaaaccccatctctgccaaaaatacaaaagttagccgggcgtagtggcacatgcctgtaatcccagctacccggggaggctgaggcaggagaattgcttgaactcagaaggcggaggctgcagtgagccgagatcgtgccactgcactccagcctggtcaacagagcaagactccatctcgaagaaaaaaaaaaaaaattccccacccctaccaattgttttacttcctcttcctgctcagggagcagatgggcctcactggttgagatggaatagaataactgggctatgagtcaccagcccactttgtgacccagcaagacctttcccctctctgggcatcagtttctcatctgtaagatgaccagagttgcttagatgatctcctagatcctttccagttctcttgatttcgtaaagccaatggcttctccctctttaaggtgctatgccaaccagccctggaggctgggatctgccgctccctccagccaccagggggcaggagtgcactacctgctgtcagtcaccagagtggccgctcagtgcccagcccgccagcctcgctcttggaggctgctctttatcctgcctgtggttttcagctcagagctggacttctatttataagttacctgtatttatatttatatgcccgctctcatggtgaaggctggacaaggtgctcctctggcccctccttcttacctcagatgcctgaacagaacaaggcaaacccgtagcagcctctcaggagctgacaggtcctctttcggggctcaggagggtgggcacacacccagcggcctgcagagtaagcttattacccacaactgtgcccgctttgtgcttctaaggtgcacacctagcctaggtgagacactgcagccaggcaaccaccgacacacgccccttctcaaagccagaggtgagtggggcaggtgcccggggctgggtgagtggaattaggacacacacaggcttgggcttcaagttcatttattgatgcattggttggacacaataaaaccacaattgttatcaaaaagtt

SEQ ID NO: 159215 - DNA, 833 bp, Homo sapiens
  Payload ID: 11161
  Gene Symbol: NKIRAS2
  Gene Name: NFKB inhibitor interacting Ras-like 2
  ENST ID: ENST00000316082
  CDS Start-End: 97-786
tggagcctttgcggcggcgctgcccctcccctggtccccgcgagctcggagggcccggctggtgctgcgggggccccgggaggttgaaaactaagcatggggaagagctgcaaggtggtcgtgtgtggccaggcgtctgtgggcaaaacttcaatcctggagcagcttctgtatgggaaccatgtagtgggttcggagatgatcgagacgcaggaggacatctacgtgggctccattgagacagaccggggggtgcgagagcaggtgcgtttctatgacacccgggggctccgagatggggccgaactgccccgacactgcttctcttgcactgatggctacgtcctggtctatagcacagatagcagagagtcttttcagcgtgtggagctgctcaagaaggagattgacaaatccaaggacaagaaggagggtctcactctgccacccaggctggagtgcagtggcatgatcacagctcactgcagcctcaacctcccaaggcttaggtggtcctcctgcctcagccccctgctaagactacaggtcaccatcgtggtccttggcaacaagtgtgacttacaggagcagcggcgtgtagacccagatgtggctcagcactgggccaagtcagagaaggtgaagctgtgggaggtgtcagtggcggaccggcgctccctcctggagccctttgtctacttggccagcaagatgacgcaaccccagagcaagtctgccttccccctcagccggaagaacaagggcagcggctccttggatggctgaagagctgccgttcctctttcacgatcccagccccatttcagtgtctg

SEQ ID NO: 159216 - DNA, 1644 bp, Homo sapiens
  Payload ID: 11161
  Gene Symbol: NKIRAS2
  Gene Name: NFKB inhibitor interacting Ras-like 2
  Uniprot ID: Q9NYR9
  ENST ID: ENST00000393880
  CDS Start-End: 188-763
agcctacaccgactctggaggaagactggagcctttgcggcggcgctgcccctcccctggtccccgcgagctcggagggcccggctggtgctgcgggggccccgggaggtacggacctgggaggcgaggctcgtccggcgctaggatcggcctccgcctccgggccgctttaggttgaaaactaagcatggggaagagctgcaaggtggtcgtgtgtggccaggcgtctgtgggcaaaacttcaatcctggagcagcttctgtatgggaaccatgtagtgggttcggagatgatcgagacgcaggaggacatctacgtgggctccattgagacagaccggggggtgcgagagcaggtgcgtttctatgacacccgggggctccgagatggggccgaactgccccgacactgcttctcttgcactgatggctacgtcctggtctatagcacagatagcagagagtcttttcagcgtgtggagctgctcaagaaggagattgacaaatccaaggacaagaaggaggtcaccatcgtggtccttggcaacaagtgtgacttacaggagcagcggcgtgtagacccagatgtggctcagcactgggccaagtcagagaaggtgaagctgtgggaggtgtcagtggcggaccggcgctccctcctggagccctttgtctacttggccagcaagatgacgcaaccccagagcaagtctgccttccccctcagccggaagaacaagggcagcggctccttggatggctgaagagctgccgttcctctttcacgatcccagccccatttcagtgtctggggctctggtagatgtgttgagggcaaagtagaggacaagctgtctttcccagtcagccagggagctccccgccaggccacgccccagccactttgctccctctcacctctgggaagtgcaaatactcttggttgacatccccttcctcagccctcccagcctactccccatcccagcttttagaggatctgctccactgtctcctggggcagttgtgggtcactgtcccttccagctgccccagacaggaagcagagtcaccacgcagcagtgtcccttcttgggtctgagttcctattataggtaggggccccaccctctgggcttcccatcagcgacacacacacacttatggcaccagcctggactccagaaaaagggtgtccaggtattgtgtgtatgcatttagttgtgcacacacaaatatgctcctatactggcattaggcgtctcctcatccctcaccctgacctttctcctgtccttttcttggctggaagaagttggcctcctgggagtgtagttttctgttttaaatcccccacccctggctgggctcagtggctcacccctgtaatcccagcactttgggaggccaaggcgggtcgattacttgaggtcaggagttcacgaccagcctggccaacattgtgaaaccccatctctgccaaaaatacaaaagttagccgggcgtagtggcacatgcctgtaatcccagctacccggggaggctgaggcaggagaattgcttgaactcagaaggcggaggctgcagtgagccgagatcgtgccactgcactccagcctggtcaacagagcaagactccatctcg

SEQ ID NO: 159217 - DNA, 1598 bp, Homo sapiens
  Payload ID: 11161
  Gene Symbol: NKIRAS2
  Gene Name: NFKB inhibitor interacting Ras-like 2
  Uniprot ID: Q9NYR9
  ENST ID: ENST00000393881
  CDS Start-End: 142-717
agcctacaccgactctggaggaagactggagcctttgcggcggcgctgcccctcccctggtccccgcgagctcggagggcccggctggtgctgcgggggccccgggagcgtgcttctgttcttcaaggttgaaaactaagcatggggaagagctgcaaggtggtcgtgtgtggccaggcgtctgtgggcaaaacttcaatcctggagcagcttctgtatgggaaccatgtagtgggttcggagatgatcgagacgcaggaggacatctacgtgggctccattgagacagaccggggggtgcgagagcaggtgcgtttctatgacacccgggggctccgagatggggccgaactgccccgacactgcttctcttgcactgatggctacgtcctggtctatagcacagatagcagagagtcttttcagcgtgtggagctgctcaagaaggagattgacaaatccaaggacaagaaggaggtcaccatcgtggtccttggcaacaagtgtgacttacaggagcagcggcgtgtagacccagatgtggctcagcactgggccaagtcagagaaggtgaagctgtgggaggtgtcagtggcggaccggcgctccctcctggagccctttgtctacttggccagcaagatgacgcaaccccagagcaagtctgccttccccctcagccggaagaacaagggcagcggctccttggatggctgaagagctgccgttcctctttcacgatcccagccccatttcagtgtctggggctctggtagatgtgttgagggcaaagtagaggacaagctgtctttcccagtcagccagggagctccccgccaggccacgccccagccactttgctccctctcacctctgggaagtgcaaatactcttggttgacatccccttcctcagccctcccagcctactccccatcccagcttttagaggatctgctccactgtctcctggggcagttgtgggtcactgtcccttccagctgccccagacaggaagcagagtcaccacgcagcagtgtcccttcttgggtctgagttcctattataggtaggggccccaccctctgggcttcccatcagcgacacacacacacttatggcaccagcctggactccagaaaaagggtgtccaggtattgtgtgtatgcatttagttgtgcacacacaaatatgctcctatactggcattaggcgtctcctcatccctcaccctgacctttctcctgtccttttcttggctggaagaagttggcctcctgggagtgtagttttctgttttaaatcccccacccctggctgggctcagtggctcacccctgtaatcccagcactttgggaggccaaggcgggtcgattacttgaggtcaggagttcacgaccagcctggccaacattgtgaaaccccatctctgccaaaaatacaaaagttagccgggcgtagtggcacatgcctgtaatcccagctacccggggaggctgaggcaggagaattgcttgaactcagaaggcggaggctgcagtgagccgagatcgtgccactgcactccagcctggtcaacagagcaagactccatctcg

SEQ ID NO: 159218 - DNA, 1909 bp, Homo sapiens
  Payload ID: 11161
  Gene Symbol: NKIRAS2
  Gene Name: NFKB inhibitor interacting Ras-like 2
  Uniprot ID: Q9NYR9
  ENST ID: ENST00000393885
  CDS Start-End: 169-744
gacggaagctggggagcgggcaggcggcgggggcggggcctggaggagcctacaccgactctggaggaagactggagcctttgcggcggcgctgcccctcccctggtccccgcgagctcggagggcccggctggtgctgcgggggccccgggaggttgaaaactaagcatggggaagagctgcaaggtggtcgtgtgtggccaggcgtctgtgggcaaaacttcaatcctggagcagcttctgtatgggaaccatgtagtgggttcggagatgatcgagacgcaggaggacatctacgtgggctccattgagacagaccggggggtgcgagagcaggtgcgtttctatgacacccgggggctccgagatggggccgaactgccccgacactgcttctcttgcactgatggctacgtcctggtctatagcacagatagcagagagtcttttcagcgtgtggagctgctcaagaaggagattgacaaatccaaggacaagaaggaggtcaccatcgtggtccttggcaacaagtgtgacttacaggagcagcggcgtgtagacccagatgtggctcagcactgggccaagtcagagaaggtgaagctgtgggaggtgtcagtggcggaccggcgctccctcctggagccctttgtctacttggccagcaagatgacgcaaccccagagcaagtctgccttccccctcagccggaagaacaagggcagcggctccttggatggctgaagagctgccgttcctctttcacgatcccagccccatttcagtgtctggggctctggtagatgtgttgagggcaaagtagaggacaagctgtctttcccagtcagccagggagctccccgccaggccacgccccagccactttgctccctctcacctctgggaagtgcaaatactcttggttgacatccccttcctcagccctcccagcctactccccatcccagcttttagaggatctgctccactgtctcctggggcagttgtgggtcactgtcccttccagctgccccagacaggaagcagagtcaccacgcagcagtgtcccttcttgggtctgagttcctattataggtaggggccccaccctctgggcttcccatcagcgacacacacacacttatggcaccagcctggactccagaaaaagggtgtccaggtattgtgtgtatgcatttagttgtgcacacacaaatatgctcctatactggcattaggcgtctcctcatccctcaccctgacctttctcctgtccttttcttggctggaagaagttggcctcctgggagtgtagttttctgttttaaatcccccacccctggctgggctcagtggctcacccctgtaatcccagcactttgggaggccaaggcgggtcgattacttgaggtcaggagttcacgaccagcctggccaacattgtgaaaccccatctctgccaaaaatacaaaagttagccgggcgtagtggcacatgcctgtaatcccagctacccggggaggctgaggcaggagaattgcttgaactcagaaggcggaggctgcagtgagccgagatcgtgccactgcactccagcctggtcaacagagcaagactccatctcgaagaaaaaaaaaaaaaattccccacccctaccaattgttttacttcctcttcctgctcagggagcagatgggcctcactggttgagatggaatagaataactgggctatgagtcaccagcccactttgtgacccagcaagacctttcccctctctgggcatcagtttctcatctgtaagatgaccagagttgcttagatgatctcctagatcctttccagttctcttgatttcgtaaagccaatggcttctccctctttaaggtgctatgccaaccagccctgg

SEQ ID NO: 159219 - DNA, 1461 bp, Homo sapiens
  Payload ID: 11161
  Gene Symbol: NKIRAS2
  Gene Name: NFKB inhibitor interacting Ras-like 2
  Uniprot ID: Q9NYR9
  ENST ID: ENST00000449471
  CDS Start-End: 114-521
cgactctggaggaagactggagcctttgcggcggcgctgcccctcccctggtccccgcgagctcggagggcccggctggtgctgcgggggccccgggaggttgaaaactaagcatggggaagagctgcaaggtggtcgtgtgtggccaggcgtctgtgggcaaaacttcaatcctggagcagcttctgtatgggaaccatgtagtgggttcggagatgatcgagacgcaggaggacatctacgtgggctccattgagacagaccggggggtgcgagagcaggtcaccatcgtggtccttggcaacaagtgtgacttacaggagcagcggcgtgtagacccagatgtggctcagcactgggccaagtcagagaaggtgaagctgtgggaggtgtcagtggcggaccggcgctccctcctggagccctttgtctacttggccagcaagatgacgcaaccccagagcaagtctgccttccccctcagccggaagaacaagggcagcggctccttggatggctgaagagctgccgttcctctttcacgatcccagccccatttcagtgtctggggctctggtagatgtgttgagggcaaagtagaggacaagctgtctttcccagtcagccagggagctccccgccaggccacgccccagccactttgctccctctcacctctgggaagtgcaaatactcttggttgacatccccttcctcagccctcccagcctactccccatcccagcttttagaggatctgctccactgtctcctggggcagttgtgggtcactgtcccttccagctgccccagacaggaagcagagtcaccacgcagcagtgtcccttcttgggtctgagttcctattataggtaggggccccaccctctgggcttcccatcagcgacacacacacacttatggcaccagcctggactccagaaaaagggtgtccaggtattgtgtgtatgcatttagttgtgcacacacaaatatgctcctatactggcattaggcgtctcctcatccctcaccctgacctttctcctgtccttttcttggctggaagaagttggcctcctgggagtgtagttttctgttttaaatcccccacccctggctgggctcagtggctcacccctgtaatcccagcactttgggaggccaaggcgggtcgattacttgaggtcaggagttcacgaccagcctggccaacattgtgaaaccccatctctgccaaaaatacaaaagttagccgggcgtagtggcacatgcctgtaatcccagctacccggggaggctgaggcaggagaattgcttgaactcagaaggcggaggctgcagtgagccgagatcgtgccactgcactccagcctggtcaacagagcaagactccatctcgaagaaaaaaaaaaaaaattccccacccctaccaattgttttacttcctcttcctgctca

SEQ ID NO: 159220 - DNA, 585 bp, Homo sapiens
  Payload ID: 11161
  Gene Symbol: NKIRAS2
  Gene Name: NFKB inhibitor interacting Ras-like 2
  ENST ID: ENST00000462043
  CDS Start-End: 119-244
tacaccgactctggaggaagactggagcctttgcggcggcgctgcccctcccctggtccccgcgagctcggagggcccggctggtgctgcgggggccccgggaggttgaaaactaagcatggggaagagctgcaaggtggtcgtgtgtggccaggcgtctgtgggcaaaacttcaatcctggagcagcttctgtatgggaaccatgtagtgggtcaccatcgtggtccttggcaacaagtgtgacttacaggagcagcggcgtgtagacccagatgtggctcagcactgggccaagtcagagaaggtgaagctgtgggaggtgtcagtggcggaccggcgctccctcctggagccctttgtctacttggccagcaagatgacgcaaccccagagcaagtctgccttccccctcagccggaagaacaagggcagcggctccttggatggctgaagagctgccgttcctctttcacgatcccagccccatttcagtgtctggggctctggtagatgtgttgagggcaaagtagaggacaagctgtctttcccagtcagccagggagctccccgccaggccacgcccc

SEQ ID NO: 159221 - DNA, 1041 bp, Homo sapiens
  Payload ID: 11161
  Gene Symbol: NKIRAS2
  Gene Name: NFKB inhibitor interacting Ras-like 2
  ENST ID: ENST00000491638
  CDS Start-End: 116-244
accgactctggaggaagactggagcctttgcggcggcgctgcccctcccctggtccccgcgagctcggagggcccggctggtgctgcgggggccccgggaggttgaaaactaagcatggggaagagctgcaaggtggtcgtgtgtggccaggcgtctgtgggcaaaacttcaatcctggagcagcttctgtatgggaaccatgtagtggacagttttctcattttataccaggttcggagatgatcgagacgcaggaggacatctacgtgggctccattgagacagaccggggggtgcgagagcaggtgcgtttctatgacacccgggggctccgagatggggccgaactgccccgacactgcttctcttgcactgatggctacgtcctggtctatagcacagatagcagagagtcttttcagcgtgtggagctgctcaagaaggagattgacaaatccaaggacaagaaggaggtcaccatcgtggtccttggcaacaagtgtgacttacaggagcagcggcgtgtagacccagatgtggctcagcactgggccaagtcagagaaggtgaagctgtgggaggtgtcagtggcggaccggcgctccctcctggagccctttgtctacttggccagcaagatgacgcaaccccagagcaagtctgccttccccctcagccggaagaacaagggcagcggctccttggatggctgaagagctgccgttcctctttcacgatcccagccccatttcagtgtctggggctctggtagatgtgttgagggcaaagtagaggacaagctgtctttcccagtcagccagggagctccccgccaggccacgccccagccactttgctccctctcacctctgggaagtgcaaatactcttggttgacatccccttcctcagccctcccagcctactccccatcccagcttttagaggatctgctccactgtctcctggggcagttgtgggtcactgtcccttccagctgccccagacaggaagcagagtcaccacgcagcagtgtccctt

SEQ ID NO: 159222 - DNA, 992 bp, Homo sapiens
  Payload ID: 11161
  Gene Symbol: NKIRAS2
  Gene Name: NFKB inhibitor interacting Ras-like 2
  Uniprot ID: Q9NYR9
  ENST ID: ENST00000479407
  CDS Start-End: 142-435
cgggggcggggcctggaggagcctacaccgactctggaggaagactggagcctttgcggcggcgctgcccctcccctggtccccgcgagctcggagggcccggctggtgctgcgggggccccgggaggttgaaaactaagcatggggaagagctgcaaggtggtcgtgtgtggccaggcgtctgtgggcaaaacttcaatcctggagcagcttctgtatgggaaccatgtagtgggttcggagatgatcgagacgcaggaggacatctacgtgggctccattgagacagaccggggggtgcgagagcagatagcagagagtcttttcagcgtgtggagctgctcaagaaggagattgacaaatccaaggacaagaaggaggtcaccatcgtggtccttggcaacaagtgtgacttacaggagcagcggcgtgtagacccagatgtggctcagcactgggccaagtcagagaaggtgaagctgtgggaggtgtcagtggcggaccggcgctccctcctggagccctttgtctacttggccagcaagatgacgcaaccccagagcaagtctgccttccccctcagccggaagaacaagggcagcggctccttggatggctgaagagctgccgttcctctttcacgatcccagccccatttcagtgtctggggctctggtagatgtgttgagggcaaagtagaggacaagctgtctttcccagtcagccagggagctccccgccaggccacgccccagccactttgctccctctcacctctgggaagtgcaaatactcttggttgacatccccttcctcagccctcccagcctactccccatcccagcttttagaggatctgctccactgtctcctggggcagttgtgggtcactgtcccttccagctgccccagacaggaagcagagtcaccacgcagcagtgtcccttcttgggtctgagttcctattataggtaggggccccaccctctggg

SEQ ID NO: 159223 - DNA, 997 bp, Homo sapiens
  Payload ID: 11161
  Gene Symbol: NKIRAS2
  Gene Name: NFKB inhibitor interacting Ras-like 2
  ENST ID: ENST00000485789
  CDS Start-End: 142-318
cgggggcggggcctggaggagcctacaccgactctggaggaagactggagcctttgcggcggcgctgcccctcccctggtccccgcgagctcggagggcccggctggtgctgcgggggccccgggaggttgaaaactaagcatggggaagagctgcaaggtggtcgtgtgtggccaggcgtctgtgggcaaaacttcaatcctggagcagcttctgtatgggaaccatgtagtgggttcggagatgatcgagacgcaggaggacatctacgtgggctccattgagacagaccggggggtgcgagagcagcacagatagcagagagtcttttcagcgtgtggagctgctcaagaaggagattgacaaatccaaggacaagaaggaggtcaccatcgtggtccttggcaacaagtgtgacttacaggagcagcggcgtgtagacccagatgtggctcagcactgggccaagtcagagaaggtgaagctgtgggaggtgtcagtggcggaccggcgctccctcctggagccctttgtctacttggccagcaagatgacgcaaccccagagcaagtctgccttccccctcagccggaagaacaagggcagcggctccttggatggctgaagagctgccgttcctctttcacgatcccagccccatttcagtgtctggggctctggtagatgtgttgagggcaaagtagaggacaagctgtctttcccagtcagccagggagctccccgccaggccacgccccagccactttgctccctctcacctctgggaagtgcaaatactcttggttgacatccccttcctcagccctcccagcctactccccatcccagcttttagaggatctgctccactgtctcctggggcagttgtgggtcactgtcccttccagctgccccagacaggaagcagagtcaccacgcagcagtgtcccttcttgggtctgagttcctattataggtaggggccccaccctctggg

SEQ ID NO: 159224 - DNA, 564 bp, Homo sapiens
  Payload ID: 11161
  Gene Symbol: NKIRAS2
  Gene Name: NFKB inhibitor interacting Ras-like 2
  ENST ID: ENST00000585955
  CDS Start-End: 425-564
acttggccctatattttctcaaaattcttgtttctctggcactagttaacatgtggatctgaactaaagcactaagagagaacctttctctgtactctacctttgctccagttatgattatctactttgccatctgttagtatcagggttcaattaatttgccggtattgagaattctgtattcctaggtttatcccttccttaacttatttctcctcccatctcccatttcttcacatctgactacacttagtgcacagcaaaaggaaaatagtgtttctcactgatttgggttccaggtcaaagataaattcccactcagtttggaggcttactgaaatgtctaggtgcttgctctgaaacttcaagaggaagattagaaggacacattcctaagaatttaaaaccaggttgaaaactaagcatggggaagagctgcaaggtggtcgtgtgtggccaggcgtctgtgggcaaaacttcaatcctggagcagcttctgtatgggaaccatgtagtgggttcggagatgatcgagacgcaggaggacatctacgtgggctccat

SEQ ID NO: 159225 - DNA, 563 bp, Homo sapiens
  Payload ID: 11161
  Gene Symbol: NKIRAS2
  Gene Name: NFKB inhibitor interacting Ras-like 2
  ENST ID: ENST00000587337
  CDS Start-End: 142-563
aggcggcgggggcggggcctggaggagcctacaccgactctggaggaagactggagcctttgcggcggcgctgcccctcccctggtccccgcgagctcggagggcccggctggtgctgcgggggccccgggaggttcggagatgatcgagacgcaggaggacatctacgtgggctccattgagacagaccggggggtgcgagagcaggtgcgtttctatgacacccgggggctccgagatggggccgaactgccccgacactgcttctcttgcactgatggctacgtcctggtctatagcacagatagcagagagtcttttcagcgtgtggagctgctcaagaaggagattgacaaatccaaggacaagaaggaggtcaccatcgtggtccttggcaacaagtgtgacttacaggagcagcggcgtgtagacccagatgtggctcagcactgggccaagtcagagaaggtgaagctgtgggaggtgtcagtggcggaccggcgctccctcctggagccctttgtctacttggccagcaagatgacgcaaccccagagcaagtc

SEQ ID NO: 159226 - DNA, 3269 bp, Homo sapiens
  Payload ID: 11162
  Gene Symbol: NKRF
  Gene Name: NFKB repressing factor
  Uniprot ID: O15226
  ENST ID: ENST00000304449
  CDS Start-End: 182-2254
cgagccagtgctggagcagtggcgctatagccacgaaagtgactggcagtgggctctgcggcgcagcttcatctgtcggcacctgcacagctatcccggggctgccctcgaccagctcctcgcgctctccgccgcctggaccaaccacgtcttcctgggctgcaggtacagcccacgcttgatggaaaaaattctccaaatggctgaaggtattgatattggggagatgccttcatatgatctggtgctgtccaaaccttccaaaggtcaaaaacgccacctctcaacatgtgatggtcaaaatcctcctaaaaagcaagccggttccaaattccatgcgagacctcgttttgagcctgtacattttgtagctagtagttcaaaagatgaaagacaggaagatccttatggccctcaaacaaaagaggtaaatgaacaaacacattttgccagcatgccaagagacatctaccaagattatactcaagactctttcagtatacaagatgggaattctcagtattgtgattcatcaggattcattctcacaaaagaccagcctgtaacagccaacatgtattttgacagtgggaaccctgccccaagcaccacatcacagcaggcaaactctcagtcaactcctgagccttcaccatcacagacatttcccgagtctgtggtagccgagaagcagtattttattgaaaaattaacggcgacaatctggaagaacctttctaatccagaaatgacttctggatctgataaaattaattatacatatatgttaactcgttgtattcaggcgtgtaagacaaatcctgagtatatatatgctcctttaaaggaaattcctcctgccgacatccccaaaaataaaaaacttctaactgatggctatgcttgtgaagttagatgccaaaatatctacttaactacaggttatgctggcagcaagaatgggtccagggatcgagctacagagctagctgtaaaactcttgcagaaacgtattgaagttagagttgtccggcggaaattcaagcatacatttggagaggacctcgtggtgtgtcagattggcatgtcctcctatgaatttcctccagctctgaagccaccagaagacctggtggtgctgggtaaagatgcttccgggcagccaatttttaatgcttctgccaaacactggaccaattttgtcattacagaaaatgcaaatgatgcaattggtatccttaacaattctgcctcattcaacaagatgtcaattgaatacaaatatgagatgatgccaaatcgcacatggcgttgtcgagtgtttttacaagatcactgcttagctgaaggttatggaaccaagaaaacaagtaaacatgcagctgccgacgaggctttgaaaattcttcaaaaaacacagcccacttatccatctgtcaaaagttcacaatgccatacaggctcttcacccagaggatctggaaagaagaaagatataaaggatcttgtagtttatgagaattcttcaaatcccgtgtgcacgctgaacgacacagctcagtttaaccgaatgacagttgagtatgtctatgaaaggatgacaggcctccgctggaaatgcaaagtgattctagagagtgaagtaattgcagaagcagttggggtgaagaaaactgtcaaatatgaagctgctggggaagctgtgaaaaccctcaaaaagacccagccaactgtcattaacaacttgaagaaaggagctgttgaagatgtgatttcaagaaatgaaattcagggccgctcagcagaggaggcttacaaacagcaaatcaaagaagataatattggaaatcagctgctgagaaagatgggttggactggtggtggtttaggtaaatctggtgagggcatacgggagcctatctcagtgaaagagcagcataagcgggaagggcttggtctggatgtagagagggtgaataaaattgccaagagagatattgaacagatcatcagaaactacgcccgctccgagagccacacagatttgactttctctagagagctgactaatgatgaacggaagcaaatacatcagattgcccagaagtatggtcttaagagtaagtctcatggggtgggccatgataggtacctagtggtaggtagaaaaagacggaaggaagacctactagatcagctcaaacaggaaggccaagtgggccattacgagcttgttatgcctcaagcaaattgagatcttactaatttattttgtaaatgcctaatgaggcagatttttgaattaaagaaatgctacatgttccggttgcagagtatattcataagatgtctcaccttgttcatttcacatagtggtttattagatattggaacctaaagaattctgtccacttgtattagcttaatccagcagatgatattgtgcagttactgtttgtgtctttgatattgctgtgtccctcagattttagtagtttgacaagcaagaacacatatccaaatggaattttaccctgagaaattatcattttaaagggcatagcacagcaatctgcaacaatatgtaaagttgatattgactacaataaaaatccagtcttaattccagatttactgaaaatgtcagatcattttgtattaatctattttcatctttgtgtgaagccagttatagaatgtttgacaataaattgtgctgtacacgtaaatgtccttaccaactaaatgatgtaaaactttcttaaagtaattttagtgttcatttatttataacttctaccatgtgatttccagactattggaagtgatttactgtatcttgtgatatatgggttttaacaaattctagtcttcacgctgagagagcactacttgagagagcagttgaaagtttcaaaaactttggttcaatctgaagaaaggaagcttgaactgtttgttcttggtgccttgcagagagactcacagcaactctccattatagctttcacacggtttggatgtgcagcacatccaaggcaaccacagctgtggtagagcttggtaaaagactgaagatacattggtgctttgatgaaaaggtcagttggctggtccctctctcaaaaagcttattaagcctgaaaagccaactttgtaacatatttaaaactgctattttcgcttatttctggaatgtaaaaaaaaaaaatgtataaaaagaattagtgtatgcttcctgaataaaaaggagccaaagttgatcagaa

SEQ ID NO: 159227 - DNA, 3741 bp, Homo sapiens
  Payload ID: 11162
  Gene Symbol: NKRF
  Gene Name: NFKB repressing factor
  Uniprot ID: O15226
  ENST ID: ENST00000371527
  CDS Start-End: 654-2726
cagaataatgacatggttccttccatcctccaaaggtgaccaataatagtttgtaagtatcattatgaactaatgaattttcaacatatttgatatatttcaatccattgccatcattgttcttatcgatatttgagttggctcactttgccagtaagagtctattcaaattggcttctgagtccatttgacacaacacctttgatctttgacagtttccttggttttaggtgctagatgatttctcaggctcaccttagacatttcctgccacagacttagaatcagccatttctctaaggaccctgattccatttcatgagaaatgatagagaccacaatcaaaacaagtcatgaatttatactgatattttcaattcaaattaaagatgaggtttttgctaaatttttttgagtttatatttgtatgtcttatgctgaaaaatcttgtttcctaattagtaacataattattcatttgatgggtaaatattttagggccgattctttggttttatagccaagataccctgttgataaagtcttgtgggagcaattataagactggcttattttgaagctttttaaaaaagacatccttacctgttttaactgtagattatattaacttaaataggtacagcccacgcttgatggaaaaaattctccaaatggctgaaggtattgatattggggagatgccttcatatgatctggtgctgtccaaaccttccaaaggtcaaaaacgccacctctcaacatgtgatggtcaaaatcctcctaaaaagcaagccggttccaaattccatgcgagacctcgttttgagcctgtacattttgtagctagtagttcaaaagatgaaagacaggaagatccttatggccctcaaacaaaagaggtaaatgaacaaacacattttgccagcatgccaagagacatctaccaagattatactcaagactctttcagtatacaagatgggaattctcagtattgtgattcatcaggattcattctcacaaaagaccagcctgtaacagccaacatgtattttgacagtgggaaccctgccccaagcaccacatcacagcaggcaaactctcagtcaactcctgagccttcaccatcacagacatttcccgagtctgtggtagccgagaagcagtattttattgaaaaattaacggcgacaatctggaagaacctttctaatccagaaatgacttctggatctgataaaattaattatacatatatgttaactcgttgtattcaggcgtgtaagacaaatcctgagtatatatatgctcctttaaaggaaattcctcctgccgacatccccaaaaataaaaaacttctaactgatggctatgcttgtgaagttagatgccaaaatatctacttaactacaggttatgctggcagcaagaatgggtccagggatcgagctacagagctagctgtaaaactcttgcagaaacgtattgaagttagagttgtccggcggaaattcaagcatacatttggagaggacctcgtggtgtgtcagattggcatgtcctcctatgaatttcctccagctctgaagccaccagaagacctggtggtgctgggtaaagatgcttccgggcagccaatttttaatgcttctgccaaacactggaccaattttgtcattacagaaaatgcaaatgatgcaattggtatccttaacaattctgcctcattcaacaagatgtcaattgaatacaaatatgagatgatgccaaatcgcacatggcgttgtcgagtgtttttacaagatcactgcttagctgaaggttatggaaccaagaaaacaagtaaacatgcagctgccgacgaggctttgaaaattcttcaaaaaacacagcccacttatccatctgtcaaaagttcacaatgccatacaggctcttcacccagaggatctggaaagaagaaagatataaaggatcttgtagtttatgagaattcttcaaatcccgtgtgcacgctgaacgacacagctcagtttaaccgaatgacagttgagtatgtctatgaaaggatgacaggcctccgctggaaatgcaaagtgattctagagagtgaagtaattgcagaagcagttggggtgaagaaaactgtcaaatatgaagctgctggggaagctgtgaaaaccctcaaaaagacccagccaactgtcattaacaacttgaagaaaggagctgttgaagatgtgatttcaagaaatgaaattcagggccgctcagcagaggaggcttacaaacagcaaatcaaagaagataatattggaaatcagctgctgagaaagatgggttggactggtggtggtttaggtaaatctggtgagggcatacgggagcctatctcagtgaaagagcagcataagcgggaagggcttggtctggatgtagagagggtgaataaaattgccaagagagatattgaacagatcatcagaaactacgcccgctccgagagccacacagatttgactttctctagagagctgactaatgatgaacggaagcaaatacatcagattgcccagaagtatggtcttaagagtaagtctcatggggtgggccatgataggtacctagtggtaggtagaaaaagacggaaggaagacctactagatcagctcaaacaggaaggccaagtgggccattacgagcttgttatgcctcaagcaaattgagatcttactaatttattttgtaaatgcctaatgaggcagatttttgaattaaagaaatgctacatgttccggttgcagagtatattcataagatgtctcaccttgttcatttcacatagtggtttattagatattggaacctaaagaattctgtccacttgtattagcttaatccagcagatgatattgtgcagttactgtttgtgtctttgatattgctgtgtccctcagattttagtagtttgacaagcaagaacacatatccaaatggaattttaccctgagaaattatcattttaaagggcatagcacagcaatctgcaacaatatgtaaagttgatattgactacaataaaaatccagtcttaattccagatttactgaaaatgtcagatcattttgtattaatctattttcatctttgtgtgaagccagttatagaatgtttgacaataaattgtgctgtacacgtaaatgtccttaccaactaaatgatgtaaaactttcttaaagtaattttagtgttcatttatttataacttctaccatgtgatttccagactattggaagtgatttactgtatcttgtgatatatgggttttaacaaattctagtcttcacgctgagagagcactacttgagagagcagttgaaagtttcaaaaactttggttcaatctgaagaaaggaagcttgaactgtttgttcttggtgccttgcagagagactcacagcaactctccattatagctttcacacggtttggatgtgcagcacatccaaggcaaccacagctgtggtagagcttggtaaaagactgaagatacattggtgctttgatgaaaaggtcagttggctggtccctctctcaaaaagcttattaagcctgaaaagccaactttgtaacatatttaaaactgctattttcgcttatttctggaatgtaaaaaaaaaaaatgtataaaaagaattagtgtatgcttcctgaataaaaaggagccaaagttgatcagaa

SEQ ID NO: 159228 - DNA, 3351 bp, Homo sapiens
  Payload ID: 11162
  Gene Symbol: NKRF
  Gene Name: NFKB repressing factor
  Uniprot ID: O15226
  ENST ID: ENST00000542113
  CDS Start-End: 223-2340
ggagcagtggcgctatagccacgaaagtgactggcagtgggctctgcggcgcagcttcatctgtcggcacctgcacagctatcccggggctgccctcgaccagctcctcgcgctctccgccgcctggaccaaccacgtcttcctgggctgcagcttccatatagaagaaagggaagggccaatgaagactcttggaagctagggaccaagtgcagtctttagatgggctttatgttacctctcatcttcaggtacagcccacgcttgatggaaaaaattctccaaatggctgaaggtattgatattggggagatgccttcatatgatctggtgctgtccaaaccttccaaaggtcaaaaacgccacctctcaacatgtgatggtcaaaatcctcctaaaaagcaagccggttccaaattccatgcgagacctcgttttgagcctgtacattttgtagctagtagttcaaaagatgaaagacaggaagatccttatggccctcaaacaaaagaggtaaatgaacaaacacattttgccagcatgccaagagacatctaccaagattatactcaagactctttcagtatacaagatgggaattctcagtattgtgattcatcaggattcattctcacaaaagaccagcctgtaacagccaacatgtattttgacagtgggaaccctgccccaagcaccacatcacagcaggcaaactctcagtcaactcctgagccttcaccatcacagacatttcccgagtctgtggtagccgagaagcagtattttattgaaaaattaacggcgacaatctggaagaacctttctaatccagaaatgacttctggatctgataaaattaattatacatatatgttaactcgttgtattcaggcgtgtaagacaaatcctgagtatatatatgctcctttaaaggaaattcctcctgccgacatccccaaaaataaaaaacttctaactgatggctatgcttgtgaagttagatgccaaaatatctacttaactacaggttatgctggcagcaagaatgggtccagggatcgagctacagagctagctgtaaaactcttgcagaaacgtattgaagttagagttgtccggcggaaattcaagcatacatttggagaggacctcgtggtgtgtcagattggcatgtcctcctatgaatttcctccagctctgaagccaccagaagacctggtggtgctgggtaaagatgcttccgggcagccaatttttaatgcttctgccaaacactggaccaattttgtcattacagaaaatgcaaatgatgcaattggtatccttaacaattctgcctcattcaacaagatgtcaattgaatacaaatatgagatgatgccaaatcgcacatggcgttgtcgagtgtttttacaagatcactgcttagctgaaggttatggaaccaagaaaacaagtaaacatgcagctgccgacgaggctttgaaaattcttcaaaaaacacagcccacttatccatctgtcaaaagttcacaatgccatacaggctcttcacccagaggatctggaaagaagaaagatataaaggatcttgtagtttatgagaattcttcaaatcccgtgtgcacgctgaacgacacagctcagtttaaccgaatgacagttgagtatgtctatgaaaggatgacaggcctccgctggaaatgcaaagtgattctagagagtgaagtaattgcagaagcagttggggtgaagaaaactgtcaaatatgaagctgctggggaagctgtgaaaaccctcaaaaagacccagccaactgtcattaacaacttgaagaaaggagctgttgaagatgtgatttcaagaaatgaaattcagggccgctcagcagaggaggcttacaaacagcaaatcaaagaagataatattggaaatcagctgctgagaaagatgggttggactggtggtggtttaggtaaatctggtgagggcatacgggagcctatctcagtgaaagagcagcataagcgggaagggcttggtctggatgtagagagggtgaataaaattgccaagagagatattgaacagatcatcagaaactacgcccgctccgagagccacacagatttgactttctctagagagctgactaatgatgaacggaagcaaatacatcagattgcccagaagtatggtcttaagagtaagtctcatggggtgggccatgataggtacctagtggtaggtagaaaaagacggaaggaagacctactagatcagctcaaacaggaaggccaagtgggccattacgagcttgttatgcctcaagcaaattgagatcttactaatttattttgtaaatgcctaatgaggcagatttttgaattaaagaaatgctacatgttccggttgcagagtatattcataagatgtctcaccttgttcatttcacatagtggtttattagatattggaacctaaagaattctgtccacttgtattagcttaatccagcagatgatattgtgcagttactgtttgtgtctttgatattgctgtgtccctcagattttagtagtttgacaagcaagaacacatatccaaatggaattttaccctgagaaattatcattttaaagggcatagcacagcaatctgcaacaatatgtaaagttgatattgactacaataaaaatccagtcttaattccagatttactgaaaatgtcagatcattttgtattaatctattttcatctttgtgtgaagccagttatagaatgtttgacaataaattgtgctgtacacgtaaatgtccttaccaactaaatgatgtaaaactttcttaaagtaattttagtgttcatttatttataacttctaccatgtgatttccagactattggaagtgatttactgtatcttgtgatatatgggttttaacaaattctagtcttcacgctgagagagcactacttgagagagcagttgaaagtttcaaaaactttggttcaatctgaagaaaggaagcttgaactgtttgttcttggtgccttgcagagagactcacagcaactctccattatagctttcacacggtttggatgtgcagcacatccaaggcaaccacagctgtggtagagcttggtaaaagactgaagatacattggtgctttgatgaaaaggtcagttggctggtccctctctcaaaaagcttattaagcctgaaaagccaactttgtaacatatttaaaactgctattttcgcttatttctggaatgtaaaaaaaaaaaatgtataaaaagaattagtgtatgcttcctgaataaaaaggagccaaagttgatc

SEQ ID NO: 159229 - DNA, 3735 bp, Homo sapiens
  Payload ID: 11162
  Gene Symbol: NKRF
  Gene Name: NFKB repressing factor
  ENST ID: ENST00000617452
  CDS Start-End: 654-1817
cagaataatgacatggttccttccatcctccaaaggtgaccaataatagtttgtaagtatcattatgaactaatgaattttcaacatatttgatatatttcaatccattgccatcattgttcttatcgatatttgagttggctcactttgccagtaagagtctattcaaattggcttctgagtccatttgacacaacacctttgatctttgacagtttccttggttttaggtgctagatgatttctcaggctcaccttagacatttcctgccacagacttagaatcagccatttctctaaggaccctgattccatttcatgagaaatgatagagaccacaatcaaaacaagtcatgaatttatactgatattttcaattcaaattaaagatgaggtttttgctaaatttttttgagtttatatttgtatgtcttatgctgaaaaatcttgtttcctaattagtaacataattattcatttgatgggtaaatattttagggccgattctttggttttatagccaagataccctgttgataaagtcttgtgggagcaattataagactggcttattttgaagctttttaaaaaagacatccttacctgttttaactgtagattatattaacttaaataggtacagcccacgcttgatggaaaaaattctccaaatggctgaaggtattgatattggggagatgccttcatatgatctggtgctgtccaaaccttccaaaggtcaaaaacgccacctctcaacatgtgatggtcaaaatcctcctaaaaagcaagccggttccaaattccatgcgagacctcgttttgagcctgtacattttgtagctagtagttcaaaagatgaaagacaggaagatccttatggccctcaaacaaaagaggtaaatgaacaaacacattttgccagcatgccaagagacatctaccaagattatactcaagactctttcagtatacaagatgggaattctcagtattgtgattcatcaggattcattctcacaaaagaccagcctgtaacagccaacatgtattttgacagtgggaaccctgccccaagcaccacatcacagcaggcaaactctcagtcaactcctgagccttcaccatcacagacatttcccgagtctgtggtagccgagaagcagtattttattgaaaaattaacggcgacaatctggaagaacctttctaatccagaaatgacttctggatctgataaaattaattatacatatatgttaactcgttgtattcaggcgtgtaagacaaatcctgagtatatatatgctcctttaaaggaaattcctcctgccgacatccccaaaaataaaaaacttctaactgatggctatgcttgtgaagttagatgccaaaatatctacttaactacaggttatgctggcagcaagaatgggtccagggatcgagctacagagctagctgtaaaactcttgcagaaacgtattgaagttagagttgtccggcggaaattcaagcatacatttggagaggacctcgtggtgtgtcagattggcatgtcctcctatgaatttcctccagctctgaagccaccagaagacctggtggtgctgggtaaagatgcttccgggcagccaatttttaatgcttctgccaaacactggaccaattttgtcattacagaaaatgcaaatgatgcaattggtatccttaacaattctgcctcattcaacaagatgtcaattgaatacaaatatgagatgatgccaaatcgcacatggcgttcgagtgtttttacaagatcactgcttagctgaaggttatggaaccaagaaaacaagtaaacatgcagctgccgacgaggctttgaaaattcttcaaaaaacacagcccacttatccatctgtcaaaagttcacaatgccatacaggctcttcacccagaggatctggaaagaagaaagatataaaggatcttgtagtttatgagaattcttcaaatcccgtgtgcacgctgaacgacacagctcagtttaaccgaatgacagttgagtatgtctatgaaaggatgacaggcctccgctggaaatgcaaagtgattctagagagtgaagtaattgcagaagcagttggggtgaagaaaactgtcaaatatgaagctgctggggaagctgtgaaaaccctcaaaaagacccagccaactgtcattaacaacttgaagaaaggagctgttgaagatgtgatttcaagaaatgaaattcagggccgctcagcagaggaggcttacaaacagcaaatcaaagaagataatattggaaatcagctgctgagaaagatgggttggactggtggtggtttaggtaaatctggtgagggcatacgggagcctatctcagtgaaagagcagcataagcgggaagggcttggtctggatgtagagagggtgaataaaattgccaagagagatattgaacagatcatcagaaactacgcccgctccgagagccacacagatttgactttctctagagagctgactaatgatgaacggaagcaaatacatcagattgcccagaagtatggtcttaagagtaagtctcatggggtgggccatgataggtacctagtggtaggtagaaaaagacggaaggaagacctactagatcagctcaaacaggaaggccaagtgggccattacgagcttgttatgcctcaagcaaattgagatcttactaatttattttgtaaatgcctaatgaggcagatttttgaattaaagaaatgctacatgttccggttgcagagtatattcataagatgtctcaccttgttcatttcacatagtggtttattagatattggaacctaaagaattctgtccacttgtattagcttaatccagcagatgatattgtgcagttactgtttgtgtctttgatattgctgtgtccctcagattttagtagtttgacaagcaagaacacatatccaaatggaattttaccctgagaaattatcattttaaagggcatagcacagcaatctgcaacaatatgtaaagttgatattgactacaataaaaatccagtcttaattccagatttactgaaaatgtcagatcattttgtattaatctattttcatctttgtgtgaagccagttatagaatgtttgacaataaattgtgctgtacacgtaaatgtccttaccaactaaatgatgtaaaactttcttaaagtaattttagtgttcatttatttataacttctaccatgtgatttccagactattggaagtgatttactgtatcttgtgatatatgggttttaacaaattctagtcttcacgctgagagagcactacttgagagagcagttgaaagtttcaaaaactttggttcaatctgaagaaaggaagcttgaactgtttgttcttggtgccttgcagagagactcacagcaactctccattatagctttcacacggtttggatgtgcagcacatccaaggcaaccacagctgtggtagagcttggtaaaagactgaagatacattggtgctttgatgaaaaggtcagttggctggtccctctctcaaaaagcttattaagcctgaaaagccaactttgtaacatatttaaaactgctattttcgcttatttctggaatgtaaaaaaaaaaaatgtataaaaagaattagtgtatgcttcctgaataaaaaggagccaaagttgatc

SEQ ID NO: 159230 - DNA, 738 bp, Homo sapiens
  Payload ID: 11163
  Gene Symbol: NFS1
  Gene Name: NFS1 cysteine desulfurase
  ENST ID: ENST00000306750
  CDS Start-End: 17-586
ctctgccagcgggaccatgctgctccgagccgcttggaggcgggcggcagtggcggtgacagcggctccagggccgaagcccgcggcgcccactcgggggctgcgcctgcgcgttggagaccgtgctcctcagtctgcggttcccgcagatacagccgctgccccggaggtggggccagtgctgcgacctctctatatggatgtgcaagctacaactcctctggacccccgggtgcttgatgccatgctcccttacctaatcaactactatgggaacccacactcccggacacatgcttatggctgggagagtgaggcagccatggaacgtgctcgtcagcaagtagcatctctgattggagctgatcctcgtgagatcatttttactagtggtgctactgaatccaacaacatagcaattaagactgagtctcactctgtcatccaggctggagtgcagtggcacgatcttgactcactgcaagctccgcctcctgggttcacgccattctcctgcctcagcctcctgagtagctgggactacaggcgccctccaccacacccggctaattttttgtatttttagtagagacagggtttcactgtgttagccagaatggtctcgatctcctgacctcgtgatccgccctcctcggcctcccaaagtgccccacaaccatttttacttactgatgtaaatactttttaggataaaatagagtataaatcaattataaa

SEQ ID NO: 159231 - DNA, 2645 bp, Homo sapiens
  Payload ID: 11163
  Gene Symbol: NFS1
  Gene Name: NFS1 cysteine desulfurase
  Uniprot ID: Q9Y697
  ENST ID: ENST00000374085
  CDS Start-End: 529-1722
acgctcgggtcccgctctccgggaggcgcggacctgtcccctccgcgcggcgacgcaactgaatattccggagccttcctgtccaccctgctgcccagaccctctgacccttctctcaaatgacacatccctcaaactttcttaggcgggtccccgaacggttgaccccggcgcaccacccctcgcaccctgcgcgacaggcccccagagccgtggaggcgcgtccttcagaccgctcctggccaagttacagatgctgctccgggctcccgtgcagaccgttaccttcggtcagaagggactgcacctactctggctccacgttccttctaaacgtctttgccctttagagccttccttcctacgataccatttgaatatcaactcaacaccccctccaggaaccctctctccctctcccttacctccttttacagcgtgtcagttggagaccgtgctcctcagtctgcggttcccgcagatacagccgctgccccggaggtggggccagtgctgcgacctctctatatggatgtgcaagctacaactcctctggacccccgggtgcttgatgccatgctcccttacctaatcaactactatgggaacccacactcccggacacatgcttatggctgggagagtgaggcagccatggaacgtgctcgtcagcaagtagcatctctgattggagctgatcctcgtgagatcatttttactagtggtgctactgaatccaacaacatagcaattaagggggtggcccgattctacaggtcacggaaaaagcacttgatcaccacccagacagaacacaaatgtgtcttggactcctgccgttcactggaagctgagggctttcaggtcacctacctcccagtgcagaagagtgggatcattgacctaaaggaactagaggctgctatccagccagatactagcctggtgtcagtcatgactgtgaacaatgagattggagtgaagcagcctattgcagaaatagggcggatttgcagttccagaaaggtatatttccatactgatgcagcccaggctgttggaaaaatcccacttgatgtcaatgacatgaaaattgatctcatgagcattagtggtcacaaaatctacggtcccaaaggggttggtgccatctacatccgtcgccggccccgtgtgcgtgtggaggccctgcagagtggaggggggcaggagcggggtatgcggtctgggacagtgcccacacccttagtggtggggctgggggctgcgtgtgaggtggcacagcaagagatggagtatgaccacaagcgaatctcaaagttgtcagagcggctgatacagaatataatgaagagccttccagatgtggtgatgaatggggaccctaagcaccattatcccggctgtatcaacctctcctttgcatatgtggaaggggaaagtctgctgatggcactgaaggacgttgccttatcctcagggagtgcctgcacctctgcatccctggagccctcttatgtgcttagagcaattggcactgatgaggatttagcgcactcttctatcaggtttggaattggccgcttcactacagaggaggaagtggactacacagtggagaaatgcattcagcatgtgaagcgtcttcgagaaatgagccctctctgggagatggttcaggatggcattgacctcaagagcatcaagtggacccaacactagaagaatagggccctgactttgtgctggtctggcccctcctgcctcaccaacccgtgcacaaccagacaccttgttacacctagtggatgctctagattggtatagaccagttgacttcagcatcagtccacctctatgacagaaacacaagaaaactgtctttccctagcttcagttccttgggtgtggagcactccccatttcttctcgggtcttaaagtgtgtggacattttcatcccgaagccatagagacatttgctgtcatattgctgctgggcacatctgtgctcttggtgaggagagcaagaggaaccagaagaagtctctttggtcagggaccatgatgctctacatggacatttgagtcttcgtcttctgctgctgctcggctggaccagcttctttaacagcaagcataatccacttcaatgtaatattttctgtagctccaaaggctatctcttcatattgactgcagacagactgaatggacagtttcttagagggcttgtctcctttctacccttgtcctctttcctttcctttgacctaatggagctagaaatatgtctgtgactccaccagttattctaataatttgttttcttgaaaattgttaatttcaagactggagaaataaactcaccttctatttactctgtgactttatgagaggttgagggaaaagtggaagctgtacttgggaattgtggagaagaccgccactccatctgatttgcataaatgactcagtgggcttttgtatctcttcatttaagaattatttgaatgcctgccaggagccagatttgttctgggtattaggaatacactggttaacaggaccaaaaaagaccctgccctcactgagttttaaattttagtggagagatggaaaataattaaacaaataaacaatgtt

SEQ ID NO: 159232 - DNA, 3012 bp, Homo sapiens
  Payload ID: 11163
  Gene Symbol: NFS1
  Gene Name: NFS1 cysteine desulfurase
  Uniprot ID: Q9Y697
  ENST ID: ENST00000374092
  CDS Start-End: 72-1445
gggcagcacttccgggagcctggggcccaggactgcagcggcttcggaaggtgggctctgccagcgggaccatgctgctccgagccgcttggaggcgggcggcagtggcggtgacagcggctccagggccgaagcccgcggcgcccactcgggggctgcgcctgcgcgttggagaccgtgctcctcagtctgcggttcccgcagatacagccgctgccccggaggtggggccagtgctgcgacctctctatatggatgtgcaagctacaactcctctggacccccgggtgcttgatgccatgctcccttacctaatcaactactatgggaacccacactcccggacacatgcttatggctgggagagtgaggcagccatggaacgtgctcgtcagcaagtagcatctctgattggagctgatcctcgtgagatcatttttactagtggtgctactgaatccaacaacatagcaattaagggggtggcccgattctacaggtcacggaaaaagcacttgatcaccacccagacagaacacaaatgtgtcttggactcctgccgttcactggaagctgagggctttcaggtcacctacctcccagtgcagaagagtgggatcattgacctaaaggaactagaggctgctatccagccagatactagcctggtgtcagtcatgactgtgaacaatgagattggagtgaagcagcctattgcagaaatagggcggatttgcagttccagaaaggtatatttccatactgatgcagcccaggctgttggaaaaatcccacttgatgtcaatgacatgaaaattgatctcatgagcattagtggtcacaaaatctacggtcccaaaggggttggtgccatctacatccgtcgccggccccgtgtgcgtgtggaggccctgcagagtggaggggggcaggagcggggtatgcggtctgggacagtgcccacacccttagtggtggggctgggggctgcgtgtgaggtggcacagcaagagatggagtatgaccacaagcgaatctcaaagttgtcagagcggctgatacagaatataatgaagagccttccagatgtggtgatgaatggggaccctaagcaccattatcccggctgtatcaacctctcctttgcatatgtggaaggggaaagtctgctgatggcactgaaggacgttgccttatcctcagggagtgcctgcacctctgcatccctggagccctcttatgtgcttagagcaattggcactgatgaggatttagcgcactcttctatcaggtttggaattggccgcttcactacagaggaggaagtggactacacagtggagaaatgcattcagcatgtgaagcgtcttcgagaaatgagccctctctgggagatggttcaggatggcattgacctcaagagcatcaagtggacccaacactagaagaatagggccctgactttgtgctggtctggcccctcctgcctcaccaacccgtgcacaaccagacaccttgttacacctagtggatgctctagattggtatagaccagttgacttcagcatcagtccacctctatgacagaaacacaagaaaactgtctttccctagcttcagttccttgggtgtggagcactccccatttcttctcgggtcttaaagtgtgtggacattttcatcccgaagccatagagacatttgctgtcatattgctgctgggcacatctgtgctcttggtgaggagagcaagaggaaccagaagaagtctctttggtcagggaccatgatgctctacatggacatttgagtcttcgtcttctgctgctgctcggctggaccagcttctttaacagcaagcataatccacttcaatgtaatattttctgtagctccaaaggctatctcttcatattgactgcagacagactgaatggacagtttcttagagggcttgtctcctttctacccttgtcctctttcctttcctttgacctaatggagctagaaatatgtctgtgactccaccagttattctaataatttgttttcttgaaaattgttaatttcaagactggagaaataaactcaccttctatttactctgtgactttatgagaggttgagggaaaagtggaagctgtacttgggaattgtggagaagaccgccactccatctgatttgcataaatgactcagtgggcttttgtatctcttcatttaagaattatttgaatgcctgccaggagccagatttgttctgggtattaggaatacactggttaacaggaccaaaaaagaccctgccctcactgagttttaaattttagtggagagatggaaaataattaaacaaataaacaatgttatagattgtgataagtgctatgaaagaattaagtggtaagaggacatagcagggaaaacctaccatgctgggtgtttgaggaaagtttttctgaggaggtagtgcttataaatatgaagagctcgctaatctagaaatgagaggtgagaaggaatggcaagagctaagggcctgaagtgtgataaagcacaaagtattatactttagaaaccaagagaaggccattgtaactagagcttttcatttgtgggtctgaacccataggtgggtagttaccagtacttaaaaaaggagatagtatgttagagtacatttatgcatattttaagaatatattttgatgatatatttgaatttgtataccaggttataaatgtatttcttattgtggataatggtcaaaaaagtttaattgcttttcatacttgccagtagcagggggacaggaaagtttgaaagccactgggctaaagtttggtaaatgtagatggacagtggaaggaggagatgaaattatagaatttttcttgttgaaaaatatcttttttacttagaataattttagatttactgaaaagttgcaaagatagtagagttgtagatctattaccagttttcctctaattaaaaagtcttacataaaa

SEQ ID NO: 159233 - DNA, 1956 bp, Homo sapiens
  Payload ID: 11163
  Gene Symbol: NFS1
  Gene Name: NFS1 cysteine desulfurase
  Uniprot ID: Q9Y697
  ENST ID: ENST00000397425
  CDS Start-End: 124-1317
tccgggagcctggggcccaggactgcagcggcttcggaagttggagaccgtgctcctcagtctgcggttcccgcagatacagccgctgccccggaggtggggccagtgctgcgacctctctatatggatgtgcaagctacaactcctctggacccccgggtgcttgatgccatgctcccttacctaatcaactactatgggaacccacactcccggacacatgcttatggctgggagagtgaggcagccatggaacgtgctcgtcagcaagtagcatctctgattggagctgatcctcgtgagatcatttttactagtggtgctactgaatccaacaacatagcaattaagggggtggcccgattctacaggtcacggaaaaagcacttgatcaccacccagacagaacacaaatgtgtcttggactcctgccgttcactggaagctgagggctttcaggtcacctacctcccagtgcagaagagtgggatcattgacctaaaggaactagaggctgctatccagccagatactagcctggtgtcagtcatgactgtgaacaatgagattggagtgaagcagcctattgcagaaatagggcggatttgcagttccagaaaggtatatttccatactgatgcagcccaggctgttggaaaaatcccacttgatgtcaatgacatgaaaattgatctcatgagcattagtggtcacaaaatctacggtcccaaaggggttggtgccatctacatccgtcgccggccccgtgtgcgtgtggaggccctgcagagtggaggggggcaggagcggggtatgcggtctgggacagtgcccacacccttagtggtggggctgggggctgcgtgtgaggtggcacagcaagagatggagtatgaccacaagcgaatctcaaagttgtcagagcggctgatacagaatataatgaagagccttccagatgtggtgatgaatggggaccctaagcaccattatcccggctgtatcaacctctcctttgcatatgtggaaggggaaagtctgctgatggcactgaaggacgttgccttatcctcagggagtgcctgcacctctgcatccctggagccctcttatgtgcttagagcaattggcactgatgaggatttagcgcactcttctatcaggtttggaattggccgcttcactacagaggaggaagtggactacacagtggagaaatgcattcagcatgtgaagcgtcttcgagaaatgagccctctctgggagatggttcaggatggcattgacctcaagagcatcaagtggacccaacactagaagaatagggccctgactttgtgctggtctggcccctcctgcctcaccaacccgtgcacaaccagacaccttgttacacctagtggatgctctagattggtatagaccagttgacttcagcatcagtccacctctatgacagaaacacaagaaaactgtctttccctagcttcagttccttgggtgtggagcactccccatttcttctcgggtcttaaagtgtgtggacattttcatcccgaagccatagagacatttgctgtcatattgctgctgggcacatctgtgctcttggtgaggagagcaagaggaaccagaagaagtctctttggtcagggaccatgatgctctacatggacatttgagtcttcgtcttctgctgctgctcggctggaccagcttctttaacagcaagcataatccacttcaatgtaatattttctgtagctccaaaggctatctcttcatattgactgcagacagactgaatggacagtttcttagagggcttgtctcctttctacccttgtcctctttcctttcctttgacctaatggagctagaaatatgtctgtgactccaccagttattctaataatttgttttcttgaaaattgttaatttcaagactggagaaat

SEQ ID NO: 159234 - DNA, 1794 bp, Homo sapiens
  Payload ID: 11163
  Gene Symbol: NFS1
  Gene Name: NFS1 cysteine desulfurase
  ENST ID: ENST00000440385
  CDS Start-End: 130-744
agcacttccgggagcctggggcccaggactgcagcggcttcggaagttggagaccgtgctcctcagtctgcggttcccgcagatacagccgctgccccggaggtggggccagtgctgcgacctctctatatggatgtgcaagctacaactcctctggacccccgggtgcttgatgccatgctcccttacctaatcaactactatgggaacccacactcccggacacatgcttatggctgggagagtgaggcagccatggaacgtgctcgtcagcaagtagcatctctgattggagctgatcctcgtgagatcatttttactagtggtgctactgaatccaacaacatagcaattaagggggtggcccgattctacaggtcacggaaaaagcacttgatcaccacccagacagaacacaaatgtgtcttggactcctgccgttcactggaagctgagggctttcaggtcacctacctcccagtgcagaagagtgggatcattgacctaaaggaactagaggctgctatccagccagatactagcctggtgtcagtcatgactgtgaacaatgagattggagtgaagcagcctattgcagaaatagggcggatttgcagttccagaaaggtatatttccatactgatgcagcccaggctgttggaaaaatcccacttgatgtcaatgacatgaaaattgatctcatgagcattagtggtcacaaaatctacggtcccaaagtatgaccacaagcgaatctcaaagttgtcagagcggctgatacagaatataatgaagagccttccagatgtggtgatgaatggggaccctaagcaccattatcccggctgtatcaacctctcctttgcatatgtggaaggggaaagtctgctgatggcactgaaggacgttgccttatcctcagggagtgcctgcacctctgcatccctggagccctcttatgtgcttagagcaattggcactgatgaggatttagcgcactcttctatcaggtttggaattggccgcttcactacagaggaggaagtggactacacagtggagaaatgcattcagcatgtgaagcgtcttcgagaaatgagccctctctgggagatggttcaggatggcattgacctcaagagcatcaagtggacccaacactagaagaatagggccctgactttgtgctggtctggcccctcctgcctcaccaacccgtgcacaaccagacaccttgttacacctagtggatgctctagattggtatagaccagttgacttcagcatcagtccacctctatgacagaaacacaagaaaactgtctttccctagcttcagttccttgggtgtggagcactccccatttcttctcgggtcttaaagtgtgtggacattttcatcccgaagccatagagacatttgctgtcatattgctgctgggcacatctgtgctcttggtgaggagagcaagaggaaccagaagaagtctctttggtcagggaccatgatgctctacatggacatttgagtcttcgtcttctgctgctgctcggctggaccagcttctttaacagcaagcataatccacttcaatgtaatattttctgtagctccaaaggctatctcttcatattgactgcagacagactgaatggacagtttcttagagggcttgtctcctttctacccttgtcctctttcctttcctttgacctaatggagctagaaatatgtctgtgactccaccagttattctaataatttgttttcttgaaaattgttaatttcaaga

SEQ ID NO: 159235 - DNA, 551 bp, Homo sapiens
  Payload ID: 11163
  Gene Symbol: NFS1
  Gene Name: NFS1 cysteine desulfurase
  ENST ID: ENST00000419569
  CDS Start-End: 229-551
acgctcgggtcccgctctccgggaggcgcggacctgtcccctccgcgcggcgacgcaactgaatattccggagccttcctgtccaccctgctgcccagaccctctgacccttctctcaaatgacacatccctcaaactttcttagttggagaccgtgctcctcagtctgcggttcccgcagatacagccgctgccccggaggtggggccagtgctgcgacctctctatatggatgtgcaagctacaactcctctggacccccgggtgcttgatgccatgctcccttacctaatcaactactatgggaacccacactcccggacacatgcttatggctgggagagtgaggcagccatggaacgtgctcgtcagcaagtagcatctctgattggagctgatcctcgtgagatcatttttactagtggtgctactgaatccaacaacatagcaattaagggggtggcccgattctacaggtcacggaaaaagcacttgatcaccacccagacagaacacaaatgtgtcttggactcctgccgttcactggaagc

SEQ ID NO: 159236 - DNA, 646 bp, Homo sapiens
  Payload ID: 11163
  Gene Symbol: NFS1
  Gene Name: NFS1 cysteine desulfurase
  ENST ID: ENST00000413203
  CDS Start-End: 127-390
acttccgggagcctggggcccaggactgcagcggcttcggaagttggagaccgtgctcctcagtctgcggttcccgcagatacagccgctgccccggaggtggggccagtgctgcgacctctctatatggatgtgcaagctacaactcctctggacccccgggtgcttgatgccatgctcccttacctaatcaactactatgggaacccacactcccggacacatgcttatggctgggagagtgaggcagccatggaacgtgctcgtcagcaagtagcatctctgattggagctgatcctcgtgagatcatttttactagtggtgctactgaatccaacaacatagcaattaagatggagtctcaccctgtcgcccaggctagagtgtaggggcatgatctcggctcactgcaacctctgcctcccaggttcaagcgattctcctgcctcatcctcctgagtagccgggattacagggggtggcccgattctacaggtcacggaaaaagcacttgatcaccacccagacagaacacaaatgtgtcttggactcctgccgttcactggaagctgagggctttcaggtcacctacctcccagtgcagaagagtgggatcattgacctaaaggaactagaggctgctat

SEQ ID NO: 159237 - DNA, 747 bp, Homo sapiens
  Payload ID: 11163
  Gene Symbol: NFS1
  Gene Name: NFS1 cysteine desulfurase
  ENST ID: ENST00000456462
  CDS Start-End: 65-508
acttccgggagcctggggcccaggactgcagcggcttcggaaggtgggctctgccagcgggaccatgctgctccgagccgcttggaggcgggcggcagtggcggtgacagcggctccagggccgaagcccgcggcgcccactcgggggctgcgcctgcgcgttggagaccgtgctcctcagtctgcggttcccgcagatacagccgctgccccggaggtggggccagtgctgcgacctctctatatggatgtgcaagctacaactcctctggacccccgggtgcttgatgccatgctcccttacctaatcaactactatgggaacccacactcccggacacatgcttatggctgggagagtgaggcagccatggaacgtgctcgtcagcaagtagcatctctgattggagctgatcctcgtgagatcatttttactagtggtgctactgaatccaacaacatagcaattaagatggagtctcaccctgtcgcccaggctagagtgtaggggcatgatctcggctcactgcaacctctgcctcccaggttcaagcgattctcctgcctcatcctcctgagtagccgggattacagggggtggcccgattctacaggtcacggaaaaagcacttgatcaccacccagacagaacacaaatgtgtcttggactcctgccgttcactggaagctgagggctttcaggtcacctacctcccagtgcagaagagtgggatcattgacctaaag

SEQ ID NO: 159238 - DNA, 1436 bp, Homo sapiens
  Payload ID: 11163
  Gene Symbol: NFS1
  Gene Name: NFS1 cysteine desulfurase
  Uniprot ID: Q9Y697
  ENST ID: ENST00000541387
  CDS Start-End: 65-1285
acttccgggagcctggggcccaggactgcagcggcttcggaaggtgggctctgccagcgggaccatgctgctccgagccgcttggaggcgggcggcagtggcggtgacagcggctccagggccgaagcccgcggcgcccactcgggggctgcgcctgcgcgttggagaccgtgctcctcagtctgcggttcccgcagatacagccgctgccccggaggtggggccagtgctgcgacctctctatatggatgtgcaagctacaactcctctggacccccgggtgcttgatgccatgctcccttacctaatcaactactatgggaacccacactcccggacacatgcttatggctgggagagtgaggcagccatggaacgtgctcgtcagcaagtagcatctctgattggagctgatcctcgtgagatcatttttactagtggtgctactgaatccaacaacatagcaattaaggaactagaggctgctatccagccagatactagcctggtgtcagtcatgactgtgaacaatgagattggagtgaagcagcctattgcagaaatagggcggatttgcagttccagaaaggtatatttccatactgatgcagcccaggctgttggaaaaatcccacttgatgtcaatgacatgaaaattgatctcatgagcattagtggtcacaaaatctacggtcccaaaggggttggtgccatctacatccgtcgccggccccgtgtgcgtgtggaggccctgcagagtggaggggggcaggagcggggtatgcggtctgggacagtgcccacacccttagtggtggggctgggggctgcgtgtgaggtggcacagcaagagatggagtatgaccacaagcgaatctcaaagttgtcagagcggctgatacagaatataatgaagagccttccagatgtggtgatgaatggggaccctaagcaccattatcccggctgtatcaacctctcctttgcatatgtggaaggggaaagtctgctgatggcactgaaggacgttgccttatcctcagggagtgcctgcacctctgcatccctggagccctcttatgtgcttagagcaattggcactgatgaggatttagcgcactcttctatcaggtttggaattggccgcttcactacagaggaggaagtggactacacagtggagaaatgcattcagcatgtgaagcgtcttcgagaaatgagccctctctgggagatggttcaggatggcattgacctcaagagcatcaagtggacccaacactagaagaatagggccctgactttgtgctggtctggcccctcctgcctcaccaacccgtgcacaaccagacaccttgttacacctagtggatgctctagattggtatagaccagttgacttcagcatcagtccacctctatgacagaaacacaag

SEQ ID NO: 159239 - DNA, 1034 bp, Homo sapiens
  Payload ID: 11164
  Gene Symbol: NFU1
  Gene Name: NFU1 iron-sulfur cluster scaffold
  Uniprot ID: Q9UMS0
  ENST ID: ENST00000303698
  CDS Start-End: 216-908
gcgcagatctttcgtggttctgtcagggagacccttaggcactccggactaagatggcggcgacggccaggcggggctggggagctgcggctgttgccgccgggctgcgcaggcggtaggtgacgagcctggagctccgaataggtgtgccgctgggcttagccagcggagcggtcgccgccttgcagaccctctctcgaggcgggttctgtcatatgttgaagaatccatacaccattaagaaacagcctctgcatcagtttgtacaaagaccacttttcccactacctgcagccttttatcacccagtgagatacatgtttattcaaacacaagataccccaaatccaaacagcttaaagtttataccaggaaaaccagttcttgagacaaggaccatggattttcccaccccagctgcagcatttcgctcccctctggctaggcagttatttaggattgaaggagtaaaaagtgtcttctttggaccagatttcatcactgtcacaaaggaaaatgaagaattagactggaatttactgaaaccagatatttatgcaacaatcatggacttctttgcatctggcttacccctggttactgaggaaacaccttcaggagaagcaggatctgaagaagatgatgaagttgtggcaatgattaaggaattgttagatactagaatacggccaactgtgcaggaagatggaggggatgtaatctacaaaggctttgaagatggcattgtacagctgaaactccagggttcttgtaccagctgccctagttcaatcattactctgaaaaatggaattcagaacatgctgcagttttatattccggaggtagaaggcgtagaacaggttatggatgatgaatcagatgaaaaagaagcaaactcaccttaaaataatctggattttctttgggcataacagtcagacttgttgataatatatatcaagtttttattattaatatgctgaggaacttgaagattaataaaatatgctcttcagagaatgatatataaa

SEQ ID NO: 159240 - DNA, 1058 bp, Homo sapiens
  Payload ID: 11164
  Gene Symbol: NFU1
  Gene Name: NFU1 iron-sulfur cluster scaffold
  Uniprot ID: Q9UMS0
  ENST ID: ENST00000394305
  CDS Start-End: 584-925
gggaaaggttccccggcctctcttggtcagggtgacgcagtagcctgcaaacctcggcgcgtaggccaccgcacttatccgcagcaggaccgcccgcagccggtagggtgggctcttcccagtgcccgcccagctaccggccagcctgcggctgcgcagatctttcgtggttctgtcagggagacccttaggcactccggactaagatggcggcgacggccaggcggggctggggagctgcggctgttgccgccgggctgcgcaggcggtaggtgacgagcctggagctccgaataggtgtgccgctgggcttagccagcggagcggtcgccgccttgcagaccctctctcgaggcgggttctgtcatatgttgaagaatccatacaccattaagaaacagcctctgcatcagtttgtacaaagaccacttttcccactacctgcagccttttatcacccaggcagttatttaggattgaaggagtaaaaagtgtcttctttggaccagatttcatcactgtcacaaaggaaaatgaagaattagactggaatttactgaaaccagatatttatgcaacaatcatggacttctttgcatctggcttacccctggttactgaggaaacaccttcaggagaagcaggatctgaagaagatgatgaagttgtggcaatgattaaggaattgttagatactagaatacggccaactgtgcaggaagatggaggggatgtaatctacaaaggctttgaagatggcattgtacagctgaaactccagggttcttgtaccagctgccctagttcaatcattactctgaaaaatggaattcagaacatgctgcagttttatattccggaggtagaaggcgtagaacaggttatggatgatgaatcagatgaaaaagaagcaaactcaccttaaaataatctggattttctttgggcataacagtcagacttgttgataatatatatcaagtttttattattaatatgctgaggaacttgaagattaataaaatatgctcttcagagaatgatatataaatattgca

SEQ ID NO: 159241 - DNA, 1467 bp, Homo sapiens
  Payload ID: 11164
  Gene Symbol: NFU1
  Gene Name: NFU1 iron-sulfur cluster scaffold
  Uniprot ID: Q9UMS0
  ENST ID: ENST00000410022
  CDS Start-End: 207-971
gggaaaggttccccggcctctcttggtcagggtgacgcagtagcctgcaaacctcggcgcgtaggccaccgcacttatccgcagcaggaccgcccgcagccggtagggtgggctcttcccagtgcccgcccagctaccggccagcctgcggctgcgcagatctttcgtggttctgtcagggagacccttaggcactccggactaagatggcggcgacggccaggcggggctggggagctgcggctgttgccgccgggctgcgcaggcggttctgtcatatgttgaagaatccatacaccattaagaaacagcctctgcatcagtttgtacaaagaccacttttcccactacctgcagccttttatcacccagtgagatacatgtttattcaaacacaagataccccaaatccaaacagcttaaagtttataccaggaaaaccagttcttgagacaaggaccatggattttcccaccccagctgcagcatttcgctcccctctggctaggcagttatttaggattgaaggagtaaaaagtgtcttctttggaccagatttcatcactgtcacaaaggaaaatgaagaattagactggaatttactgaaaccagatatttatgcaacaatcatggacttctttgcatctggcttacccctggttactgaggaaacaccttcaggagaagcaggatctgaagaagatgatgaagttgtggcaatgattaaggaattgttagatactagaatacggccaactgtgcaggaagatggaggggatgtaatctacaaaggctttgaagatggcattgtacagctgaaactccagggttcttgtaccagctgccctagttcaatcattactctgaaaaatggaattcagaacatgctgcagttttatattccggaggtagaaggcgtagaacaggttatggatgatgaatcagatgaaaaagaagcaaactcaccttaaaataatctggattttctttgggcataacagtcagacttgttgataatatatatcaagtttttattattaatatgctgaggaacttgaagattaataaaatatgctcttcagagaatgatatataaatattgcatgtttgctttacctcatatgagttatttataacctcttgaatcatcttctgtacacgtggattttatccaaggatatttttatttttgtccctcatttcccatggctctttctttgcatatgtgtgaaggagtttaaaatacatttccccccatctaatttatttacttttttccatacaggaagaaacagaatgctttttagaatattctaaaatagctttttgtgaaatatctaaaactatttttactgaagtttttagcttaagaaacagctaaacaagtctgttttaaaaatggtatctggctactagcccccaattaagtagcaaagaactgcttaagaccaaaaaaaagaaatcaaa

SEQ ID NO: 159242 - DNA, 659 bp, Homo sapiens
  Payload ID: 11164
  Gene Symbol: NFU1
  Gene Name: NFU1 iron-sulfur cluster scaffold
  ENST ID: ENST00000438184
  CDS Start-End: 46-165
ggagctgcggctgttgccgccgggctgcgcaggcggttctgtcatatgttgaagaatccatacaccattaagaaacagcctctgcatcagtttgtacaaagaccacttttcccactacctgcagccttttatcacccaggcagttatttaggattgaaggagtaaaaagtgtcttctttggaccagatttcatcactgtcacaaaggaaaatgaagaattagactggaatttactgaaaccagatatttatgcaacaatcatggacttctttgcatctggcttacccctggttactgaggaaacaccttcaggagaagcaggtaatcaattatcccagtctttcctcatgaatttataatattatacatgggtctttttctaagatgttttttgtccctgtggtctttttgccccccttcctgttttaataacatatggagttttaattataatatctctgtaacaattagtatagtatatgataatatctggaagaaaaagttcctcaattaaaaaaaactttctggtagtctgctcactttattcttccttgtaaatttaatgaccatcttgtaaagtctctaaaaaaccatgtcaagagtttggttgaagttgcattaaatttacagattaaatttgggagaattaacatttcttc

SEQ ID NO: 159243 - DNA, 664 bp, Homo sapiens
  Payload ID: 11164
  Gene Symbol: NFU1
  Gene Name: NFU1 iron-sulfur cluster scaffold
  ENST ID: ENST00000419370
  CDS Start-End: 85-213
ctccggactaagatggcggcgacggccaggcggggctggggagctgcggctgttgccgccgggctgcgcaggcggttctgtcatatgttgaagaatccatacaccattaagaaacagcctctgcatcagtttgtacaaagaccacttttcccactacctgcagccttttatcacccagggtctcactatgttgcccaggctaaagtgcagtgatgtgatcttggctcactgtaacctccgcctcctgggctccagccatcctcccacctcagtctcccaagtagctggtactacagtgagatacatgtttattcaaacacaagataccccaaatccaaacagcttaaagtttataccaggaaaaccagttcttgagacaaggaccatggattttcccaccccagctgcagcatttcgctcccctctggctaggcagttatttaggattgaaggagtaaaaagtgtcttctttggaccagatttcatcactgtcacaaaggaaaatgaagaattagactggaatttactgaaaccagatatttatgcaacaatcatggacttctttgcatctggcttacccctggttactgaggaaacaccttcaggagaagcaggatctgaagaagatgatgaagttgtggcaatgattaaggaattgttagat

SEQ ID NO: 159244 - DNA, 580 bp, Homo sapiens
  Payload ID: 11164
  Gene Symbol: NFU1
  Gene Name: NFU1 iron-sulfur cluster scaffold
  ENST ID: ENST00000450796
  CDS Start-End: 283-580
ggcgacggccaggcggggctggggagctgcggctgttgccgccgggctgcgcaggcggttctgtcatatgttgaagaatccatacaccattaagaaacagcctctgcatcagtttgtacaaagaccacttttcccactacctgcagccttttatcacccaggcagttatttaggattgaaggagtaaaaagtgtcttctttggaccagatttcatcactgtcacaaaggaaaatgaagaattagactggaatttactgaaaccagatatttatgcaacaatcatggacttctttgcatctggcttacccctggttactgaggaaacaccttcaggagaagcaggatctgaagaagatgatgaagttgtggcaatgattaaggaattgttagatactagaatacggccaactgtgcaggaagatggaggggatgtaatctacaaaggctttgaagatggcattgtacagctgaaactccagggttcttgtaccagctgccctagttcaatcattactctgaaaaatggaattcagaacatgctgcagttttatattccggaggtagaaggcgtagaacagg

SEQ ID NO: 159245 - DNA, 668 bp, Homo sapiens
  Payload ID: 11164
  Gene Symbol: NFU1
  Gene Name: NFU1 iron-sulfur cluster scaffold
  ENST ID: ENST00000484177
  CDS Start-End: 381-668
aagatggcggcgacggccaggcggggctggggagctgcggctgttgccgccgggctgcgcaggcggtaggtgacgagcctggagctccgaataggtgtgccgctgggcttagccagcggagcggtcgccgccttgcagaccctctctcgaggcgggttctgtcatatgttgaagaatccatacaccattaagaaacagcctctgcatcagtttgtacaaagaccacttttcccactacctgcagccttttatcacccaggcagttatttaggattgaaggagtaaaaagtgtcttctttggaccagatttcatcactgtcacaaaggaaaatgaagaattagactggaatttactgaaaccagatatttatgcaacaatcatggacttctttgcatctggcttacccctggttactgaggaaacaccttcaggagaagcaggatctgaagaagatgatgaagttgtggcaatgattaaggaattgttagatactagaatacggccaactgtgcaggaagatggaggggatgtaatctacaaaggctttgaagatggcattgtacagctgaaactccagggttcttgtaccagctgccctagttcaatcattactctgaaaaatggaattcagaacatgctgcagttttatattccggaggtagaaggc

SEQ ID NO: 159246 - DNA, 558 bp, Homo sapiens
  Payload ID: 11164
  Gene Symbol: NFU1
  Gene Name: NFU1 iron-sulfur cluster scaffold
  Uniprot ID: Q9UMS0
  ENST ID: ENST00000462320
  CDS Start-End: 94-435
gctaatatatattctccagaagtggttgccattgcataggaaaatgaagaattagactggaatttactgaaaccagatatttatgcaacaatcatggacttctttgcatctggcttacccctggttactgaggaaacaccttcaggagaagcaggatctgaagaagatgatgaagttgtggcaatgattaaggaattgttagatactagaatacggccaactgtgcaggaagatggaggggatgtaatctacaaaggctttgaagatggcattgtacagctgaaactccagggttcttgtaccagctgccctagttcaatcattactctgaaaaatggaattcagaacatgctgcagttttatattccggaggtagaaggcgtagaacaggttatggatgatgaatcagatgaaaaagaagcaaactcaccttaaaataatctggattttctttgggcataacagtcagacttgttgataatatatatcaagtttttattattaatatgctgaggaacttgaagattaataaaatatgctcttcagagaatgatatat

SEQ ID NO: 159247 - DNA, 666 bp, Homo sapiens
  Payload ID: 11164
  Gene Symbol: NFU1
  Gene Name: NFU1 iron-sulfur cluster scaffold
  ENST ID: ENST00000474230
  CDS Start-End: 1-381
gaaaatgaagaattagactggaatttactgaaaccagatatttatgcaacaatcatggacttctttgcatctggcttacccctggttactgaggaaacaccttcaggagaagcaggatctgaagaagatgatgaagttgtggcaatgattaaggaattgttagatactagaatacggccaactgtgcaggaagatggaggggatgtaatctacaaaggctttgaagatggcattgtacagctgaaactccagggttcttgtaccagctgccctagttcaatcattactctgaaaaatggaattcagaacatgctgcagttttatattccggaggtagaaggcgtagaacaggagtataacacagcaccttgtcatcagtaataatgagtctcactgcagtgattctcaaccaaaaagcatggccttatggagagagattatcaaggagtgaagggatgtgtggaaattagaaatttccaacccacagaatttcaggttatggatgatgaatcagatgaaaaagaagcaaactcaccttaaaataatctggattttctttgggcataacagtcagacttgttgataatatatatcaagtttttattattaatatgctgaggaacttgaagattaataaaatatgctcttcagagaatgatatataaa

SEQ ID NO: 159248 - DNA, 4358 bp, Homo sapiens
  Payload ID: 11165
  Gene Symbol: NAB1
  Gene Name: NGFI-A binding protein 1 (EGR1 binding protein 1)
  Uniprot ID: Q13506
  ENST ID: ENST00000337386
  CDS Start-End: 462-1925
cgatgggagcgggggcgtcccggctcctgcagccgccagaggagggagagccgggggccgtcgcttcggagttggggctgagcagtcctcggggagagcgcgccaagaccgctgcagccgctggctgacggaaggagagttttacatggaagtggcttacagaaacttggcgctgaggtgcagggaagccagaaactctttgtgtctctaaggccgatgaggaatttggaaacacatgtgggacatacaagcgttggatatagaggactgagcagggggaggaacatttaagctgatggaagtggaagtggaagttgctgtacattggcagcaaggcctccgagttagcttttgaatgcagttaactggtttctcttaactgtggaattcattgaaaagtcagactccgagtggtcgttccaggatatcttgaaaagcccaggttaaacccatccagagtaatggctgcggccttacccaggaccctgggggagttgcagctgtatagaatattacaaaaagccaatctactttcttattttgatgcctttatccaacaaggtggtgatgatgtccagcaactctgtgaagcaggagaagaggagtttttggaaatcatggcactcgtgggcatggctagcaagccccttcatgttagaaggctgcagaaggctttgagagactgggtcacaaaccctgggcttttcaatcagccactgacttcccttcctgtcagtagcatacccatctataaattaccagagggatcaccaacatggctgggaatatcctgcagtagttatgaaaggagtagcaatgcccgggaacctcatttaaaaatccccaaatgtgctgccaccacctgtgtgcagagcttgggacaggggaagtcagatgtggttgggagcctagcactgcagagtgttggtgagtccagactctggcaaggccaccatgccactgagagcgagcacagcctctccccagcagacctgggctcccccgcgtccccaaaggagagcagtgaggcgctggatgctgctgctgcgctctctgtggctgagtgtgtggagcggatggcccccacactgccaaaaagtgacttgaatgaagtgaaagagctgctaaaaaccaacaagaagttggccaaaatgattggtcacatctttgagatgaacgatgatgatccacacaaagaggaggaaattcggaaatacagtgcaatatatggcagatttgactcaaagaggaaggatgggaaacatctcacacttcatgagctcactgttaatgaagcggctgctcaactctgtgtgaaggataatgccctgctgacaagaagagatgagctttttgccttggctcgacagatttctcgagaagtcacctataaatatacttacagaaccaccaagtcaaaatgtggagaaagagatgaattatccccaaagagaattaaagtggaggatgggtttccagatttccaggattctgtgcaaacactcttccagcaggctagagctaagagtgaagaacttgcagctcttagttcacagcagcctgaaaaggtgatggcaaagcagatggagttcctttgcaaccaagctggctatgagagactgcagcatgccgagaggaggttgtctgcagggctttacaggcagagctcagaagagcacagtcctaacggcttgacttccgataactcagatggacaaggagaaagacctttgaatctccgaatgcctaatttacagaacagacaaccccatcattttgtggtggatggggagctgagcagactttaccccagtgaggcaaagtcccactcatcagagagccttgggattttaaaagactaccctcattcagcttttaccttagaaaagaaagtcatcaaaacagagcctgaagattcaagatagctgtgatttctctcaccgttctctggaaatggcatcagatttaaggataatactccatcatagaaataagccttaataaccagtgttgcctcattcagctcaaacagatttcatagccaaagcaaaaggactggtacggtagtctgtggaaaccaggaagataaaacaacagccacaaaagagaaaatcaagagtgttgcaatctataacagtaatattgattcattcacattcctgtgttaagtcattttatatggaaaggcttacaaatcaatattgtaagcattcattatttaagaatgtacaatgtatttgtgtaatttatagaagtaaaatctagatgttgagacctgtttggtctaatagatgtggatacagtttattttacttgaaattttgttgtctactttgtgtgtttaacgtaaatatatgtcagagtttagaatctgcctgcagttgtgaaaaagaaagcttaagtgatgcagttattggcaagattgcaatgattatggaaaaatagaaagcgaatactcagtttaagccaaggaaaatattgtggatttaatatttgataaaactgattttgtttaacaggaaatttttagcattcagtcatataacatctggttatcaatgcacgtttacacaataaatacttgagtggaggaaagttaaaaagatgagcaatagagtagaaaatatatcttaaactagttgacctagattgtattaatagctacttaagatgtttcaaagataggaagctattgcttggacagagaacttgaaataagtggacccatgtataaaagctttgacttaaacattgatatttcagaatgtgttaaatagattaagacacagtaagttaaccctacatgttataaagatggcgactgttaacaaaggctgtaacagattaagtactattttatatccagaaagtcttctctatgtagagaagtcagagagactagatgctttcactagggaatgtcttcccacccagccatcacaaatgtggacaatcactgcatccacatctgtaggcatatttctatggaagtttaattgacagctatattcattatttattttacaatttcatttttctacacctttgagatttatgaatgcagttttttcttaaaatttattttaacttgacagtatgtttttagttcccccaatttaattaatggaccatgtgcatatatatgggagtgtgcttacatgttaataatttacttgcatacttatgagaatttcacattggaattcataatggtaaaacaacatacatctgccaatatacgttttttctgttggtttaagagaagataactgacagctttacctacttcctacagatgcatctaaacccagatattactgagaagagtgtattgactctgagtgtaagagagtatgtgtttttttgtttttagttctgctctagatcataattgtaaaaaatattaagtcataatctgttacactaaaatttgtcagccaaatgttagatgaaatgtctgcactgtagtctcagatcactgtcacgtatataaattgcttcttcattttaatttgtagaagtactttacagtaggaaacgccagtaaacaacttttatactgttaaaaggcttttttccccttcctaaatgttttaattgtaccatagtgttttgctcactgaagaagcttcttatggaccttgcaactttgttgctagcttgaggttgattattgtggttgtattgttcactgtgtgtagaaatagtatgagtacgatttcaatagactgttcagtttttaatattagccatagcactggttagtatatctcagtagtttcatgaaacgtttcctgtattctaatctattttgaaacattttgtttttttttaattgtgtcttacagtcaagtttgtagattttcataagccacaattttaaaagatgcagtaatcttccaacttccaatatttatccattcgttgtggacccacagattgcatctttaaattcataataagtttccttaactatcttatgtttctagtctttcaagcttagtgataaggtggaagcacaagaaaaatttcagtagaatacagtttttattttgtaaacactaatgtattaaacttgctatacattaaagcaaataatatatatttttatttgaattgtatatgtgaattggaagttataattagttgattttttcattttgttagaggtattttcactgaacaaggtcaattggttacctcagtattacagccaatatagtccaagggaccatttctccccgagtctcttacactttattgtgcgatgtccacgtttttgtgactcttcaagctgttggtgaggtgggacgaatgcacttgcttcctgtggcaataaagattttctgtgcctcaca

SEQ ID NO: 159249 - DNA, 2472 bp, Homo sapiens
  Payload ID: 11165
  Gene Symbol: NAB1
  Gene Name: NGFI-A binding protein 1 (EGR1 binding protein 1)
  ENST ID: ENST00000409641
  CDS Start-End: 119-1579
ttctcgtttttgttcttaaaacctgtagtgtaacctatttggtgtaaggagtttgaagcaagtatgatgagtttttacttttttttttttttttggcaggttaaacccatccagagtaatggctgcggccttacccaggaccctgggggagttgcagctgtatagaatattacaaaaagccaatctactttcttattttgatgcctttatccaacaaggtggtgatgatgtccagcaactctgtgaagcaggagaagaggagtttttggaaatcatggcactcgtgggcatggctagcaagccccttcatgttagaaggctgcagaaggctttgagagactgggtcacaaaccctgggcttttcaatcagccactgacttcccttcctgtcagtagcatacccatctataaattaccagagggatcaccaacatggctgggaatatcctgcagtagttatgaaaggagtagcaatgcccgggaacctcatttaaaaatccccaaatgtgctgccaccacctgtgtgcagagcttgggacaggggaagtcagatgtggttgggagcctagcactgcagagtgttggtgagtccagactctggcaaggccaccatgccactgagagcgagcacagcctctccccagcagacctgggctcccccgcgtccccaaaggagagcagtgaggcgctggatgctgctgctgcgctctctgtggctgagtgtgtggagcggatggcccccacactgccaaaaagtgacttgaatgaagtgaaagagctgctaaaaaccaacaagaagttggccaaaatgattggtcacatctttgagatgaacgatgatgatccacacaaagaggaggaaattcggaaatacagtgcaatatatggcagatttgactcaaagaggaaggatgggaaacatctcacacttcatgagctcactgttaatgaagcggctgctcaactctgtgtgaaggataatgccctgctgacaagaagagatgagctttttgccttggctcgacagatttctcgagaagtcacctataaatatacttacagaaccaccaagtcaaaatgtggagaaagagatgaattatccccaaagagaattaaagtggaggatgggtttccagatttccaggattctgtgcaaacactcttccagcaggctagagctaagagtgaagaacttgcagctcttagttcacagcctgaaaaggtgatggcaaagcagatggagttcctttgcaaccaagctggctatgagagactgcagcatgccgagaggaggttgtctgcagggctttacaggcagagctcagaagagcacagtcctaacggcttgacttccgataactcagatggacaaggagaaagacctttgaatctccgaatgcctaatttacagaacagacaaccccatcattttgtggtggatggggagctgagcagactttaccccagtgaggcaaagtcccactcatcagagagccttgggattttaaaagactaccctcattcagcttttaccttagaaaagaaagtcatcaaaacagagcctgaagattcaagatagctgtgatttctctcaccgttctctggaaatggcatcagatttaaggataatactccatcatagaaataagccttaataaccagtgttgcctcattcagctcaaacagatttcatagccaaagcaaaaggactggtacggtagtctgtggaaaccaggaagataaaacaacagccacaaaagagaaaatcaagagtgttgcaatctataacagtaatattgattcattcacattcctgtgttaagtcattttatatggaaaggcttacaaatcaatattgtaagcattcattatttaagaatgtacaatgtatttgtgtaatttatagaagtaaaatctagatgttgagacctgtttggtctaatagatgtggatacagtttattttacttgaaattttgttgtctactttgtgtgtttaacgtaaatatatgtcagagtttagaatctgcctgcagttgtgaaaaagaaagcttaagtgatgcagttattggcaagattgcaatgattatggaaaaatagaaagcgaatactcagtttaagccaaggaaaatattgtggatttaatatttgataaaactgattttgtttaacaggaaatttttagcattcagtcatataacatctggttatcaatgcacgtttacacaataaatacttgagtggaggaaagttaaaaagatgagcaatagagtagaaaatatatcttaaactagttgacctagattgtattaatagctacttaagatgtttcaaagataggaagctattgcttggacagagaacttgaaataagtggacccatgtataaaagctttgacttaaacattgatatttcagaatgtgttaaatagattaagacacagtaagttaaccctacatgttataaagatgg

SEQ ID NO: 159250 - DNA, 2360 bp, Homo sapiens
  Payload ID: 11165
  Gene Symbol: NAB1
  Gene Name: NGFI-A binding protein 1 (EGR1 binding protein 1)
  Uniprot ID: Q13506
  ENST ID: ENST00000409581
  CDS Start-End: 311-1774
aggcgctgccgccgccgccgccgcccgcgcgccgcagcctggaggagccgccgccgccgccgcggccaagcgagcgccgtcggggcgggtgggcgggaagaagcggcgggcccgaggtgggggggagcagagagagcgcgcccaccaccttcccttcccccctcgatgggagcgggggcgtcccggctcctgcagccgccagaggagggagagccgggggccgtcgcttcggagttggggctgagcagtcctcggggagagcgcgccaagaccgctgcagccgctggctgagttaaacccatccagagtaatggctgcggccttacccaggaccctgggggagttgcagctgtatagaatattacaaaaagccaatctactttcttattttgatgcctttatccaacaaggtggtgatgatgtccagcaactctgtgaagcaggagaagaggagtttttggaaatcatggcactcgtgggcatggctagcaagccccttcatgttagaaggctgcagaaggctttgagagactgggtcacaaaccctgggcttttcaatcagccactgacttcccttcctgtcagtagcatacccatctataaattaccagagggatcaccaacatggctgggaatatcctgcagtagttatgaaaggagtagcaatgcccgggaacctcatttaaaaatccccaaatgtgctgccaccacctgtgtgcagagcttgggacaggggaagtcagatgtggttgggagcctagcactgcagagtgttggtgagtccagactctggcaaggccaccatgccactgagagcgagcacagcctctccccagcagacctgggctcccccgcgtccccaaaggagagcagtgaggcgctggatgctgctgctgcgctctctgtggctgagtgtgtggagcggatggcccccacactgccaaaaagtgacttgaatgaagtgaaagagctgctaaaaaccaacaagaagttggccaaaatgattggtcacatctttgagatgaacgatgatgatccacacaaagaggaggaaattcggaaatacagtgcaatatatggcagatttgactcaaagaggaaggatgggaaacatctcacacttcatgagctcactgttaatgaagcggctgctcaactctgtgtgaaggataatgccctgctgacaagaagagatgagctttttgccttggctcgacagatttctcgagaagtcacctataaatatacttacagaaccaccaagtcaaaatgtggagaaagagatgaattatccccaaagagaattaaagtggaggatgggtttccagatttccaggattctgtgcaaacactcttccagcaggctagagctaagagtgaagaacttgcagctcttagttcacagcagcctgaaaaggtgatggcaaagcagatggagttcctttgcaaccaagctggctatgagagactgcagcatgccgagaggaggttgtctgcagggctttacaggcagagctcagaagagcacagtcctaacggcttgacttccgataactcagatggacaaggagaaagacctttgaatctccgaatgcctaatttacagaacagacaaccccatcattttgtggtggatggggagctgagcagactttaccccagtgaggcaaagtcccactcatcagagagccttgggattttaaaagactaccctcattcagcttttaccttagaaaagaaagtcatcaaaacagagcctgaagattcaagatagctgtgatttctctcaccgttctctggaaatggcatcagatttaaggataatactccatcatagaaataagccttaataaccagtgttgcctcattcagctcaaacagatttcatagccaaagcaaaaggactggtacggtagtctgtggaaaccaggaagataaaacaacagccacaaaagagaaaatcaagagtgttgcaatctataacagtaatattgattcattcacattcctgtgttaagtcattttatatggaaaggcttacaaatcaatattgtaagcattcattatttaagaatgtacaatgtatttgtgtaatttatagaagtaaaatctagatgttgagacctgtttggtctaatagatgtggatacagtttattttacttgaaattttgttgtctactttgtgtgtttaacgtaaatatatgtcagagtttagaatctgcctgcagttgtgaaaaagaaagcttaagtgatgcagttattggcaagattgcaatgattatggaaaaatagaaagcgaatactcagtttaagccaaggaaaatattgtggatttaatatttgataaaactgattttg

SEQ ID NO: 159251 - DNA, 590 bp, Homo sapiens
  Payload ID: 11165
  Gene Symbol: NAB1
  Gene Name: NGFI-A binding protein 1 (EGR1 binding protein 1)
  ENST ID: ENST00000448811
  CDS Start-End: 133-590
acatttccttttcagcatcatgttcagccagacacagacaagcttgggaagaggatttaatgttgtttcttccaactctggaaacaattccactagaaggctcaatagttcaggttaaacccatccagagtaatggctgcggccttacccaggaccctgggggagttgcagctgtatagaatattacaaaaagccaatctactttcttattttgatgcctttatccaacaaggtggtgatgatgtccagcaactctgtgaagcaggagaagaggagtttttggaaatcatggcactcgtgggcatggctagcaagccccttcatgttagaaggctgcagaaggctttgagagactgggtcacaaaccctgggcttttcaatcagccactgacttcccttcctgtcagtagcatacccatctataaattaccagagggatcaccaacatggctgggaatatcctgcagtagttatgaaaggagtagcaatgcccgggaacctcatttaaaaatccccaaatgtgctgccaccacctgtgtgcagagcttgggacaggggaagtcagatgtggttgggagcctagcactgca

SEQ ID NO: 159252 - DNA, 1661 bp, Homo sapiens
  Payload ID: 11165
  Gene Symbol: NAB1
  Gene Name: NGFI-A binding protein 1 (EGR1 binding protein 1)
  ENST ID: ENST00000434473
  CDS Start-End: 1-721
gaaagagctgctaaaaaccaacaagaagttggccaaaatgattggtcacatctttgagatgaacgatgatgatccacacaaagaggaggaaattcggaaatacagtgcaatatatggcagatttgactcaaagaggaaggatgggaaacatctcacacttcatgagctcactgttaatgaagcggctgctcaactctgtgtgaaggataatgccctgctgacaagaagagatgagctttttgccttggctcgacagatttctcgagaagtcacctataaatatacttacagaaccaccaagtcaaaatgtggagaaagagatgaattatccccaaagagaattaaagtggagcagcctgaaaaggtgatggcaaagcagatggagttcctttgcaaccaagctggctatgagagactgcagcatgccgagaggaggttgtctgcagggctttacaggcagagctcagaagagcacagtcctaacggcttgacttccgataactcagatggacaaggagaaagacctttgaatctccgaatgcctaatttacagaacagacaaccccatcattttgtggtggatggggagctgagcagactttaccccagtgaggcaaagtcccactcatcagagagccttgggattttaaaagactaccctcattcagcttttaccttagaaaagaaagtcatcaaaacagagcctgaagattcaagatagctgtgatttctctcaccgttctctggaaatggcatcagatttaaggataatactccatcatagaaataagccttaataaccagtgttgcctcattcagctcaaacagatttcatagccaaagcaaaaggactggtacggtagtctgtggaaaccaggaagataaaacaacagccacaaaagagaaaatcaagagtgttgcaatctataacagtaatattgattcattcacattcctgtgttaagtcattttatatggaaaggcttacaaatcaatattgtaagcattcattatttaagaatgtacaatgtatttgtgtaatttatagaagtaaaatctagatgttgagacctgtttggtctaatagatgtggatacagtttattttacttgaaattttgttgtctactttgtgtgtttaacgtaaatatatgtcagagtttagaatctgcctgcagttgtgaaaaagaaagcttaagtgatgcagttattggcaagattgcaatgattatggaaaaatagaaagcgaatactcagtttaagccaaggaaaatattgtggatttaatatttgataaaactgattttgtttaacaggaaatttttagcattcagtcatataacatctggttatcaatgcacgtttacacaataaatacttgagtggaggaaagttaaaaagatgagcaatagagtagaaaatatatcttaaactagttgacctagattgtattaatagctacttaagatgtttcaaagataggaagctattgcttggacagagaacttgaaataagtggacccatgtataaaagctttgacttaaacattgatatttcagaatgtgttaaatagattaagacacagtaagttaaccctacatgttataaagatggcgactgttaacaaaggctgtaacagattaagtactattttatatcca

SEQ ID NO: 159253 - DNA, 542 bp, Homo sapiens
  Payload ID: 11165
  Gene Symbol: NAB1
  Gene Name: NGFI-A binding protein 1 (EGR1 binding protein 1)
  ENST ID: ENST00000423076
  CDS Start-End: 290-542
agagaagaaaaagacctaggatctcatgactgaacttgaattcttaaaaggactgagcagggggaggaacatttaagctgatggaagtggaagtggaagttgctgtacattggcagcaaggcctccgagttagcttttgaatgcagttaactggtttctcttaactgtggaattcattgaaaagtcagactccgagtggtcgttccaggatatcttgaaaagcccaggtaacagtggtgatgatgtccagcaactctgtgaagcaggagaagaggagtttttggaaatcatggcactcgtgggcatggctagcaagccccttcatgttagaaggctgcagaaggctttgagagactgggtcacaaaccctgggcttttcaatcagccactgacttcccttcctgtcagtagcatacccatctataaattaccagagggatcaccaacatggctgggaatatcctgcagtagttatgaaaggagtagcaatgcccgggaacctcatttaaaaatccccaaatgtgctgccaccacctgtgtgc

SEQ ID NO: 159254 - DNA, 545 bp, Homo sapiens
  Payload ID: 11165
  Gene Symbol: NAB1
  Gene Name: NGFI-A binding protein 1 (EGR1 binding protein 1)
  ENST ID: ENST00000426601
  CDS Start-End: 246-545
actcggccgcgcgtgggcgggagccggagcggcgaatgtagcaagagcggaatctcccaatgtgacagcgcgggttttctttttaaaagcggaaggagagttttacatggaagtggcttacagaaacttggcgctgaggtgcagggaagccagaaactctttgtgtctctaaggccgatgaggaatttggaaacacatgtgggacatacaagcgttggatatagaggttaaacccatccagagtaatggctgcggccttacccaggaccctgggggagttgcagctgtatagaatattacaaaaagccaatctactttcttattttgatgcctttatccaacaaggtggtgatgatgtccagcaactctgtgaagcaggagaagaggagtttttggaaatcatggcactcgtgggcatggctagcaagccccttcatgttagaaggctgcagaaggctttgagagactgggtcacaaaccctgggcttttcaatcagccactgacttcccttcctgtcagtagcatacccatctataaattacca

SEQ ID NO: 159255 - DNA, 438 bp, Homo sapiens
  Payload ID: 11165
  Gene Symbol: NAB1
  Gene Name: NGFI-A binding protein 1 (EGR1 binding protein 1)
  ENST ID: ENST00000423376
  CDS Start-End: 253-438
aggaacagagaagaaaaagacctaggatctcatgactgaacttgaattcttaaaaggactgagcagggggaggaacatttaagctgatggaagtggaagtggaagttgctgtacattggcagcaaggcctccgagttagcttttgaatgcagttaactggtttctcttaactgtggaattcattgaaaagtcagactccgagtggtcgttccaggatatcttgaaaagcccaggttaaacccatccagagtaatggctgcggccttacccaggaccctgggggagttgcagctgtatagaatattacaaaaagccaatctactttcttattttgatgcctttatccaacaaggtggtgatgatgtccagcaactctgtgaagcaggagaagaggagtttttggaaatcatggcactcgtgggcatggctagcaagccc

SEQ ID NO: 159256 - DNA, 568 bp, Homo sapiens
  Payload ID: 11165
  Gene Symbol: NAB1
  Gene Name: NGFI-A binding protein 1 (EGR1 binding protein 1)
  ENST ID: ENST00000416973
  CDS Start-End: 97-568
gtcactcggccgcgcgtgggcgggagccggagcggcgaatgtagcaagagcggaatctcccaatgtgacagcgcggggttaaacccatccagagtaatggctgcggccttacccaggaccctgggggagttgcagctgtatagaatattacaaaaagccaatctactttcttattttgatgcctttatccaacaaggtggtgatgatgtccagcaactctgtgaagcaggagaagaggagtttttggaaatcatggcactcgtgggcatggctagcaagccccttcatgttagaaggctgcagaaggctttgagagactgggtcacaaaccctgggcttttcaatcagccactgacttcccttcctgtcagtagcatacccatctataaattaccagagggatcaccaacatggctgggaatatcctgcagtagttatgaaaggagtagcaatgcccgggaacctcatttaaaaatccccaaatgtgctgccaccacctgtgtgcagagcttgggacaggggaagtcagatgtggttgggagcctagcactgcagagtgttggtgagt

SEQ ID NO: 159257 - DNA, 2711 bp, Homo sapiens
  Payload ID: 11166
  Gene Symbol: NAB2
  Gene Name: NGFI-A binding protein 2 (EGR1 binding protein 2)
  Uniprot ID: Q15742
  ENST ID: ENST00000300131
  CDS Start-End: 379-1956
ctctcccagtctctaagccgcggcgtctccgcggccgagaggccccagcgcccgcctccccggcccccgcccccacccccgcccccggctctgcccacgccctccgcccgccagcccggcagccagcgcagctccgggcctcgctccctgtgcgtcctgcgggggcggaggcgcggagaggcggcaagcgcagccggggagggtgggggggcagaggcacagacagaggcgcggaggctcggagagagaagacgtggagggagggacagagcctggacagcggtggacacggcatcgtgcgcggggaagagggcagcacgcagcaggcgccgagcgccgggcaccgagaagggcagcccgggtgatctccggccgtccatgcacagagcgccttcccccacagccgagcagccgccgggcggaggggacagcgcccgccggaccctgcagcccagactcaagcccagtgcccgagccatggcactgcctcggacgctgggggagctgcagctgtaccgggtcctgcagcgcgccaacctcctttcctactatgagaccttcatccagcagggaggggacgacgtgcagcagctgtgtgaggcgggtgaggaggagtttctggagatcatggcacttgtgggcatggccaccaagcccctccatgtccggcgcctgcagaaggcactgagagagtgggccaccaatccagggctcttcagtcaaccagtgcctgctgttcccgtctccagcatcccgctcttcaagatctctgagactgcgggtacccggaaagggagcatgagcaatgggcatggcagcccaggggaaaaggcaggcagtgcccgcagttttagccccaagagcccccttgaacttggagagaagctatcaccactgcctgggggacctggggcaggggacccccggatctggccaggccggagcactccagagtcggacgttggggcaggaggagaagaggaggctggctcgccccccttctccccccctgcagggggaggagtccctgaggggactggggctggggggctggcagcaggtgggactgggggtggtccagaccgactggagccagagatggtacgcatggtggtggaaagtgtggagaggatcttccggagcttcccaaggggggatgctggggaggtcacatccctgctaaagctgaataagaagctggcacggagcgttgggcacatctttgagatggatgataatgacagccagaaggaagaggagatccgcaaatacagcatcatctatggccgtttcgactctaagcggcgggagggcaagcagctcagcctgcacgagctcaccatcaacgaggctgctgcccagttctgcatgagggacaacacgctcttattacggagagtggagctcttctctttgtcccgccaagtagcccgagagagcacctacttgtcctccttgaagggctccaggcttcaccctgaagaactgggaggccctccactgaagaagctgaaacaagaggttggagaacagagtcaccctgaaatccagcagcctcccccaggccctgagtcctatgtacccccataccgccccagcctggaggaggacagcgccagcctgtctggggagagtctggatggacatttgcaggctgtggggtcatgtccaaggctgacgccgccccctgctgacctgcctctggcattgccagcccatgggctatggagccgacacatcctgcagcagacactgatggacgaggggctgcggctcgcccgcctcgtctcccacgaccgcgtgggccgcctcagcccctgtgtgcctgcgaagccacctctcgcagagttcgaggaagggctgctggacagatgtcctgccccaggaccccatcccgcgctggtggagggtcgcaggagcagcgtgaaagtggaggctgaggccagccggcagtgagggttggactggtgtcttcagacccaggacctcagacttctggctcacacagacccccacgctctccatccccggaatctagtcacaaccctggatccttcctctgcccttctcctgcctccccacctgctccatgggcataagactgtggggcttcaagcaataacaagcagaggcctggagagaggacacaaggagggtgcgtggtgccctcacccctgcccagagcgagggggcaaggactctgcctccagggcatctggggttttcccctccctcacacaacacactcccattctctttaggtttgcaccagtggtgtgagcagttggactcagtttggacaagggggaaagggggacttccctgggaaggtccagctaaaagtggcaacatttgcccccagaattgggggcctgggaacactggacctgctccttctcccctctccttccccgtttttgtgcttctggtttgtttctttaattaatttaacaagtgctgcagtttgccctcccattcccatctatcccccaagtcctttgcaatttcttccctgccctacataggggcggtgggtgtgggatcccttcactggccccctcgggaggcctgggttggactcagggtctcctccagctgggggctggaccgcagcacctatctgagcagttagagcgtctttcttttcagattgtgtacagtagattatttattttgttattttggaataaaatttattttatggcttagga

SEQ ID NO: 159258 - DNA, 2318 bp, Homo sapiens
  Payload ID: 11166
  Gene Symbol: NAB2
  Gene Name: NGFI-A binding protein 2 (EGR1 binding protein 2)
  Uniprot ID: Q15742
  ENST ID: ENST00000342556
  CDS Start-End: 179-1564
gggtgggggggcagaggcacagacagaggcgcggaggctcggagagagaagacgtggagggagggacagagcctggacagcggtggacacggcatcgtgcgcggggaagagggcagcacgcagcaggcgccgagcgccgggcaccgagaagggcagcccgggtgatctccggccgtccatgcacagagcgccttcccccacagccgagcagccgccgggcggaggggacagcgcccgccggaccctgcagcccagactcaagcccagtgcccgagccatggcactgcctcggacgctgggggagctgcagctgtaccgggtcctgcagcgcgccaacctcctttcctactatgagaccttcatccagcagggaggggacgacgtgcagcagctgtgtgaggcgggtgaggaggagtttctggagatcatggcacttgtgggcatggccaccaagcccctccatgtccggcgcctgcagaaggcactgagagagtgggccaccaatccagggctcttcagtcaaccagtgcctgctgttcccgtctccagcatcccgctcttcaagatctctgagactgcgggtacccggaaagggagcatgagcaatgggcatggcagcccaggggaaaaggcaggcagtgcccgcagttttagccccaagagcccccttgaacttggagagaagctatcaccactgcctgggggacctggggcaggggacccccggatctggccaggccggagcactccagagtcggacgttggggcaggaggagaagaggaggctggctcgccccccttctccccccctgcagggggaggagtccctgaggggactggggctggggggctggcagcaggtgggactgggggtggtccagaccgactggagccagagatggtacgcatggtggtggaaagtgtggagaggatcttccggagcttcccaaggggggatgctggggaggtcacatccctgctaaagctgaataagaagctggcacggagcgttgggcacatctttgagatggatgataatgacagccagaaggaagaggagatccgcaaatacagcatcatctatggccgtttcgactctaagcggcgggagggcaagcagctcagcctgcacgagctcaccatcaacgaggctgctgcccagttctgcatgagggacaacacgctcttattacggagagtggagctcttctctttgtcccgccaagtagcccgagagagcacctacttgtcctccttgaagggctccaggcttcaccctgaagaactgggaggccctccactgaagaagctgaaacaagaggttggagaacagagtcaccctgaaatccagcagcctcccccaggccctgagtcctatgtacccccataccgccccagcctggaggaggacagcgccagcctgtctggggagagtctggatggacatttgcaggagttcgaggaagggctgctggacagatgtcctgccccaggaccccatcccgcgctggtggagggtcgcaggagcagcgtgaaagtggaggctgaggccagccggcagtgagggttggactggtgtcttcagacccaggacctcagacttctggctcacacagacccccacgctctccatccccggaatctagtcacaaccctggatccttcctctgcccttctcctgcctccccacctgctccatgggcataagactgtggggcttcaagcaataacaagcagaggcctggagagaggacacaaggagggtgcgtggtgccctcacccctgcccagagcgagggggcaaggactctgcctccagggcatctggggttttcccctccctcacacaacacactcccattctctttaggtttgcaccagtggtgtgagcagttggactcagtttggacaagggggaaagggggacttccctgggaaggtccagctaaaagtggcaacatttgcccccagaattgggggcctgggaacactggacctgctccttctcccctctccttccccgtttttgtgcttctggtttgtttctttaattaatttaacaagtgctgcagtttgccctcccattcccatctatcccccaagtcctttgcaatttcttccctgccctacataggggcggtgggtgtgggatcccttcactggccccctcgggaggcctgggttggactcagggtctcctccagctgggggctggaccgcagcacctatctgagcagttagagcgtctttcttttcagattgtgtacagtagattatttattttgttattttggaataaaatttattttatggcttagg

SEQ ID NO: 159259 - DNA, 1897 bp, Homo sapiens
  Payload ID: 11167
  Gene Symbol: NGLY1
  Gene Name: N-glycanase 1
  ENST ID: ENST00000280699
  CDS Start-End: 1-721
ctcaggctcggcgtccccggccgtggctgagctctgccagaacaccccggagacctttttggaggcctccaagctgctgctcacctatgctgacaacatcctcagaaaccctaatgatgaaaaatatagatccatccggattggaaacacagccttttctactagactcttgcctgtcagaggagctgttgaatgtttatttgaaatgggctttgaagagggagaaacacatctcatctttcctaaaaaagcttcagtggagcagctgcaaaaaattcgtgacctgattgccatagagagaagtagcagactggatggctcaaataagagccacaaagtaaagtcatctcagcaacctgcagccagtacccagcttcctacaacaccatcttcaaatcccagtgggttaaaccagcacacaaggaaccgtcaagggcagtcatcagatccaccatctgcttcaacggttgctgctgactcagccattctagaagttcttcagtccaacattcagcatgtgctggtctatgaaaatcctgctcttcaggagaaagcgttggcttgtattccggtccaagaactaaaaaggaaatcacaagaaaagttatcgagagctagaaaattggataaagatataataaccctgagaaacttttggaaacaagatgtggacggtgtggcgagtgggccaattgttttacactgtgctgccgagctgtagggtttgaagctcgctatgtttgggattacacagaccatgtctggacagaagtctattctccttctcagcagcggtggctgcactgtgatgcatgtgaagatgtctgtgacaagccactcctttatgaaataggatggggcaagaagctttcctatgtcatagcattttcaaaagatgaggtagttgatgtcacttggcgatattcctgcaaacatgaagaggtgattgccagaagaactaaggttaaagaagcattacttcgagacactattaatgggcttaataagcagaggcaactgtttttgtcagaaaacagaaggaaagaacttctccagaggataattgtggagcttgttgaatttatatctcccaaaacccctaaacctggagaacttgggggaagaatatctgggtcagtggcttggagagtagcccgaggtgaaatgggtctacagagaaaagaaaccttgtttattccctgtgaaaatgagaagatttctaaacagctccacctttgttacaatattgtgaaagatcgttatgttcgagtttcaaataacaatcaaaccatttctggatgggagaatggcgtgtggaaaatggaatctatattcagaaaagttgaaacagactggcacatggtatatttggcccgaaaggaaggatcatcttttgcttatatttcctggaagtttgagtgtgggtcagttggcctaaaagtagatagcatttctattagaacaagtagtcaaacttttcagactggaacagtagaatggaaattgcgatctgatacagcacaagtagaactgacaggcgataacagtcttcactcctatgctgatttttctggtgccactgaagttattttggaagcagaattaagcagaggagatggtgatgtcgcttggcaacacacccagctgtttagacaaagcttaaatgaccatgaagaaaattgtttggagataattataaaattcagtgacctttgagaacctgaacattatagaaaagctggcaataatcaaggacttactgaagtagtctgttggttcagtgcatgcttagttggcagttaccaccctgtgctagcatatttcttttgctagctatccatcatgtaaccctcatgaaaattatctttatacgtggactataataaaatattgaatt

SEQ ID NO: 159260 - DNA, 2473 bp, Homo sapiens
  Payload ID: 11167
  Gene Symbol: NGLY1
  Gene Name: N-glycanase 1
  Uniprot ID: Q96IV0
  ENST ID: ENST00000280700
  CDS Start-End: 162-2126
gccggccgaggaccccgcccctgccggccgaggaccccgcccctgccggccgaggaccccgcccctgccggtggctgcggtagctgctgcgcgctgaggcgcctgctcagtgtgggacgcggagagcgaggggcggcggcggcgcccgctggcgctcaagcatggcggcggcggcattgggcagctcctcaggctcggcgtccccggccgtggctgagctctgccagaacaccccggagacctttttggaggcctccaagctgctgctcacctatgctgacaacatcctcagaaaccctaatgatgaaaaatatagatccatccggattggaaacacagccttttctactagactcttgcctgtcagaggagctgttgaatgtttatttgaaatgggctttgaagagggagaaacacatctcatctttcctaaaaaagcttcagtggagcagctgcaaaaaattcgtgacctgattgccatagagagaagtagcagactggatggctcaaataagagccacaaagtaaagtcatctcagcaacctgcagccagtacccagcttcctacaacaccatcttcaaatcccagtgggttaaaccagcacacaaggaaccgtcaagggcagtcatcagatccaccatctgcttcaacggttgctgctgactcagccattctagaagttcttcagtccaacattcagcatgtgctggtctatgaaaatcctgctcttcaggagaaagcgttggcttgtattccggtccaagaactaaaaaggaaatcacaagaaaagttatcgagagctagaaaattggataaaggtatcaatataagtgatgaggattttcttttgctggagcttttgcactggtttaaggaagaattttttcactgggtgaataacgttttgtgcagcaaatgtggtggacagactaggtctagagatagatcattactgcccagtgatgatgagctgaagtggggtgcaaaggaagtggaagatcattactgtgatgcctgccagttcagcaatcgattcccaagatataataaccctgagaaacttttggaaacaagatgtggacggtgtggcgagtgggccaattgttttacactgtgctgccgagctgtagggtttgaagctcgctatgtttgggattacacagaccatgtctggacagaagtctattctccttctcagcagcggtggctgcactgtgatgcatgtgaagatgtctgtgacaagccactcctttatgaaataggatggggcaagaagctttcctatgtcatagcattttcaaaagatgaggtagttgatgtcacttggcgatattcctgcaaacatgaagaggtgattgccagaagaactaaggttaaagaagcattacttcgagacactattaatgggcttaataagcagaggcaactgtttttgtcagaaaacagaaggaaagaacttctccagaggataattgtggagcttgttgaatttatatctcccaaaacccctaaacctggagaacttgggggaagaatatctgggtcagtggcttggagagtagcccgaggtgaaatgggtctacagagaaaagaaaccttgtttattccctgtgaaaatgagaagatttctaaacagctccacctttgttacaatattgtgaaagatcgttatgttcgagtttcaaataacaatcaaaccatttctggatgggagaatggcgtgtggaaaatggaatctatattcagaaaagttgaaacagactggcacatggtatatttggcccgaaaggaaggatcatcttttgcttatatttcctggaagtttgagtgtgggtcagttggcctaaaagtagatagcatttctattagaacaagtagtcaaacttttcagactggaacagtagaatggaaattgcgatctgatacagcacaagtagaactgacaggcgataacagtcttcactcctatgctgatttttctggtgccactgaagttattttggaagcagaattaagcagaggagatggtgatgtcgcttggcaacacacccagctgtttagacaaagcttaaatgaccatgaagaaaattgtttggagataattataaaattcagtgacctttgagaacctgaacattatagaaaagctggcaataatcaaggacttactgaagtagtctgttggttcagtgcatgcttagttggcagttaccaccctgtgctagcatatttcttttgctagctatccatcatgtaaccctcatgaaaattatctttatacgtggactataataaaatattgaattaaaacctttcttccatatgtgactataatttggagtaaagtcttgttgactcaatatgggattttaatctaaaactgtaagtatggttttaaaagttaaataatgatattcatgattaaatgctattcatgattatgataaaatcttgggcttatgatagtaattt

SEQ ID NO: 159261 - DNA, 2086 bp, Homo sapiens
  Payload ID: 11167
  Gene Symbol: NGLY1
  Gene Name: N-glycanase 1
  ENST ID: ENST00000308710
  CDS Start-End: 1-1902
gcggcattgggcagctcctcaggctcggcgtccccggccgtggctgagctctgccagaacaccccggagacctttttggaggcctccaagctgctgctcacctatgctgacaacatcctcagaaaccctaatgatgaaaaatatagatccatccggattggaaacacagccttttctactagactcttgcctgtcagaggagctgttgaatgtttatttgaaatgggctttgaagagggagaaacacatctcatctttcctaaaaaagcttcagtggagcagctgcaaaaaattcgtgacctgattgccatagagagaagtagcagactggatggctcaaataagagccacaaagtaaagtcatctcagcaacctgcagccagtacccagcttcctacaacaccatcttcaaatcccagtgggttaaaccagcacacaaggaaccgtcaagggcagtcatcagatccaccatctgcttcaacggttgctgctgactcagccattctagaagttcttcagtccaacattcagcatgtgctggtctatgaaaatcctgctcttcaggagaaagcgttggcttgtattccggtccaagaactaaaaaggaaatcacaagaaaagttatcgagagctagaaaattggataaaggtatcaatataagtgatgaggattttcttttgctggagcttttgcactggtttaaggaagaattttttcactgggtgaataacgttttgtgcagcaaatgtggtggacagactaggtctagagatagatcattactgcccagtgatgatgagctgaagtggggtgcaaaggaagtggaagatcattactgtgatgcctgccagttcagcaatcgattcccaagatataataaccctgagaaacttttggaaacaagatgtggacggtgtggcgagtgggccaattgttttacactgtgctgccgagctgtagggtttgaagctcgctatgtttgggattacacagagttacagcgcacattaagcctaaaactgaccacgttaaaggagattggaaaaacatttttaaggatttcaaagagacagaaattaatacaggtagttgatgtcacttggcgatattcctgcaaacatgaagaggtgattgccagaagaactaaggttaaagaagcattacttcgagacactattaatgggcttaataagcagaggcaactgtttttgtcagaaaacagaaggaaagaacttctccagaggataattgtggagcttgttgaatttatatctcccaaaacccctaaacctggagaacttgggggaagaatatctgggtcagtggcttggagagtagcccgaggtgaaatgggtctacagagaaaagaaaccttgtttattccctgtgaaaatgagaagatttctaaacagctccacctttgttacaatattgtgaaagatcgttatgttcgagtttcaaataacaatcaaaccatttctggatgggagaatggcgtgtggaaaatggaatctatattcagaaaagttgaaacagactggcacatggtatatttggcccgaaaggaaggatcatcttttgcttatatttcctggaagtttgagtgtgggtcagttggcctaaaagtagatagcatttctattagaacaagtagtcaaacttttcagactggaacagtagaatggaaattgcgatctgatacagcacaagtagaactgacaggcgataacagtcttcactcctatgctgatttttctggtgccactgaagttattttggaagcagaattaagcagaggagatggtgatgtcgcttggcaacacacccagctgtttagacaaagcttaaatgaccatgaagaaaattgtttggagataattataaaattcagtgacctttgagaacctgaacattatagaaaagctggcaataatcaaggacttactgaagtagtctgttggttcagtgcatgcttagttggcagttaccaccctgtgctagcatatttcttttgctagctatccatcatgtaaccctcatgaaaattatctttatacgtggactataataaaatattgaattaaa

SEQ ID NO: 159262 - DNA, 2024 bp, Homo sapiens
  Payload ID: 11167
  Gene Symbol: NGLY1
  Gene Name: N-glycanase 1
  Uniprot ID: Q96IV0
  ENST ID: ENST00000396649
  CDS Start-End: 49-1725
gggacgcggagagcgaggggcggcggcggcgcccgctggcgctcaagcatggcggcggcggcattgggcagctcctcaggctcggcgtccccggccgtggctgagctctgccagaacaccccggagacctttttggaggcctccaagctgctgctcacctatgctgacaacatcctcagaaaccctaatgatgaaaaatatagatccatccggattggaaacacagccttttctactagactcttgcctgtcagaggagctgttgaatgtttatttgaaatgggctttgaagagggagaaacacatctcatctttcctaaaaaagcttcagtggagcagctgcaaaaaattcgtgacctgattgccatagagagaagtagcagactggatggctcaaataagagccacaaagtaaagtcatctcagcaacctgcagccagtacccagcttcctacaacaccatcttcaaatcccagtgggttaaaccagcacacaaggaaccgtcaagggcagtcatcagatccaccatctgcttcaacggttgctgctgactcagccattctagaagttcttcagtccaacattcagcatgtgctggtctatgaaaatcctgctcttcaggagaaagcgttggcttgtattccggtccaagaactaaaaaggaaatcacaagaaaagttatcgagagctagaaaattggataaaggtatcaatataagtgatgaggattttcttttgctggagcttttgcactggtttaaggaagaattttttcactgggtgaataacgttttgtgcagcaaatgtggtggacagactaggtctagagatagatcattactgcccagtgatgatgagctgaagtggggtgcaaaggaagtggaagatcattactgtgatgcctgccagttcagcaatcgattcccaagatataataaccctgagaaacttttggaaacaagatgtggacggtgtggcgagtgggccaattgttttacactgtgctgccgagctgtagggtttgaagctcgctatgtttgggattacacagaccatgtctggacagaagtctattctccttctcagcagcggtggctgcactgtgatgcatgtgaagatgtctgtgacaagccactcctttatgaaataggatggggcaagaagctttcctatgtcatagcattttcaaaagatgaggtagttgatgtcacttggcgatattcctgcaaacatgaagaggtgattgccagaagaactaaggttaaagaagcattacttcgagacactattaatgggcttaataagcagaggcaactgtttttgtcagaaaacagaaggaaagaacttctccagaggataattgtggagcttgttgaatttatatctcccaaaacccctaaacctggagaacttgggggaagaatatctgggtcagtggcttggagagtagcccgaggtgaaatgggtctacagagaaaagaaaccttgtttattccctgtgaaaatgagaagatttctaaacagctccacctttgttacaatattgtgaaagatcgttatgttcgagtttcaaataacaatcaaaccatttctggatgggagaatggcgtgtggaaaatggaatctatattcagaaaagttgaaacagactggcacatgataacagtcttcactcctatgctgatttttctggtgccactgaagttattttggaagcagaattaagcagaggagatggtgatgtcgcttggcaacacacccagctgtttagacaaagcttaaatgaccatgaagaaaattgtttggagataattataaaattcagtgacctttgagaacctgaacattatagaaaagctggcaataatcaaggacttactgaagtagtctgttggttcagtgcatgcttagttggcagttaccaccctgtgctagcatatttcttttgctagctatccatcatgtaaccctcatgaaaattatctttatacgtggactataataaaatattgaattaaaacctt

SEQ ID NO: 159263 - DNA, 2534 bp, Homo sapiens
  Payload ID: 11167
  Gene Symbol: NGLY1
  Gene Name: N-glycanase 1
  Uniprot ID: Q96IV0
  ENST ID: ENST00000428257
  CDS Start-End: 109-2019
ggaccccgcccctgccggtggctgcggtagctgctgcgcgctgaggcgcctgctcagtgtgggacgcggagagcgaggggcggcggcggcgcccgctggcgctcaagcatggcggcggcggcattgggcagctcctcaggctcggcgtccccggccgtggctgagctctgccagaacaccccggagacctttttggaggcctccaagctgctgctcacctatgctgacaacatcctcagaaaccctaatgatgaaaaatatagatccatccggattggaaacacagccttttctactagactcttgcctgtcagaggagctgttgaatgtttatttgaaatgggctttgaagagggagaaacacatctcatctttcctaaaaaagcttcagtggagcagctgcaaaaaattcgtgacctgattgccatagagagaagtagcagactggatggctcaaataagagccacaaagtaaagtcatctcagcaacctgcagccagtacccagcttcctacaacaccatcttcaaatcccagtgggttaaaccagcacacaaggaaccgtcaagggcagtcatcagatccaccatctgcttcaacggttgctgctgactcagccattctagaagttcttcagtccaacattcagcatgtgctggtctatgaaaatcctgctcttcaggagaaagcgttggcttgtattccggtccaagaactaaaaaggaaatcacaagaaaagttatcgagagctagaaaattggataaaggtatcaatataagtgatgaggattttcttttgctggagcttttgcactggtttaaggaagaattttttcactgggtgaataacgttttgtgcagcaaatgtggtggacagactaggtctagagatagatcattactgcccagtgatgatgagctgaagtggggtgcaaaggaagtggaagatcattactgtgatgcctgccagttcagcaatcgattcccaagatataataaccctgagaaacttttggaaacaagatgtggacggtgtggcgagtgggccaattgttttacactgtgctgccgagctgtagggtttgaagctcgctatgtttgggattacacagagttacagcgcacattaagcctaaaactgaccacgttaaaggagattggaaaaacatttttaaggatttcaaagagacagaaattaatacaggtagttgatgtcacttggcgatattcctgcaaacatgaagaggtgattgccagaagaactaaggttaaagaagcattacttcgagacactattaatgggcttaataagcagaggcaactgtttttgtcagaaaacagaaggaaagaacttctccagaggataattgtggagcttgttgaatttatatctcccaaaacccctaaacctggagaacttgggggaagaatatctgggtcagtggcttggagagtagcccgaggtgaaatgggtctacagagaaaagaaaccttgtttattccctgtgaaaatgagaagatttctaaacagctccacctttgttacaatattgtgaaagatcgttatgttcgagtttcaaataacaatcaaaccatttctggatgggagaatggcgtgtggaaaatggaatctatattcagaaaagttgaaacagactggcacatggtatatttggcccgaaaggaaggatcatcttttgcttatatttcctggaagtttgagtgtgggtcagttggcctaaaagtagatagcatttctattagaacaagtagtcaaacttttcagactggaacagtagaatggaaattgcgatctgatacagcacaagtagaactgacaggcgataacagtcttcactcctatgctgatttttctggtgccactgaagttattttggaagcagaattaagcagaggagatggtgatgtcgcttggcaacacacccagctgtttagacaaagcttaaatgaccatgaagaaaattgtttggagataattataaaattcagtgacctttgagaacctgaacattatagaaaagctggcaataatcaaggacttactgaagtagtctgttggttcagtgcatgcttagttggcagttaccaccctgtgctagcatatttcttttgctagctatccatcatgtaaccctcatgaaaattatctttatacgtggactataataaaatattgaattaaaacctttcttccatatgtgactataatttggagtaaagtcttgttgactcaatatgggattttaatctaaaactgtaagtatggttttaaaagttaaataatgatattcatgattaaatgctattcatgattatgataaaatcttgggcttatgatagtaatttgacattttctgatcagccattcatttcttcagaagtggttaaattagagtctcctaatatttttaattaatgtgaaagtacagtagctcataaattatataatgcatgaaaatttatatgattataaatattcaggcatttaagaaataaaatgaagtattttgcctt

SEQ ID NO: 159264 - DNA, 2062 bp, Homo sapiens
  Payload ID: 11167
  Gene Symbol: NGLY1
  Gene Name: N-glycanase 1
  Uniprot ID: Q96IV0
  ENST ID: ENST00000417874
  CDS Start-End: 175-2013
gctttcccacgcacgcgtcccgttcgactctctttccgccggttgactttaagccgcgtcaccttggctgaggtcagaccgtgggaggcggctgggtagctgtttgcgtgagcagagacgcccctctcggaacctcagtgactcgccgataatcgaggacctgccaataacgcgatgagaaaccctaatgatgaaaaatatagatccatccggattggaaacacagccttttctactagactcttgcctgtcagaggagctgttgaatgtttatttgaaatgggctttgaagagggagaaacacatctcatctttcctaaaaaagcttcagtggagcagctgcaaaaaattcgtgacctgattgccatagagagaagtagcagactggatggctcaaataagagccacaaagtaaagtcatctcagcaacctgcagccagtacccagcttcctacaacaccatcttcaaatcccagtgggttaaaccagcacacaaggaaccgtcaagggcagtcatcagatccaccatctgcttcaacggttgctgctgactcagccattctagaagttcttcagtccaacattcagcatgtgctggtctatgaaaatcctgctcttcaggagaaagcgttggcttgtattccggtccaagaactaaaaaggaaatcacaagaaaagttatcgagagctagaaaattggataaaggtatcaatataagtgatgaggattttcttttgctggagcttttgcactggtttaaggaagaattttttcactgggtgaataacgttttgtgcagcaaatgtggtggacagactaggtctagagatagatcattactgcccagtgatgatgagctgaagtggggtgcaaaggaagtggaagatcattactgtgatgcctgccagttcagcaatcgattcccaagatataataaccctgagaaacttttggaaacaagatgtggacggtgtggcgagtgggccaattgttttacactgtgctgccgagctgtagggtttgaagctcgctatgtttgggattacacagaccatgtctggacagaagtctattctccttctcagcagcggtggctgcactgtgatgcatgtgaagatgtctgtgacaagccactcctttatgaaataggatggggcaagaagctttcctatgtcatagcattttcaaaagatgaggtagttgatgtcacttggcgatattcctgcaaacatgaagaggtgattgccagaagaactaaggttaaagaagcattacttcgagacactattaatgggcttaataagcagaggcaactgtttttgtcagaaaacagaaggaaagaacttctccagaggataattgtggagcttgttgaatttatatctcccaaaacccctaaacctggagaacttgggggaagaatatctgggtcagtggcttggagagtagcccgaggtgaaatgggtctacagagaaaagaaaccttgtttattccctgtgaaaatgagaagatttctaaacagctccacctttgttacaatattgtgaaagatcgttatgttcgagtttcaaataacaatcaaaccatttctggatgggagaatggcgtgtggaaaatggaatctatattcagaaaagttgaaacagactggcacatggtatatttggcccgaaaggaaggatcatcttttgcttatatttcctggaagtttgagtgtgggtcagttggcctaaaagtagatagcatttctattagaacaagtagtcaaacttttcagactggaacagtagaatggaaattgcgatctgatacagcacaagtagaactgacaggcgataacagtcttcactcctatgctgatttttctggtgccactgaagttattttggaagcagaattaagcagaggagatggtgatgtcgcttggcaacacacccagctgtttagacaaagcttaaatgaccatgaagaaaattgtttggagataattataaaattcagtgacctttgagaacctgaacattatagaaaagctggcaataatcaaggacttactgaag

SEQ ID NO: 159265 - DNA, 579 bp, Homo sapiens
  Payload ID: 11167
  Gene Symbol: NGLY1
  Gene Name: N-glycanase 1
  ENST ID: ENST00000427041
  CDS Start-End: 236-579
attccccctgcgtgcatttttcgagcggagtggcttacatttccacatacttatcagaagttactcactgacaaagtgatgttttcttcccatgttgagactatccgagtactaaagcataatgcttctgaagtgaaaccctaatgatgaaaaatatagatccatccggattggaaacacagccttttctactagactcttgcctgtcagaggagctgttgaatgtttatttgaaatgggctttgaagagggagaaacacatctcatctttcctaaaaaagcttcagtggagcagctgcaaaaaattcgtgacctgattgccatagagagaagtagcagactggatggctcaaataagagccacaaagtaaagtcatctcagcaacctgcagccagtacccagcttcctacaacaccatcttcaaatcccagtgggttaaaccagcacacaaggaaccgtcaagggcagtcatcagatccaccatctgcttcaacggttgctgctgactcagccattctagaagttcttcagtccaacattcagcatgtgctggtctatgaaaatcctgctcttcagga

SEQ ID NO: 159266 - DNA, 11051 bp, Homo sapiens
  Payload ID: 11168
  Gene Symbol: NHLRC2
  Gene Name: NHL repeat containing 2
  Uniprot ID: Q8NBF2
  ENST ID: ENST00000369301
  CDS Start-End: 213-2393
agtttaattacgtccccgggaactgcgccgatttggacttttggcacttggacctatgctttaaaaagaaaaaagtgtcattggcgtggagtggggctagtggagggtgaggtgaatgcgccgtttggaaaccacaggacagtgaacgtttcgtctctcccagcgagactctcccgcgggcccggcggccgcatcgggagcccggcggaaacatggcggcgcccggaggccggggccgcagcctctccggcctgctccccgcgcagacctcgctagagtacgccctgctcgacgccgttacccagcaggagaaggacagcctggtctaccagtatctgcagaaggtggacggctgggagcaggacttgtcagtacccgagtttccggaaggattagaatggctgaacacagaagaacctatttctgtctacaaggatctatgtggaaaaatagtcgtccttgatttcttcacctactgctgcataaactgtattcacctattgcctgatctccatgcattagaacacacatactctgataaagatggtcttcttattattggtgttcactcggctaagtttccaaatgaaaaagtcctggataacattaagagtgctgttcttcgatacaacatcacccaccctatggttaatgatgcagatgccagcctttggcaagaactagaagtttcctgctggccaactctagtcatacttggacctcgtggaaacatgttgttttctttgattggagagggacacaaagataaattatttttatatacttcaattgctttaaagtattacaaagacagggggcagatcagagataataaaattggaataaaactctataaagattctttgccaccttcaccattgctatttcctggcaaagtaacagtagaccaagttactgatagattggtaatagcagacactggacatcatagaattttggtcgtttggaagaatggacaaattcaatatagcattggaggacccaaccctggaagaaaagatggaatattttcagaatcaacttttaattctccacagggtgtagccataatgaataatatcatatatgtggcagacactgaaaaccaccttataagaaagattgacctagaagctgagaaggtgagcactgtagctggtattggaattcaaggtacagataaagaaggtggagcaaaaggagaacaacaacccattagttccccttgggatgtagtttttggaacatcaggttcagaggtccaaagaggtgacattttatggatagccatggcagggactcatcagatatgggcactcctgctggactctggcaaactgccaaagaaaaatgagttaacaaaaggaacctgccttaggtttgctggaagtggaaatgaagagaatcgaaacaatgcctatcctcacaaggcaggttttgcccaaccttcaggcctttccttggcctctgaagatccctggagctgcttgtttgtagcagatagtgagagcagtacagtgagaaccgtttcactgaaagatggagcagtgaagcacctcgtaggaggagaaagagaccccatgaatttatttgcttttggtgatgttgatggagtaggaatcaatgcaaagcttcaacacccccttggagtaacatgggacaaaaaaaggaatttactttatgttgcagactcctacaatcacaagattaaagttgtggatccaaaaacaaaaaactgtacaacattagcaggaactggagacacaaataatgttaccagttccagttttacagagtcaacttttaatgaaccaggaggcttgtgtattggagagaatggagaattattatatgtagcagacaccaataatcatcaaattaaagtgatggatttagaaactaaaatggtatctgtgctccccatcttcagatctgaaaatgctgtggtagatggcccgttcctagtagaaaaacagaagacattacccaaactacctaaatctgctccaagcattaggctttcccccgtgactgcgtgtgctggccagactcttcagttcaaactcagattagacctcccatcaggatcaaagctaactgaaggagtatccagttgctggtttctaacagctgaaggcaatgaatggctacttcaaggacagatagcagctggagatatagagaacatttccagtcaaccaacaatttcactacaaattcctgatgattgcttatcacttgaagccattgtatctgtcagtgtgtttctttattactgtagtgcagacagcagtgcttgtatgatgaaggcaattttgttcagtcagcctttacaaataacggatacacagcaaggttgcatagctccagtagagctcaggtatgtattttagccagccagctagctagcaacccattgccaccacctactgtctcccatcctgactatcactgtaatttaaggaaagaaaacttcagttctgcctctggataccaagatgcccattgctcagttcagacaactgatattaaaataaagctatgctccttacttacttcttttattataaacaaattcctttgctttggctgatactagctgagtcattgatcatcattggtaccatgatattgtaatctatgctgctatttggcacaagactgaagttcacactacagtagagaatactataagataatttgcaataaatactgataataataataccagatattttaactaactttttctacctttattaatagcaatcagcacacttgaatgtgtaaatttcacagtaactttaggcagaacttaagctccaggccacatttgtataagaacaccaagtattcaaggcataaagtctgttgtaagccaaaaaaaagtcttttcatcactgtagaagcttaaggagtacatcagtggtaaatacgatctttattctcttctgtggttttctcagttgagatatttttaaaagagagttttgatctatttttattataaattatttgttatttaacataccattatgaatgccttaaaactttgtacagataaagttggacatagaatctctaaggactgactcctttaactgtttttgagtgactacattaccagataatgaatgagtccccagaaatattatgactttcaaggaaaaagggactttaggacacattacttagtgtctgtgataaataatttattgtgacagctaaatctgatggttacatatcttgttttggaaatgtacatttcacttgtaagcattaaatgcagatttgttgagtttaggttttgaggtttttttcgttcccatattcagaatttaaattatgatcatttattgtgatgtttttaaaaatcacttttaagccttaaaagtgaaattttcagtgtgaggtgctttcatgctattaatagatacagtatatcctaatatattagtcttcaaaatattaaggccgaaacagtgatttaatgatactattttttaatttttgttgttttttatccctaaaaaaagatattggaaaggttttttttctattgtcataatttataactacttaaaagcctaatcttgttttccttaagacctattcaacatgtttgtgatttaatcagcttacaagggtttaaaaacatcaggtgaaccatgtttatttattcagtaaatatttatagacaatatggcataatatgcttcccttccctgtaaaaacagtgctaaatttgaagtgtaatcttttttaaacatcattgtctatttttaattttgtttgaaatgtagtattagtttgttttattcataaggttagctgaatctctgaagtaaggatgtataaatcatgacattgatttaattagtcatctactgaagctacttttaaagagaaatatagatataaaattaaaaggaatcctgtttaaaattatatgtaattacctcataaaccttttctctccacaagcaatcaaaaaaatgaaatgttctgtaataaaagggtgtataacatactctcttttatgagaataggccttagttattttattttatttttgagacgtagtctggctctgtagcccaggctgggagggcagtggcgcgatcttggctcactgcaacctctacctcctgggttcaagagattttcctgcctcagcctcccaagtagctgggattacaggcgtacaccaccatgcccagctaatttttttgtgtttttagtagagacagggtttcaccatgtcagtcaggctggtcccaaactcctggcctcaggtgatccgcctgcctctgtctcccaaagtgctgggattacaggtgtgagccaccttgccctactggccttagttaatttttaatctcatttgacttattatgtttctcatttctagatggacaggatgagaatattttggcccaatcattttctgtttaaggacttaaacaatttcacactctaaatgaagtatatacaattttaatttactaatttagaaatatctgagtttatttttcaatataatatacaaacacagtgtttgttatacatgttcatgtacagtgaaaatgcaaaggcattttttagactctattccccttcatttgtctagacagttttaggttagccttagcttatacttttcttgactttcaaaatacagttttattgaacattcttattcttacccactgccagtctgcattgttttttacattaaaagtattatttatagtagactaatatgattttgaataaaatcacacttaagcaatatagataggttcctagaatttatgacgaggataaacctctcacataagaggaagcactagaaagtttatttttaaaacttgttgatccatattctataaggactaatgcatattttttatcttttgcttttcttgttggataaattattatgtccagtgatagtttaaaaagaacaagattttagtgtaagtcacctcacttgaaatgccagtaatgtggtattacacacattttatataatacctggaatctttgccctaaattattctgctggtttgtcgctatttttttcctctcctctttattatttcacaaatggtagaatttcttgatatgattcttgtaaagagtttagcttatcttgaacattctgtcttaagcaaatatttaacaagagaaaactttgtagtttaatcacccataagtgtaactttagcaaaattcaatgactatgaaaaataatttttttcttaactgttctaataatatttagttataatattatcaaaccttcagaaagttataaatcctaacagccagaaaaaaaaatttactatgtgtatatttatataggtgtgtgtatacacaaagattaagaattattcatgattcttttatggccaatatacttttgagcttgtataactgagataagttactctttgcttgtttttctgtagttggaaaatttaggaagttattaaaaatacatatctctataatgtaatagttttctgcctgcacaaagtttactattaatttatgtctaccagttaaaaatacgatagttagatttggcatcacgtttaaccacaatcatcaaaatctacttaaattctatagttaacagttacataagaatatatgcagagggaaaatgtcaatagttcttgtgaatgaaggaattatggatgtttttattttaattctactttgctgttttttttttcttttcagtgagcaatctgttatttttaaaatcacggtggggggaaacccataaagtttaaagagttaaagttaactgaatcgtaagcacttatataataactttttaaaagtcatttttattaccagagctcagaacattgtttggagtcctttgatctaccggttctcttaagtacgtgatttcgtgaagatagcaatggttatggcttttttgttctgttatttttattgtgtaacgtagtgtagtggttaagagcttggattttgcagtaacttggattctaatcctttaaaatggggctgatatacctgcctcatattcaatgaaatattgtgtgtacagcacttagtaattaatgaaactggtaattattagcttagttactgtaatgataatttgggaccataaacacatatcaccctacattttctttgcaactacaatttgtgaaggaaaatctcccactaactattggttatgttaatattcttcatagagttgggttcaagaagagaaatgttttataatgaagcatataactattttataaacaacattgtagttataaagaagcatgcctatagtgttattaaaaattttttgtacgactttctggagctacaagtaatgaacttgctttgagagggtccagacatactcatcctgaaccacattcctacaacatatgcccaacaacctgcaccagagtacttatatcttaaccaaaaagtttcacttcaatggtggtgcttcacaaaatcttcaaagtgctttcatgtgtattgcctcatttgagcttcaaataaccttataaatcgggcaggtagatgttagtttacagaggaggagacagctttggaatagtggtgacgtatctgaagaatagaaaaccggaatagtgctcgatgcctgaagtggtgcctggcgccagcagatgttcacttctgtcaaacaaggggaagtagtggtggagcctttattcaggcacgggtctcctcattcctaactccaagatgcagagggaaaacgaactgctcaattaagagttcttccatggacactttcttaagccttcacataaaataacaagaataatagatatttattgagtagatatttattgagttctttctattttccagcactcatctattaagtgcttttatgtattaactcatttaatccacacaacaaccttatgtgagaaataccatttttccttatttgattggtgaagaagcacacagagagggtaagcataatcaaatacaccagcataaccaaaatcacacatttagcgagtggcagggcctggatgggagtctgttcaactctctgctgtattgcctcttaaagtaggttttcttaaaacataaatctttcataactttatatatttatagtaacttaatccaaagaaccccaaaagtactagcaatgattgtttctgcaatttaaataaatccatttaattatacaactttgcattatatactgttattcagaccttggaacagtctataattgtttgtcaaaagattttatgtactactttttcttaatttcagatattatccagagtttttcttggcagatggatgtattaaaaaaatagctttccagtgttagttctcaacagtgctgtttcaaaagttgttttaaaagttctaacggttggtcttcaaaacgtaattaagaccttatcataaagagccttttgcacaggactatctcaaaccctaagaagctattcatatttaagaaaattttgttgtattaaatattagtccaagtgagctctggaaatacagtcttctgctttcttgtttcataaataacactggtatgcagacccctccccatgactcaaatattaatatatgcaattctgttacagtaaagttttcaccatggtcaacctattccagcattaggtactttttgttgttgttgttttgttttttttttttttttttgagatggagtctcactctgtcacccaggctggagtgcaagggtacaatctcagctcactgcaggctccacctaccgggttcaagtgatcctcctgcctcagcctcccaagtagctggcgctcaccactactggtgcccaccacaatgcccggctaatttttgtacttttagtagaaacagggtttctgttggccaggttggtctcgaactcctgacctcatgtgatgcgcctgccttggcctcccaaagtgctgggattacaggcgtgagccaccgtacccagcctagcattaggtactttgttttgttttgttttgtttttgttttttttgagatggagttttgctcttgttgcccaggctggagtgccatggcaacacagcctccacttcctgtgttcaagcaattctcctgcctcagcctcctgagtagctgggattacaggcgtctgccaccacgcttagctgattttttgtatttttagtggagatggggtttcgccatgcttgccaggctggtctcgaactcctgacctcaggtgatctgcctgccttggccttccaaagtgctgggattacaggcgtgagccgctgcgcccagcgcactaaatactattaaaaggaattaagcaaaatgctacgtaccaatgattatgattcatgatcacctaaacacagaatgcagacttaacttttcattcttagtgtgctaattaagtagtagtatggtgcagtaaggaattttgttaattttgttataaactccctctcctgaaatccgtaaggaaatgtgataataagaaagtgataatagtgtcatattttaaaagtagaatccactgttaagcaccaagattaccttttcttccccctgtggcacagtttatttaaatgaagtattagcaataatcatgtcactattttgtcctgaataattaagagtttgcttttttcccatgtctttgcaataggataatataaagaatagtattaaaagtcagaggctttactaatctacctatatgtattccatggctaacaaaccctggcccctttacatatgagctctggaggttcgcctggctgcctcaggcttgcagaaggctgccccaatcacagagcctgggtaaggtggaacaggaggcagccccactcggcttttctgattgcatcccacctgtttctgagtgtgttggtttggtttaattcttttcaagggttggagttggaaagtgaaaaccctagacacttgctgtggaatgtttgcctggttgtattggtgtgtccctcttcttcactggcatgtcgctttcaagtgtaccaaaggacattttgttctgttgaaagccacaggaccaaaaggaaaatattgcaactatttgcaaacatacttccctacctgtacaagcagccatatactaaaaagcactaaacaagcacaaatgaacactaaatagccttataccaaaaagcattcttgtaactgtcagggcatggtatgaattccttcctctttaagcagcaacttaccacaggcttggtggctttaagtaatatagcattaagcaaatggtcagttattttttaatgttgaaaacttccaagtgtgaataatacggacatagtttactaccttttgcttttaatatacctggttatctatttccatttgaaataaaatgaaaggagacctcaaactgatgctgagaagtagacaaaatcagctctcagacttaactctccccaattaaaatagtttttttttcccttcccatttttttgtttttaagagatagggtcttgctgtgttgcccaggctagagtgcagcagtgacatgatcatagctcactgcagcctggaactcctgggctcaggatccttctgcttcggcctcctgagtagctaagaccacaggtgtgtgccaccacacctggctaatttttttaaaattttttgtagagatggggacttgctatgttgcccagactggtctcgaactcctggcctcaagccaccaacctctcaaattgctagaattacaagcatgagccaccacacctggcctgttattccttctttatctaatgtgtgctaagcttgtgaaaaatatatgttgaggtaaatagggcaaaacattagttgataaattatgctaattaatgggaaaaatagacatgttcctctctgaacatttagaaggactctgccctacaactatcttctgtttttagaatttgtagtcactgttcttagtgccactggaaatatattcattctttgagcatgtacagggtgggctccctgttgtatttattacacttttcaaaatgccagcaagtttttgtttgtatagagttggaatgtattgttcgtgcatgcctgtgatattcatcatcaaaatatacctgtaaaaaataaactactgcttcctctccacagcttaggcctccctcttactaaaaacaatagtagtttctgtagaagtttcagtgagaaattatggttatataaataacagatatggcagaacaattttgttgtagtatttttttccgtagcatttcttaataatagctcagtttttaaaggaggggaacaataccccatgagttcaaattaattttctctactttgaggtataccttcctaattatattttacataggctgttttttttaagtttaaattctcactgttaagttgcattgagagacaattagaaatgttgtaattgtcatatctttacatgtggattatgaacaaatgaaagtttgctgtgtgattgcagttttaaattataacatttcataaatatgtcaattttagaaactcaaactctttcccatcttttgtatggataaagtttatggtttcatttctgagaatagagttggtctgctgtgctaacttcatgtttcttattccaaaggcttgattatatttttttctccagtgattaaaaatgcagcgaaaatccaatctacaagttcatatattggtatttctagacatagtctagttctaaaagaatgtacttggtgtgcatttttaagtgtttcatgtagacagattaatatatttttgtacaacattgtatttctacatttatttcaagactgtacttttcagtgactttttcaagtgcatgtgttaacagaagattgtttggaacgagagtgcagtggcttctttactagcaaagagaagtgtaatacaagtgatcatagaaggtgagaatgtgtttatactgtatatggaaacctaatgcctcttttctaaagctttgtacatttttttcgtgaaatagattaaatattttctctctaaaa

SEQ ID NO: 159267 - DNA, 3275 bp, Homo sapiens
  Payload ID: 11169
  Gene Symbol: NHLRC3
  Gene Name: NHL repeat containing 3
  Uniprot ID: Q5JS37
  ENST ID: ENST00000379599
  CDS Start-End: 250-1092
acctgacatgagggcggggaccccgaaatgcacacgaagtccggaactggtcttctgtgattttcattcgccctggtctctgttccctttcgtactcaaagctcgtgcatccagggaggggaaaccggagatagggtcttcgggccccgggcagaccctctgtgccgctgcaaaccgttgcagcctgaggctgtcaggtcctcccccagacacctgcggaccctccctctcctggcttcccgtctggtcatggcgagattctgggtctgcgtagccggtgctggcttctttcttgcatttttggttttgcattcgcgtttttgtggctctccagttttgaggaactttacttttgcagtttcctggagaactgagaaaattctttaccggctggatgtgggttggcctaagcacccagaatattttaccggaacaacattttgtgttgcagttgactccctcaatggattggtttacataggtcaaagaggggataacatcccaaagatattagtgttcacagaggatggatatttcctacgagcctggaattatacagttgacacacctcatggtatatttgcagccagtactctatatgaacaatccgtctggatcacggatgtaggaagtgatttcatgatcctttggctgcatggagaaaatgggacagggcctgctaagttcaacatacctcacagtgttacacttgattcagctggtcgggtgtgggttgctgaccgaggaaataaaagaatccaagtatttgataaagacactggggagtggttaggagcatggaataattgtttcacagaagagggaccttcttcagtcaggtttactcctgatgggaagtacttgattgtggcccagctgaatcttagcaggctctcagtcgtagcagcacccccagtgggaagcattggggagtgttctgtgatcagcacaatccaactagcagatcaagttttgccacatctcctagaagtcgacagaaagactggagcagtctatgtagcagaaattggagcaaaacaagtacaaaaatatgtccctttgaatagctatgttccttcatttggttcataatgtttctttcctgggaatatttcaagtggcagttcagattctcaattcactaagtgcttaaaaatgatgttcaagcacaagaatttatttttctagtataaaagatctagtatcagaaagatttgtttttgtatcattaagaatcttatattttgttgccctcttgggacttagttttatttgtaagtgcataaggatattttaatgaaaggaaagtaactaaaaaatggggttgggaagagggactaaggtggtaacctcattatttgccctggtagactgattctccctgggtaaaaaaaatgggaataaaaatgagcttgcatgataatttattaaatttcatgtgaagaactccagacctccagattgtgcaactaacataaaatgagctgcttgagagattgtaaataagatgaactattgattaatttgagtacccacagagtgctgtgtcttgacgacttaaaaatgaaaaagcaggattgccttttgagtagcttgcagtctagtggggagacaagcaggcaaacagtcacaacacagcaaaagcgaccttggagcatagtgggacttttggagtaggagtgctgcatttgactgagggaatcatggatacttcgcaggagaagtgaatttgagctcagacttgaaaactgaggaggagcttaccaagggacaaggaggagaaaacaataatttccaagtaaagaaggtataaaaagttagaagtgtactgtaaactttgataggcttttaggccttttttaaagcccaacttggcttctgtccattacctataagatatttaatgtcagtcagcctttaaatgtaggaataaaatggctggcatctaagcactttagtaaaagaggtttttacaaataactaaggattgtagagcttccttctctttttttttctttttctttcttttgttttacatgaactcaacttattcctaacatttgtctacctcaaagaaatttcaagattatttagataacatggatatgtgccaaatcctttgagctgttaagatgataatttcctgctttcctcctacatcttctcctcccactccctcctttggtgtgaatattggcttcccaattaagacctttttttttttttttccagtttgttttagcttattataggttttggaggaactttgccattttgtaatctttcaaatcattcttcacccttcctcacatcagcttcctgcttttcccagtgttttactgtaaattgtgtagcatatgacaaatcttgagctgactttcctcttcacctgttatggctggagtattttccagacctgaagggactcacacttgttttgatacttggatcacatctccgtgaggttaggaaggtaaatctaccaacaggaagccctgtactctgtattccaaggccattggtaaatgtgttggtgccactgatcggactgtatgaccttaaacaagtcaccttagttttcagtgaaatgggaatatcattgtctcctctttcatgaatgctgtgagaatcagatgtgcaacaggtacagacttgccctttgaaatctatacctctggatacattagaggcattttattaacaaaggcccttctaaatgtgctatttatttgacaataactatcagatttgccttaattttgtgtttatagcatttatcaaaacgtatcctcatagactttatgcagattaatatggtcaattgatttggataaaagaaagtaatttcagggtttgtttttaagccaggacaagaagtgcaaatgcctctttgaagcaatttaggctaaactgattttgaaatttcaaaatgttttattttactttgttttattaagccaggacaagaagtgcaaatgcctctttgaagcaattcaggctaggtaaaccgattttgccatttcaaaacgttttattttactttgttttatatcagagtcttataaaacctgctgcaaatatttctgaatgtctttgtaaaagtgtttgttagtgtacctgtgattatagtacttcacttttttcctttggattaattggttaaatgaatgagaaatgtgttatgttttttactaaaaagtataaattaaaattttggaaagaaaaggcaatattatctggctccccaattaaagtttgattttattgtcacaaaa

SEQ ID NO: 159268 - DNA, 3549 bp, Homo sapiens
  Payload ID: 11169
  Gene Symbol: NHLRC3
  Gene Name: NHL repeat containing 3
  Uniprot ID: Q5JS37
  ENST ID: ENST00000379600
  CDS Start-End: 323-1366
ggtggccactgaaagtcagcggcgcggactgccctgagggcgggaaagggtggtcactgggtcagcccgaagcacctgacatgagggcggggaccccgaaatgcacacgaagtccggaactggtcttctgtgattttcattcgccctggtctctgttccctttcgtactcaaagctcgtgcatccagggaggggaaaccggagatagggtcttcgggccccgggcagaccctctgtgccgctgcaaaccgttgcagcctgaggctgtcaggtcctcccccagacacctgcggaccctccctctcctggcttcccgtctggtcatggcgagattctgggtctgcgtagccggtgctggcttctttcttgcatttttggttttgcattcgcgtttttgtggctctccagttttgaggaactttacttttgcagtttcctggagaactgagaaaattctttaccggctggatgtgggttggcctaagcacccagaatattttaccggaacaacattttgtgttgcagttgactccctcaatggattggtttacataggtcaaagaggggataacatcccaaagatattagtgttcacagaggatggatatttcctacgagcctggaattatacagttgacacacctcatggtatatttgcagccagtactctatatgaacaatccgtctggatcacggatgtaggaagtggattctttggtcatactgttaaaaaatacagttcttttggtgatcttgttcaagtcttgggtactccaggcaaaaaaggcactagtttgaatcctttgcagtttgataacccagcagaattatatgtagaggacacaggagatatttacattgtggatggagatggaggattgaataacagattgatcaaactgtcccaagatttcatgatcctttggctgcatggagaaaatgggacagggcctgctaagttcaacatacctcacagtgttacacttgattcagctggtcgggtgtgggttgctgaccgaggaaataaaagaatccaagtatttgataaagacactggggagtggttaggagcatggaataattgtttcacagaagagggaccttcttcagtcaggtttactcctgatgggaagtacttgattgtggcccagctgaatcttagcaggctctcagtcgtagcagcacccccagtgggaagcattggggagtgttctgtgatcagcacaatccaactagcagatcaagttttgccacatctcctagaagtcgacagaaagactggagcagtctatgtagcagaaattggagcaaaacaagtacaaaaatatgtccctttgaatagctatgttccttcatttggttcataatgtttctttcctgggaatatttcaagtggcagttcagattctcaattcactaagtgcttaaaaatgatgttcaagcacaagaatttatttttctagtataaaagatctagtatcagaaagatttgtttttgtatcattaagaatcttatattttgttgccctcttgggacttagttttatttgtaagtgcataaggatattttaatgaaaggaaagtaactaaaaaatggggttgggaagagggactaaggtggtaacctcattatttgccctggtagactgattctccctgggtaaaaaaaatgggaataaaaatgagcttgcatgataatttattaaatttcatgtgaagaactccagacctccagattgtgcaactaacataaaatgagctgcttgagagattgtaaataagatgaactattgattaatttgagtacccacagagtgctgtgtcttgacgacttaaaaatgaaaaagcaggattgccttttgagtagcttgcagtctagtggggagacaagcaggcaaacagtcacaacacagcaaaagcgaccttggagcatagtgggacttttggagtaggagtgctgcatttgactgagggaatcatggatacttcgcaggagaagtgaatttgagctcagacttgaaaactgaggaggagcttaccaagggacaaggaggagaaaacaataatttccaagtaaagaaggtataaaaagttagaagtgtactgtaaactttgataggcttttaggccttttttaaagcccaacttggcttctgtccattacctataagatatttaatgtcagtcagcctttaaatgtaggaataaaatggctggcatctaagcactttagtaaaagaggtttttacaaataactaaggattgtagagcttccttctctttttttttctttttctttcttttgttttacatgaactcaacttattcctaacatttgtctacctcaaagaaatttcaagattatttagataacatggatatgtgccaaatcctttgagctgttaagatgataatttcctgctttcctcctacatcttctcctcccactccctcctttggtgtgaatattggcttcccaattaagacctttttttttttttttccagtttgttttagcttattataggttttggaggaactttgccattttgtaatctttcaaatcattcttcacccttcctcacatcagcttcctgcttttcccagtgttttactgtaaattgtgtagcatatgacaaatcttgagctgactttcctcttcacctgttatggctggagtattttccagacctgaagggactcacacttgttttgatacttggatcacatctccgtgaggttaggaaggtaaatctaccaacaggaagccctgtactctgtattccaaggccattggtaaatgtgttggtgccactgatcggactgtatgaccttaaacaagtcaccttagttttcagtgaaatgggaatatcattgtctcctctttcatgaatgctgtgagaatcagatgtgcaacaggtacagacttgccctttgaaatctatacctctggatacattagaggcattttattaacaaaggcccttctaaatgtgctatttatttgacaataactatcagatttgccttaattttgtgtttatagcatttatcaaaacgtatcctcatagactttatgcagattaatatggtcaattgatttggataaaagaaagtaatttcagggtttgtttttaagccaggacaagaagtgcaaatgcctctttgaagcaatttaggctaaactgattttgaaatttcaaaatgttttattttactttgttttattaagccaggacaagaagtgcaaatgcctctttgaagcaattcaggctaggtaaaccgattttgccatttcaaaacgttttattttactttgttttatatcagagtcttataaaacctgctgcaaatatttctgaatgtctttgtaaaagtgtttgttagtgtacctgtgattatagtacttcacttttttcctttggattaattggttaaatgaatgagaaatgtgttatgttttttactaaaaagtataaattaaaattttggaaagaaaaggcaatattatctggctccccaattaaagtttgattttattgtcacaaaa

SEQ ID NO: 159269 - DNA, 3298 bp, Homo sapiens
  Payload ID: 11169
  Gene Symbol: NHLRC3
  Gene Name: NHL repeat containing 3
  ENST ID: ENST00000470258
  CDS Start-End: 663-1115
atactttggtggccactgaaagtcagcggcgcggactgccctgagggcgggaaagggtggtcactgggtcagcccgaagcacctgacatgagggcggggaccccgaaatgcacacgaagtccggaactggtcttctgtgattttcattcgccctggttttgaggaactttacttttgcagtttcctggagaactgagaaaattctttaccggctggatgtgggttggcctaagcacccagaatattttaccggaacaacattttgtgttgcagttgactccctcaatggattggtttacataggtcaaagaggggataacatcccaaagatattagtgttcacagaggatggatatttcctacgagcctggaattatacagttgacacacctcatggtatatttgcagccagtactctatatgaacaatccgtctggatcacggatgtaggaagtggattctttggtcatactgttaaaaaatacagttcttttggtgatcttgttcaagtcttgggtactccaggcaaaaaaggcactagtttgaatcctttgcagtttgataacccagcagaattatatgtagaggacacaggagatatttacattgtggatggagatggaggattgaataacagattgatcaaactgtcccaagatttcatgatcctttggctgcatggagaaaatgggacagggcctgctaagttcaacatacctcacagtgttacacttgattcagctggtcgggtgtgggttgctgaccgaggaaataaaagaatccaagtatttgataaagacactggggagtggttaggagcatggaataattgtttcacagaagagggaccttcttcagtcaggtttactcctgatgggaagtacttgattgtggcccagctgaatcttagcaggctctcagtcgtagcagcacccccagtgggaagcattggggagtgttctgtgatcagcacaatccaactagcagatcaagttttgccacatctcctagaagtcgacagaaagactggagcagtctatgtagcagaaattggagcaaaacaagtacaaaaatatgtccctttgaatagctatgttccttcatttggttcataatgtttctttcctgggaatatttcaagtggcagttcagattctcaattcactaagtgcttaaaaatgatgttcaagcacaagaatttatttttctagtataaaagatctagtatcagaaagatttgtttttgtatcattaagaatcttatattttgttgccctcttgggacttagttttatttgtaagtgcataaggatattttaatgaaaggaaagtaactaaaaaatggggttgggaagagggactaaggtggtaacctcattatttgccctggtagactgattctccctgggtaaaaaaaatgggaataaaaatgagcttgcatgataatttattaaatttcatgtgaagaactccagacctccagattgtgcaactaacataaaatgagctgcttgagagattgtaaataagatgaactattgattaatttgagtacccacagagtgctgtgtcttgacgacttaaaaatgaaaaagcaggattgccttttgagtagcttgcagtctagtggggagacaagcaggcaaacagtcacaacacagcaaaagcgaccttggagcatagtgggacttttggagtaggagtgctgcatttgactgagggaatcatggatacttcgcaggagaagtgaatttgagctcagacttgaaaactgaggaggagcttaccaagggacaaggaggagaaaacaataatttccaagtaaagaaggtataaaaagttagaagtgtactgtaaactttgataggcttttaggccttttttaaagcccaacttggcttctgtccattacctataagatatttaatgtcagtcagcctttaaatgtaggaataaaatggctggcatctaagcactttagtaaaagaggtttttacaaataactaaggattgtagagcttccttctctttttttttctttttctttcttttgttttacatgaactcaacttattcctaacatttgtctacctcaaagaaatttcaagattatttagataacatggatatgtgccaaatcctttgagctgttaagatgataatttcctgctttcctcctacatcttctcctcccactccctcctttggtgtgaatattggcttcccaattaagacctttttttttttttttccagtttgttttagcttattataggttttggaggaactttgccattttgtaatctttcaaatcattcttcacccttcctcacatcagcttcctgcttttcccagtgttttactgtaaattgtgtagcatatgacaaatcttgagctgactttcctcttcacctgttatggctggagtattttccagacctgaagggactcacacttgttttgatacttggatcacatctccgtgaggttaggaaggtaaatctaccaacaggaagccctgtactctgtattccaaggccattggtaaatgtgttggtgccactgatcggactgtatgaccttaaacaagtcaccttagttttcagtgaaatgggaatatcattgtctcctctttcatgaatgctgtgagaatcagatgtgcaacaggtacagacttgccctttgaaatctatacctctggatacattagaggcattttattaacaaaggcccttctaaatgtgctatttatttgacaataactatcagatttgccttaattttgtgtttatagcatttatcaaaacgtatcctcatagactttatgcagattaatatggtcaattgatttggataaaagaaagtaatttcagggtttgtttttaagccaggacaagaagtgcaaatgcctctttgaagcaatttaggctaaactgattttgaaatttcaaaatgttttattttactttgttttattaagccaggacaagaagtgcaaatgcctctttgaagcaattcaggctaggtaaaccgattttgccatttcaaaacgttttattttactttgttttatatcagagtcttataaaacctgctgcaaatatttctgaatgtctttgtaaaagtgtttgttagtgtacctgtgattatagtacttcacttttttcctttggattaattggttaaatgaatgagaaatgtgttatgttttttactaaaaagtataaattaaaattttggaaagaaaaggcaatattatctggctccccaattaaagtttgattttattgtcacaaaa

SEQ ID NO: 159270 - DNA, 3267 bp, Homo sapiens
  Payload ID: 11169
  Gene Symbol: NHLRC3
  Gene Name: NHL repeat containing 3
  ENST ID: ENST00000610563
  CDS Start-End: 250-711
acctgacatgagggcggggaccccgaaatgcacacgaagtccggaactggtcttctgtgattttcattcgccctggtctctgttccctttcgtactcaaagctcgtgcatccagggaggggaaaccggagatagggtcttcgggccccgggcagaccctctgtgccgctgcaaaccgttgcagcctgaggctgtcaggtcctcccccagacacctgcggaccctccctctcctggcttcccgtctggtcatggcgagattctgggtctgcgtagccggtgctggcttctttcttgcatttttggttttgcattcgcgtttttgtggctctccagttttgaggaactttacttttgcagtttcctggagaactgagaaaattctttaccggctggatgtgggttggcctaagcacccagaatattttaccggaacaacattttgtgttgcagttgactccctcaatggattggtttacataggtcaaagaggggataacatcccaaagatattagtgttcacagaggatggatatttcctacgagcctggaattatacagttgacacacctcatggtatatttgcagccagtactctatatgaacaatccgtctggatcacggatgtaggaagtgatttcatgatcctttggctgcatggagaaaatgggacagggcctgctaagttcaacatacctcacagtgttacatgattcagctggtcgggtgtgggttgctgaccgaggaaataaaagaatccaagtatttgataaagacactggggagtggttaggagcatggaataattgtttcacagaagagggaccttcttcagtcaggtttactcctgatgggaagtacttgattgtggcccagctgaatcttagcaggctctcagtcgtagcagcacccccagtgggaagcattggggagtgttctgtgatcagcacaatccaactagcagatcaagttttgccacatctcctagaagtcgacagaaagactggagcagtctatgtagcagaaattggagcaaaacaagtacaaaaatatgtccctttgaatagctatgttccttcatttggttcataatgtttctttcctgggaatatttcaagtggcagttcagattctcaattcactaagtgcttaaaaatgatgttcaagcacaagaatttatttttctagtataaaagatctagtatcagaaagatttgtttttgtatcattaagaatcttatattttgttgccctcttgggacttagttttatttgtaagtgcataaggatattttaatgaaaggaaagtaactaaaaaatggggttgggaagagggactaaggtggtaacctcattatttgccctggtagactgattctccctgggtaaaaaaaatgggaataaaaatgagcttgcatgataatttattaaatttcatgtgaagaactccagacctccagattgtgcaactaacataaaatgagctgcttgagagattgtaaataagatgaactattgattaatttgagtacccacagagtgctgtgtcttgacgacttaaaaatgaaaaagcaggattgccttttgagtagcttgcagtctagtggggagacaagcaggcaaacagtcacaacacagcaaaagcgaccttggagcatagtgggacttttggagtaggagtgctgcatttgactgagggaatcatggatacttcgcaggagaagtgaatttgagctcagacttgaaaactgaggaggagcttaccaagggacaaggaggagaaaacaataatttccaagtaaagaaggtataaaaagttagaagtgtactgtaaactttgataggcttttaggccttttttaaagcccaacttggcttctgtccattacctataagatatttaatgtcagtcagcctttaaatgtaggaataaaatggctggcatctaagcactttagtaaaagaggtttttacaaataactaaggattgtagagcttccttctctttttttttctttttctttcttttgttttacatgaactcaacttattcctaacatttgtctacctcaaagaaatttcaagattatttagataacatggatatgtgccaaatcctttgagctgttaagatgataatttcctgctttcctcctacatcttctcctcccactccctcctttggtgtgaatattggcttcccaattaagacctttttttttttttttccagtttgttttagcttattataggttttggaggaactttgccattttgtaatctttcaaatcattcttcacccttcctcacatcagcttcctgcttttcccagtgttttactgtaaattgtgtagcatatgacaaatcttgagctgactttcctcttcacctgttatggctggagtattttccagacctgaagggactcacacttgttttgatacttggatcacatctccgtgaggttaggaaggtaaatctaccaacaggaagccctgtactctgtattccaaggccattggtaaatgtgttggtgccactgatcggactgtatgaccttaaacaagtcaccttagttttcagtgaaatgggaatatcattgtctcctctttcatgaatgctgtgagaatcagatgtgcaacaggtacagacttgccctttgaaatctatacctctggatacattagaggcattttattaacaaaggcccttctaaatgtgctatttatttgacaataactatcagatttgccttaattttgtgtttatagcatttatcaaaacgtatcctcatagactttatgcagattaatatggtcaattgatttggataaaagaaagtaatttcagggtttgtttttaagccaggacaagaagtgcaaatgcctctttgaagcaatttaggctaaactgattttgaaatttcaaaatgttttattttactttgttttattaagccaggacaagaagtgcaaatgcctctttgaagcaattcaggctaggtaaaccgattttgccatttcaaaacgttttattttactttgttttatatcagagtcttataaaacctgctgcaaatatttctgaatgtctttgtaaaagtgtttgttagtgtacctgtgattatagtacttcacttttttcctttggattaattggttaaatgaatgagaaatgtgttatgttttttactaaaaagtataaattaaaattttggaaagaaaaggcaatattatctggctccccaattaaagtttgattttattgtc

SEQ ID NO: 159271 - DNA, 2097 bp, Homo sapiens
  Payload ID: 11170
  Gene Symbol: NHLRC4
  Gene Name: NHL repeat containing 4
  Uniprot ID: P0CG21
  ENST ID: ENST00000424439
  CDS Start-End: 658-1029
acttcctccagttctagtttccaacaacagaggctgcagccacccagccccgaagcagggcccagcgagacagggcccagtggggccttattctctctcttgcagccccaagcgtgacccagctgcagagaagctgagacggtgattcggactgactggactctggcctccaggtgtctgcacctcacactggacccacctggagactccacgggctcccggcagctccggctgcttgggtggatccgggtgcccgcaggggctgtgggagggccccggggcctgcactgctcccccgatggcctgctcttcctcacggccggggctgcaccctgtgtccacgtgctagatctggagggacgccccatctgcctcctgccctgccgcactccggggagcggggccttcgttccagaggacgtggctgtgacagcgtcagggcttgtggtggtcagcgatcccatccatggggctgtccatgcactccagcacacagcccgggaccccgggggccactgggtgacagtgggcaccttcctgtctccccgagggctggctgtggatgccctcaaccgcctcctggtgacggactacttgcctggggctgtgcacagcttctcgttgggtcctgcttgggagcccctggccccagcctccatgctgggtctggagggcccctgctgggtgggcccagggcctgatgggggccttgctgtgagtgaggagtttggggatgtgaggctgtttggcagtgcccgccaacccctgggctccctggggggctggacggggcacactttcggctgcccagcgggcatctgctccaactcagagggcaatgttattgtggcagacgagcagaggcgccaggtgaccctgtttccccgggctgggccacccatctgcctggtgtcagaggggcttgggcagcccttgggagtggcctgtgcaccccagggccagctcctggtggctgatgccaaggacaactccatcaaggtgtaccagggcctcaaggagctggcctgacctgaggctgggttggagcagccctcctgtgcctgaggccagctcccaggcccttggatcaccgcgggaggaaccctcaggatgggtggagcctccaggctatgggcattgcctgcctgatgccagcaccacctgggctgggccctgggcttggctcgagttctcctgctggtgaggctccggatctcaggagcagccctgagtctgcttcccaggctgcccctgccaggcctgcagcctccccagccagggctgctctctgctgtccccattcagtgccctggcccctgcattcatgccccccacaccccctcaggccctgtgcctggactttggggctggcagctgaagccttgagatcctgggccagctgccggcacacagctaggcagactctcccaccaggtgcccctgcccaggcctcctaatcgggggcagacaggcagggagggtgtggctgggctgggctgggcggggcggcctggggcaggggtgtggcccctaaatgtccccaacctcagagggacctagagtcctgagcctccagtagcttctctgggcctggcagaggtaagggggaggcaaccctggagtgtctggaggcccatggctggctgaaccctggatgccttttcttccgcgtccccatgaatgaaagctgtctgggccttcattctgcagacagggacaaacagctccatgctgtttgtcctcccagtgcagccgtgctgggagggtctgggggagcttcctacaaggagagactcctgctgctttggaaaactgagaaaaaataggggtctaaccctctcctcccattttacaagtggggaaatgaggcgtgaaaggagaggcgtctgggttactccgtgggtctggggtccagggaagggcctgtatgggggagggagctgggaggggacggtgtctggctctacccctgtggggtggggaggtggggctcccctgtatcacaggacatcccccctgagaggtccctcatatgtctgggtcctgtgggtgggggactaactgcgcaatgtagttaggtgctcaataaacggagtt

SEQ ID NO: 159272 - DNA, 2071 bp, Homo sapiens
  Payload ID: 11170
  Gene Symbol: NHLRC4
  Gene Name: NHL repeat containing 4
  Uniprot ID: P0CG21
  ENST ID: ENST00000540585
  CDS Start-End: 624-995
agttctagtttccaacaacagaggctgcagccacccagccccgaagcagggcccagcgagacagggcccagccccaagcgtgacccagctgcagagaagctgagacggtgattcggactgactggactctggcctccaggtgtctgcacctcacactggacccacctggagactccacgggctcccggcagctccggctgcttgggtggatccgggtgcccgcaggggctgtgggagggccccggggcctgcactgctcccccgatggcctgctcttcctcacggccggggctgcaccctgtgtccacgtgctagatctggagggacgccccatctgcctcctgccctgccgcactccggggagcggggccttcgttccagaggacgtggctgtgacagcgtcagggcttgtggtggtcagcgatcccatccatggggctgtccatgcactccagcacacagcccgggaccccgggggccactgggtgacagtgggcaccttcctgtctccccgagggctggctgtggatgccctcaaccgcctcctggtgacggactacttgcctggggctgtgcacagcttctcgttgggtcctgcttgggagcccctggccccagcctccatgctgggtctggagggcccctgctgggtgggcccagggcctgatgggggccttgctgtgagtgaggagtttggggatgtgaggctgtttggcagtgcccgccaacccctgggctccctggggggctggacggggcacactttcggctgcccagcgggcatctgctccaactcagagggcaatgttattgtggcagacgagcagaggcgccaggtgaccctgtttccccgggctgggccacccatctgcctggtgtcagaggggcttgggcagcccttgggagtggcctgtgcaccccagggccagctcctggtggctgatgccaaggacaactccatcaaggtgtaccagggcctcaaggagctggcctgacctgaggctgggttggagcagccctcctgtgcctgaggccagctcccaggcccttggatcaccgcgggaggaaccctcaggatgggtggagcctccaggctatgggcattgcctgcctgatgccagcaccacctgggctgggccctgggcttggctcgagttctcctgctggtgaggctccggatctcaggagcagccctgagtctgcttcccaggctgcccctgccaggcctgcagcctccccagccagggctgctctctgctgtccccattcagtgccctggcccctgcattcatgccccccacaccccctcaggccctgtgcctggactttggggctggcagctgaagccttgagatcctgggccagctgccggcacacagctaggcagactctcccaccaggtgcccctgcccaggcctcctaatcgggggcagacaggcagggagggtgtggctgggctgggctgggcggggcggcctggggcaggggtgtggcccctaaatgtccccaacctcagagggacctagagtcctgagcctccagtagcttctctgggcctggcagaggtaagggggaggcaaccctggagtgtctggaggcccatggctggctgaaccctggatgccttttcttccgcgtccccatgaatgaaagctgtctgggccttcattctgcagacagggacaaacagctccatgctgtttgtcctcccagtgcagccgtgctgggagggtctgggggagcttcctacaaggagagactcctgctgctttggaaaactgagaaaaaataggggtctaaccctctcctcccattttacaagtggggaaatgaggcgtgaaaggagaggcgtctgggttactccgtgggtctggggtccagggaagggcctgtatgggggagggagctgggaggggacggtgtctggctctacccctgtggggtggggaggtggggctcccctgtatcacaggacatcccccctgagaggtccctcatatgtctgggtcctgtgggtgggggactaactgcgcaatgtagttaggtgctcaataaacggagttgccgctga

SEQ ID NO: 159273 - DNA, 1188 bp, Homo sapiens
  Payload ID: 11171
  Gene Symbol: NHLRC1
  Gene Name: NHL repeat containing E3 ubiquitin protein ligase 1
  Uniprot ID: Q6VVB1
  ENST ID: ENST00000340650
  CDS Start-End: 1-1188
atggcggccgaagcctcggagagcgggccagcgctgcatgagctcatgcgcgaggcggagatcagcctgctcgagtgcaaggtgtgctttgagaagtttggccaccggcagcagcggcgcccgcgcaacctgtcctgcggccacgtggtctgcctggcctgcgtggccgccctggcgcacccgcgcactctggccctcgagtgcccattctgcaggcgagcttgccggggctgcgacaccagcgactgcctgccggtgctgcacctcatagagctcctgggctcagcgcttcgccagtccccggccgcccatcgcgccgcccccagcgcccccggagccctcacctgccaccacaccttcggcggctgggggaccctggtcaaccccaccggactggcgctttgtcccaagacggggcgtgtcgtggtggtgcacgacggcaggaggcgtgtcaagatttttgactcagggggaggatgcgcgcatcagtttggagagaagggggacgctgcccaagacattaggtaccctgtggatgtcaccatcaccaacgactgccatgtggttgtcactgacgccggcgatcgctccatcaaagtgtttgatttttttggccagatcaagcttgtcattggaggccaattctccttaccttggggtgtggagaccacccctcagaatgggattgtggtaactgatgcggaggcagggtccctgcacctcctggacgtcgacttcgcggaaggggtccttcggagaactgaaaggttgcaagctcatctgtgcaatccccgaggggtggcagtgtcttggctcaccggggccattgcggtcctggagcaccccctggccctggggactggggtttgcagcaccagggtgaaagtgtttagctcaagtatgcagcttgtcggccaagtggatacctttgggctgagcctctactttccctccaaaataactgcctccgctgtgacctttgatcaccagggaaatgtgattgttgcagatacatctggtccagctatcctttgcttaggaaaacctgaggagtttccagtaccgaagcccatggtcactcatggtctttcgcatcctgtggctcttaccttcaccaaggagaattctcttcttgtgctggacacagcatctcattctataaaagtctataaagttgactgggggtga

SEQ ID NO: 159274 - DNA, 865 bp, Homo sapiens
  Payload ID: 11172
  Gene Symbol: NHP2
  Gene Name: NHP2 ribonucleoprotein
  Uniprot ID: Q9NX24
  ENST ID: ENST00000274606
  CDS Start-End: 151-612
gtcaacgattgggctgagtcggagacttcctttcctgattggccgtgttgtacggcggcttctcgcgcagctgatgacctggaagtgatgcctaaagctgtggaccgcgtgggctcgcctccctgggactaggtttcagcggccgctgcgatgaccaaaataaaggcagatcccgacgggcccgaggctcaggcggaggcgtgttccggggagcgcacctaccaggagctgctggtcaaccagaaccccatcgcgcagcccctggcttctcgccgcctcacgcggaagctctacaaatgcatcaagaaagcggtgaagcagaagcagattcggcgcggggtgaaagaggttcagaaatttgtcaacaaaggagaaaaagggatcatggttttggcaggagacacactgcccattgaggtatactgccatctcccagtcatgtgtgaggaccgaaatttgccctatgtctatatcccctctaagacggacctgggtgcagccgcaggctccaagcgccccacctgtgtgataatggtcaagccccatgaggagtaccaggaggcttacgatgagtgcctggaggaggtgcagtccctgcccctacccctatgaggggctccggtagcacctgggcacctgccgctggaagctattgggctggcagcaggacgactggctgtcctcctgcccacccacactgacggcatcttcccagttccccaaggcacgccttcttcccaggcagctctaacagccctttcatgaaggtaatgctagtcttctgtccatcagtgccatttcctgtagaactaaaggctgttccaagaatgtggggtggggaaagtaaatgctaagactaaaatgt

SEQ ID NO: 159275 - DNA, 599 bp, Homo sapiens
  Payload ID: 11172
  Gene Symbol: NHP2
  Gene Name: NHP2 ribonucleoprotein
  ENST ID: ENST00000314397
  CDS Start-End: 13-285
gcggccgctgcgatgaccaaaataaaggcagatcccgacgggcccgaggctcaggcggaggcgtgttccggggagcgcacctaccaggagctgctggtcaaccagaaccccatcgcgcagcccctggcttctcgccgcctcacgcggaagctctacaaatgcatcaagaaagcggtgaagcagaagcagattcggcgcggggtgaaagaggttcagaaatttgtcaacaaaggagaaaaagggacctgggtgcagccgcaggctccaagcgccccacctgtgtgataatggtcaagccccatgaggagtaccaggaggcttacgatgagtgcctggaggaggtgcagtccctgcccctacccctatgaggggctccggtagcacctgggcacctgccgctggaagctattgggctggcagcaggacgactggctgtcctcctgcccacccacactgacggcatcttcccagttccccaaggcacgccttcttcccaggcagctctaacagccctttcatgaaggtaatgctagtcttctgtccatcagtgccatttcctgtagaactaaaggctgttccaagaatgtggggtggggaaa

SEQ ID NO: 159276 - DNA, 472 bp, Homo sapiens
  Payload ID: 11172
  Gene Symbol: NHP2
  Gene Name: NHP2 ribonucleoprotein
  ENST ID: ENST00000514354
  CDS Start-End: 66-472
tgatgcctaaagctgtggaccgcgtgggctcgcctccctgggactaggtttcagcggccgctgcgatgaccaaaataaaggcagatcccgacgggcccgaggctcaggcggaggcgtgttccggggagcgcacctaccaggagctgctggtcaaccagaaccccatcgcgcagcccctggcttctcgccgcctcacgcggaagctctacaaatgcatcaagaaagcggtgaagcagaagcagattcggcgcggggtgaaagaggttcagaaatttgtcaacaaaggagaaaaagggatcatggttttggcaggagacacactgcccattgaggtatactgccatctcccagtcatgtgtgaggaccgaaatttgccctatgtctatatcccctctaagacgttcccatcttgtaaagtgggaatcccagcccaggcgctgtggctcacacctgtaatcctagtgctttggga

SEQ ID NO: 159277 - DNA, 475 bp, Homo sapiens
  Payload ID: 11172
  Gene Symbol: NHP2
  Gene Name: NHP2 ribonucleoprotein
  ENST ID: ENST00000511078
  CDS Start-End: 78-475
atgacctggaagtgatgcctaaagctgtggaccgcgtgggctcgcctccctgggactaggtttcagcggccgctgcgatgaccaaaataaaggcagatcccgacgggcccgaggctcaggcggaggcgtgttccggggagcgcacctaccaggagctgctggtcaaccagaaccccatcgcgcagcccctggcttctcgccgcctcacgcggaagctctacaaatgcatcaagaaagcggtgaagcagaagcagattcggcgcggggtgaaagaggttcagaaatttgtcaacaaaggagaaaaagggatcatggttttggcaggagacacactgcccattgaggtatactgccatctcccagtcatgtgtgaggaccgaaatttgccctatgtctatatcccctctaagacggtaaggagcacgtggccccctgaccttgctcagcactggggtgtctgggatagtctgccata

SEQ ID NO: 159278 - DNA, 552 bp, Homo sapiens
  Payload ID: 11172
  Gene Symbol: NHP2
  Gene Name: NHP2 ribonucleoprotein
  ENST ID: ENST00000502263
  CDS Start-End: 1-258
gactcttctgtcgttgcagcggtgaagcagaagcagattcggcgcggggtgaaagaggttcagaaatttgtcaacaaaggagaaaaagggatcatggttttggcaggagacacactgcccattgaggtatactgccatctcccagtcatgtgtgaggaccgaaatttgccctatgtctatatcccctctaagacggtaaggagcacgtggccccctgaccttgctcagcactggggtgtctgggatagtctgccatagcaggagagtgtgggaaagagccaggagtgttggagctaagacaggcctggatggattctcagctccacatcttcttagttttgggactacagatatgttacttcttgcatttcagttcccatcttgtaaagtgggaatcccagcccaggcgctgtggctcacacctgtaatcctagtgctttgggaggccaagacaggaggatcagttgaggacaggagttcaggaataacctgcgcaacaaagtgagactccatctctacaaaaaaaatttttttaattagctgggtgtggtg

SEQ ID NO: 159279 - DNA, 736 bp, Homo sapiens
  Payload ID: 11173
  Gene Symbol: NHSL1
  Gene Name: NHS-like 1
  ENST ID: ENST00000342260
  CDS Start-End: 74-736
ggagacagctgtgcctagcactgcaggcttcatcagaccacagagcacagcccctccatggaactgctgcagaatgttctgtctgaaagcggtttccaacctagatgaggaaagccgatggacagtccactacactgccccgtggcaccagcaggagaatgtgttccttcccaccacaagacccccctgtgttgaggacctgcaccgccaagccaagctcaacctcaaatcagtactgagggaatgcgataagttgcggcatgatggctaccgcagttctcagtactactctcagggacccacctttgcggccaacgccagcccattctgtgatgattaccaagatgaagatgaagaaacagatcaaaagtgttctctgtcttcatcagaagaagaaagatttatttccatcaggagacctaaaacaccagcctcaagtgacttctccgaccttaatactcagacgaactggaccaagtcgcttccactgccaacaccagaagagaagatgcgacagcaagcccaaacagtccaggctgacgtggtgcctattaacataactgcatcaggcactggccaagatgatgctgatggccactcagtgtacacccctgatcactactctacactaggaaggttcaatagctgtcggtctgctgggcagcgctcagaaaccagggactccagctgtcagacggaggatgtgaaggtcgtaccaccttccatgaggagaatc

SEQ ID NO: 159280 - DNA, 6535 bp, Homo sapiens
  Payload ID: 11173
  Gene Symbol: NHSL1
  Gene Name: NHS-like 1
  Uniprot ID: Q5SYE7
  ENST ID: ENST00000343505
  CDS Start-End: 205-5025
aggttcaaggactgttaatggtttgtaactgcctgacaataaactcaacctcagttacatcagcctgggcagatgtctaaggatatgagaccgggggaagaaaaagttagaatctgtagcagaaggacgaagcttgccacctgcctactgggctgagcttttaatgtgatttacatttctaagctctatgtaggtgccctggaaatggtggtcttcattaatgcaaagattaagtctttaattaaactttttaagaagaaaacggtttccaacctagatgaggaaagccgatggacagtccactacactgccccgtggcaccagcaggagaatgtgttccttcccaccacaagacccccctgtgttgaggacctgcaccgccaagccaagctcaacctcaaatcagtactgagggaatgcgataagttgcggcatgatggctaccgcagttctcagtactactctcagggacccacctttgcggccaacgccagcccattctgtgatgattaccaagatgaagatgaagaaacagatcaaaagtgttctctgtcttcatcagaagaagaaagatttatttccatcaggagacctaaaacaccagcctcaagtgacttctccgaccttaatactcagacgaactggaccaagtcgcttccactgccaacaccagaagagaagatgcgacagcaagcccaaacagtccaggctgacgtggtgcctattaacataactggggagaatttcgatcgccaggccagccttcggcggtctctaatttacacagacactctggtaagacgaccgaagaaagtcaaaaggagaaagactattacaggagtccctgacaacatacagaaggagctagcatcaggcactggccaagatgatgctgatggccactcagtgtacacccctgatcactactctacactaggaaggttcaatagctgtcggtctgctgggcagcgctcagaaaccagggactccagctgtcagacggaggatgtgaaggtcgtaccaccttccatgaggagaatcagggcacagaaggggcaaggcattgctgcccagatgggccacttctcaggttcctctggcaacatgtctgtgctgagcgattctgcagggatcgtattcccttcccgccttgacagtgatgctggcttccatagtcttccgcgttctggagcaagggcaaacattcagtcccttgagccgaggctgggtgccctcggccctgcaggagacatgaatggcactttcctctaccagagaggtcacccacaagcagatgaaaacttaggccatttaggaggtgcctcagggactggaacacttttgagacccaaatcccaggagttgagacacttcgagagtgaaaatataatgagcccagcgtgtgtggtttctcctcatgcaacctactccaccagcatcatcccaaatgccacactgtcttcctcttccgaggtcatcgctattcccactgctcagagtgcgggacagcgggaaagtaaaagttctggctcatcacatgcaaggataaaatccagagaccacctcatctccaggcatgctgtgaaaggtgatcctcagtctcccggtcgccactggaatgagggccatgccaccattctttcacaggacttagaccctcattcccctggtgaacccgcactgttgtccctctgtgactcagccgtccctctaaatgctccagcaaatagggagaatgggtcccaagctatgccgtataattgtagaaacaacctggccttcccagcccacccccaagatgtggatggcaagagtgaatctagttattcagggggcggagggcacagcagctcggagccctgggaatacaaatcctcaggtaatggaagggcatcccccctgaagccgcatttagcaactcctggctattccactcccacaagtaacatgagcagctgcagtttggaccaaacgtccaacaaagaggatgctgggtcgctgtattctgaggaccacgatggctactgtgcatctgtgcacactgactctggacatggatctgggaatctgtgcaatagcagtgatggctttgggaaccccaggcacagcgtgatcaatgtttttgttggaagagctcagaaaaaccaaggggaccggtccaattaccaggataaatccctatcaagaaacatctctttgaagaaagcaaagaagcctcccctgccaccctcccggacagactccctccgcaggattcccaagaagagcagccagtgcaacgggcaggtgctcaacgagagcctgatcgccacactccagcactcgctgcagctgagcctcccaggcaagagtggcagctcgccctcccagagcccctgcagtgacttggaagagccctggctgccccgctcccggagccagagcacagttagtgctggcagcagcatgacttccgccaccacccccaatgtctactccctgtgcggggccacgccatcgcagagtgacacaagcagcgtcaagtcagagtacacggacccctggggttattacattgactacacgggcatgcaggaagatccggggaacccggcagggggctgttcaaccagcagtggggtgcccactgggaacgggccagtccgccatgtccaagaagggtccagagccacaatgccccaagtgcccggtggttcagtcaaaccaaagatcatgtcaccagagaagtcacacagagtcatttctccatccagtgggtattccagccagtcgaatacacccacagcactcacccctgtgcctgtgtttttaaaatcagtgtcaccagcaaacgggaaggggaagcccaagcccaaggtaccagaaaggaagtcctctctgatatcttcagtatccatttcctcatcgtccacttctctttcttctagtacttctactgaaggaagtggcactatgaagaagctggatccagccgtgggctctcccccggctcctcctcctcctcctgttccctctcctccattcccttgtcctgcagacaggtctcctttccttcctcccccacctcctgtcacagattgctcccagggctctcctctgcctcactctcctgtgttcccccctccgccgccagaagctctcattcctttctgctccccacctgattggtgcctttctcctccccgccctgcactgagccccattcttccagattcacctgtgtccttgccattgcccccacctctcttaccttcctcggaacccccacctgccccacctcttgaccccaaattcatgaaagacaccaggccgcctttcacaaattctggccagccagaatcctcccggggatccttgaggccgccttctaccaaggaggagaccagcaggccccccatgcccctgataaccacggaagcattgcagatggtgcagttgaggcccgtgagaaagaactcaggcgctgaggcggcacagttgtctgaacgaacagctcaggaacaacgaactccagttgctccacagtaccacttaaagccatctgctttcctgaaatcccgaaatagcacaaatgaaatggagagtgaaagccagcctgcctctgtgacaagctcgcttccgacgcctgccaagagctcgagtcagggtgaccatggcagtgcggctgagcgtggtggccctgtgagccgcagccctggagctccaagcgctggggaggcagaggctcggcccagccccagcaccaccccactcccagactcttcacccagcaggaagccaccccccatttccaagaagcccaaactgttcctggtggtaccacctccgcagaaagattttgcagtggagcccgcagagaacgtgagcgaagccctccgagctgtgcccagccccacgacgggagaggagggctctgtgcacagcagggaggcaaaagagagttctgcagcccaagctggctctcatgccacgcaccctggcacctcggttcttgagggaggagctgcaggatccatgtctcccagcagagtggaagccaatgtccccatggttcagcctgatgtctcaccagcccccaagcaggaggagccagccgagaacagtgcggatactgggggcgatggggagagctgcctatctcaacaggacggagcagctggggtgccggagaccaacgcagccggttcatcctcagaggcctgtgacttcctcaaggaagacgggaatgatgaggtaatgacccccagtcgacccaggaccacagaagacctttttgcagctattcacagatccaaaaggaaagtcctcggccgtagagattcagatgatgaccactcccgaaaccattctccctccccgcccgtgacacccaccggcgctgccccaagcctggcctctccaaagcaagtggggtcgattcagagaagcatccgaaagagcagcaccagcagtgacaacttcaaagctctgctgctgaaaaagggcagtcgttcagacaccagcgcccgcatgtctgcagcagagatgctcaagaacacagaccctagattccagaggtcgaggtcagagccttccccagatgcccccgagagcccgtcaagctgctccccaagcaagaacagaagggcgcaggaggagtgggccaagaacgaaggcttgatgcctcggagtctgtccttttccggccccaggtacggccgcagccgaacgccgccttctgccgccagcagcaggtacagcatgcggaaccggatccagagcagccccatgaccgtcatctcggagggagaaggggaagccgtggagcctgtggacagcatagcccgcggggctctgggcgctgcggagggatgttccctggacggactggcgagggaggagatggacgagggcggcctgctctgtggggaggggcctgccgcctccctgcagccccaggcccccggccctgtggatgggacagccagtgcagagggcagagagccctccccacagtgtggcggttctctgagcgaggagagttagggccaagaacgtaactctcccaggtgacacggggggagacgagcaatgcagcactctaggaagcctgctaggcgcccttccctggctcacccggggagcccactctgcttctgtgctgtgggccccggggttgccagccctgcagtgtgagtgaacggttatttaggactcacctggcacttgccctgtggcttaagaacaagtagaagcttaaacttctgaaagtgcttcccggggaagattttttttttttttttttttttttgctaaatgctgggtgtgtatgtgtgcattttccacactttttaatttttaaaaaatacacatatacacaaacaacatgtacagaaatagaagaaagcaagccagacttaagcttggtagagtaacggagtcctctggtctaggcggtaattgctttcagagaattacgtttatagaaatcagcgagttttgtaagaaaggagaagatgttacttcaagaaagaggcagtagagttgctggttcttaatgcacagaacacacagatatatgcacacgtgtgctgctgaggtgaggcaggtctggtgagcacggagaggctgggaaggggctaagtgactaattggttcaggtacttttttctgggggaggtagactttgcttcttttttgtaaaaatgacaaacgtagaagtggcaatgctgtaacctggtgcctgctgctgtgcagccacatacacacaattgtagcctgatttttagaagtgtgggtaattttttaatgaatttcctccttgagtagcagctgaggtcattgacaactgaagtgatggtgtggacatagagagaggggaagggttggaaaggagtaagtgatacactgctggaatttgtttcctgcctatgaaataaaattatttttcagaattaaatttgaaaacttgcactacagaactatgggtggagcttttccttttacaacagtttttttttttttttttttttaaccagagtttaaacttccattaggcaatttcctgtcacttgaaatgtcaacatttgctaacttttggatatccttttggttacaccaaagaaaaagttatggctatttttttttccttgaactgcctacagtatcatgtcctaattcagaaagatttatcaaaatctattatatattatcttactttgaagaaaatgctgaatagctcttgttagtcaaataaactgataaaaattggtagggcctggctatcaattagccctgggaaatgaatttttagattaaaaaggtttttttgcatcatttggtttgtgcatttttatatttgtttataaataattgagttgctaattacttctaatcttctccaatcagattttcaacaattttagacatgggacacacgtgtgtgaagtctttattttaatgtaataatctcattacccccacccttactcccttaacttccatgtacttagactcctttatttgttaaataaactagagtattgtcttcttcatt

SEQ ID NO: 159281 - DNA, 7500 bp, Homo sapiens
  Payload ID: 11173
  Gene Symbol: NHSL1
  Gene Name: NHS-like 1
  Uniprot ID: Q5SYE7
  ENST ID: ENST00000427025
  CDS Start-End: 630-5462
gagcgcttcacagacgggaaggagagcaagtgggcggtttatgattctgccctgtgctggggcgagtgagctgagctctttgatttctcccaagtaaccgtgtgggtgaactgtaaactgggtgcctggcttgaccctgactctttttctctagggtgaggagttacttcaccagggcagctggctttctgccctggtggggaaagatgcccaggagaggagtaggattacaatttgggatgctagggacacgccaaagagtcggggtgccttggctttgtgttttgcaaagtcctgacaagtactcctgaaatgaacacgctgcttcattttttaaattatacttttatttgtttattattttttggccgtggatatcgcggatctagaaacggagtccacaatgtggctagggtaaaacatttttcttttctttcttaacccctccttttccctttctttttaattgggtgacacagaagccgtctttttggataatgcggtgcctgactgtcagcgttgtctaagagggaaacagcaggctcgtggagaggacctgggccaacgcaaaaaacccagcgttttgtttgctgggctgttctttgtctctagttgattttgaaaagaagatgaaaaaggaaggctcttcaggttccttcagactccagccgaatacaggttctctctcacgtgctgtaagttggataaatttctcctccttgtccaggcagacaaagaggctgtttcgcagtgatggagagctctcggtttgtgggcagcaggtggaagtggatgacgaaaactggatatacagagcccagcccagaaaagcggtttccaacctagatgaggaaagccgatggacagtccactacactgccccgtggcaccagcaggagaatgtgttccttcccaccacaagacccccctgtgttgaggacctgcaccgccaagccaagctcaacctcaaatcagtactgagggaatgcgataagttgcggcatgatggctaccgcagttctcagtactactctcagggacccacctttgcggccaacgccagcccattctgtgatgattaccaagatgaagatgaagaaacagatcaaaagtgttctctgtcttcatcagaagaagaaagatttatttccatcaggagacctaaaacaccagcctcaagtgacttctccgaccttaatactcagacgaactggaccaagtcgcttccactgccaacaccagaagagaagatgcgacagcaagcccaaacagtccaggctgacgtggtgcctattaacataactgcatcaggcactggccaagatgatgctgatggccactcagtgtacacccctgatcactactctacactaggaaggttcaatagctgtcggtctgctgggcagcgctcagaaaccagggactccagctgtcagacggaggatgtgaaggtcgtaccaccttccatgaggagaatcagggcacagaaggggcaaggcattgctgcccagatgggccacttctcaggttcctctggcaacatgtctgtgctgagcgattctgcagggatcgtattcccttcccgccttgacagtgatgctggcttccatagtcttccgcgttctggagcaagggcaaacattcagtcccttgagccgaggctgggtgccctcggccctgcaggagacatgaatggcactttcctctaccagagaggtcacccacaagcagatgaaaacttaggccatttaggaggtgcctcagggactggaacacttttgagacccaaatcccaggagttgagacacttcgagagtgaaaatataatgagcccagcgtgtgtggtttctcctcatgcaacctactccaccagcatcatcccaaatgccacactgtcttcctcttccgaggtcatcgctattcccactgctcagagtgcgggacagcgggaaagtaaaagttctggctcatcacatgcaaggataaaatccagagaccacctcatctccaggcatgctgtgaaaggtgatcctcagtctcccggtcgccactggaatgagggccatgccaccattctttcacaggacttagaccctcattcccctggtgaacccgcactgttgtccctctgtgactcagccgtccctctaaatgctccagcaaatagggagaatgggtcccaagctatgccgtataattgtagaaacaacctggccttcccagcccacccccaagatgtggatggcaagagtgaatctagttattcagggggcggagggcacagcagctcggagccctgggaatacaaatcctcaggtaatggaagggcatcccccctgaagccgcatttagcaactcctggctattccactcccacaagtaacatgagcagctgcagtttggaccaaacgtccaacaaagaggatgctgggtcgctgtattctgaggaccacgatggctactgtgcatctgtgcacactgactctggacatggatctgggaatctgtgcaatagcagtgatggctttgggaaccccaggcacagcgtgatcaatgtttttgttggaagagctcagaaaaaccaaggggaccggtccaattaccaggataaatccctatcaagaaacatctctttgaagaaagcaaagaagcctcccctgccaccctcccggacagactccctccgcaggattcccaagaagagcagccagtgcaacgggcaggtgctcaacgagagcctgatcgccacactccagcactcgctgcagctgagcctcccaggcaagagtggcagctcgccctcccagagcccctgcagtgacttggaagagccctggctgccccgctcccggagccagagcacagttagtgctggcagcagcatgacttccgccaccacccccaatgtctactccctgtgcggggccacgccatcgcagagtgacacaagcagcgtcaagtcagagtacacggacccctggggttattacattgactacacgggcatgcaggaagatccggggaacccggcagggggctgttcaaccagcagtggggtgcccactgggaacgggccagtccgccatgtccaagaagggtccagagccacaatgccccaagtgcccggtggttcagtcaaaccaaagatcatgtcaccagagaagtcacacagagtcatttctccatccagtgggtattccagccagtcgaatacacccacagcactcacccctgtgcctgtgtttttaaaatcagtgtcaccagcaaacgggaaggggaagcccaagcccaaggtaccagaaaggaagtcctctctgatatcttcagtatccatttcctcatcgtccacttctctttcttctagtacttctactgaaggaagtggcactatgaagaagctggatccagccgtgggctctcccccggctcctcctcctcctcctgttccctctcctccattcccttgtcctgcagacaggtctcctttccttcctcccccacctcctgtcacagattgctcccagggctctcctctgcctcactctcctgtgttcccccctccgccgccagaagctctcattcctttctgctccccacctgattggtgcctttctcctccccgccctgcactgagccccattcttccagattcacctgtgtccttgccattgcccccacctctcttaccttcctcggaacccccacctgccccacctcttgaccccaaattcatgaaagacaccaggccgcctttcacaaattctggccagccagaatcctcccggggatccttgaggccgccttctaccaaggaggagaccagcaggccccccatgcccctgataaccacggaagcattgcagatggtgcagttgaggcccgtgagaaagaactcaggcgctgaggcggcacagttgtctgaacgaacagctcaggaacaacgaactccagttgctccacagtaccacttaaagccatctgctttcctgaaatcccgaaatagcacaaatgaaatggagagtgaaagccagcctgcctctgtgacaagctcgcttccgacgcctgccaagagctcgagtcagggtgaccatggcagtgcggctgagcgtggtggccctgtgagccgcagccctggagctccaagcgctggggaggcagaggctcggcccagccccagcaccaccccactcccagactcttcacccagcaggaagccaccccccatttccaagaagcccaaactgttcctggtggtaccacctccgcagaaagattttgcagtggagcccgcagagaacgtgagcgaagccctccgagctgtgcccagccccacgacgggagaggagggctctgtgcacagcagggaggcaaaagagagttctgcagcccaagctggctctcatgccacgcaccctggcacctcggttcttgagggaggagctgcaggatccatgtctcccagcagagtggaagccaatgtccccatggttcagcctgatgtctcaccagcccccaagcaggaggagccagccgagaacagtgcggatactgggggcgatggggagagctgcctatctcaacaggacggagcagctggggtgccggagaccaacgcagccggttcatcctcagaggcctgtgacttcctcaaggaagacgggaatgatgaggtaatgacccccagtcgacccaggaccacagaagacctttttgcagctattcacagatccaaaaggaaagtcctcggccgtagagattcagatgatgaccactcccgaaaccattctccctccccgcccgtgacacccaccggcgctgccccaagcctggcctctccaaagcaagtggggtcgattcagagaagcatccgaaagagcagcaccagcagtgacaacttcaaagctctgctgctgaaaaagggcagtcgttcagacaccagcgcccgcatgtctgcagcagagatgctcaagaacacagaccctagattccagaggtcgaggtcagagccttccccagatgcccccgagagcccgtcaagctgctccccaagcaagaacagaagggcgcaggaggagtgggccaagaacgaaggcttgatgcctcggagtctgtccttttccggccccaggtacggccgcagccgaacgccgccttctgccgccagcagcaggtacagcatgcggaaccggatccagagcagccccatgaccgtcatctcggagggagaaggggaagccgtggagcctgtggacagcatagcccgcggggctctgggcgctgcggagggatgttccctggacggactggcgagggaggagatggacgagggcggcctgctctgtggggaggggcctgccgcctccctgcagccccaggcccccggccctgtggatgggacagccagtgcagagggcagagagccctccccacagtgtggcggttctctgagcgaggagagttagggccaagaacgtaactctcccaggtgacacggggggagacgagcaatgcagcactctaggaagcctgctaggcgcccttccctggctcacccggggagcccactctgcttctgtgctgtgggccccggggttgccagccctgcagtgtgagtgaacggttatttaggactcacctggcacttgccctgtggcttaagaacaagtagaagcttaaacttctgaaagtgcttcccggggaagattttttttttttttttttttttttgctaaatgctgggtgtgtatgtgtgcattttccacactttttaatttttaaaaaatacacatatacacaaacaacatgtacagaaatagaagaaagcaagccagacttaagcttggtagagtaacggagtcctctggtctaggcggtaattgctttcagagaattacgtttatagaaatcagcgagttttgtaagaaaggagaagatgttacttcaagaaagaggcagtagagttgctggttcttaatgcacagaacacacagatatatgcacacgtgtgctgctgaggtgaggcaggtctggtgagcacggagaggctgggaaggggctaagtgactaattggttcaggtacttttttctgggggaggtagactttgcttcttttttgtaaaaatgacaaacgtagaagtggcaatgctgtaacctggtgcctgctgctgtgcagccacatacacacaattgtagcctgatttttagaagtgtgggtaattttttaatgaatttcctccttgagtagcagctgaggtcattgacaactgaagtgatggtgtggacatagagagaggggaagggttggaaaggagtaagtgatacactgctggaatttgtttcctgcctatgaaataaaattatttttcagaattaaatttgaaaacttgcactacagaactatgggtggagcttttccttttacaacagtttttttttttttttttttttaaccagagtttaaacttccattaggcaatttcctgtcacttgaaatgtcaacatttgctaacttttggatatccttttggttacaccaaagaaaaagttatggctatttttttttccttgaactgcctacagtatcatgtcctaattcagaaagatttatcaaaatctattatatattatcttactttgaagaaaatgctgaatagctcttgttagtcaaataaactgataaaaattggtagggcctggctatcaattagccctgggaaatgaatttttagattaaaaaggtttttttgcatcatttggtttgtgcatttttatatttgtttataaataattgagttgctaattacttctaatcttctccaatcagattttcaacaattttagacatgggacacacgtgtgtgaagtctttattttaatgtaataatctcattacccccacccttactcccttaacttccatgtacttagactcctttatttgttaaataaactagagtattgtcttcttcattagaaggacctaggatgacaatgcggagagtcttggtctgaatctagtgcgactaccacctgccagcttttggggggtatggaaatactatctaaaagttggactgcatgggtcaaatcattatgagacttataaactaaaactttagatacccatatagaaatgtctttgaggcaaaaacaaacctaaagaatgaaggctctttcccttctctgaaaaaaacaaaacactgctcttcacacaaccggaagtcaagaccagagatttggagcaattgtctactaatttggcacaaagatcgtttctttagaaaagtggcattggcttttgaatatgaaatcttctcatagctgcctaaaaaagactagaatgtatatggatatcagaaacctttaataatacataatttatgcaaagataagataaagcaacataacactaattataaaactatttttaaatccccatttttaatgaaaaatatacatttgtatttaatttcctttgaataaaacaattgtaaagtaaa

SEQ ID NO: 159282 - DNA, 506 bp, Homo sapiens
  Payload ID: 11173
  Gene Symbol: NHSL1
  Gene Name: NHS-like 1
  ENST ID: ENST00000491526
  CDS Start-End: 1-506
cggccgcgctgggccaccgcaccgccgcgctgcaccgccgcctcgacgccctgcaagccgccgctgcgcgcctggaccaccgccgagtgaaaatcccggtttccaacctagatgaggaaagccgatggacagtccactacactgccccgtggcaccagcaggagaatgtgttccttcccaccacaagacccccctgtgttgaggacctgcaccgccaagccaagctcaacctcaaatcagtactgagggaatgcgataagttgcggcatgatggctaccgcagttctcagtactactctcagggacccacctttgcggccaacgccagcccattctgtgatgattaccaagatgaagatgaagaaacagatcaaaagtgttctctgtcttcatcagaagaagaaagatttatttccatcaggagacctaaaacaccagcctcaagtgacttctccgaccttaatactcagacgaactggaccaagtcgcttccactgccaacacca

SEQ ID NO: 159283 - DNA, 568 bp, Homo sapiens
  Payload ID: 11173
  Gene Symbol: NHSL1
  Gene Name: NHS-like 1
  ENST ID: ENST00000533765
  CDS Start-End: 157-568
agaatatagagttatcctgttgacgagcagttagaattgtattaacgaagaagaagagggaggttactgagcaaagaagtgaattttatcctattttaacatgggacatcgtgccggaacgagttctccatagatgctctgggatttattttgataatgaatgtaatatattgtctggagtctgtgaccgattcctctttcccgtggggtgcagttgcggtttccaacctagatgaggaaagccgatggacagtccactacactgccccgtggcaccagcaggagaatgtgttccttcccaccacaagacccccctgtgttgaggacctgcaccgccaagccaagctcaacctcaaatcagtactgagggaatgcgataagttgcggcatgatggctaccgcagttctcagtactactctcagggacccacctttgcggccaacgccagcccattctgtgatgattaccaagatgaagatgaagaaacagatcaaaagtgttctctgtcttcatcagaagaagaaagatttatttccatcaggagacctaaaacaccagcctcaagtg

SEQ ID NO: 159284 - DNA, 3082 bp, Homo sapiens
  Payload ID: 11174
  Gene Symbol: NHSL2
  Gene Name: NHS-like 2
  Uniprot ID: Q5HYW2
  ENST ID: ENST00000510661
  CDS Start-End: 472-2601
gatgaggccactaagcccacccccaacccaaggccccagtctgccaggcgtctggagtttatattgatgcctacaaaacggcagctgagcgaggatgagactaccacccagggtgtgagggcccccgaggcctccctgagcctgtctaccacagccgacaagcaaactgcctggaatagccttttccctctgcccatcctagaggagaagcggtggcctcagctttgctccacgcagtctgacattgtgcccatcaacatctctggtcacagcaacagcccagcaggcagtgtggcccactctaccacctccgacatcaggcccagtcactcagttccagaaggggttcatggaagagttgcagttggtcaggatgctcggttcccaagtctcacctcgccagtactgagaactccttccagtgagccggacgaacctcaccaggcacggagtggcccaaaccctcctggcatggagagcatgggaatggtgtacagtgtccccagttcttgcaatggacctacagaatcaaccttctccacttcctggaagggagatgcttttacctacatgactccaagtgccaccagccagagcaatcaagtcaatgaaaatgggaaaaatccttcctgtgggaattcttgggtctctctaaacaaagtcccacctctggttcctaaggaggctgctaccctccttgtcgctcgtgataacccagcaggatgcagtgggtcagctggctaccctgagcgccttattcagcaaaggcacatgcccgaaagaccctccaagattggccttctgaccagtgggacctcgaggctggagacaggccccggtggggccagcagattccgggagcggtcactgtctgtgcccacagactcaggcaccacagatgtggactatgatgaggagcagaaggccaatgaggcctgtgccctgccttttgccagtacgagctctgagggcagtaacagtgctgacaacattgcctcccttagtgcccagcaagaggcccagcacagaaggcagaggtccaagagtatctcacttaggaaggccaaaaagaagccttccccacccacacgcagtgtctcactggtcaaagatgagccaggcctcttgcctgaaggtgggtcagcactacccaaggaccagaggcccaagagcctttgcctctccttggaacatcaaggacatcactcgtcccacccagatgctcagggtcacccagctattccaaaccacaaagatccagaaagtacacaattctcccaccactggtatcttactgactggaagtctggtgacacctaccaatccctgtccagctccagcactgccactggcaccacagtcattgagtgcacccaagttcagggcagctcagagtctcttgcctcaccttccacctccagagccactacaccttcccaactctccattgaagtggaggccagggagatatcatccccgggaaggccccctggactgatgtcaccctccagtggctactccagccagtcggaaacaccaacacccactgtttccatgtccctgaccctgggccacttaccccctccaagcagcagtgtccgggtacgtccagtggtacctgagaggaagtcatcactacccccgacgtcaccaatggagaaatttcccaagtcacggctatcatttgacctaccactgacctcttcacccaacctggatctgtctgggatgagtatctccatccgaagcaaaactaaggtgagtcggcaccactcagagacaaattttggcgtcaagctggcccagaaaactaatcccaaccagccaatcatgcctatggttactcagtccgacctacgttctgttcgcctgaggtcggtcagcaagtctgagccggaagatgatattgagagccctgagtatgccgaggaacccagagcagaagaagtcttcaccttgccagagagaaagacaaaacctcccgtagctgagaagcctccggtggcccggaggcctccaagcttggtccacaagccaccatctgttcctgaggagtatgcactaacttcaccaaccttggctatgccccccaggagctcaattcaacatgcgagaccactccctcaagacagctacacggtagtgcggaaaccaaagccctccagcttcccagatggcagaagcccaggggagtcaacagcaccctcatctcttgttttcacgccttttgccagttcctctgatgctttcttctcaggaacacagcagcctccccagggaagtgtagaggacgagggccccaaggtgagggttctgcctgaaagaattagcctccagagccaggaagaagctgagaaaaagaaaggcaagattccacctcccgtaccaaaaaaacccagcgtgctgtacctgcctctcacttctcccacagctcaaatggaggcctatgtggcagaaccaaggctgcctctcagccccatcatcaccctggaggaagacaccaagtgtcccgccaccggcgatgacctgcaatcacttggtcaaagggtgacttcaactcctcaggctgacagtgaaagggaggcaagccctctgggttagtaaactgtctgctggctttttccttcagtcacaggagagatgagggtgagaatggagtgccagagatggaagcagatgccccagaataattatcctgatcccaagtcagtagcgggcaccctttgagggtttgagttactctaaataggaaccacgggctggccttactgcccttgagatcaagactagcccgaggcagatctccaaggcccagtttaggccactctcccctctaaatctctagtgctgagataatgaaatcaaactaggttctagcaccctaggacttcagcatcccacatccctagccaagcatgcatcctgtcttgggaactactccacctcactgtacagtacttttcattggctgcagtgaatttagttccctacatgggacccagtaccccaccagactgagttcaagtgccatggcaggctcggagccatctgaaacaacggaatatgttgccaccagcagcct

SEQ ID NO: 159285 - DNA, 2955 bp, Homo sapiens
  Payload ID: 11174
  Gene Symbol: NHSL2
  Gene Name: NHS-like 2
  ENST ID: ENST00000632230
  CDS Start-End: 449-2955
ttcccctcactgcaggacagccgctgagcgggaggtcagccctctgaggggctctgactcgggcctttggctgagaaccttacctagagaaagacaagcccaactcacagtaaacttccctcgcctgtccgctgtgactgggccgacgggtccagggtggctgtgggtggagtgcagcggggtggagaaagagagaggaaactcacttttgaatcctcagttgctttccctaggctgggctgcccaggaacaacttcaatgggcaaaggagtatgtgatcgatgggaccaaggtgctgggaaacggggttcaggaaagtccctgggcacccactgaggagcctagggacagggtttgggacagtgtggagcccgtcggctccctgcccccagtgtgggctcagcacacacttttctcatgtggattcttggttatccacaccgctgggatggagagaactgactctgtcaccctcttctggatccggggaggtcacagcaacagcccagcaggcagtgtggcccactctaccacctccgacatcaggcccagtcactcagttccagaaggggttcatggaagagttgcagttggtcaggatgctcggttcccaagtctcacctcgccagtactgagaactccttccagtgagccggacgaacctcaccaggcacggagtggcccaaaccctcctggcatggagagcatgggaatggtgtacagtgtccccagttcttgcaatggacctacagaatcaaccttctccacttcctggaagggagatgcttttacctacatgactccaagtgccaccagccagagcaatcaagtcaatgaaaatgggaaaaatccttcctgtgggaattcttgggtctctctaaacaaagtcccacctctggttcctaaggaggctgctaccctccttgtcgctcgtgataacccagcaggatgcagtgggtcagctggctaccctgagcgccttattcagcaaaggcacatgcccgaaagaccctccaagattggccttctgaccagtgggacctcgaggctggagacaggccccggtggggccagcagattccgggagcggtcactgtctgtgcccacagactcaggcaccacagatgtggactatgatgaggagcagaaggccaatgaggcctgtgccctgccttttgccagtacgagctctgagggcagtaacagtgctgacaacattgcctcccttagtgcccagcaagaggcccagcacagaaggcagaggtccaagagtatctcacttaggaaggccaaaaagaagccttccccacccacacgcagtgtctcactggtcaaagatgagccaggcctcttgcctgaaggtgggtcagcactacccaaggaccagaggcccaagagcctttgcctctccttggaacatcaaggacatcactcgtcccacccagatgctcagggtcacccagctattccaaaccacaaagatccagaaagtacacaattctcccaccactggtatcttactgactggaagtctggtgacacctaccaatccctgtccagctccagcactgccactggcaccacagtcattgagtgcacccaagttcagggcagctcagagtctcttgcctcaccttccacctccagagccactacaccttcccaactctccattgaagtggaggccagggagatatcatccccgggaaggccccctggactgatgtcaccctccagtggctactccagccagtcggaaacaccaacacccactgtttccatgtccctgaccctgggccacttaccccctccaagcagcagtgtccgggtacgtccagtggtacctgagaggaagtcatcactacccccgacgtcaccaatggagaaatttcccaagtcacggctatcatttgacctaccactgacctcttcacccaacctggatctgtctgggatgagtatctccatccgaagcaaaactaaggtgagtcggcaccactcagagacaaattttggcgtcaagctggcccagaaaactaatcccaaccagccaatcatgcctatggttactcagtccgacctacgttctgttcgcctgaggtcggtcagcaagtctgagccggaagatgatattgagagccctgagtatgccgaggaacccagagcagaagaagtcttcaccttgccagagagaaagacaaaacctcccgtagctgagaagcctccggtggcccggaggcctccaagcttggtccacaagccaccatctgttcctgaggagtatgcactaacttcaccaaccttggctatgccccccaggagctcaattcaacatgcgagaccactccctcaagacagctacacggtagtgcggaaaccaaagccctccagcttcccagatggcagaagcccaggggagtcaacagcaccctcatctcttgttttcacgccttttgccagttcctctgatgctttcttctcaggaacacagcagcctccccagggaagtgtagaggacgagggccccaaggtgagggttctgcctgaaagaattagcctccagagccaggaagaagctgagaaaaagaaaggcaagattccacctcccgtaccaaaaaaacccagcgtgctgtacctgcctctcacttctcccacagctcaaatggaggcctatgtggcagaaccaaggctgcctctcagccccatcatcaccctggaggaagacaccaagtgtcccgccaccggcgatgacctgcaatcacttggtcaaagggtgacttcaactcctcaggctgacagtgaaagggaggcaagccctctggggagttctgtggaaccaggcaccgaagaaaaaagtttaatcagtgataaaacagctgaatggattgcagaggatgatgatgacgtgtttgtggcttcacgcacaactgaagatttatttactgtgatacacag

SEQ ID NO: 159286 - DNA, 13660 bp, Homo sapiens
  Payload ID: 11174
  Gene Symbol: NHSL2
  Gene Name: NHS-like 2
  ENST ID: ENST00000633930
  CDS Start-End: 271-3948
ggaggaggagcccggcgaagcagagtcagagggactggtggctccggcgagtgtgcagccccgggggagccggcgctctaggcgaggaacccgtcagcccgcctacccgcccgtcgtctttggcgcccgcacgctctccggcccgcgcccaggggcctgctacacccggagctggggccgccgctcaggggcgctcgggccaggggcgctgctcggggtgagcccgccgcgccgccagactggtcccctgcgcccgcgcccgcggccgggatgccgttctacaggcgcacggtggtaccccagcgcctgtgcccgcgcaacccgccgcagcagctggcggagctccgcgacgtgagccacctggcagcgctcagcctgctccggcagctcgccgacctctgtggccactcgttggctctgctcgaggacctcgaggggcacctgctggccctggggcgccgcacagacagcctgtaccggcgcaccgtgcgcctccgccgccgccttccctgccgcctgcttggcccggaggaggacgaggaagagctagctgcagctaactcgggtcgggaaaatgcgacagcgactgcccactcgaggtcgtcatggcgacagccagtgaacgtgttcctctcctcgggcaggcccccgagtgtagaggagctgcttcgggaggcgcagctcaatctccagagcctgttgcaagaagaatatgaggaacagtactcggaggccagacttgtggggcagaccttccgctcttctgatgaggccactaagcccacccccaacccaaggccccagtctgccaggcgtctggagtttatattgatgcctacaaaacggcagctgagcgaggatgagactaccacccagggtgtgagggcccccgaggcctccctgagcctgtctaccacagccgacaagcaaactgcctggaatagccttttccctctgcccatcctagaggagaagcggtggcctcagctttgctccacgcagtctgacattgtgcccatcaacatctctgggcagcagtttgataaacatgcaagtttgcgacactcgttgtttaacacagagacagccgtgaaccccaagtccaccctgaggcggaggcggaccattattggattctctaacttttcccagcgagaccaaggtcacagcaacagcccagcaggcagtgtggcccactctaccacctccgacatcaggcccagtcactcagttccagaaggggttcatggaagagttgcagttggtcaggatgctcggttcccaagtctcacctcgccagtactgagaactccttccagtgagccggacgaacctcaccaggcacggagtggcccaaaccctcctggcatggagagcatgggaatggtgtacagtgtccccagttcttgcaatggacctacagaatcaaccttctccacttcctggaagggagatgcttttacctacatgactccaagtgccaccagccagagcaatcaagtcaatgaaaatgggaaaaatccttcctgtgggaattcttgggtctctctaaacaaagtcccacctctggttcctaaggaggctgctaccctccttgtcgctcgtgataacccagcaggatgcagtgggtcagctggctaccctgagcgccttattcagcaaaggcacatgcccgaaagaccctccaagattggccttctgaccagtgggacctcgaggctggagacaggccccggtggggccagcagattccgggagcggtcactgtctgtgcccacagactcaggcaccacagatgtggactatgatgaggagcagaaggccaatgaggcctgtgccctgccttttgccagtacgagctctgagggcagtaacagtgctgacaacattgcctcccttagtgcccagcaagaggcccagcacagaaggcagaggtccaagagtatctcacttaggaaggccaaaaagaagccttccccacccacacgcagtgtctcactggtcaaagatgagccaggcctcttgcctgaaggtgggtcagcactacccaaggaccagaggcccaagagcctttgcctctccttggaacatcaaggacatcactcgtcccacccagatgctcagggtcacccagctattccaaaccacaaagatccagaaagtacacaattctcccaccactggtatcttactgactggaagtctggtgacacctaccaatccctgtccagctccagcactgccactggcaccacagtcattgagtgcacccaagttcagggcagctcagagtctcttgcctcaccttccacctccagagccactacaccttcccaactctccattgaagtggaggccagggagatatcatccccgggaaggccccctggactgatgtcaccctccagtggctactccagccagtcggaaacaccaacacccactgtttccatgtccctgaccctgggccacttaccccctccaagcagcagtgtccgggtacgtccagtggtacctgagaggaagtcatcactacccccgacgtcaccaatggagaaatttcccaagtcacggctatcatttgacctaccactgacctcttcacccaacctggatctgtctgggatgagtatctccatccgaagcaaaactaaggtgagtcggcaccactcagagacaaattttggcgtcaagctggcccagaaaactaatcccaaccagccaatcatgcctatggttactcagtccgacctacgttctgttcgcctgaggtcggtcagcaagtctgagccggaagatgatattgagagccctgagtatgccgaggaacccagagcagaagaagtcttcaccttgccagagagaaagacaaaacctcccgtagctgagaagcctccggtggcccggaggcctccaagcttggtccacaagccaccatctgttcctgaggagtatgcactaacttcaccaaccttggctatgccccccaggagctcaattcaacatgcgagaccactccctcaagacagctacacggtagtgcggaaaccaaagccctccagcttcccagatggcagaagcccaggggagtcaacagcaccctcatctcttgttttcacgccttttgccagttcctctgatgctttcttctcaggaacacagcagcctccccagggaagtgtagaggacgagggccccaaggtgagggttctgcctgaaagaattagcctccagagccaggaagaagctgagaaaaagaaaggcaagattccacctcccgtaccaaaaaaacccagcgtgctgtacctgcctctcacttctcccacagctcaaatggaggcctatgtggcagaaccaaggctgcctctcagccccatcatcaccctggaggaagacaccaagtgtcccgccaccggcgatgacctgcaatcacttggtcaaagggtgacttcaactcctcaggctgacagtgaaagggaggcaagccctctggggagttctgtggaaccaggcaccgaagaaaaaagtttaatcagtgataaaacagctgaatggattgcagaggatgatgatgacgtgtttgtggcttcacgcacaactgaagatttatttactgtgatacacaggtccaaaaggaagctgctcggctggaaggaacctggtgaggcctttgtgggtggcagaacgagttcccactcaccaataaagaacacagctgagtctccaatcagtgagtctaccgccactgcagggtcaggcagcagtgccaacctagatgctggcagaaatgacgatttcaaggccttgctacagaagaagggaagtaaggcaactccaaggtctcgtccctcagcagctgaacttctgaagaccactaacccactggctcggagaattattgcacaattttcaaaagactatgaaaccaccgataaccccagtacctaagccctgggctcaacaagcagggtttacttactaaacttgagtagagaagggggaagagaaagggtctttaaacagaaccatgggaacaacagagcctacatttcttttatattaactcacactctggacagcaggagagaggctacttcatctagagctaaaatcatctggcacttaatcatcttcagacatttttatgttttcatacttataagcttgtcatgactgactaccgagtttcttcttattttcccccagtggtgtgcactaactaagaagaaattttcagatgtcagggcacatgtgccactttttcaattcagtgacccggctgctccatccctggctcctgtcactgaggagtgcagtgtgagagcagattggaggctgccaaacttggggggcatagggtgccattgcttattattcactttcctagggaggctctgatggccctgtgtgcaaacacagaaagactctgatgcctcctcaaccacagtttagctttcccctgcgctcacaagaggtttgcagggtgcacttatttcggcatgaggttgattggatggcttttgtggtgcaaaatatgactgtgactctgtcctgaaacttaatgcctttttcagtttgattgtctacatggagatcagggtgataagtttcaataaacatatagacgcccccccacccacccccattagctagaaaagaccaggactgggttgctttaaatgaaccaagcttgaccaacaaacaagacagccatttgttcactcagatctagccgaggtaactcacaagtgcaccttgagatcctccatgtgtctgtcaacagcgataggcaggatctgcgcccagctcatgctgcattctaagaactctcatttcatttgcatataaaattcattacaggaagtaattaactgaaggaacagcatcatcaaaggctcaaggataatggaaagtaagtgcatcttgccccccaccagtcaattcagatcgtggtttgtggttggtttggttttgtttaaaggaagtccgactctgttccaaaaaccaagaacatataaactaaaaggatctatccaaaatctaaaaggcagtcttgccagttgctatggcccataatgcacacacacacacacacacacacacacacacacacacacacaaaagggctactttttgccatttaggttctgtgtttgaccagctttcaattaaccttgctgggggagagcataagaacctgggtaaatggcatactgaaagagcttcagaataatcattgcgacccctccctgcccccaccccccacgaagcttataggcactaactattcttgtcagctcaattttctaagcagagcaagagcagtgattcatttgatttttgtatgcctgatttctgggaggttggggaggaagacaaagcactgagcaaagaaaacctgctgaccaatgatggaaagttaattgtctactgtcttcaagaggcaaaaagaacagttgaatgaaattgtagcctgcttcacaaagagagttccccagccccttcctacttcacccctcacccaatagattcaatggtcaacctcctggaggatgcagtaaggttccagagacaagcagatctcaactttgataggtcgtattgcccaatgagaagccaccttttagctcaactgcccacactccagctggacagagcagctgaaaaaccacactaagtactgagaaaacttgggcctctcacaagagaagccctaggcctaggccctttgttgttatagttctgaatctgagacttctggaaacaggccaggcccaccaactcccttgcaaccagcacttcgacacttaaaataataaaacagctaggctcagttgcttttgaaagtactagaactacttggtgtgaagttcttaaccaaattccaaattccagggattttgcccaaaataaaatcaattcatccctggcctcagtttatatatgaatgccacatttgtctgctccagacttagaattccaaaaaacagacattttcctctgtagtaaatgaaggagcgtttgtgcttttgcttagcaaaaatgaaaggacaccagggtctccttgggaaccattatgactggttgaacgttaaagctgagtatgggactcacatagtataggccttgttacttctgtggacttttctggaagtttcttgtttactacttctaatgggttttgcctctcccctcaccttgctacctctggaggttttcccaaaagattctgaacctgaattctcagacaccttgatgtttgtcagttacctttagtcttgttttcctctacaatactctatatgcctggaatttttagaatatcttctacatcatcactgtggcccacgcagtggtgttcccattagcacaagaggatttggggcagaaatcatatggtcagagagaacatttaagaccggaagtattcatttaattttttaaattaattttttgtaaagatgggggttttgctatgttgcccacgctggtcttgaactcctgagctcaagcgatcctctcgccttggcctcccaaagtgctgggattaaaggagtaagccactgcacctggcctcatttaatattttgcaacaggtagacgtcccaaataaacaaccaaactgtaaaatttctactaatcactaattaacagaacacaaagcatcttccccactcctaacactcaacctctctcctacctttgattatcataactccactctctctcccacccaggcacttaccacaatgtttgctgccttctgcacctacgctgctgagactggagaagagaggctgaaagcccctctcagaaaggcttgcagagaacccaccactactacaattactagtataaataataatgataataatttttgaaggtggaatagagaagagatttgagtgaaatgaagttggccctaggagctcagcttccatttcaagtcgtccctatcctcttttttcctccccattccagttagtagcaacagatggctctgctagcctgactttgatctagtcaccatccccaggagcggaggttaattgttaaccaaggatgctttgcatttggtgggtagtcagtacatgtttttgagggtagttattcttggtacaatagcaagctttgctggtgtctcctctccttatcctgtactacttggcctgcctcagctcctgactgggcctcccccaccagccccaacttattcctcagccccaacttatccctcagccccaaatcccatgaactgcatccctagcacaacaactcacccataaaggaagtgagacaacaggaagcaaaataattaatgttagcttaatgaccacaaactgaccagttgatctggataaattaccttgaacgtgcaaagacagaggagatcctaccaggctctcctaacaagcactgcacctgacatccagtgtaactatctggacaacacagacccgattgcagtctctctgtacctgtcagtctgagcagatctgtccacgcacctgccctcttcctcatcaatgaacaagttgggaaaaagatgagttcatgctcagtgctctgttcctcactcgttccaccttccattatcaagtctgtgacacaatggtgagctttcgctttaatatgatttgctagggccaggactagggtgaggtgagcgaggcacctagggcgtaaaattcaaagaggtgcccgctctcagggccatgcaagtgccttaccctcgtcccagccctgtgatttgcactctttaaagtaatatcagtttatcttcttcctatgaacaagtatagtccttctgatttggggtcgggggttaactccctatctcttgttgcaccaaatattttattgctacctatttttccattgctataagtctttgtgtgcctatacattaaagaatctttaatagtgttaatatcggaaaacatagttgatttctaagtaatatgctccaggtggcaagttaacacccatttcagcagggatgctcccaaggccagcccttcaacaaaagagtgactgagttgacggtctgtcaccaggatcctccctctcctctttctgctccattctcctaaaccttgcttcccagcaccaactctcttcagtgcctcctacttccttctcctcctaagaaaaacctgctctcaggaaagggataaattcatttactttgagattataaggcttaatgctacctcttttgagggtcagttgcattttaacaagggaaaagccttaagccaatggaatgaagttctacttgcagaatgttaggcatcaactagttgtagaagtgtatttttcaccatggaaaggccaaattccctgacgcctaactccagaatatagaaaatatcttaatcgcctggaatcatttgagttactagctgatggtcaattaaattgtcctgatatccaatgctattcaatatggttactaccaagggactctcagaaatggctactaaaagccactgagaaggcctagatcattcatattgtacattgacatttttacataaatggaattaatactacttaccatttgagtaaagaacacaaggaattgaagagtctgtgaaaatatgtcctgtttgtgaaaggtgaaactgtccaatccatgtccaatcaatgtcagtcgtccagtattggtggtgattattaaacttattggaggtacaactttacctccaataagcttacctttacaagcttctgctttccctgcttcatctctgttatgggctatcagtccagcttggtgtgaaaatgagactatatctataccacagcccccaatcctttcaaaggctttgcatgtatttcagctacaagtgacaaggatattagggatttaaaaggataagagagtgggaaagatgtataaggaagtgcctttgtcaaaaggcagcaaaaagtataatgatataaacataatatgaaataagcaaattttagaatactttgaaacagatttatagaggaatacatagtaaatagttatagacacacatttggggcatttttaataaggttagcaagaagaaatttgcatgagtaatgagcaatgtgaaatgggcattatacttttgttcagtaaagcccaaaatctaggccaatggttctcaaagtgcagttccaggagcagcaacagcagcatccctggagagggagaaagagagagagagagagtgtatgtgtgtgtgtgtgtgtgtgtgtgtgtgtgtgtgtgtgtatgtgcattccagtgatgttactccttcaagcccctgaatcactatagccacgactctccaactgattccaacctttaccattattctggctctcatcataaggaccagtctctggccaagaggtgtatattgttatcttggtcaggcatatgtttgcttggttttaagaaattatcagattgaggagtctcatgttttatgggactccggtgcatatgctcgaaaaaaattaaaaagaacttatcatattggatcaacaaattgctcaacctgcaaaatctttgattagacttagccagcccatctggcctgctttgggtttaaaaaaaaaaaaaagattttttttaactcacaaatggaaaaaagggaaaggtgttaagtttgtttggtattgccagctcttaaatacctgtctttaccgtggtggctgttctccagtaaggctctggcagaagtatatttgattttaagatttttgcctaaatagtagaatttgatagcaacgaactccaaaacaaaatctgaactggaacaactagttaacccctctcagcctctttgtaatgccaagctttatagacatttattccttaggtggtcttgagctttttctaacatccaattttataaaatgttgtgcatgcaaacgcagcattgtgctcattgtacaagtcacctcaaactcattccttcccccatgtgtatcatggcgaagaaatatcaatatatgtatgtgctgaggtcttctgatgaattgtaaattacaaaccttttcattcatttttaaatgagatatatttaccctggctagtggttaaagttttattctttttattatatttcactgctacttttttctactgactccaaagcttactttgggctatatttcttatttctagattgttgtatttatcttatttctatatttatctgcagtcttggaatgttagagctgaaagggaccaacctctctcatttcacacatgaggaagctgaggcccagaaaggtcaaataacttatatacaaggtcacacagtgagtcagtggtggggcccagcctcaattccaggtctcctgcccttgggcccaatctggtttcatttaaagcactacaatttatagaagacccacagctggcttctacttttatgacacatgaatttcccaggtatttcaatgaactaatatatatgctttaagggaaaatgttcaagagttctttaattcattaatccaaagacaaattggattttcagtttataaacattagtttccctccaaattcaatatgtgcaccctacttagtacaatggatgttttccctaaaagttgtgtgaaaaatgagttttttagatatcaagtatcattttttagaggtaaacttcctatgtaagggaaccttctggtgacttctttttgaaaaaccgagattcctcttgtcattgtcccataatgtctctactttttttagtgcaaacttttgtatttggtgtttatttaaaagtagggtacaacccaaccaatattagctttcccagagtctactttagccttcccttcttaatctttatgagaaattttcagactgttaaatgctcatgagatatttagttgtgttctagaaatttcacctggcttgatattctgtcaatccctgggctcaaattccagctccatcttatcaaacaataacagaattccctaatcagtactaagctccgcatgcagtctcttttccagaacattctttgcctaatgttccttagtgtggctctctctttagttggggcctccttccttagtacatgcataccttactattctgtggaattgcaagccatgcatcttttagagccacactagtcaaattgattggcatttccatttattttccattgttcccttgtttctcctggacttcctctcgtttctcttttcgaggatgcttagaggcttctcaccagagattggtgaggtttcccccatcatctagatgggagattgacaaattctgtaaaggttaagacagtaactattttaggctttgtgggctacatgtggtctctgtagcacattcttctttgttgttgctgtttgttcattcgtttgttttgcaacctttggataatgtaaaccactctctttttttttgacagagtctctctctgtagccaggctggagggcaattgtacaatctcggctcattacaacctccacctcccgggttcaggcaattctcctgcctcagcttcccgagtagctgggactataggtgcgtgccaccatgcccagctaatattttttttttttttgtatttttagtagaggcagagtttcaccatgttggccaggatgttctcgatctcctgaccttgtgatccgcccacctcggcctcccaaagtgctgggattacaggtgtgagctaccgcaccctgccaatataaactattcttagctcatgggctatgcaaagccttaggctgacccctgatccagactgtcttctgagacaagcatttctgtgagctgccccatgtgataactgagttgtgcagtagctgatgtggtttattgccttcccatctactgcattgtcagaccagactgactgcacaggagcaggtggaggggggctgcatatgccaaccattactcttcaatagagtgtccttcatgagctctctctctctctcattactgactacctcagtgtagaaaccctcatttttttccccagacctatccttgttacccaatgtgcctctgcttccctgggtttgggataaactggaaggagagaatttctgagttctcttacttattttgttccataacttctccctcatatctgtggttggagactcccacccttgtccaccctttcctgcctcatactagtatcatgagtttagggctgtcgttggaaagtctggcagcccaggccataggattccagttcagcctacgatttcctagggaaatcaccaggttccaaaggctggtttttaaacctagaatatccatgtatccatttcctaatgcagtttggacctgttctagacagagcactcagccttagcaagaaaaccaatgaggtgcagaagatattctgtgcccacagtttttccctgccttctggaccctcagcccctgggatgggctccttgggattgcccatgcaacaacacagccacaagacattcagcacaccacctcctcctgtgttttgaatctctaaatgaattctgttctaaagcttcttcacgtctctctccatcctgctcccatctccacctctaatgcttcttgggagtctgaagctcagattcacattttcacattttctcgtataaacgttgtgggataagaatggatgatatgtatgtgtctgtgtgagtttggtttctcaacctggactgtgagggctaattcacaaatcacaccatacatgcgtgtgtgcatgcgcgcgcgcacacacacacacacacacacacacacacacacagtccagcaccctcatcagttctctggtttaggtccagatctgatgggactggtcaagaaggggatggtgggggctcctgaagcatttgccctttcttgcctcttgagaccttctttccattggcaattcaaaacaggctgacatacagagggctagcactctaatttgatgtggactcagccactcagacctaggtctcaggctgcagcttatcctagctcagcaaattgcttcttagaatctttagcttgatttctgtcatttgagcccagggatctacccacttactgaaatctaaattttaaaaaatcagtgatgaaagtaattttcaggatttccctatttaaaagcatccatgaaacagttcctttatgccttctgtttaggatttccagaattaggaagggaaaccaggcttgtgccttggatccaaaagcagcaaaaatactacacttgccaaaagcaaactgaggaatgagcattggccagtcctagtatgcagtcaagaggtggacttttgttaagttagcccttaccatttagtgcttactgaatgccaacaatgcacttagaaaaataagggagacaagaatttacagaccataccctaaactggaaggtacaggaaagacacatctcctagagctgggaatgtgtccctaacatttcaagaagaagcagaaagtaggagagatcacgatctcagtctttttaggattccaacacaaaatggaagggagccctctgtggggtgatattacaaagggtttttcttgtctttctttaaaaaaaaaaaggcattccttactggcttgctaccagcaattgaactgtattctttatatagctagagctgtttgtgtcttcttaaaataaactttttctgttaaaatca

SEQ ID NO: 159287 - DNA, 12593 bp, Homo sapiens
  Payload ID: 11174
  Gene Symbol: NHSL2
  Gene Name: NHS-like 2
  ENST ID: ENST00000631375
  CDS Start-End: 29-2881
gccgcggtggctgccagtccagagcagaatgatgggcaactctcaccacaagcaaccgaggagtaaaagccaaagcaggatgcattcagcaacaggtcacagcaacagcccagcaggcagtgtggcccactctaccacctccgacatcaggcccagtcactcagttccagaaggggttcatggaagagttgcagttggtcaggatgctcggttcccaagtctcacctcgccagtactgagaactccttccagtgagccggacgaacctcaccaggcacggagtggcccaaaccctcctggcatggagagcatgggaatggtgtacagtgtccccagttcttgcaatggacctacagaatcaaccttctccacttcctggaagggagatgcttttacctacatgactccaagtgccaccagccagagcaatcaagtcaatgaaaatgggaaaaatccttcctgtgggaattcttgggtctctctaaacaaagtcccacctctggttcctaaggaggctgctaccctccttgtcgctcgtgataacccagcaggatgcagtgggtcagctggctaccctgagcgccttattcagcaaaggcacatgcccgaaagaccctccaagattggccttctgaccagtgggacctcgaggctggagacaggccccggtggggccagcagattccgggagcggtcactgtctgtgcccacagactcaggcaccacagatgtggactatgatgaggagcagaaggccaatgaggcctgtgccctgccttttgccagtacgagctctgagggcagtaacagtgctgacaacattgcctcccttagtgcccagcaagaggcccagcacagaaggcagaggtccaagagtatctcacttaggaaggccaaaaagaagccttccccacccacacgcagtgtctcactggtcaaagatgagccaggcctcttgcctgaaggtgggtcagcactacccaaggaccagaggcccaagagcctttgcctctccttggaacatcaaggacatcactcgtcccacccagatgctcagggtcacccagctattccaaaccacaaagatccagaaagtacacaattctcccaccactggtatcttactgactggaagtctggtgacacctaccaatccctgtccagctccagcactgccactggcaccacagtcattgagtgcacccaagttcagggcagctcagagtctcttgcctcaccttccacctccagagccactacaccttcccaactctccattgaagtggaggccagggagatatcatccccgggaaggccccctggactgatgtcaccctccagtggctactccagccagtcggaaacaccaacacccactgtttccatgtccctgaccctgggccacttaccccctccaagcagcagtgtccgggtacgtccagtggtacctgagaggaagtcatcactacccccgacgtcaccaatggagaaatttcccaagtcacggctatcatttgacctaccactgacctcttcacccaacctggatctgtctgggatgagtatctccatccgaagcaaaactaaggtgagtcggcaccactcagagacaaattttggcgtcaagctggcccagaaaactaatcccaaccagccaatcatgcctatggttactcagtccgacctacgttctgttcgcctgaggtcggtcagcaagtctgagccggaagatgatattgagagccctgagtatgccgaggaacccagagcagaagaagtcttcaccttgccagagagaaagacaaaacctcccgtagctgagaagcctccggtggcccggaggcctccaagcttggtccacaagccaccatctgttcctgaggagtatgcactaacttcaccaaccttggctatgccccccaggagctcaattcaacatgcgagaccactccctcaagacagctacacggtagtgcggaaaccaaagccctccagcttcccagatggcagaagcccaggggagtcaacagcaccctcatctcttgttttcacgccttttgccagttcctctgatgctttcttctcaggaacacagcagcctccccagggaagtgtagaggacgagggccccaaggtgagggttctgcctgaaagaattagcctccagagccaggaagaagctgagaaaaagaaaggcaagattccacctcccgtaccaaaaaaacccagcgtgctgtacctgcctctcacttctcccacagctcaaatggaggcctatgtggcagaaccaaggctgcctctcagccccatcatcaccctggaggaagacaccaagtgtcccgccaccggcgatgacctgcaatcacttggtcaaagggtgacttcaactcctcaggctgacagtgaaagggaggcaagccctctggggagttctgtggaaccaggcaccgaagaaaaaagtttaatcagtgataaaacagctgaatggattgcagaggatgatgatgacgtgtttgtggcttcacgcacaactgaagatttatttactgtgatacacaggtccaaaaggaagctgctcggctggaaggaacctggtgaggcctttgtgggtggcagaacgagttcccactcaccaataaagaacacagctgagtctccaatcagtgagtctaccgccactgcagggtcaggcagcagtgccaacctagatgctggcagaaatgacgatttcaaggccttgctacagaagaagggaagtaaggcaactccaaggtctcgtccctcagcagctgaacttctgaagaccactaacccactggctcggagaattattgcacaattttcaaaagactatgaaaccaccgataaccccagtacctaagccctgggctcaacaagcagggtttacttactaaacttgagtagagaagggggaagagaaagggtctttaaacagaaccatgggaacaacagagcctacatttcttttatattaactcacactctggacagcaggagagaggctacttcatctagagctaaaatcatctggcacttaatcatcttcagacatttttatgttttcatacttataagcttgtcatgactgactaccgagtttcttcttattttcccccagtggtgtgcactaactaagaagaaattttcagatgtcagggcacatgtgccactttttcaattcagtgacccggctgctccatccctggctcctgtcactgaggagtgcagtgtgagagcagattggaggctgccaaacttggggggcatagggtgccattgcttattattcactttcctagggaggctctgatggccctgtgtgcaaacacagaaagactctgatgcctcctcaaccacagtttagctttcccctgcgctcacaagaggtttgcagggtgcacttatttcggcatgaggttgattggatggcttttgtggtgcaaaatatgactgtgactctgtcctgaaacttaatgcctttttcagtttgattgtctacatggagatcagggtgataagtttcaataaacatatagacgcccccccacccacccccattagctagaaaagaccaggactgggttgctttaaatgaaccaagcttgaccaacaaacaagacagccatttgttcactcagatctagccgaggtaactcacaagtgcaccttgagatcctccatgtgtctgtcaacagcgataggcaggatctgcgcccagctcatgctgcattctaagaactctcatttcatttgcatataaaattcattacaggaagtaattaactgaaggaacagcatcatcaaaggctcaaggataatggaaagtaagtgcatcttgccccccaccagtcaattcagatcgtggtttgtggttggtttggttttgtttaaaggaagtccgactctgttccaaaaaccaagaacatataaactaaaaggatctatccaaaatctaaaaggcagtcttgccagttgctatggcccataatgcacacacacacacacacacacacacacacacacacacacacaaaagggctactttttgccatttaggttctgtgtttgaccagctttcaattaaccttgctgggggagagcataagaacctgggtaaatggcatactgaaagagcttcagaataatcattgcgacccctccctgcccccaccccccacgaagcttataggcactaactattcttgtcagctcaattttctaagcagagcaagagcagtgattcatttgatttttgtatgcctgatttctgggaggttggggaggaagacaaagcactgagcaaagaaaacctgctgaccaatgatggaaagttaattgtctactgtcttcaagaggcaaaaagaacagttgaatgaaattgtagcctgcttcacaaagagagttccccagccccttcctacttcacccctcacccaatagattcaatggtcaacctcctggaggatgcagtaaggttccagagacaagcagatctcaactttgataggtcgtattgcccaatgagaagccaccttttagctcaactgcccacactccagctggacagagcagctgaaaaaccacactaagtactgagaaaacttgggcctctcacaagagaagccctaggcctaggccctttgttgttatagttctgaatctgagacttctggaaacaggccaggcccaccaactcccttgcaaccagcacttcgacacttaaaataataaaacagctaggctcagttgcttttgaaagtactagaactacttggtgtgaagttcttaaccaaattccaaattccagggattttgcccaaaataaaatcaattcatccctggcctcagtttatatatgaatgccacatttgtctgctccagacttagaattccaaaaaacagacattttcctctgtagtaaatgaaggagcgtttgtgcttttgcttagcaaaaatgaaaggacaccagggtctccttgggaaccattatgactggttgaacgttaaagctgagtatgggactcacatagtataggccttgttacttctgtggacttttctggaagtttcttgtttactacttctaatgggttttgcctctcccctcaccttgctacctctggaggttttcccaaaagattctgaacctgaattctcagacaccttgatgtttgtcagttacctttagtcttgttttcctctacaatactctatatgcctggaatttttagaatatcttctacatcatcactgtggcccacgcagtggtgttcccattagcacaagaggatttggggcagaaatcatatggtcagagagaacatttaagaccggaagtattcatttaattttttaaattaattttttgtaaagatgggggttttgctatgttgcccacgctggtcttgaactcctgagctcaagcgatcctctcgccttggcctcccaaagtgctgggattaaaggagtaagccactgcacctggcctcatttaatattttgcaacaggtagacgtcccaaataaacaaccaaactgtaaaatttctactaatcactaattaacagaacacaaagcatcttccccactcctaacactcaacctctctcctacctttgattatcataactccactctctctcccacccaggcacttaccacaatgtttgctgccttctgcacctacgctgctgagactggagaagagaggctgaaagcccctctcagaaaggcttgcagagaacccaccactactacaattactagtataaataataatgataataatttttgaaggtggaatagagaagagatttgagtgaaatgaagttggccctaggagctcagcttccatttcaagtcgtccctatcctcttttttcctccccattccagttagtagcaacagatggctctgctagcctgactttgatctagtcaccatccccaggagcggaggttaattgttaaccaaggatgctttgcatttggtgggtagtcagtacatgtttttgagggtagttattcttggtacaatagcaagctttgctggtgtctcctctccttatcctgtactacttggcctgcctcagctcctgactgggcctcccccaccagccccaacttattcctcagccccaacttatccctcagccccaaatcccatgaactgcatccctagcacaacaactcacccataaaggaagtgagacaacaggaagcaaaataattaatgttagcttaatgaccacaaactgaccagttgatctggataaattaccttgaacgtgcaaagacagaggagatcctaccaggctctcctaacaagcactgcacctgacatccagtgtaactatctggacaacacagacccgattgcagtctctctgtacctgtcagtctgagcagatctgtccacgcacctgccctcttcctcatcaatgaacaagttgggaaaaagatgagttcatgctcagtgctctgttcctcactcgttccaccttccattatcaagtctgtgacacaatggtgagctttcgctttaatatgatttgctagggccaggactagggtgaggtgagcgaggcacctagggcgtaaaattcaaagaggtgcccgctctcagggccatgcaagtgccttaccctcgtcccagccctgtgatttgcactctttaaagtaatatcagtttatcttcttcctatgaacaagtatagtccttctgatttggggtcgggggttaactccctatctcttgttgcaccaaatattttattgctacctatttttccattgctataagtctttgtgtgcctatacattaaagaatctttaatagtgttaatatcggaaaacatagttgatttctaagtaatatgctccaggtggcaagttaacacccatttcagcagggatgctcccaaggccagcccttcaacaaaagagtgactgagttgacggtctgtcaccaggatcctccctctcctctttctgctccattctcctaaaccttgcttcccagcaccaactctcttcagtgcctcctacttccttctcctcctaagaaaaacctgctctcaggaaagggataaattcatttactttgagattataaggcttaatgctacctcttttgagggtcagttgcattttaacaagggaaaagccttaagccaatggaatgaagttctacttgcagaatgttaggcatcaactagttgtagaagtgtatttttcaccatggaaaggccaaattccctgacgcctaactccagaatatagaaaatatcttaatcgcctggaatcatttgagttactagctgatggtcaattaaattgtcctgatatccaatgctattcaatatggttactaccaagggactctcagaaatggctactaaaagccactgagaaggcctagatcattcatattgtacattgacatttttacataaatggaattaatactacttaccatttgagtaaagaacacaaggaattgaagagtctgtgaaaatatgtcctgtttgtgaaaggtgaaactgtccaatccatgtccaatcaatgtcagtcgtccagtattggtggtgattattaaacttattggaggtacaactttacctccaataagcttacctttacaagcttctgctttccctgcttcatctctgttatgggctatcagtccagcttggtgtgaaaatgagactatatctataccacagcccccaatcctttcaaaggctttgcatgtatttcagctacaagtgacaaggatattagggatttaaaaggataagagagtgggaaagatgtataaggaagtgcctttgtcaaaaggcagcaaaaagtataatgatataaacataatatgaaataagcaaattttagaatactttgaaacagatttatagaggaatacatagtaaatagttatagacacacatttggggcatttttaataaggttagcaagaagaaatttgcatgagtaatgagcaatgtgaaatgggcattatacttttgttcagtaaagcccaaaatctaggccaatggttctcaaagtgcagttccaggagcagcaacagcagcatccctggagagggagaaagagagagagagagagtgtatgtgtgtgtgtgtgtgtgtgtgtgtgtgtgtgtgtgtgtatgtgcattccagtgatgttactccttcaagcccctgaatcactatagccacgactctccaactgattccaacctttaccattattctggctctcatcataaggaccagtctctggccaagaggtgtatattgttatcttggtcaggcatatgtttgcttggttttaagaaattatcagattgaggagtctcatgttttatgggactccggtgcatatgctcgaaaaaaattaaaaagaacttatcatattggatcaacaaattgctcaacctgcaaaatctttgattagacttagccagcccatctggcctgctttgggtttaaaaaaaaaaaaaagattttttttaactcacaaatggaaaaaagggaaaggtgttaagtttgtttggtattgccagctcttaaatacctgtctttaccgtggtggctgttctccagtaaggctctggcagaagtatatttgattttaagatttttgcctaaatagtagaatttgatagcaacgaactccaaaacaaaatctgaactggaacaactagttaacccctctcagcctctttgtaatgccaagctttatagacatttattccttaggtggtcttgagctttttctaacatccaattttataaaatgttgtgcatgcaaacgcagcattgtgctcattgtacaagtcacctcaaactcattccttcccccatgtgtatcatggcgaagaaatatcaatatatgtatgtgctgaggtcttctgatgaattgtaaattacaaaccttttcattcatttttaaatgagatatatttaccctggctagtggttaaagttttattctttttattatatttcactgctacttttttctactgactccaaagcttactttgggctatatttcttatttctagattgttgtatttatcttatttctatatttatctgcagtcttggaatgttagagctgaaagggaccaacctctctcatttcacacatgaggaagctgaggcccagaaaggtcaaataacttatatacaaggtcacacagtgagtcagtggtggggcccagcctcaattccaggtctcctgcccttgggcccaatctggtttcatttaaagcactacaatttatagaagacccacagctggcttctacttttatgacacatgaatttcccaggtatttcaatgaactaatatatatgctttaagggaaaatgttcaagagttctttaattcattaatccaaagacaaattggattttcagtttataaacattagtttccctccaaattcaatatgtgcaccctacttagtacaatggatgttttccctaaaagttgtgtgaaaaatgagttttttagatatcaagtatcattttttagaggtaaacttcctatgtaagggaaccttctggtgacttctttttgaaaaaccgagattcctcttgtcattgtcccataatgtctctactttttttagtgcaaacttttgtatttggtgtttatttaaaagtagggtacaacccaaccaatattagctttcccagagtctactttagccttcccttcttaatctttatgagaaattttcagactgttaaatgctcatgagatatttagttgtgttctagaaatttcacctggcttgatattctgtcaatccctgggctcaaattccagctccatcttatcaaacaataacagaattccctaatcagtactaagctccgcatgcagtctcttttccagaacattctttgcctaatgttccttagtgtggctctctctttagttggggcctccttccttagtacatgcataccttactattctgtggaattgcaagccatgcatcttttagagccacactagtcaaattgattggcatttccatttattttccattgttcccttgtttctcctggacttcctctcgtttctcttttcgaggatgcttagaggcttctcaccagagattggtgaggtttcccccatcatctagatgggagattgacaaattctgtaaaggttaagacagtaactattttaggctttgtgggctacatgtggtctctgtagcacattcttctttgttgttgctgtttgttcattcgtttgttttgcaacctttggataatgtaaaccactctctttttttttgacagagtctctctctgtagccaggctggagggcaattgtacaatctcggctcattacaacctccacctcccgggttcaggcaattctcctgcctcagcttcccgagtagctgggactataggtgcgtgccaccatgcccagctaatattttttttttttttgtatttttagtagaggcagagtttcaccatgttggccaggatgttctcgatctcctgaccttgtgatccgcccacctcggcctcccaaagtgctgggattacaggtgtgagctaccgcaccctgccaatataaactattcttagctcatgggctatgcaaagccttaggctgacccctgatccagactgtcttctgagacaagcatttctgtgagctgccccatgtgataactgagttgtgcagtagctgatgtggtttattgccttcccatctactgcattgtcagaccagactgactgcacaggagcaggtggaggggggctgcatatgccaaccattactcttcaatagagtgtccttcatgagctctctctctctctcattactgactacctcagtgtagaaaccctcatttttttccccagacctatccttgttacccaatgtgcctctgcttccctgggtttgggataaactggaaggagagaatttctgagttctcttacttattttgttccataacttctccctcatatctgtggttggagactcccacccttgtccaccctttcctgcctcatactagtatcatgagtttagggctgtcgttggaaagtctggcagcccaggccataggattccagttcagcctacgatttcctagggaaatcaccaggttccaaaggctggtttttaaacctagaatatccatgtatccatttcctaatgcagtttggacctgttctagacagagcactcagccttagcaagaaaaccaatgaggtgcagaagatattctgtgcccacagtttttccctgccttctggaccctcagcccctgggatgggctccttgggattgcccatgcaacaacacagccacaagacattcagcacaccacctcctcctgtgttttgaatctctaaatgaattctgttctaaagcttcttcacgtctctctccatcctgctcccatctccacctctaatgcttcttgggagtctgaagctcagattcacattttcacattttctcgtataaacgttgtgggataagaatggatgatatgtatgtgtctgtgtgagtttggtttctcaacctggactgtgagggctaattcacaaatcacaccatacatgcgtgtgtgcatgcgcgcgcgcacacacacacacacacacacacacacacacacagtccagcaccctcatcagttctctggtttaggtccagatctgatgggactggtcaagaaggggatggtgggggctcctgaagcatttgccctttcttgcctcttgagaccttctttccattggcaattcaaaacaggctgacatacagagggctagcactctaatttgatgtggactcagccactcagacctaggtctcaggctgcagcttatcctagctcagcaaattgcttcttagaatctttagcttgatttctgtcatttgagcccagggatctacccacttactgaaatctaaattttaaaaaatcagtgatgaaagtaattttcaggatttccctatttaaaagcatccatgaaacagttcctttatgccttctgtttaggatttccagaattaggaagggaaaccaggcttgtgccttggatccaaaagcagcaaaaatactacacttgccaaaagcaaactgaggaatgagcattggccagtcctagtatgcagtcaagaggtggacttttgttaagttagcccttaccatttagtgcttactgaatgccaacaatgcacttagaaaaataagggagacaagaatttacagaccataccctaaactggaaggtacaggaaagacacatctcctagagctgggaatgtgtccctaacatttcaagaagaagcagaaagtaggagagatcacgatctcagtctttttaggattccaacacaaaatggaagggagccctctgtggggtgatattacaaagggtttttcttgtctttctttaaaaaaaaaaaggcattccttactggcttgctaccagcaattgaactgtattctttatatagctagagctgtttgtgtcttcttaaaataaactttttctgttaaaatca

SEQ ID NO: 159288 - DNA, 4666 bp, Homo sapiens
  Payload ID: 11175
  Gene Symbol: NBN
  Gene Name: nibrin
  Uniprot ID: O60934
  ENST ID: ENST00000265433
  CDS Start-End: 156-2420
aagtcgcactcccgcctcatccaaggcagcctgcgtggctcccgggagcgcgcacgtcccggagcccatgccgaccgcaggcgccgtatccgcgctcgtctagcagccccggttacgcggttgcacgtcggccccagccctgaggagccggaccgatgtggaaactgctgcccgccgcgggcccggcaggaggagaaccatacagacttttgactggcgttgagtacgttgttggaaggaaaaactgtgccattctgattgaaaatgatcagtcgatcagccgaaatcatgctgtgttaactgctaacttttctgtaaccaacctgagtcaaacagatgaaatccctgtattgacattaaaagataattctaagtatggtacctttgttaatgaggaaaaaatgcagaatggcttttcccgaactttgaagtcgggggatggtattacttttggagtgtttggaagtaaattcagaatagagtatgagcctttggttgcatgctcttcttgtttagatgtctctgggaaaactgctttaaatcaagctatattgcaacttggaggatttactgtaaacaattggacagaagaatgcactcaccttgtcatggtatcagtgaaagttaccattaaaacaatatgtgcactcatttgtggacgtccaattgtaaagccagaatattttactgaattcctgaaagcagttgagtccaagaagcagcctccacaaattgaaagtttttacccacctcttgatgaaccatctattggaagtaaaaatgttgatctgtcaggacggcaggaaagaaaacaaatcttcaaagggaaaacatttatatttttgaatgccaaacagcataagaaattgagttccgcagttgtctttggaggtggggaagctaggttgataacagaagagaatgaagaagaacataatttctttttggctccgggaacgtgtgttgttgatacaggaataacaaactcacagaccttaattcctgactgtcagaagaaatggattcagtcaataatggatatgctccaaaggcaaggtcttagacctattcctgaagcagaaattggattggcggtgattttcatgactacaaagaattactgtgatcctcagggccatcccagtacaggattaaagacaacaactccaggaccaagcctttcacaaggcgtgtcagttgatgaaaaactaatgccaagcgccccagtgaacactacaacatacgtagctgacacagaatcagagcaagcagatacatgggatttgagtgaaaggccaaaagaaatcaaagtctccaaaatggaacaaaaattcagaatgctttcacaagatgcacccactgtaaaggagtcctgcaaaacaagctctaataataatagtatggtatcaaatactttggctaagatgagaatcccaaactatcagctttcaccaactaaattgccaagtataaataaaagtaaagatagggcttctcagcagcagcagaccaactccatcagaaactactttcagccgtctaccaaaaaaagggaaagggatgaagaaaatcaagaaatgtcttcatgcaaatcagcaagaatagaaacgtcttgttctcttttagaacaaacacaacctgctacaccctcattgtggaaaaataaggagcagcatctatctgagaatgagcctgtggacacaaactcagacaataacttatttacagatacagatttaaaatctattgtgaaaaattctgccagtaaatctcatgctgcagaaaagctaagatcaaataaaaaaagggaaatggatgatgtggccatagaagatgaagtattggaacagttattcaaggacacaaaaccagagttagaaattgatgtgaaagttcaaaaacaggaggaagatgtcaatgttagaaaaaggccaaggatggatatagaaacaaatgacactttcagtgatgaagcagtaccagaaagtagcaaaatatctcaagaaaatgaaattgggaagaaacgtgaactcaaggaagactcactatggtcagctaaagaaatatctaacaatgacaaacttcaggatgatagtgagatgcttccaaaaaagctgttattgactgaatttagatcactggtgattaaaaactctacttccagaaatccatctggcataaatgatgattatggtcaactaaaaaatttcaagaaattcaaaaaggtcacatatcctggagcaggaaaacttccacacatcattggaggatcagatctaatagctcatcatgctcgaaagaatacagaactagaagagtggctaaggcaggaaatggaggtacaaaatcaacatgcaaaagaagagtctcttgctgatgatctttttagatacaatccttatttaaaaaggagaagataactgaggattttaaaaagaagccatggaaaaacttcctagtaagcatctacttcaggccaacaaggttatatgaatatatagtgtatagaagcgatttaagttacaatgttttatggcctaaatttattaaataaaatgcacaaaactttgattcttttgtatgtaacaattgtttgttctgttttcaggctttgtcattgcatctttttttcatttttaaatgtgttttgtttattaaatagttaatatagtcacagttcaaaattctaaatgtacgtaaggtaaagactaaagtcacccttccaccattgtcctagctacttggttcccctcagaaaaaaattcatgatactcatttcttatgaatctttccagggatttttgagtcctattcaaattcctatttttaaataatttcctacacaaatgatagcataacatatgcagtgttctacaccttgcttttttacttagtagattaaaaattataggaatatcaatataatgtttttaatattttttcttttccattatgctgtagtcttacctaaactctggtgatccaaacaaaatggcttcagtggtgcagatgtcacctacatgttattctagtactagaaactgaagaccatgtggagacttcatcaaacatgggtttagttttcaccagaatggaaagacctgtacccctttttggtggtcttactgagctgggtgggtgtctgttttgagcttatttagagtcctagttttcctacttataaagtagaaatggtgagattgttttctttttctaccttaaagggagatggtaagaaacaatgaatgtcttttttcaaactttattgacaagtgattttcaagtctgtgttcaaaaatatattcatgtacctgtgatccagcaagaagggagttccagtcaagagtcactacaactgattagttgtttagagaatgagaaatggaacagtgaggaatggaggccatatttccatgacttcccttgtaaacagaagcaacagaagggacaagaggctggcctctacatcactctcaccttccaaatcttgtggaagtgcatctacttgccagaaccaaattaacttacttccaagttctggctgcttgcaggtggaactccagctgcaagggagttagggaaatgaaggtctttttttaaaagcttctcagccttcctagggaacagaaattgggtgagccaatctgcaatttctactacaggcattgagaccagttagattattgaaatattatagagagttatgaacacttaaattatgatagtggtatgacattggatagaacatgggatactttagaagtagaattgacagggcatattagttgatgaaatggagtcatttgagtctcttaatagccatgtatcataattaccaagtgaagctggtggaacatatggtctccattttacagttaaggaatataatggacagattaatattgttctctgtcatgcccacaatccctttctaaggaagactgccctactatagcagtttttatatttgtcaatttatgaatataatgaatgagagttctggtacctcctgtctttacaaatattggtgttgtcagtatttttcctttttaaccattccaatcggtgtgtagtgatgtttcattttggttttaatttgtatatccctgatagctataattgggtcatagaaattctttatacattctagatgcaagtctcttgtcggatatatgtattgagatattacacctagtctgtggcttgactgttttctttatgtcttttgatgaatagaagttttaaattttgacaaggtcaaatttatttttttcttttgtttgatattttttctctccaatttaaccccaagatttcagatattctgctctattatataaactttatatttttatatttgtgatctaccttgaattgatatgtatgttgtgaattatggatcagggttctttttttcccccatacaagtatccagtcattgtaacactgtttattgaaagaattatcctttcctcattaaattaccttgccaattagtaaaaaatcaattaaccataatggtggatctgtttctggactttctgtttggttacactgaaatgtttgtccatccttgcactcactcataccatactgccttgaattactgtagctgcatagatgctccttaagttgggattacattgtaataaacgcaatgtaagtt

SEQ ID NO: 159289 - DNA, 4907 bp, Homo sapiens
  Payload ID: 11175
  Gene Symbol: NBN
  Gene Name: nibrin
  ENST ID: ENST00000396252
  CDS Start-End: 347-523
aaaaacatgatgttccctggaacaacctcccacatcacagatgtaaagacttttcttctcccaggaattcaaacttgaggctacatgtgctaggaaggggacaaaccacactaacagattccaaaggaatacctgcaatttaagaaactgcaaacgcacgaaactacataactggtggcgggcaagcgcccaagtcgcactcccgcctcatccaaggcagcctgcgtggctcccgggagcgcgcacgtcccggagcccatgccgaccgcaggcgccgtatccgcgctcgtctagcagccccggttacgcggttgcacgtcggccccagccctgaggagccggaccgatgtggaaactgctgcccgccgcgggcccggcaggaggagaaccatacagacttttgactggcgttgagtacgttgttggaaggaaaaactgtgccattctgattgaaaatgatcagtcgatcagccgaaatcatgctgtgttaactgctaacttttctgtaaccaacctggtatagaaaaacattttggaaatttctacagaaaaagtaaaattgttactagtcaaacagatgaaatccctgtattgacattaaaagataattctaagtatggtacctttgttaatgaggaaaaaatgcagaatggcttttcccgaactttgaagtcgggggatggtattacttttggagtgtttggaagtaaattcagaatagagtatgagcctttggttgcatgctcttcttgtttagatgtctctgggaaaactgctttaaatcaagctatattgcaacttggaggatttactgtaaacaattggacagaagaatgcactcaccttgtcatggtatcagtgaaagttaccattaaaacaatatgtgcactcatttgtggacgtccaattgtaaagccagaatattttactgaattcctgaaagcagttgagtccaagaagcagcctccacaaattgaaagtttttacccacctcttgatgaaccatctattggaagtaaaaatgttgatctgtcaggacggcaggaaagaaaacaaatcttcaaagggaaaacatttatatttttgaatgccaaacagcataagaaattgagttccgcagttgtctttggaggtggggaagctaggttgataacagaagagaatgaagaagaacataatttctttttggctccgggaacgtgtgttgttgatacaggaataacaaactcacagaccttaattcctgactgtcagaagaaatggattcagtcaataatggatatgctccaaaggcaaggtcttagacctattcctgaagcagaaattggattggcggtgattttcatgactacaaagaattactgtgatcctcagggccatcccagtacaggattaaagacaacaactccaggaccaagcctttcacaaggcgtgtcagttgatgaaaaactaatgccaagcgccccagtgaacactacaacatacgtagctgacacagaatcagagcaagcagatacatgggatttgagtgaaaggccaaaagaaatcaaagtctccaaaatggaacaaaaattcagaatgctttcacaagatgcacccactgtaaaggagtcctgcaaaacaagctctaataataatagtatggtatcaaatactttggctaagatgagaatcccaaactatcagctttcaccaactaaattgccaagtataaataaaagtaaagatagggcttctcagcagcagcagaccaactccatcagaaactactttcagccgtctaccaaaaaaagggaaagggatgaagaaaatcaagaaatgtcttcatgcaaatcagcaagaatagaaacgtcttgttctcttttagaacaaacacaacctgctacaccctcattgtggaaaaataaggagcagcatctatctgagaatgagcctgtggacacaaactcagacaataacttatttacagatacagatttaaaatctattgtgaaaaattctgccagtaaatctcatgctgcagaaaagctaagatcaaataaaaaaagggaaatggatgatgtggccatagaagatgaagtattggaacagttattcaaggacacaaaaccagagttagaaattgatgtgaaagttcaaaaacaggaggaagatgtcaatgttagaaaaaggccaaggatggatatagaaacaaatgacactttcagtgatgaagcagtaccagaaagtagcaaaatatctcaagaaaatgaaattgggaagaaacgtgaactcaaggaagactcactatggtcagctaaagaaatatctaacaatgacaaacttcaggatgatagtgagatgcttccaaaaaagctgttattgactgaatttagatcactggtgattaaaaactctacttccagaaatccatctggcataaatgatgattatggtcaactaaaaaatttcaagaaattcaaaaaggtcacatatcctggagcaggaaaacttccacacatcattggaggatcagatctaatagctcatcatgctcgaaagaatacagaactagaagagtggctaaggcaggaaatggaggtacaaaatcaacatgcaaaagaagagtctcttgctgatgatctttttagatacaatccttatttaaaaaggagaagataactgaggattttaaaaagaagccatggaaaaacttcctagtaagcatctacttcaggccaacaaggttatatgaatatatagtgtatagaagcgatttaagttacaatgttttatggcctaaatttattaaataaaatgcacaaaactttgattcttttgtatgtaacaattgtttgttctgttttcaggctttgtcattgcatctttttttcatttttaaatgtgttttgtttattaaatagttaatatagtcacagttcaaaattctaaatgtacgtaaggtaaagactaaagtcacccttccaccattgtcctagctacttggttcccctcagaaaaaaattcatgatactcatttcttatgaatctttccagggatttttgagtcctattcaaattcctatttttaaataatttcctacacaaatgatagcataacatatgcagtgttctacaccttgcttttttacttagtagattaaaaattataggaatatcaatataatgtttttaatattttttcttttccattatgctgtagtcttacctaaactctggtgatccaaacaaaatggcttcagtggtgcagatgtcacctacatgttattctagtactagaaactgaagaccatgtggagacttcatcaaacatgggtttagttttcaccagaatggaaagacctgtacccctttttggtggtcttactgagctgggtgggtgtctgttttgagcttatttagagtcctagttttcctacttataaagtagaaatggtgagattgttttctttttctaccttaaagggagatggtaagaaacaatgaatgtcttttttcaaactttattgacaagtgattttcaagtctgtgttcaaaaatatattcatgtacctgtgatccagcaagaagggagttccagtcaagagtcactacaactgattagttgtttagagaatgagaaatggaacagtgaggaatggaggccatatttccatgacttcccttgtaaacagaagcaacagaagggacaagaggctggcctctacatcactctcaccttccaaatcttgtggaagtgcatctacttgccagaaccaaattaacttacttccaagttctggctgcttgcaggtggaactccagctgcaagggagttagggaaatgaaggtctttttttaaaagcttctcagccttcctagggaacagaaattgggtgagccaatctgcaatttctactacaggcattgagaccagttagattattgaaatattatagagagttatgaacacttaaattatgatagtggtatgacattggatagaacatgggatactttagaagtagaattgacagggcatattagttgatgaaatggagtcatttgagtctcttaatagccatgtatcataattaccaagtgaagctggtggaacatatggtctccattttacagttaaggaatataatggacagattaatattgttctctgtcatgcccacaatccctttctaaggaagactgccctactatagcagtttttatatttgtcaatttatgaatataatgaatgagagttctggtacctcctgtctttacaaatattggtgttgtcagtatttttcctttttaaccattccaatcggtgtgtagtgatgtttcattttggttttaatttgtatatccctgatagctataattgggtcatagaaattctttatacattctagatgcaagtctcttgtcggatatatgtattgagatattacacctagtctgtggcttgactgttttctttatgtcttttgatgaatagaagttttaaattttgacaaggtcaaatttatttttttcttttgtttgatattttttctctccaatttaaccccaagatttcagatattctgctctattatataaactttatatttttatatttgtgatctaccttgaattgatatgtatgttgtgaattatggatcagggttctttttttcccccatacaagtatccagtcattgtaacactgtttattgaaagaattatcctttcctcattaaattaccttgccaattagtaaaaaatcaattaaccataatggtggatctgtttctggactttctgtttggttacactgaaatgtttgtccatccttgcactcactcataccatactgccttgaattactgtagctgcatagatgctccttaagttgggattacattgtaataaacgcaatgtaagtt

SEQ ID NO: 159290 - DNA, 4523 bp, Homo sapiens
  Payload ID: 11175
  Gene Symbol: NBN
  Gene Name: nibrin
  ENST ID: ENST00000409330
  CDS Start-End: 407-2425
cagaagcggcgagtacgctgtatggcaagcgcatattcttcccgggcagcacggcggctgtgagctggaattcagcgcgggcggtggggtgattgcggcgccccctggtggcagtcctccgcgcccctcccctgactccccctccctcccagcctcacccccgcgccgttgcagcgctagggctggatggcctgcgggagaaccatacagacttttgactggcgttgagtacgttgttggaaggaaaaactgtgccattctgattgaaaatgatcagtcgatcagccgaaatcatgctgtgttaactgctaacttttctgtaaccaacctgagtcaaacagatgaaatccctgtattgacattaaaagataattctaagtatggtacctttgttaatgaggaaaaaatgcagaatggcttttcccgaactttgaagtcgggggatggtattacttttggagtgtttggaagtaaattcagaatagagtatgagcctttggttgcatgctcttcttgtttagatgtctctgggaaaactgctttaaatcaagctatattgcaacttggaggatttactgtaaacaattggacagaagaatgcactcaccttgtcatggtatcagtgaaagttaccattaaaacaatatgtgcactcatttgtggacgtccaattgtaaagccagaatattttactgaattcctgaaagcagttgagtccaagaagcagcctccacaaattgaaagtttttacccacctcttgatgaaccatctattggaagtaaaaatgttgatctgtcaggacggcaggaaagaaaacaaatcttcaaagggaaaacatttatatttttgaatgccaaacagcataagaaattgagttccgcagttgtctttggaggtggggaagctaggttgataacagaagagaatgaagaagaacataatttctttttggctccgggaacgtgtgttgttgatacaggaataacaaactcacagaccttaattcctgactgtcagaagaaatggattcagtcaataatggatatgctccaaaggcaaggtcttagacctattcctgaagcagaaattggattggcggtgattttcatgactacaaagaattactgtgatcctcagggccatcccagtacaggattaaagacaacaactccaggaccaagcctttcacaaggcgtgtcagttgatgaaaaactaatgccaagcgccccagtgaacactacaacatacgtagctgacacagaatcagagcaagcagatacatgggatttgagtgaaaggccaaaagaaatcaaagtctccaaaatggaacaaaaattcagaatgctttcacaagatgcacccactgtaaaggagtcctgcaaaacaagctctaataataatagtatggtatcaaatactttggctaagatgagaatcccaaactatcagctttcaccaactaaattgccaagtataaataaaagtaaagatagggcttctcagcagcagcagaccaactccatcagaaactactttcagccgtctaccaaaaaaagggaaagggatgaagaaaatcaagaaatgtcttcatgcaaatcagcaagaatagaaacgtcttgttctcttttagaacaaacacaacctgctacaccctcattgtggaaaaataaggagcagcatctatctgagaatgagcctgtggacacaaactcagacaataacttatttacagatacagatttaaaatctattgtgaaaaattctgccagtaaatctcatgctgcagaaaagctaagatcaaataaaaaaagggaaatggatgatgtggccatagaagatgaagtattggaacagttattcaaggacacaaaaccagagttagaaattgatgtgaaagttcaaaaacaggaggaagatgtcaatgttagaaaaaggccaaggatggatatagaaacaaatgacactttcagtgatgaagcagtaccagaaagtagcaaaatatctcaagaaaatgaaattgggaagaaacgtgaactcaaggaagactcactatggtcagctaaagaaatatctaacaatgacaaacttcaggatgatagtgagatgcttccaaaaaagctgttattgactgaatttagatcactggtgattaaaaactctacttccagaaatccatctggcataaatgatgattatggtcaactaaaaaatttcaagaaattcaaaaaggtcacatatcctggagcaggaaaacttccacacatcattggaggatcagatctaatagctcatcatgctcgaaagaatacagaactagaagagtggctaaggcaggaaatggaggtacaaaatcaacatgcaaaagaagagtctcttgctgatgatctttttagatacaatccttatttaaaaaggagaagataactgaggattttaaaaagaagccatggaaaaacttcctagtaagcatctacttcaggccaacaaggttatatgaatatatagtgtatagaagcgatttaagttacaatgttttatggcctaaatttattaaataaaatgcacaaaactttgattcttttgtatgtaacaattgtttgttctgttttcaggctttgtcattgcatctttttttcatttttaaatgtgttttgtttattaaatagttaatatagtcacagttcaaaattctaaatgtacgtaaggtaaagactaaagtcacccttccaccattgtcctagctacttggttcccctcagaaaaaaattcatgatactcatttcttatgaatctttccagggatttttgagtcctattcaaattcctatttttaaataatttcctacacaaatgatagcataacatatgcagtgttctacaccttgcttttttacttagtagattaaaaattataggaatatcaatataatgtttttaatattttttcttttccattatgctgtagtcttacctaaactctggtgatccaaacaaaatggcttcagtggtgcagatgtcacctacatgttattctagtactagaaactgaagaccatgtggagacttcatcaaacatgggtttagttttcaccagaatggaaagacctgtacccctttttggtggtcttactgagctgggtgggtgtctgttttgagcttatttagagtcctagttttcctacttataaagtagaaatggtgagattgttttctttttctaccttaaagggagatggtaagaaacaatgaatgtcttttttcaaactttattgacaagtgattttcaagtctgtgttcaaaaatatattcatgtacctgtgatccagcaagaagggagttccagtcaagagtcactacaactgattagttgtttagagaatgagaaatggaacagtgaggaatggaggccatatttccatgacttcccttgtaaacagaagcaacagaagggacaagaggctggcctctacatcactctcaccttccaaatcttgtggaagtgcatctacttgccagaaccaaattaacttacttccaagttctggctgcttgcaggtggaactccagctgcaagggagttagggaaatgaaggtctttttttaaaagcttctcagccttcctagggaacagaaattgggtgagccaatctgcaatttctactacaggcattgagaccagttagattattgaaatattatagagagttatgaacacttaaattatgatagtggtatgacattggatagaacatgggatactttagaagtagaattgacagggcatattagttgatgaaatggagtcatttgagtctcttaatagccatgtatcataattaccaagtgaagctggtggaacatatggtctccattttacagttaaggaatataatggacagattaatattgttctctgtcatgcccacaatccctttctaaggaagactgccctactatagcagtttttatatttgtcaatttatgaatataatgaatgagagttctggtacctcctgtctttacaaatattggtgttgtcagtatttttcctttttaaccattccaatcggtgtgtagtgatgtttcattttggttttaatttgtatatccctgatagctataattgggtcatagaaattctttatacattctagatgcaagtctcttgtcggatatatgtattgagatattacacctagtctgtggcttgactgttttctttatgtcttttgatgaatagaagttttaaattttgacaaggtcaaatttatttttttcttttgtttgatattttttctctccaatttaaccccaagatttcagatattctgctctattatataaactttatatttttatatttgtgatctaccttgaattgatatgtatgttgtgaattatggatcagggttctttttttcccccatacaagtatccagtcattgtaacactgtttattgaaagaattatcctttcctcattaaattaccttgccaattagtaaaaaatcaattaaccataa

SEQ ID NO: 159291 - DNA, 593 bp, Homo sapiens
  Payload ID: 11175
  Gene Symbol: NBN
  Gene Name: nibrin
  ENST ID: ENST00000523444
  CDS Start-End: 59-235
gtctagcagccccggttacgcggttgcacgtcggccccagccctgaggagccggaccgatgtggaaactgctgcccgccgcgggcccggcaggaggagaaccatacagacttttgactggcgttgagtacgttgttggaaggaaaaactgtgccattctgattgaaaatgatcagtcgatcagccgaaatcatgctgtgttaactgctaacttttctgtaaccaacctggtatagaaaaacattttggaaatttctacagaaaaagtaaaattgttactagtcaaacagatgaaatccctgtattgacattaaaagataattctaagtatggtacctttgttaatgaggaaaaaatgcagaatggcttttcccgaactttgaagtcgggggatggtattacttttggagtgtttggaagtaaattcagatgtctctgggaaaactgctttaaatcaagctatattgcaacttggaggatttactgtaaacaattggacagaagaatgcactcaccttgtcatggtatcagtgaaagttaccattaaaacaatatgtgcactcatttgtggacgtccaattgtaaagccagaat

SEQ ID NO: 159292 - DNA, 701 bp, Homo sapiens
  Payload ID: 11175
  Gene Symbol: NBN
  Gene Name: nibrin
  ENST ID: ENST00000517772
  CDS Start-End: 208-701
gaagcagtaattgttgtctgccgtgttgggaggttagccacctgcctattgtcttttcttttgaaaactttttctctgagaagtgaatgtactgagtggtaaaagactttaaattatttgctaacttttcagagtcaaacagatgaaatccctgtattgacattaaaagataattctaagtatggtacctttgttaatgaggaaaaaatgcagaatggcttttcccgaactttgaagtcgggggatggtattacttttggagtgtttggaagtaaattcagaatagagtatgagcctttggttgcatgctcttcttgtttagatgtctctgggaaaactgctttaaatcaagctatattgcaacttggaggatttactgtaaacaattggacagaagaatgcactcaccttgtcatggtatcagtgaaagttaccattaaaacaatatgtgcactcatttgtggacgtccaattgtaaagccagaatattttactgaattcctgaaagcagttgagtccaagaagcagcctccacaaattgaaagtttttacccacctcttgatgaaccatctattggaagtaaaaatgttgatctgtcaggacggcaggaaagaaaacaaatcttcaaagggaaaacatttatatttttgaatgccaaacagcataagaaattgagttccgcagttgtctttggaggtgg

SEQ ID NO: 159293 - DNA, 565 bp, Homo sapiens
  Payload ID: 11175
  Gene Symbol: NBN
  Gene Name: nibrin
  ENST ID: ENST00000517337
  CDS Start-End: 290-565
gttgcagcgctagggctggatggcctgcgggagaaccatacagacttttgactggcgttgagtacgttgttggaaggaaaaactgtgccattctgattgaaaatgatcagtcgatcagccgaaatcatgctgtgttaactgctaacttttctgtaaccaacctggtatagaaaaacattttggaaatttctacagaaaaagtaaaattgttactagtcaaacagatgaaatccctgtattgacattaaaagataattctaagtatggtacctttgttaatgaggaaaaaatgcagaatggcttttcccgaactttgaagtcgggggatggtattacttttggagtgtttggaagtaaattcagaatagagtatgagcctttggttgcatgctcttcttgtttagatgtctctgggaaaactgctttaaatcaagctatattgcaacttggaggatttactgtaaacaattggacagaagaatgcactcaccttgtcatggtatcagtgaaagttaccattaaaacaatatgtgcactcatttgtggacgtccaattgtaaagcca

SEQ ID NO: 159294 - DNA, 535 bp, Homo sapiens
  Payload ID: 11175
  Gene Symbol: NBN
  Gene Name: nibrin
  ENST ID: ENST00000519426
  CDS Start-End: 59-535
gtctagcagccccggttacgcggttgcacgtcggccccagccctgaggagccggaccgatgtggaaactgctgcccgccgcgggcccggcaggaggagaaccatacagacttttgactggcgttgagtacgttgttggaaggaaaaactgtgccattctgattgaaaatgatcagtcgatcagccgaaatcatgctgtgttaactgctaacttttctgtaaccaacctgagtcaaacagatgaaatccctgtattgacattaaaagataattctaagtatggtacctttgttaatgaggaaaaaatgcagaatggcttttcccgaactttgaagtcgggggatggtattacttttggagtgtttggaagtaaattcagtttttacccacctcttgatgaaccatctattggaagtaaaaatgttgatctgtcaggacggcaggaaagaaaacaaatcttcaaagggaaaacatttatatttttgaatgccaaacagcataagaaattgagttccgcagttgtctttggaggtggg

SEQ ID NO: 159295 - DNA, 786 bp, Homo sapiens
  Payload ID: 11175
  Gene Symbol: NBN
  Gene Name: nibrin
  ENST ID: ENST00000613033
  CDS Start-End: 1-375
aaagttcaaaaacaggaggaagatgtcaatgttagaaaaaggccaaggatggatatagaaacaaatgacactttcagtgatgaagcagtaccagaaagtagcaaaatatctcaagaaaatgaaattgggaagaaacgtgaactcaaggaagactcactatggtcagctaaagaaatatctgtcacatatcctggagcaggaaaacttccacacatcattggaggatcagatctaatagctcatcatgctcgaaagaatacagaactagaagagtggctaaggcaggaaatggaggtacaaaatcaacatgcaaaagaagagtctcttgctgatgatctttttagatacaatccttatttaaaaaggagaagataactgaggattttaaaaagaagccatggaaaaacttcctagtaagcatctacttcaggccaacaaggttatatgaatatatagtgtatagaagcgatttaagttacaatgttttatggcctaaatttattaaataaaatgcacaaaactttgattcttttgtatgtaacaattgtttgttctgttttcaggctttgtcattgcatctttttttcatttttaaatgtgttttgtttattaaatagttaatatagtcacagttcaaaattctaaatgtacgtaaggtaaagactaaagtcacccttccaccattgtcctagctacttggttcccctcagaaaaaaattcatgatactcatttcttatgaatctttccagggatttttgagtcctattcaaattcctatttttaaa

SEQ ID NO: 159296 - DNA, 4005 bp, Homo sapiens
  Payload ID: 11176
  Gene Symbol: NCLN
  Gene Name: nicalin
  Uniprot ID: Q969V3
  ENST ID: ENST00000246117
  CDS Start-End: 432-2123
caaggtcacgtcctgtccccacctttcgcccctcaccctagctcccccaacgccaaagacaaggttaagaaagtgatatcgcgaaatagttttttaaagcattttattgcattttatgacttggagtttatgtgaaacctcaacggtattagccgaacagcctgccgcaccttccgggagttccagagtgggcctacaactcccacagggctccgcgagcgccggacggacggactacaattcccgacaggcagcgcggctggcggggcggttcgccgcggtgcccacaggacctcagggcgagtgcgggctgccccgcgcggcgcccgcaggaccccggcggctacccatgccgaggtgagtccgcgggagccgccgccgccgccgtcccgtcccagctgccgccccgcgcggccccgccgccggccaggatgctggaggaagcgggcgaggtgctggagaacatgctgaaggcgtcttgtctgccgctcggcttcatcgtcttcctgcccgctgtgctgctgctggtggcgccgccgctgcctgccgccgacgccgcgcacgagttcaccgtgtaccgcatgcagcagtacgacctgcagggccagccctacggcacacggaatgcagtgctgaacacggaggcgcgcacgatggcggcggaggtgctgagccgccgctgcgtgctcatgcggctactggacttctcctacgagcagtaccagaaggccctgcggcagtcggcgggcgccgtggtcatcatcctgcccagggccatggccgccgtgccccaggacgtcgtccggcaattcatggagatcgagccggagatgctggccatggagaccgccgtccccgtgtactttgccgtggaggacgaggccctgctgtctatctacaagcagacccaggctgcctccgcctcccagggctccgcctctgctgctgaagtactgctgcgcacggccactgccaacggcttccagatggtcaccagcggggtacagagcaaggccgtgagtgactggctgattgccagcgtggaggggcggctgacggggctgggcggagaggaccttcccaccatcgtcatcgtggcccactacgacgcctttggagtggccccctggctgtcgctgggcgcggactccaacgggagcggcgtctctgtgctgctggagctggcacgcctcttctcccggctctacacctacaagcgcacgcacgccgcctacaacctcctgttctttgcgtctggaggaggcaagtttaactaccagggaaccaagcgctggctggaagacaacctggaccacacagactccagcctgcttcaggacaatgtggccttcgtgctgtgcctggacaccgtgggccggggcagcagcctgcacctgcacgtgtccaagccgcctcgggagggcaccctgcagcacgccttcctgcgggagctggagacggtggccgcgcaccagttccctgaggtacggttctccatggtgcacaagcggatcaacctggcggaggacgtgctggcctgggagcacgagcgcttcgccatccgccgactgcccgccttcacgctgtcccacctggagagccaccgtgacggccagcgcagcagcatcatggacgtgcggtcccgggtggattctaagaccctgacccgtaacacgaggatcattgcagaggccctgactcgagtcatctacaacctgacagagaaggggacacccccagacatgccggtgttcacagagcagatgcagatccagcaggagcagctggactcggtgatggactggctcaccaaccagccgcgggccgcgcagctggtggacaaggacagcaccttcctcagcacgctggagcaccacctgagccgctacctgaaggacgtgaagcagcaccacgtcaaggctgacaagcgggacccagagtttgtcttctacgaccagctgaagcaagtgatgaatgcgtacagagtcaagccggccgtctttgacctgctcctggctgttggcattgctgcctacctcggcatggcctacgtggctgtccagcacttcagcctcctctacaagaccgtccagaggctgctcgtgaaggccaagacacagtgacacagccacccccacagccggagcccccgccgctccacagtccctggggccgagcacgagtgagtggacactgccccgccgcgggcggccctgcagggacaggggccctctccctccccggcggtggttggaacactgaattacagagcttttttctgttgctctccgagactggggggggattgtttcttcttttccttgtctttgaacttccttggaggagagcttgggagacgtcccggggccaggctacggacttgcggacgagccccccagtcctgggagccggccgccctcggtctggtgtaagcacacatgcacgattaaagaggagacgccgggaccccctgcccgatcgcgcgcggcctccgcccaccgcctcctgccgcaaggggcctggactgcaggcctgacctgctccctgctccgtgtctgtcctaggacgtcccctcccgctccccgatggtggcgtggacatggttatttatctctgctccttcttgcctggaggagggcagtgccagccctggggttctgggattccagccctcctggagccttttgttccccatgtggtctcagtgacccgtccccctgacagtgggctcggggagctgcatcacccagccttccccttctccgactgcagggtctgatgtcatcattgacagcctttgcttcgtgggggcctggcagggcccctgcctccccgacccccgacccactgcaaatccccgttcccctgcactcctcttctcccagcccatccctccggcccctgtgcctctgcggccccagcccagctcccagggccgtcacctgcttggccctggcccagctccctgccctgagtcctgagccagtgcctggtgtttcctgggctcggtactgggcccccaggccatccaggctttgccacggccagttggtcctccctggggaactgggtgcgggtggagtactgggaggcaggaggtggcccggggaggccttgtggctcctcccctcgctcctcgccctgggcctcagcttcctcatcaatagaaaggatgtgttcggggtgggggcgtcaggtgagaacgtttgctgggaaggagaggacttggggcatggcctctggggccacccttcctggaactcagagaggaaggtccgggccctcgggaagccttggacagaaccctccaccccgcagaccaggcgtcgtgtgtgtgtgggagagaaggaggcccgtgttgagctcagggagaccccggtgtgtccgttctttagcaatataacctacccagtgcgtgccgagcaggcttggtggggaagggacttgagctgggcaagtcctggcctggcacccgcagccgtctcccttccgtggcccagggaggtgtttgctgtccgaaggacctgggccggcccatgggagcctggggttctgtccagataggaccagggggtctcactttggccaccagttcttcggccagcacctctgccctccagaacctgcagcctggaggggtgaggggacaaccacccctctttcctccaggttggcaggggaccctcttctcccgtctgccctgcgggttgcccgcctcctccagagacttgcccaagggcccatcaccactggcctctgggcacttgtgctgagactctgggacccaggcagctgccaccttgtcaccatgagagaatttggggagtgcttgcatgctagccagcaggctcctgtctgggtgccacggggccagcattttggagggagcttccttccttccttcctggacaggtcgtcatgatggatgcactgactgaccgtctggggctcaggctggtgtgggatgcagccggccgatgagaaaataaagccatattgaatgat

SEQ ID NO: 159297 - DNA, 2735 bp, Homo sapiens
  Payload ID: 11176
  Gene Symbol: NCLN
  Gene Name: nicalin
  ENST ID: ENST00000592737
  CDS Start-End: 1-848
actaccagggaaccaagcgctggctggaagacaacctggaccacacagactccagcctgcttcaggacaatgtggccttcgtgctgtgcctggacaccgtgggccggggcagcagcctgcacctgcacgtgtccaagccgcctcgggagggcaccctgcagcacgccttcctgcgggagctggagacggtggccgcgcaccagttccctgaggtacggttctccatggtgcacaagcggatcaacctggcggaggacgtgctggcctgggagcacgagcgcttcgccatccgccgactgcccgccttcacgctgtcccacctggagagccaccgtgacggccagcgcagcagcatcatggacgtgcggtcccgggtggattctaagaccctgacccgtaacacgaggatcattgcagaggccctgactcgagtcatctacaacctgacagagaaggggacacccccagacatgccggtgttcacagagcagatgatccagcaggagcagctggactcggtgatggactggctcaccaaccagccgcgggccgcgcagctggtggacaaggacagcaccttcctcagcacgctggagcaccacctgagccgctacctgaaggacgtgaagcagcaccacgtcaaggctgacaagcgggacccagagtttgtcttctacgaccagctgaagcaagtgatgaatgcgtacagagtcaagccggccgtctttgacctgctcctggctgttggcattgctgcctacctcggcatggcctacgtggctgtccagcacttcagcctcctctacaagaccgtccagaggctgctcgtgaaggccaagacacagtgacacagccacccccacagccggagcccccgccgctccacagtccctggggccgagcacgagtgagtggacactgccccgccgcgggcggccctgcagggacaggggccctctccctccccggcggtggttggaacactgaattacagagcttttttctgttgctctccgagactggggggggattgtttcttcttttccttgtctttgaacttccttggaggagagcttgggagacgtcccggggccaggctacggacttgcggacgagccccccagtcctgggagccggccgccctcggtctggtgtaagcacacatgcacgattaaagaggagacgccgggaccccctgcccgatcgcgcgcggcctccgcccaccgcctcctgccgcaaggggcctggactgcaggcctgacctgctccctgctccgtgtctgtcctaggacgtcccctcccgctccccgatggtggcgtggacatggttatttatctctgctccttcttgcctggaggagggcagtgccagccctggggttctgggattccagccctcctggagccttttgttccccatgtggtctcagtgacccgtccccctgacagtgggctcggggagctgcatcacccagccttccccttctccgactgcagggtctgatgtcatcattgacagcctttgcttcgtgggggcctggcagggcccctgcctccccgacccccgacccactgcaaatccccgttcccctgcactcctcttctcccagcccatccctccggcccctgtgcctctgcggccccagcccagctcccagggccgtcacctgcttggccctggcccagctccctgccctgagtcctgagccagtgcctggtgtttcctgggctcggtactgggcccccaggccatccaggctttgccacggccagttggtcctccctggggaactgggtgcgggtggagtactgggaggcaggaggtggcccggggaggccttgtggctcctcccctcgctcctcgccctgggcctcagcttcctcatcaatagaaaggatgtgttcggggtgggggcgtcaggtgagaacgtttgctgggaaggagaggacttggggcatggcctctggggccacccttcctggaactcagagaggaaggtccgggccctcgggaagccttggacagaaccctccaccccgcagaccaggcgtcgtgtgtgtgtgggagagaaggaggcccgtgttgagctcagggagaccccggtgtgtccgttctttagcaatataacctacccagtgcgtgccgagcaggcttggtggggaagggacttgagctgggcaagtcctggcctggcacccgcagccgtctcccttccgtggcccagggaggtgtttgctgtccgaaggacctgggccggcccatgggagcctggggttctgtccagataggaccagggggtctcactttggccaccagttcttcggccagcacctctgccctccagaacctgcagcctggaggggtgaggggacaaccacccctctttcctccaggttggcaggggaccctcttctcccgtctgccctgcgggttgcccgcctcctccagagacttgcccaagggcccatcaccactggcctctgggcacttgtgctgagactctgggacccaggcagctgccaccttgtcaccatgagagaatttggggagtgcttgcatgctagccagcaggctcctgtctgggtgccacggggccagcattttggagggagcttccttccttccttcctggacaggtcgtcatgatggatgcactgactgaccgtctggggctcaggctggtgtgggatgcagccggccgatgagaaaataaagccatattgaatgatcgcca

SEQ ID NO: 159298 - DNA, 1210 bp, Homo sapiens
  Payload ID: 11176
  Gene Symbol: NCLN
  Gene Name: nicalin
  ENST ID: ENST00000587740
  CDS Start-End: 1-1053
gaggaccttcccaccatcgtcatcgtggcccactacgacgcctttggagtggccccctggctgtcgctgggcgcggactccaacgggagcggcgtctctgtgctgctggagctggcacgcctcttctcccggctctacacctacaagcgcacgcacgccgcctacaacctcctgttctttgcgtctggaggaggcaagtttaactaccagggaaccaagcgctggctggaagacaacctggaccacacagactccagcctgcttcaggacaatgtggccttcgtgctgtgcctggacaccgtgggccggggcagcagcctgcacctgcacgtgtccaagccgcctcgggagggcaccctgcagcacgccttcctgcgggagctggagacggtggccgcgcaccagttccctgaggtacggttctccatggtgcacaagcggatcaacctggcggaggacgtgctggcctgggagcacgagcgcttcgccatccgccgactgcccgccttcacgctgtcccacctggagagccaccgtgacggccagcgcagcagcatcatggacgtgcggtcccgggtggattctaagaccctgacccgtaacacgaggatcattgcagaggccctgactcgagtcatctacaacctgacagagaaggggacacccccagacatgccggtgttcacagagcagatgcagatccagcaggagcagctggactcggtgatggactggctcaccaaccagccgcgggccgcgcagctggtggacaaggacagcaccttcctcagcacgctggagcaccacctgagccgctacctgaaggacgtgaagcagcaccacgtcaaggctgacaagcgggacccagagtttgtcttctacgaccagctgaagcaagtgatgaatgcgtacagagtcaagccggccgtctttgacctgctcctggctgttggcattgctgcctacctcggcatggcctacgtggctgtccagcacttcagcctcctctacaagaccgtccagaggctgctcgtgaaggccaagacacagtgacacagccacccccacagccggagcccccgccgctccacagtccctggggccgagcacgagtcgtcatgatggatgcactgactgaccgtctggggctcaggctggtgtgggatgcagccggccgatgagaaaataaagccatattgaatgatcgcca

SEQ ID NO: 159299 - DNA, 2070 bp, Homo sapiens
  Payload ID: 11176
  Gene Symbol: NCLN
  Gene Name: nicalin
  ENST ID: ENST00000590671
  CDS Start-End: 433-1902
ttccttttctctttatccccaacttccttccaggtcgcaaggtcacgtcctgtccccacctttcgcccctcaccctagctcccccaacgccaaagacaaggttaagaaagtgatatcgcgaaatagttttttaaagcattttattgcattttatgacttggagtttatgtgaaacctcaacggtattagccgaacagcctgccgcaccttccgggagttccagagtgggcctacaactcccacagggctccgcgagcgccggacggacggactacaattcccgacaggcagcgcggctggcggggcggttcgccgcggtgcccacaggacctcagggcgagtgcgggctgccccgcgcggcgcccgcaggaccccggcggctacccatgccgaggcacacggaatgcagtgctgaacacggaggcgcgcacgatggcggcggaggtgctgagccgccgctgcgtgctcatgcggctactggacttctcctacgagcagtaccagaaggccctgcggcagtcggcgggcgccgtggtcatcatcctgcccagggccatggccgccgtgccccaggacgtcgtccggcaattcatggagatcgagccggagatgctggccatggagaccgccgtccccgtgtactttgccgtggaggacgaggccctgctgtctatctacaagcagacccaggctgcctccgcctcccagggctccgcctctgctgctgaagtactgctgcgcacggccactgccaacggcttccagatggtcaccagcggggtacagagcaaggccgtgagtgactggctgattgccagcgtggaggggcggctgacggggctgggcggagaggaccttcccaccatcgtcatcgtggcccactacgacgcctttggagtggccccctggctgtcgctgggcgcggactccaacgggagcggcgtctctgtgctgctggagctggcacgcctcttctcccggctctacacctacaagcgcacgcacgccgcctacaacctcctgttctttgcgtctggaggaggcaagtttaactaccagggaaccaagcgctggctggaagacaacctggaccacacagactccagcctgcttcaggacaatgtggccttcgtgctgtgcctggacaccgtgggccggggcagcagcctgcacctgcacgtgtccaagccgcctcgggagggcaccctgcagcacgccttcctgcgggagctggagacggtggccgcgcaccagttccctgaggtacggttctccatggtgcacaagcggatcaacctggcggaggacgtgctggcctgggagcacgagcgcttcgccatccgccgactgcccgccttcacgctgtcccacctggagagccaccgtgacggccagcgcagcagcatcatggacgtgcggtcccgggtggattctaagaccctgacccgtaacacgaggatcattgcagaggccctgactcgagtcatctacaacctgacagagaaggggacacccccagacatgccggtgttcacagagcagatgcagatccagcaggagcagctggactcggtgatggactggctcaccaaccagccgcgggccgcgcagctggtggacaaggacagcaccttcctcagcacgctggagcaccacctgagccgctacctgaaggacgtgaagcagcaccacgtcaaggctgacaagcgggacccagagtttgtcttctacgaccagctgaagcaagtgatgaatgcgtacagagtcaagccggccgtctttgacctgctcctggctgttggcattgctgcctacctcggcatggcctacgtggctgtccagcacttcagcctcctctacaagaccgtccagaggctgctcgtgaaggccaagacacagtgacacagccacccccacagccggagcccccgccgctccacagtccctggggccgagcacgagtgagtggacactgccccgccgcgggcggccctgcagggacaggggccctctccctccccggcggtggttggaacactgaattacagagcttttttctgttgctctccg

SEQ ID NO: 159300 - DNA, 380 bp, Homo sapiens
  Payload ID: 11176
  Gene Symbol: NCLN
  Gene Name: nicalin
  ENST ID: ENST00000592235
  CDS Start-End: 1-218
agcgggacccagagtttgtcttctacgaccagctgaagcaagtgatgaatgcgtacagagtcaagccggccgtctttgacctgctcctggctgttggcattgctgcctacctcggcatggcctacgtggctgtccaggtgagcagtgcccaggctcagcacttcagcctcctctacaagaccgtccagaggctgctcgtgaaggccaagacacagtgacacagccacccccacagccggagcccccgccgctccacagtccctggggccgagcacgagtgagtggacactgccccgccgcgggcggccctgcagggacaggggccctctccctccccggcggtggttggaacactgaattacagagcttttttctgttgc

SEQ ID NO: 159301 - DNA, 1080 bp, Homo sapiens
  Payload ID: 11176
  Gene Symbol: NCLN
  Gene Name: nicalin
  ENST ID: ENST00000588428
  CDS Start-End: 96-1080
ccggcggctacccatgccgaggtgagtccgcgggagccgccgccgccgccgtcccgtcccagctgccgccccgcgcggccccgccgccggccaggatgctggaggaagcgggcgaggtgctggagaacatgctgaaggcgtcttgtctgccgctcggcttcatcgtcttcctgcccgctgtgctgctgctggtggcgccgccgctgcctgccgccgacgccgcgcacgagttcaccgtgtaccgcatgcagcagtacgacctgcagggccagccctacgtactgctgcgcacggccactgccaacggcttccagatggtcaccagcggggtacagagcaaggccgtgagtgactggctgattgccagcgtggaggggcggctgacggggctgggcggagaggaccttcccaccatcgtcatcgtggcccactacgacgcctttggagtggccccctggctgtcgctgggcgcggactccaacgggagcggcgtctctgtgctgctggagctggcacgcctcttctcccggctctacacctacaagcgcacgcacgccgcctacaacctcctgttctttgcgtctggaggaggcaagtttaactaccagggaaccaagcgctggctggaagacaacctggaccacacagactccagcctgcttcaggacaatgtggccttcgtgctgtgcctggacaccgtgggccggggcagcagcctgcacctgcacgtgtccaagccgcctcgggagggcaccctgcagcacgccttcctgcgggagctggagacggtggccgcgcaccagttccctgaggtacggttctccatggtgcacaagcggatcaacctggcggaggacgtgctggcctgggagcacgagcgcttcgccatccgccgactgcccgccttcacgctgtcccacctggagagccaccgtgacggccagcgcagcagcatcatggacgtgcggtcccgggtggattctaagaccctgacccgtaacacgaggatcattgcagaggccctgactcgagtcatctacaacctgacagagaaggggacacccccagacatgccggtgt

SEQ ID NO: 159302 - DNA, 836 bp, Homo sapiens
  Payload ID: 11176
  Gene Symbol: NCLN
  Gene Name: nicalin
  ENST ID: ENST00000586904
  CDS Start-End: 1-331
gcttcaggacaatgtggccttcgtgctgtgcctggacaccgtgggccggggcagcagcctgcacctgcacgtgtccaagccgcctcgggagggcaccctgcagcacgccttcctgcgggagctggagacggtggccgcgcaccagttccctgaggtacggttctccatggtgcacaagcggatcaacctggcggaggacgtgctggcctgggagcacgagcgcttcgccatccgccgactgcccgccttcacgctgtcccacctggagagccaccgtgacggccagcgcagcagcatcatggacgtgcgacagagtctcacggtctcctaggctggagtgctgggattacaagtgtgagagctaccttgcctggcccaaagtccacattttaaaacattgtttttgaatcgtgaaggtcccgggtggattctaagaccctgacccgtaacacgaggatcattgcagaggccctgactcgagtcatctacaacctgacagagaaggggacacccccagacatgccggtgttcacagagcagatgatccagcaggagcagctggactcggtgatggactggctcaccaaccagccgcgggccgcgcagctggtggacaaggacagcaccttcctcagcacgctggagcaccacctgagccgctacctgaaggacgtgaagcagcaccacgtcaaggctgacaagcgggacccagagtttgtcttctacgaccagctgaagcaagtgatgaatgcgtacagagtcaagccggccgtctttgacctgctcctggctgttggcattgctgcctacctcggcatggcctacgtggctgtcca

SEQ ID NO: 159303 - DNA, 2936 bp, Homo sapiens
  Payload ID: 11177
  Gene Symbol: NCSTN
  Gene Name: nicastrin
  Uniprot ID: Q92542
  ENST ID: ENST00000294785
  CDS Start-End: 126-2255
gcgcctggaaacacgaacttccggtctcttaggctccgggccacagagacggtgtcagtggtagcctagagaggccgctaacagacaggagccgaacgggggcttccgctcagcagagaggcaagatggctacggcagggggtggctctggggctgacccgggaagtcggggtctccttcgccttctgtctttctgcgtcctactagcaggtttgtgcaggggaaactcagtggagaggaagatatatatccccttaaataaaacagctccctgtgttcgcctgctcaacgccactcatcagattggctgccagtcttcaattagtggagacacaggggttatccacgtagtagagaaagaggaggacctacagtgggtattgactgatggccccaaccccccttacatggttctgctggagagcaagcattttaccagggatttaatggagaagctgaaagggagaaccagccgaattgctggtcttgcagtgtccttgaccaagcccagtcctgcctcaggcttctctcctagtgtacagtgcccaaatgatgggtttggtgtttactccaattcctatgggccagagtttgctcactgcagagaaatacagtggaattcgctgggcaatggtttggcttatgaagactttagtttccccatctttcttcttgaagatgaaaatgaaaccaaagtcatcaagcagtgctatcaagatcacaacctgagtcagaatggctcagcaccaaccttcccactatgtgccatgcagctcttttcacacatgcatgctgtcatcagcactgccacctgcatgcggcgcagctccatccaaagcaccttcagcatcaacccagaaatcgtctgtgaccccctgtctgattacaatgtgtggagcatgctaaagcctataaatacaactgggacattaaagcctgacgacagggttgtggttgctgccacccggctggatagtcgttcctttttctggaatgtggccccaggggctgaaagcgcagtggcttcctttgtcacccagctggctgctgctgaagctttgcaaaaggcacctgatgtgaccaccctgccccgcaatgtcatgtttgtcttctttcaaggggaaacttttgactacattggcagctcgaggatggtctacgatatggagaagggcaagtttcccgtgcagttagagaatgttgactcatttgtggagctgggacaggtggccttaagaacttcattagagctttggatgcacacagatcctgtttctcagaaaaatgagtctgtacggaaccaggtggaggatctcctggccacattggagaagagtggtgctggtgtccctgctgtcatcctcaggaggccaaatcagtcccagcctctcccaccatcttccctgcagcgatttcttcgagctcgaaacatctctggcgttgttctggctgaccactctggtgccttccataacaaatattaccagagtatttacgacactgctgagaacattaatgtgagctatcccgaatggctgagccctgaagaggacctgaactttgtaacagacactgccaaggccctggcagatgtggccacggtgctgggacgtgctctgtatgagcttgcaggaggaaccaacttcagcgacacagttcaggctgatccccaaacggttacccgcctgctctatgggttcctgattaaagccaacaactcatggttccagtctatcctcaggcaggacctaaggtcctacttgggtgacgggcctcttcaacattacatcgctgtctccagccccaccaacaccacttatgttgtacagtatgccttggcaaatttgactggcacagtggtcaacctcacccgagagcagtgccaggatccaagtaaagtcccaagtgaaaacaaggatctgtatgagtactcatgggtccagggccctttgcattctaatgagacggaccgactcccccggtgtgtgcgttctactgcacgattagccagggccttgtctcctgcctttgaactgagtcagtggagctctactgaatactctacatggactgagagccgctggaaagatatccgtgcccggatatttctcatcgccagcaaagagcttgagttgatcaccctgacagtgggcttcggcatcctcatcttctccctcatcgtcacctactgcatcaatgccaaagctgatgtccttttcattgctccccgggagccaggagctgtgtcatactgaggaggaccccagcttttcttgccagctcagcagttcacttcctagagcatctgtcccactgggacacaaccactaatttgtcactggaacctccctgggcctgtctcagattgggattaacataaaagagtggaactatccaaaagagacagggagaaataaataaattgcctcccttcctccgctcccctttcccatcaccccttccccatttcctcttccttctctactcatgccagattttgggattacaaatagaagcttcttgctcctgtttaactccctagttacccaccctaatttgcccttcaggacccttctactttttccttcctgccctgtacctctctctgctcctcacccccacccctgtacccagccaccttcctgactgggaaggacataaaaggtttaatgtcagggtcaaactacattgagcccctgaggacaggggcatctctgggctgagcctactgtctccttcccactgtcctttctccaggccctcagatggcacattagggtgggcgtgctgcgggtgggtatcccacctccagcccacagtgctcagttgtactttttattaagctgtaatatctatttttgtttttgtctttttcctttattctttttgtaaatatatatataatgagtttcattaaaatagattatcccacacga

SEQ ID NO: 159304 - DNA, 3031 bp, Homo sapiens
  Payload ID: 11177
  Gene Symbol: NCSTN
  Gene Name: nicastrin
  Uniprot ID: Q92542
  ENST ID: ENST00000368063
  CDS Start-End: 281-2350
agagacggtgtcagtggtagcctagagaggccgctaacagacaggagccgaacgggggcttccgctcagcagagaggcaagatggctacggcagggggtggctctggggctgacccgggaagtcggggtctccttcgccttctgtctttctgcgtcctactagcagtgtcactgtcaatggcgctacatggactttgtaataaccctttgaggcacatagctgggtgccatgtagaacatgtatctgttacgataagtgtgtgcccaagaaatcagaagaatggactttaatctcattttagaaagtttgtgcaggggaaactcagtggagaggaagatatatatccccttaaataaaacagctccctgtgttcgcctgctcaacgccactcatcagattggctgccagtcttcaattagtggagacacaggggttatccacgtagtagagaaagaggaggacctacagtgggtattgactgatggccccaaccccccttacatggttctgctggagagcaagcattttaccagggatttaatggagaagctgaaagggagaaccagccgaattgctggtcttgcagtgtccttgaccaagcccagtcctgcctcaggcttctctcctagtgtacagtgcccaaatgatgggtttggtgtttactccaattcctatgggccagagtttgctcactgcagagaaatacagtggaattcgctgggcaatggtttggcttatgaagactttagtttccccatctttcttcttgaagatgaaaatgaaaccaaagtcatcaagcagtgctatcaagatcacaacctgagtcagaatggctcagcaccaaccttcccactatgtgccatgcagctcttttcacacatgcatgctgtcatcagcactgccacctgcatgcggcgcagctccatccaaagcaccttcagcatcaacccagaaatcgtctgtgaccccctgtctgattacaatgtgtggagcatgctaaagcctataaatacaactgggacattaaagcctgacgacagggttgtggttgctgccacccggctggatagtcgttcctttttctggaatgtggccccaggggctgaaagcgcagtggcttcctttgtcacccagctggctgctgctgaagctttgcaaaaggcacctgatgtgaccaccctgccccgcaatgtcatgtttgtcttctttcaaggggaaacttttgactacattggcagctcgaggatggtctacgatatggagaagggcaagtttcccgtgcagttagagaatgttgactcatttgtggagctgggacaggtggccttaagaacttcattagagctttggatgcacacagatcctgtttctcagaaaaatgagtctgtacggaaccaggtggaggatctcctggccacattggagaagagtggtgctggtgtccctgctgtcatcctcaggaggccaaatcagtcccagcctctcccaccatcttccctgcagcgatttcttcgagctcgaaacatctctggcgttgttctggctgaccactctggtgccttccataacaaatattaccagagtatttacgacactgctgagaacattaatgtgagctatcccgaatggctgagccctgaagaggacctgaactttgtaacagacactgccaaggccctggcagatgtggccacggtgctgggacgtgctctgtatgagcttgcaggaggaaccaacttcagcgacacagttcaggctgatccccaaacggttacccgcctgctctatgggttcctgattaaagccaacaactcatggttccagtctatcctcaggcaggacctaaggtcctacttgggtgacgggcctcttcaacattacatcgctgtctccagccccaccaacaccacttatgttgtacagtatgccttggcaaatttgactggcacagtggtcaacctcacccgagagcagtgccaggatccaagtaaagtcccaagtgaaaacaaggatctgtatgagtactcatgggtccagggccctttgcattctaatgagacggaccgactcccccggtgtgtgcgttctactgcacgattagccagggccttgtctcctgcctttgaactgagtcagtggagctctactgaatactctacatggactgagagccgctggaaagatatccgtgcccggatatttctcatcgccagcaaagagcttgagttgatcaccctgacagtgggcttcggcatcctcatcttctccctcatcgtcacctactgcatcaatgccaaagctgatgtccttttcattgctccccgggagccaggagctgtgtcatactgaggaggaccccagcttttcttgccagctcagcagttcacttcctagagcatctgtcccactgggacacaaccactaatttgtcactggaacctccctgggcctgtctcagattgggattaacataaaagagtggaactatccaaaagagacagggagaaataaataaattgcctcccttcctccgctcccctttcccatcaccccttccccatttcctcttccttctctactcatgccagattttgggattacaaatagaagcttcttgctcctgtttaactccctagttacccaccctaatttgcccttcaggacccttctactttttccttcctgccctgtacctctctctgctcctcacccccacccctgtacccagccaccttcctgactgggaaggacataaaaggtttaatgtcagggtcaaactacattgagcccctgaggacaggggcatctctgggctgagcctactgtctccttcccactgtcctttctccaggccctcagatggcacattagggtgggcgtgctgcgggtgggtatcccacctccagcccacagtgctcagttgtactttttattaagctgtaatatctatttttgtttttgtctttttcctttattctttttgtaaatatatatataatgagtttcattaaaatagattatcccacacga

SEQ ID NO: 159305 - DNA, 958 bp, Homo sapiens
  Payload ID: 11177
  Gene Symbol: NCSTN
  Gene Name: nicastrin
  ENST ID: ENST00000424645
  CDS Start-End: 1-958
atgggtttggtgtttactccaattcctatgggccagagtttgctcactgcagagaaatacagtggaattcgctgggcaatggtttggcttatgaagactttagtttccccatctttcttcttgaagatgaaaatgaaaccaaagtcatcaagcagctcttttcacacatgcatgctgtcatcagcactgccacctgcatgcggcgcagctccatccaaagcaccttcagcatcaacccagaaatcgtctgtgaccccctgtctgattacaatgtgtggagcatgctaaagcctataaatacaactgggacattaaagcctgacgacagggttgtggttgctgccacccggctggatagtcgttcctttttctggaatgtggccccaggggctgaaagcgcagtggcttcctttgtcacccagctggctgctgctgaagctttgcaaaaggcacctgatgtgaccaccctgccccgcaatgtcatgtttgtcttctttcaaggggaaacttttgactacattggcagctcgaggatggtctacgatatggagaagggcaagtttcccgtgcagttagagaatgttgactcatttgtggagctgggacaggtggccttaagaacttcattagagctttggatgcacacagatcctgtttctcagaaaaatgagtctgtacggaaccaggtggaggatctcctggccacattggagaagagtggtgctggtgtccctgctgtcatcctcaggaggccaaatcagtcccagcctctcccaccatcttccctgcagcgatttcttcgagctcgaaacatctctggcgttgttctggctgaccactctggtgccttccataacaaatattaccagagtatttacgacactgctgagaacattaatgtgagctatcccgaatggctgagccctgaagaggacctgaactttgtaacagacactgc

SEQ ID NO: 159306 - DNA, 702 bp, Homo sapiens
  Payload ID: 11177
  Gene Symbol: NCSTN
  Gene Name: nicastrin
  ENST ID: ENST00000438008
  CDS Start-End: 7-702
ggcaagatggctacggcagggggtggctctggggctgacccgggaagtcggggtctccttcgccttctgtctttctgcgtcctactagcaggcctcttcctggacttcgagcctgaccctctcccactttgtccagatgtctcgtttttcccacaaccccagccacccaccccacagtcgaaaggaacaggtttgtgcaggggaaactcagtggagaggaagatatatatccccttaaataaaacagctccctgtgttcgcctgctcaacgccactcatcagattggctgccagtcttcaattagtggagacacaggggttatccacgtagtagagaaagaggaggacctacagtgggtattgactgatggccccaaccccccttacatggttctgctggagagcaagcattttaccagggatttaatggagaagctgaaagggagaaccagccgaattgctggtcttgcagtgtccttgaccaagcccagtcctgcctcaggcttctctcctagtgtacagtgcccaaatgatgggtttggtgtttactccaattcctatgggccagagtttgctcactgcagagaaatacagtggaattcgctgggcaatggtttggcttatgaagactttagtttccccatctttcttcttgaagatgaaaatgaaaccaaagtcatcaagcagtgctatcaagatcac

SEQ ID NO: 159307 - DNA, 776 bp, Homo sapiens
  Payload ID: 11177
  Gene Symbol: NCSTN
  Gene Name: nicastrin
  ENST ID: ENST00000421914
  CDS Start-End: 12-776
agagaggcaagatggctacggcagggggtggctctggggctgacccgggaagtcggggtctccttcgccttctgtctttctgcgtcctactagcaggtttgtgcaggggaaactcagtggagaggaagatatatatccccttaaataaaacagctccctgtgttcgcctgctcaacgccactcatcagattggctgccagtcttcaattagtggagacacaggggttatccacgtagtagagaaagaggaggacctacagtgggtattgactgatggccccaaccccccttacatggttctgctggagagcaagcattttaccagggatttaatggagaagctgaaagggagaaccagccgaattgctggtcttgcagtgtccttgaccaagcccagtcctgcctcaggcttctctcctagtgtacagtgcccaaatgatgggtttggtgtttactccaattcctatgggccagagtttgctcactgcagagaaatacagtggaattcgctgggcaatggtttggcttatgaagactttagtttccccatctttcttcttgaagatgaaaatgaaaccaaagtcatcaagcaggaaacttttgactacattggcagctcgaggatggtctacgatatggagaagggcaagtttcccgtgcagttagagaatgttgactcatttgtggagctgggacaggtggccttaagaacttcattagagctttggatgcacacagatcctgtttctcagaaaaatgagtctgtacggaaccag

SEQ ID NO: 159308 - DNA, 824 bp, Homo sapiens
  Payload ID: 11177
  Gene Symbol: NCSTN
  Gene Name: nicastrin
  ENST ID: ENST00000435149
  CDS Start-End: 1-824
ggaatgtggccccaggggctgaaagcgcagtggcttcctttgtcacccagctggctgctgctgaagctttgcaaaaggcacctgatgtgaccaccctgccccgcaatgtcatgtttgtcttctttcaaggggtggccttaagaacttcattagagctttggatgcacacagatcctgtttctcagaaaaatgagtctgtacggaaccaggtggaggatctcctggccacattggagaagagtggtgctggtgtccctgctgtcatcctcaggaggccaaatcagtcccagcctctcccaccatcttccctgcagcgatttcttcgagctcgaaacatctctggcgttgttctggctgaccactctggtgccttccataacaaatattaccagagtatttacgacactgctgagaacattaatgtgagctatcccgaatggctgagccctgaagaggacctgaactttgtaacagacactgccaaggccctggcagatgtggccacggtgctgggacgtgctctgtatgagcttgcaggaggaaccaacttcagcgacacagttcaggctgatccccaaacggttacccgcctgctctatgggttcctgattaaagccaacaactcatggttccagtctatcctcaggcaggacctaaggtcctacttgggtgacgggcctcttcaacattacatcgctgtctccagccccaccaacaccacttatgttgtacagtatgccttggcaaatttgactggcacagtggtcaacctcacccgagagcagtgccaggatccaagtaaagtcccaagtgaaaacaaggat

SEQ ID NO: 159309 - DNA, 659 bp, Homo sapiens
  Payload ID: 11177
  Gene Symbol: NCSTN
  Gene Name: nicastrin
  ENST ID: ENST00000424754
  CDS Start-End: 1-659
cgcagctccatccaaagcaccttcagcatcaacccagaaatcgtctgtgaccccctgtctgattacaatgtgtggagcatgctaaagcctataaatacaactgggacattaaagcctgacgacagggttgtggttgctgccacccggctggctgctgctgaagctttgcaaaaggcacctgatgtgaccaccctgccccgcaatgtcatgtttgtcttctttcaaggggaaacttttgactacattggcagctcgaggatggtctacgatatggagaagggcaagtttcccgtgcagttagagaatgttgactcatttgtggagctgggacaggtggccttaagaacttcattagagctttggatgcacacagatcctgtttctcagaaaaatgagtctgtacggaaccaggtggaggatctcctggccacattggagaagagtggtgctggtgtccctgctgtcatcctcaggaggccaaatcagtcccagcctctcccaccatcttccctgcagcgatttcttcgagctcgaaacatctctggcgttgttctggctgaccactctggtgccttccataacaaatattaccagagtatttacgacactgctgagaacattaatgtgagctatcccgaatggctgagccctgaagagga

SEQ ID NO: 159310 - DNA, 448 bp, Homo sapiens
  Payload ID: 11177
  Gene Symbol: NCSTN
  Gene Name: nicastrin
  ENST ID: ENST00000437169
  CDS Start-End: 45-448
cagacaggagccgaacgggggcttccgctcagcagagaggcaagatggctacggcagggggtggctctggggctgacccgggaagtcggggtctccttcgccttctgtctttctgcgtcctactagcaggtttgtgcaggggaaactcagtggagaggaagatatatatccccttaaataaaacagctccctgtgttcgcctgctcaacgccactcatcagattggctgccagtcttcaattagtggagacacaggggttatccacgtagtagagaaagaggaggacctacagtgggtattgactgatggccccaaccccccttacatggttctgctggagagcaagcattttaccaggcagaatgtcaggctgtctgataccttcctgtgttccttcatggaattcctttcctattccagggatttaatggagaagctgaaagggag

SEQ ID NO: 159311 - DNA, 2616 bp, Homo sapiens
  Payload ID: 11178
  Gene Symbol: NICN1
  Gene Name: nicolin 1
  Uniprot ID: Q9BSH3
  ENST ID: ENST00000273598
  CDS Start-End: 88-729
ttcttgaggctcggctgaggatgccgggaagggctggtggtcgggggcctagagcggcggttgcacttagttgcggctgctgtcaccatgtcccgcgttttggtgccttgccatgtgaaaggctccgtagccctccaggtgggcgacgtgcggacctcccaaggccggcctggcgtgctggtcatcgatgtcaccttccccagcgtcgctcccttcgagttgcaggaaatcacgtttaagaattactacacagcttttttgagcatccgtgtccgtcagtacacctcagcacacacacctgccaagtgggtgacctgcctgcgggactactgcctaatgcctgacccacacagtgaggagggagcccaggagtatgtatcgctgttcaagcatcagatgctgtgtgacatggctagaatatcggagctacgcctgattctgcggcagccatcaccactgtggctgtctttcacagtggaggagctgcagatctatcagcagggaccaaagagcccctccgtgacctttcccaagtggctctcccacccagtgccctgtgagcaacctgcactcctccgtgagggtctcccagaccccagcagggtatcctccgaggtgcagcagatgtgggcactgacagagatgatccgggccagtcacacctccgcaaggatcggccgctttgatgtggatggctgttatgacctgaacttgctctcctacacttgaatggttgctcctagccaagatgttggcctttctgtgcccacccagacttggtttgggccaccagaggctgaagtgtatttcctgtgcattccaagtgttgcctgcatgcctgttctgtctgggccacattcacagattcaggattctcaggggcttaccgtgttacttcagcatgagctcctggcatgggggtgctctgtcttcgcctggctgcaactcaattcttccttctacccaaaaacactccagtcagttgtacttactgagaatccctgagtgccctctgccccttctggcaacatgcacattcctgtcttctgcctgctccctcatgtcagtgcagttgggctgggctgacctactaaaacctgctccatgtatggacctggaaggccattgctgccatggcacttgggacacttgaggaagaaacagaaaccttatttcttcctgtgtgtcccctagtggttttctttccatttgtgttatgccacagagagaaatttcctgtctgaactcttctgctgcctgcctaggaaggaaacctgaagatttgggcagcctgagtctcttggtttctgagctggctcctgaatatatgttcaagtgggtgtgcccatagggcctgggcacgtgtctctagcaaaaccagggcctgagcataagaactgggacccttctaggcagggtgcagtggctcacgcctgtaatcccagcactttgggaggcccaggcaggcggatcacctgaggtcaggagttcaagaccagcctgaccaacctggagaaaccccgtctctactaaaaatacaaaaaattagctgggcgtggtggtaggcacctgtaatcccagctacttgggaggctgaggcaggagaatctcttgaacccgggaagtggaggttgcggacctgagatcatgccattgcactccagcctgggcaagaagagcgaaactccatcttaaacaaacaaacaaaaaaaaaagaactgggacccttctgccatctgacatagcccaaagcacatctctatcctttctcccagttgcccctctccttttttgttgttttttttgaggttgagttttgctcttgttgcccaggctggagtgcaatagtgcaatcttggctaactgcaacctccgcctcccaggttcaagcaattctcctgcctcagtctcccgagtagctgggattacagtcatgcatcaccatgcctggctaattttgtatttgtagtagagatggggtttctccatgttggtcaggctggtctcaaacacctgacctcaggtgatctgcctgccttggccttccaaagtgctgggattacaggcatgagccaccgcgcccgccctgcccctttccaagagatatgctcagcataatgagagatcaaccgtggtggggagtgggtccaagtaagggttctcattgttgccttttaagaggcctaagtcctgcattaactcagtccaaccattaagtgatgcaggctgctcttccctcatgtgagaaaaacctgtttccctctggttcttcctggctttgcacctggtggctattacaaagcagtactgcagtatgtcttggacctggaaagttggacatgtgtgtggctcaacagttttctcgggggagttcagtgaccttttggtggccaccctctgttctcacctgtgagttcttgcaggtggcgacttcatctgcaaggtcacttacatagccccactcagctgcttcggaaagcgtgacgaagcagtagtcctcagtgtgtgtgtaagtgaagaggaccttgtggtagcagggaccatgcttcattcgtggctgtgtccccatctgagggcctggtatgcagtaagatcaataaatacttgtggaatgca

SEQ ID NO: 159312 - DNA, 1271 bp, Homo sapiens
  Payload ID: 11178
  Gene Symbol: NICN1
  Gene Name: nicolin 1
  ENST ID: ENST00000436744
  CDS Start-End: 88-615
ttcttgaggctcggctgaggatgccgggaagggctggtggtcgggggcctagagcggcggttgcacttagttgcggctgctgtcaccatgtcccgcgttttggtgccttgccatgtgaaaggctccgtagccctccaggtgggcgacgtgcggacctcccaaggccggcctggcgtgctggtcatcgatgtcaccttccccagcgtcgctcccttcgagttgcaggaaatcacgtttaagaattactacacagcttttttgagcatccgtgtccgtcagtacacctcagcacacacacctgccaagtgggtgacctgcctgcgggactactgcctaatgcctgacccacacagtgaggagggagcccaggagtatgtatcgctgttcaagcatcagagcccctccgtgacctttcccaagtggctctcccacccagtgccctgtgagcaacctgcactcctccgtgagggtctcccagaccccagcagggtatcctccgaggtgcagcagatgtgggcactgacagagatgatccgggccagtcacacctccgcaaggatcggccgctttgatgtggatggctgttatgacctgaacttgctctcctacacttgaatggttgctcctagccaagatgttggcctttctgtgcccacccagacttggtttgggccaccagaggctgaagtgtatttcctgtgcattccaagtgttgcctgcatgcctgttctgtctgggccacattcacagattcaggattctcaggggcttaccgtgttacttcagcatgagctcctggcatgggggtgctctgtcttcgcctggctgcaactcaattcttccttctacccaaaaacactccagtcagttgtacttactgagaatccctgagtgccctctgccccttctggcaacatgcacattcctgtcttctgcctgctccctcatgtcagtgcagttgggctgggctgacctactaaaacctgctccatgtatggacctggaaggccattgctgccatggcacttgggacacttgaggaagaaacagaaaccttatttcttcctgtgtgtcccctagtggttttctttccatttgtgttatgccacagagagaaatttcctgtctgaactcttctgctgcctgcctaggaaggaaacctgaagatttgggcagcctgagtctcttggtttctgagctggctcctgaatatatgttcaagtgggtgtgcccatagggcctgggcacgtgtctctagcaaaaccagggcc

SEQ ID NO: 159313 - DNA, 2040 bp, Homo sapiens
  Payload ID: 11178
  Gene Symbol: NICN1
  Gene Name: nicolin 1
  Uniprot ID: Q9BSH3
  ENST ID: ENST00000423832
  CDS Start-End: 70-711
ggatgccgggaagggctggtggtcgggggcctagagcggcggttgcacttagttgcggctgctgtcaccatgtcccgcgttttggtgccttgccatgtgaaaggctccgtagccctccaggtgggcgacgtgcggacctcccaaggccggcctggcgtgctggtcatcgatgtcaccttccccagcgtcgctcccttcgagttgcaggaaatcacgtttaagaattactacacagcttttttgagcatccgtgtccgtcagtacacctcagcacacacacctgccaagtgggtgacctgcctgcgggactactgcctaatgcctgacccacacagtgaggagggagcccaggagtatgtatcgctgttcaagcatcagatgctgtgtgacatggctagaatatcggagctacgcctgattctgcggcagccatcaccactgtggctgtctttcacagtggaggagctgcagatctatcagcagggaccaaagagcccctccgtgacctttcccaagtggctctcccacccagtgccctgtgagcaacctgcactcctccgtgagggtctcccagaccccagcagggtatcctccgaggtgcagcagatgtgggcactgacagagatgatccgggccagtcacacctccgcaaggatcggccgctttgatgtggatggctgttatgacctgaacttgctctcctacacttgaatggttgctcctagccaagatgttggcctttctgtgcccacccagacttggtttgggccaccagaggctgaagtgtatttcctgtgcattccaagtgttgcctgcatgcctgttctgtctgggccacattcacagattcaggattctcaggggcttaccgtgttacttcagcatgagctcctggcatgggggtgctctgtcttcgcctggctgcaactcaattcttccttctacccaaaaacactccagtcagttgtacttactgagaatccctgagtgccctctgccccttctggcaacatgcacattcctgtcttctgcctgctccctcatgtcagtgcagttgggctgggctgacctactaaaacctgctccatgtatggacctggaaggccattgctgccatggcacttgggacacttgaggaagaaacagaaaccttatttcttcctgtgtgtcccctagtggttttctttccatttgtgttatgccacagagagaaatttcctgtctgaactcttctgctgcctgcctaggaaggaaacctgaagatttgggcagcctgagtctcttggtttctgagctggctcctgaatatatgttcaagtgggtgtgcccatagggcctgggcacgtgtctctagcaaaaccagggcctgagcataagaactgggacccttctaggcagggtgcagtggctcacgcctgtaatcccagcactttgggaggcccaggcaggcggatcacctgaggtcaggagctggtctcaaacacctgacctcaggtgatctgcctgccttggccttccaaagtgctgggattacaggcatgagccaccgcgcccgccctgcccctttccaagagatatgctcagcataatgagagatcaaccgtggtggggagtgggtccaagtaagggttctcattgttgccttttaagaggcctaagtcctgcattaactcagtccaaccattaagtgatgcaggctgctcttccctcatgtgagaaaaacctgtttccctctggttcttcctggctttgcacctggtggctattacaaagcagtactgcagtatgtcttggacctggaaagttggacatgtgtgtggctcaacagttttctcgggggagttcagtgaccttttggtggccaccctctgttctcacctgtgagttcttgcaggtggcgacttcatctgcaaggtcacttacatagccccactcagctgcttcggaaagcgtgacgaagcagtagtcctcagtgtgtgtgtaagtgaagaggaccttgtggtagcagggaccatgcttcattcgtggctgtgtccccat

SEQ ID NO: 159314 - DNA, 1921 bp, Homo sapiens
  Payload ID: 11178
  Gene Symbol: NICN1
  Gene Name: nicolin 1
  Uniprot ID: Q9BSH3
  ENST ID: ENST00000615713
  CDS Start-End: 50-691
ggtcgggggcctagagcggcggttgcacttagttgcggctgctgtcaccatgtcccgcgttttggtgccttgccatgtgaaaggctccgtagccctccaggtgggcgacgtgcggacctcccaaggccggcctggcgtgctggtcatcgatgtcaccttccccagcgtcgctcccttcgagttgcaggaaatcacgtttaagaattactacacagcttttttgagcatccgtgtccgtcagtacacctcagcacacacacctgccaagtgggtgacctgcctgcgggactactgcctaatgcctgacccacacagtgaggagggagcccaggagtatgtatcgctgttcaagcatcagatgctgtgtgacatggctagaatatcggagctacgcctgattctgcggcagccatcaccactgtggctgtctttcacagtggaggagctgcagatctatcagcagggaccaaagagcccctccgtgacctttcccaagtggctctcccacccagtgccctgtgagcaacctgcactcctccgtgagggtctcccagaccccagcagggtatcctccgaggtgcagcagatgtgggcactgacagagatgatccgggccagtcacacctccgcaaggatcggccgctttgatgtggatggctgttatgacctgaacttgctctcctacacttgaatggttgctcctagccaagatgttggcctttctgtgcccacccagacttggtttgggccaccagaggctgaagtgtatttcctgtgcattccaagtgttgcctgcatgcctgttctgtctgggccacattcacagattcaggattctcaggggcttaccgtgttacttcagcatgagctcctggcatgggggtgctctgtcttcgcctggctgcaactcaattcttccttctacccaaaaacactccagtcagttgtacttactgagaatccctgagtgccctctgccccttctggcaacatgcacattcctgtcttctgcctgctccctcatgtcagtgcagttgggctgggctgacctactaaaacctgctccatgtatggacctggaaggccattgctgccatggcacttgggacacttgaggaagaaacagaaaccttatttcttcctgtgtgtcccctagtggttttctttccatttgtgttatgccacagagagaaatttcctgtctgaactcttctgctgcctgcctaggaaggaaacctgaagatttgggcagcctgagtctcttggtttctgagctggctcctgaatatatgttcaagtgggtgtgcccatagggcctgggcacgtgtctctagcaaaaccagggcctgagcataagaactgggattacaggcatgagccaccgcgcccgccctgcccctttccaagagatatgctcagcataatgagagatcaaccgtggtggggagtgggtccaagtaagggttctcattgttgccttttaagaggcctaagtcctgcattaactcagtccaaccattaagtgatgcaggctgctcttccctcatgtgagaaaaacctgtttccctctggttcttcctggctttgcacctggtggctattacaaagcagtactgcagtatgtcttggacctggaaagttggacatgtgtgtggctcaacagttttctcgggggagttcagtgaccttttggtggccaccctctgttctcacctgtgagttcttgcaggtggcgacttcatctgcaaggtcacttacatagccccactcagctgcttcggaaagcgtgacgaagcagtagtcctcagtgtgtgtgtaagtgaagaggaccttgtggtagcagggaccatgcttcattcgtggctgtgtccccatctgagggcctggtatgcagtaagatcaataaatacttgtggaatgc

SEQ ID NO: 159315 - DNA, 1610 bp, Homo sapiens
  Payload ID: 11179
  Gene Symbol: NNMT
  Gene Name: nicotinamide N-methyltransferase
  Uniprot ID: P40261
  ENST ID: ENST00000299964
  CDS Start-End: 733-1527
gccagacactgggtcatggcagtggtcggtgaagctgcagttgcctagggcagggatggagagagagtctgggcatgaggagagggtctcgggatgtttggctggactagattttacagaaagccttatccaggcttttaaaattactctttccagacttcatctgagactccttcttcagccaacattccttagccctgaatacatttcctatcctcatctttcccttcttttttttcctttcttttacatgtttaaatttaaaccattcttcgtgaccccttttcttgggagattcatggcaagaacgagaagaatgatggtgcttgttaggggatgtcctgtctctctgaactttggggtcctatgcattaaataattttcctgacgagctcaagtgctccctctggtctacaatccctggcggctggccttcatcccttgggcaagcattgcatacagctcatggccctccctctaccataccctccacccccgttcgcctaagctcccttctccgggaatttcatcatttcctagaacagccagaacatttgtggtctatttctctgttagtgtttaaccaaccatctgttctaaaagaagggctgaactgatggaaggaatgctgttagcctgagactcaggaagacaacttctgcagggtcactccctggcttctggaggaaagagaaggagggcagtgctccagtggtacagaagtgagacataatggaatcaggcttcacctccaaggacacctatctaagccattttaaccctcgggattacctagaaaaatattacaagtttggttctaggcactctgcagaaagccagattcttaagcaccttctgaaaaatcttttcaagatattctgcctagacggtgtgaagggagacctgctgattgacatcggctctggccccactatctatcagctcctctctgcttgtgaatcctttaaggagatcgtcgtcactgactactcagaccagaacctgcaggagctggagaagtggctgaagaaagagccagaggcctttgactggtccccagtggtgacctatgtgtgtgatcttgaagggaacagagtcaagggtccagagaaggaggagaagttgagacaggcggtcaagcaggtgctgaagtgtgatgtgactcagagccagccactgggggccgtccccttacccccggctgactgcgtgctcagcacactgtgtctggatgccgcctgcccagacctccccacctactgcagggcgctcaggaacctcggcagcctactgaagccagggggcttcctggtgatcatggatgcgctcaagagcagctactacatgattggtgagcagaagttctccagcctccccctgggccgggaggcagtagaggctgctgtgaaagaggctggctacacaatcgaatggtttgaggtgatctcgcaaagttattcttccaccatggccaacaacgaaggacttttctccctggtggcgaggaagctgagcagacccctgtgatgcctgtgacctcaattaaagcaattcctttgacctgtccagttgactttagtccttgtttctaactgccaagtcatgtgctg

SEQ ID NO: 159316 - DNA, 1867 bp, Homo sapiens
  Payload ID: 11179
  Gene Symbol: NNMT
  Gene Name: nicotinamide N-methyltransferase
  Uniprot ID: P40261
  ENST ID: ENST00000535401
  CDS Start-End: 265-1059
taggcgctgtgctggggtcgcggcggcgcgggcgctgggggagaggagtgtggtcttcagcatagagtgagcttctagtgacacgagctggagggaaagaggaagtgcatcaggacggctcgtccaatggacaagaagggctgaactgatggaaggaatgctgttagcctgagactcaggaagacaacttctgcagggtcactccctggcttctggaggaaagagaaggagggcagtgctccagtggtacagaagtgagacataatggaatcaggcttcacctccaaggacacctatctaagccattttaaccctcgggattacctagaaaaatattacaagtttggttctaggcactctgcagaaagccagattcttaagcaccttctgaaaaatcttttcaagatattctgcctagacggtgtgaagggagacctgctgattgacatcggctctggccccactatctatcagctcctctctgcttgtgaatcctttaaggagatcgtcgtcactgactactcagaccagaacctgcaggagctggagaagtggctgaagaaagagccagaggcctttgactggtccccagtggtgacctatgtgtgtgatcttgaagggaacagagtcaagggtccagagaaggaggagaagttgagacaggcggtcaagcaggtgctgaagtgtgatgtgactcagagccagccactgggggccgtccccttacccccggctgactgcgtgctcagcacactgtgtctggatgccgcctgcccagacctccccacctactgcagggcgctcaggaacctcggcagcctactgaagccagggggcttcctggtgatcatggatgcgctcaagagcagctactacatgattggtgagcagaagttctccagcctccccctgggccgggaggcagtagaggctgctgtgaaagaggctggctacacaatcgaatggtttgaggtgatctcgcaaagttattcttccaccatggccaacaacgaaggacttttctccctggtggcgaggaagctgagcagacccctgtgatgcctgtgacctcaattaaagcaattcctttgacctgtccagttgactttagtccttgtttctaactgccaagtcatgtgctgagtagaggctcagtggttggggcccaatggttcatctaggacgggactagagaggtcagtctacaagcaatccattgaccacttacttggtgctgcacacaaatgttggtgctatgggacccaaagatgagcaattagtattccagtcttcattgcctgtgcttacaaaagaagacctcacttccctaaacatctagttatggcggctcaagcccgtacctgcctacagagaagtgtctgcagttactcactattagtttcctaagggggcactgctggctccttctctcccaggaatgggcttctcctattctttaactcttgccttctccctggagaggctaccaaaccctggcctctgccgctgttcaggctgccatgtgggtatagctgtttgctagactccactctggcctcaggggccagagaacagctgtccagcatttctgttcatcccagcaatccaaaaaaaaatttttttaagctacaaagatcactccattttcaaattcagactctgccacttattagctgtttctcattaggcaagttatataaccttgcagtgcctcactttcctcatctataaaatgagattaaaatagtctttttattaagagaattaaagtgaattgtggccaggcactgtggctcatgcctgtaatcccagcgctttgggaggctgaggcagacagattgcttgagctcagaagttcgagactggc

SEQ ID NO: 159317 - DNA, 3781 bp, Homo sapiens
  Payload ID: 11180
  Gene Symbol: NMNAT1
  Gene Name: nicotinamide nucleotide adenylyltransferase 1
  Uniprot ID: Q9HAN9
  ENST ID: ENST00000377205
  CDS Start-End: 145-984
gagagtgcgaccgagatgttccactcgctggcgtccgggccgctggtgatctccggtagcactcgggccggcggacagtgagggcgcgacaacaagggaggtgtcacagttttccatttagatcaacaacttcaagttcttaccatggaaaattccgagaagactgaagtggttctccttgcttgtggttcattcaatcccatcaccaacatgcacctcaggttgtttgagctggccaaggactacatgaatggaacaggaaggtacacagttgtcaaaggcatcatctctcctgttggtgatgcctacaagaagaaaggactcattcctgcctatcaccgggtcatcatggcagaacttgctaccaagaattctaaatgggtggaagttgatacatgggaaagtcttcagaaggagtggaaagagactctgaaggtgctaagacaccatcaagagaaattggaggctagtgactgtgatcaccagcagaactcacctactctagaaaggcctggaaggaagaggaagtggactgaaacacaagattctagtcaaaagaaatccctagagccaaaaacaaaagctgtgccaaaggtcaagctgctgtgtggggcagatttattggagtcctttgctgttcccaatttgtggaagagtgaagacatcacccaaatcgtggccaactatgggctcatatgtgttactcgggctggaaatgatgctcagaagtttatctatgaatcggatgtgctgtggaaacaccggagcaacattcacgtggtgaatgaatggatcgctaatgacatctcatccacaaaaatccggagagccctcagaaggggccagagcattcgctacttggtaccagatcttgtccaagaatacattgaaaagcataatttgtacagctctgagagtgaagacaggaatgctggggtcatcctggcccctttgcagagaaacactgcagaagctaagacataggaattctacagcatgatatttcagacttcccatttggggatctgaaacaatctgggagttaataactggggaaagaagttgtgatctgttgcctaaactaaagcttaaaagtttagtaaaaatcgtctgggcacagtggctcacgcctgtaatcccagcactttgggaggctgaggcaggtggatcacggggtcaagagatcgagaccatcctggccaatatggtgaaaccccatctctactaaaaatacaaaaattagctgtgtgtggtggcacgtgcctgtagtcccagctacttgggaggctgaggcaggagaatcacttgaccccaggtggtggaggttgcagtgagccaagattgcaccattgcactccagcctggcgacagagcaagactctgtctcaaaaaaaaaaaaaaatttagtaaaaatcaatggtaagctaaaataagtttttgtttgtttatttgtttttgagatggagtctctactaaaaatacaaaaaattagccaggcatggtgccgcataactataatcccagctacttgggaggctgaggcaggagaatcgcttgaacccgggaggcacaggttccagtgagccaaggttgtgccactgcactccagcctgggcaaaaaagcaaaactccatctcaaagagaaaaaaaaaaaagaccgggtgtggtggctcacacctgtaatcccagcactttgggaggcctaagtgggtggatcacgtgaggtcaagagttcaagaccagcctggccaatatggtgaaaccccatctctactaagaatacaaaaaattagctgagcatggtggtgggctcctgtagtcccagctacttgggaggctgaggcaggagaatcgcttgaacctgggaggcagaggttgcagtaagccaagatcgtgccattgcactccagcctgggtgacagagcgagactccatctcaaaaaaaaaaaaaagcctgacagctagcaggtttcaggatccatctgccaagttagtgaaaggctggagcctcaaatcatacagatgagggtcattttctcctccttagcttcttggagtttaagagttgaaggagtcctgaaaagtaatgatagagcaagatgaagctatcagaactgaatttggacttcctctgggaaactacacctagttcatctgaagtgtcacgtaaactgcagaaagtttccaatgctggaaacttctctcatactatcgtgccttcctactcagaagtgcctgtgccctgctcagctgtgactactgacctcaggacctcactggacaaggcatgtggggacccttgcaggagccctggtaagggtacaatgatcctattgttttttgtttttgagatggagtctcactctgtctcccaggctggagtgcagtggtgcgatctccgctcactgcaacctccgcctcccgggttcaagcaattctcctgcctcagcctgctgagtagctgggattacaggcacccactaccatgtccggctaattttgtatttttagtagagatggggtttcgccatgttagacaggctggtcttgaactcctgacctcaggtgatctgcccacctcggccttccaaagtgctgggattacaggcatgagccactgcacccagcctgatcctattgttgcactatttatggagcaacaactttgtacaaagaacaagctttgtacagagaacaagcttggctttttctcccaacgccgaggatgctgttgatgctgccacgtaatagcataattttgggtgtcctcaaggacagaacttccactttgaataatggaagttagaacaatgaatttcacaggggaataaatattaatgactgacgtgaagaaaatatgccattgtttattccctcctgcatcatttccataatttgcttttgtactgtcaatttagaggaaatgtgtgatgctggtgttttgtttggcctgtttgtttgatgctgggggttttatgtgttgtaccctttaccccttacattgtgtaatttgaaagtggcaaacaaacctgcagtaaaagtccttgattggcatcttcattcggatgatggagagcctttgtggtagtgtttgcttatgtgaacagcaggcctttcagataagagaagtggcttttccttggtgatgaaggggtagagattgagccatggggatggtttaggttaaagaatgcttttttttggccatcatgaggatctaacaacagagtagaaggaaggatgccctaggtcagcatgcagggtggtgggagggctttcatcttccttacccaagcctctcttttcacttttctagaagtccagaagttgttatatgatgaaatagcctcctttaacgtttatttctgggtgccaacggaggcccattcctctaacattctcataatttttctcaaaggcctatgatctaaacatttcaccacggcatccactcagctgtgaggctgcgtacacagtctccacctctgaaatctgaacttcgtttaccagtggtgctgtttgaacttcataatgtcagcacttcctgaacacttactgtgtgcttggcttgtgctcctgagtgccttatatcataaggaaacggcaaaatcaggggactggtataaatggtgagctgagcttgaatctaagctttgtcttcagagccagtacccctaatctctctttctgtaaaatattacttttcaaagaatgaagttgtagccaaatcttgaaatttttcatttaccctaagtgaggacaaataaagctttcaacaaca

SEQ ID NO: 159318 - DNA, 1094 bp, Homo sapiens
  Payload ID: 11180
  Gene Symbol: NMNAT1
  Gene Name: nicotinamide nucleotide adenylyltransferase 1
  ENST ID: ENST00000403197
  CDS Start-End: 145-627
gagagtgcgaccgagatgttccactcgctggcgtccgggccgctggtgatctccggtagcactcgggccggcggacagtgagggcgcgacaacaagggaggtgtcacagttttccatttagatcaacaacttcaagttcttaccatggaaaattccgagaagactgaagtggttctccttgcttgtggttcattcaatcccatcaccaacatgcacctcaggttgtttgagctggccaaggactacatgaatggaacaggaaggtacacagttgtcaaaggcatcatctctcctgttggtgatgcctacaagaagaaaggactcattcctgcctatcaccgggtcatcatggcagaacttgctaccaagaattctaaatgggtggaagttgatacatgggaaagtcttcagaaggagtggaaagagactctgaaggtgctaagacaccatcaagagaaattggaggctagtgactgtgatcaccagcagaactcacctactctagaaaggcctggaaggaagaggaagtggactgaaacacaagattctagtcaaaagaaatccctagagccaaaaacaaaagatggagtctcgctctatcacccaggctggagtgcagtggcatgatctcagctcactgcaagctctgcctcctgggttcatgccattctcctgcctcagcctcctgagcagctgggactacaggtgcctgccaccacgcctgtctaatttgtttgtatttttagtagagacggggttgcaccatgttagccaggatggtcttgatctcctgacctcatgatccgcccacctcggcctcccaaagtgctgggattacaggcgtgagccacagcgcctgggccttattttttttgttttatagagatggggtctcactattttggccaggttggtcttgaactcctggccccaagcagtcctcctgccttggcctcccaaagtgttaggattacaggtgtcagccactatgcctggcctttattttcattttatattgcatacttgtgggtgtctggaaaatgccccttgttagttgcatgaagtgaaggagaataaaaggcacttggagctta

SEQ ID NO: 159319 - DNA, 1818 bp, Homo sapiens
  Payload ID: 11180
  Gene Symbol: NMNAT1
  Gene Name: nicotinamide nucleotide adenylyltransferase 1
  Uniprot ID: Q9HAN9
  ENST ID: ENST00000462686
  CDS Start-End: 144-983
agagtgcgaccgagatgttccactcgctggcgtccgggccgctggtgatctccggtagcactcgggccggcggacagtgagggcgcgacaacaagggaggtgtcacagttttccatttagatcaacaacttcaagttcttaccatggaaaattccgagaagactgaagtggttctccttgcttgtggttcattcaatcccatcaccaacatgcacctcaggttgtttgagctggccaaggactacatgaatggaacaggaaggtacacagttgtcaaaggcatcatctctcctgttggtgatgcctacaagaagaaaggactcattcctgcctatcaccgggtcatcatggcagaacttgctaccaagaattctaaatgggtggaagttgatacatgggaaagtcttcagaaggagtggaaagagactctgaaggtgctaagacaccatcaagagaaattggaggctagtgactgtgatcaccagcagaactcacctactctagaaaggcctggaaggaagaggaagtggactgaaacacaagattctagtcaaaagaaatccctagagccaaaaacaaaagctgtgccaaaggtcaagctgctgtgtggggcagatttattggagtcctttgctgttcccaatttgtggaagagtgaagacatcacccaaatcgtggccaactatgggctcatatgtgttactcgggctggaaatgatgctcagaagtttatctatgaatcggatgtgctgtggaaacaccggagcaacattcacgtggtgaatgaatggatcgctaatgacatctcatccacaaaaatccggagagccctcagaaggggccagagcattcgctacttggtaccagatcttgtccaagaatacattgaaaagcataatttgtacagctctgagagtgaagacaggaatgctggggtcatcctggcccctttgcagagaaacactgcagaagctaagacataggaattctacagcatgatatttcagacttcccatttggggatctgaaacaatctgggagttaataactggggaaagaagttgtgatctgttgcctaaactaaagcttaaaagtttagtaaaaatcgtctgggcacagtggctcacgcctgtaatcccagcactttgggaggctgaggcaggagaatcacttgaccccaggtggtggaggttgcagtgagccaagattgcaccattgcactccagcctggcgacagagcaagactctgtctcaaaaaaaaaaaaaaatttagtaaaaatcaatggtaagctaaaataagtttttgtttgtttatttgtttttgagatggagtctctactaaaaatacaaaaaattagccaggcatggtgccgcataactataatcccagctacttgggaggctgaggcaggagaatcgcttgaacccgggaggcacaggttccagtgagccaaggttgtgccactgcactccagcctgggcaaaaaagcaaaactccatctcaaagagaaaaaaaaaaaagaccgggtgtggtggctcacacctgtaatcccagcactttgggaggcctaagtgggtggatcacgtgaggtcaagagttcaagaccagcctggccaatatggtgaaaccccatctctactaagaatacaaaaaattagctgagcatggtggtgggctcctgtagtcccagctacttgggaggctgaggcaggagaatcgcttgaacctgggaggcagaggttgcagtaagccaagatcgtgccattgcactccagcctgggtgacagagcgagactccatctcaaaaaaaaaaaaaa

SEQ ID NO: 159320 - DNA, 485 bp, Homo sapiens
  Payload ID: 11180
  Gene Symbol: NMNAT1
  Gene Name: nicotinamide nucleotide adenylyltransferase 1
  ENST ID: ENST00000496751
  CDS Start-End: 1-127
ggctagtgactgtgatcaccagcagaactcacctactctagaaaggcctggaaggaagaggaagtggactgaaacacaagattctagtcaaaagaaatccctagagccaaaaacaaaaggcctatgatctaaacatttcaccacggcatccactcagctgtgaggctgcgtacacagtctccacctctgaaatctgaacttcgtttaccagtggtgctgtttgaacttcataatgtcagcacttcctgaacacttactgtgtgcttggcttgtgctcctgagtgccttatatcataaggaaacggcaaaatcaggggactggtataaatggtgagctgagcttgaatctaagctttgtcttcagagccagtacccctaatctctctttctgtaaaatattacttttcaaagaatgaagttgtagccaaatcttgaaatttttcatttaccctaagtgaggacaaataaagctttcaacaacagtt

SEQ ID NO: 159321 - DNA, 5663 bp, Homo sapiens
  Payload ID: 11181
  Gene Symbol: NMNAT2
  Gene Name: nicotinamide nucleotide adenylyltransferase 2
  Uniprot ID: Q9BZQ4
  ENST ID: ENST00000287713
  CDS Start-End: 336-1259
ataaactctaaggaagacagtgatggagtgaagtgggctgggggcgatagagaggatggggtggggcaccaggcgagagatgcgaaggaagccagaacgaaaagagagcgaccgaggagagaagagagcagagcaatacaaaagcagcctcggatctagccggagctgcaagcgttaaggggaggcggagagtgacgcggtttgcgtctggagcggctccttggagtccacagcatccaccgccggagcctcgccttcctttctccctctgcagacacaacgagacacaaaaagagaggcaacccctagaccaccgcgaaggacccatctgcaccatgaccgagaccaccaagacccacgttatcttgctcgcctgcggcagcttcaatcccatcaccaaagggcacattcagatgtttgaaagagccagggattatctgcacaaaactggaaggtttattgtgattggcgggattgtctcccctgtccacgactcctatggaaaacagggcctcgtgtcaagccggcaccgtctcatcatgtgtcagctggccgtccagaattctgattggatcagggtggacccttgggagtgctaccaggacacctggcagacgacctgcagcgtgttggaacaccaccgggacctcatgaagagggtgactggctgcatcctctccaatgtcaacacaccttccatgacacctgtgatcggacagccacaaaacgagaccccccagcccatttaccagaacagcaacgtggccaccaagcccactgcagccaagatcttggggaaggtgggagaaagcctcagccggatctgctgtgtccgcccgccggtggagcgtttcacctttgtagatgagaatgccaatctgggcacggtgatgcggtatgaagagattgagctacggatcctgctgctgtgtggtagtgacctgctggagtccttctgcatcccagggctctggaacgaggcagatatggaggtgattgttggtgactttgggattgtggtggtgccccgggatgcagccgacacagaccgaatcatgaatcactcctcaatactccgcaaatacaaaaacaacatcatggtggtgaaggatgacatcaaccatcccatgtctgttgtcagctcaaccaagagcaggctggccctgcagcatggggacggccatgttgtggattacctgtcccagccggtcatcgactacatcctcaaaagccagctgtacatcaatgcctccggctagcagcccctcgtcctccggcaacacaatggcccctccatctttgtcagccccctgtttctctcctgcctctctgtttctccatctcctcgtcttgactgttttccctacttgctgacttaaccccccatagtgtgggggacctgcagagaaccatggcattccctattccacagtcatctttggacagactttcctctagtctccgggttgggggtgggtgagggaatggggtgggagtcgggggaagtgcagtccttggagatgtactggtgtccgtctcccagcatgctctagagaggcggctctggtgcccatcctcccagcacgctctggggaggcggctctggtgcccatcctcccagcatgctctagagaggcggctctggtgcccctcctcccagcatgctctggggaggcggctctggctcttgccttcccagcatgccctttactacaaagggctatttttcttttctttcttttgtttatttatttttctttgttcactccctgtagaacttggatgaaatcagtgtccatggttctttatgtttgtagtcttgatgtgctcctgtggtattacttcccctctgataggacattgtagccagcctcagcactcagtgagttcatcagggccacacccagtagagaaggccaagcaacctccacttcttcagcaccacacacacgcacacacacacacacgcacacatgcgtgtgcacccgcgcacgcacatacacacacacatatagcagtagcagcagcagcagcagcagcagcaacctttgatcaggagtgagattttcgggttctgaaacctgggacacgagtctgtgaatagtcggttttctcagaataatttgaatctgttttcttagtttcaaatgaccatttccctgatgctctgagcttatgatcacacagagccagtccatcctcatttcctggtggcatctgttcatttacctttgtggactgtagctgatggcacagtgcgggttccctaccagccaggggtttccaagggacctttggaggccatgcttagacacattcctgtacctgagaacaaccacataggcaggaccagatccacatcgtgcagtcgtgtcataaaaaaacaaaacaaaacaaaaaaacactaggagtccactcaaccctggaggtctttgctaattggaattatgtattgtctgttgggctgggaaatgtctctttcatattgtaagtccaggatgaactaggagaaagcaatttgttgccctgatgataactgatgattttcaccctctctagctgaggtaactcagacagtgcatgaggtcagtttcttcttgagaagcagtgccttggtcttgtttctgtggttggttctagcccctgcagagcctgggagctgcaggaactgtctgagaaaatctccctaataggggagtgggttcccagaagggagatctgggaggggtcaggagccactaagttgcttcactccttttttctctaattttctaccttcctctctgttcctgcagacagttttgccagctttgcttctggttactagggtctcatgcgtgtcctgcttggagagccataaggaaattgctgtcttgtgctttgtgtctctcatccagtctctggctcttgggattctggtctttgagaaatagtccctgagtattaggatacttttatcaaaatctagtaccagctacggccagaaagggccaggtgggacctgaaagcaaagacaatgttctttaccacacgtttcacatctgcaacatccttcaattgcgggaaaaggaacttgatttaacagaagaacatggtagagcagcatccagaaagtctgttattcctcttggattttttgaaataatcttcagaggaaggaaggaaaatcctattttggggtatcagtgtttgactagggatcatgaaataataaactgaaaaaaactttagagttcagttgatccaacactttcctttaaaagttgagggagcagaggcccatgggattaaatggctggtccaggtcagccagcaggtgtagggcctgacaagaacatattgtttccctgacccctaggccgtcacaccacaccctccatttcctcatgttgctgaccaggtgcccatatgatttctacacttcccaagccttaccctggcatctttcttttaaattatatctgtcccaggtgctctccacacataggatggtaatgccagtcccaggggagggtgtgatagtaaggaaggccactgttaggtttcctttagaaataaagagatctcagcagcttggaagaaatcccagaagcggactccatcaatccaagaaagagttgctttgtggaaggtgaaggaagacccacagagtgctcaggatgatgctattgctggagagcgaaagatggaacagccttgtccaggcagaacagtcataagccaggaaatgaaacaaaggaaaacaggtgcctgaatttcctggggaaacatggcttgtttaaggacttggagttatggatggaatttatgggacccacgtgagcagacctgaggaaggctcgatttcttttgtttcttggtccactctgtcactctgctctggtcaagccccatttggtctacagcccatgagaaggaatgaggctggttctgcactctcagcatgcagtccgaaagcatgtgggagtggggagggaaagtgagatgaattaagacaaagaacaggtgccatagaagtagatttctaggaatgaagtggggcagatcttatctttgtggattacaggcactgtactaaaaacaggtttcctatttaatataaaaagaaagtgaatcttcttttggatagaatcatccattcccatcgccgcaccccctaccccccaaacacacacacacacacacacacacacacacacacacacacacacacacacgccctactcttcatttgctaggggaaggtcacagcacaactaaatccaggacaggacattgtgaccatgacccagccacagtcaataccagaaagatgattcagagtctgaagtggtgccccaggtgccaacaggataacctctaccccccgactttgtctctggggtcctgttccttcctgcaaagcccaatccaagactggcatggctcagaggttgtgagaaaggcatggactggaacaatcatgtccagaggggtctggagctttgtttcctgttcaccagcaaaaaatgtctctcccatttttctgaaagtggctgatgtaagaacaggcagaaggaaaaccctttttgtcaataactctgtccttaaggaatggtcctctgggagggctgtgctgctagtgggtacctcagtcacacacccccaaccccaggcagcctctagagccttcttgctttcattttccttgaatgtacataggaacaagggggaaagtctcttactgaagtgcctgaaacccaaagctagagcttctagagacgccgttcttcctgtctcagcttggccagcctttcaacaatgttctctagtttcaagctccagcttctcagaaagaattaaagaacttgctgttcaaattaagtagaaagtgagactcaataataactgaactacagcaaaaggcagagaattacagggagaaaaaacttgtacttaccagcccaattctactctcctcaaactgacacacacacacacacacacacacacacacacacacacacactcttttaggggactaagagagagaagcatgttattacattttactcatccaaacagtaatgcaaaaataaaacggtagaatatgaaaagctcaggatctctcccaaggctacctactgcaggagggccaacaggtgagatgggaagaatggaaacagggaccgattttgtagctcatacaattaggacaccttaggaatagcattgtagtaatggtgatgaatatgctctgccaaattcatccagtctgcaccatcttatagctgcccagcacactcgactgttcatgtggtctctttgtagtgtgagtttggagtgtcctattagcctgttctggttaggaatgagttaacggctctttccctcaaccttagtctagtcccagggctgaggattcagctggatccacatggtcttgagggttggcatgaggagggggaagcttttttgaatcgctttttgatcacataatctgccattttaagagtaagatttgctttatggaaatcaattcattaataaaaaatgatattcaagttgcaataccatttcacagtgaaatattttgagtacaattttgttgctagaatagtcatgggcaagagttttatgcaaaatgtttcaattatgttaataaataagacaatgctacaaga

SEQ ID NO: 159322 - DNA, 5448 bp, Homo sapiens
  Payload ID: 11181
  Gene Symbol: NMNAT2
  Gene Name: nicotinamide nucleotide adenylyltransferase 2
  Uniprot ID: Q9BZQ4
  ENST ID: ENST00000294868
  CDS Start-End: 136-1044
ttcaaattctcccaagctggaggtagtggagcaaacaagatcagcaacaatgagggagcagctgcaccactttgtgttactctctgatggccagcacagggctgcaagtagtggctgcaaaaaccagacaaatagatggaaatccaggaactagaggaaattcaggcctgccaggggctctgggaagtgtttgttactctctcagaaagagccagggattatctgcacaaaactggaaggtttattgtgattggcgggattgtctcccctgtccacgactcctatggaaaacagggcctcgtgtcaagccggcaccgtctcatcatgtgtcagctggccgtccagaattctgattggatcagggtggacccttgggagtgctaccaggacacctggcagacgacctgcagcgtgttggaacaccaccgggacctcatgaagagggtgactggctgcatcctctccaatgtcaacacaccttccatgacacctgtgatcggacagccacaaaacgagaccccccagcccatttaccagaacagcaacgtggccaccaagcccactgcagccaagatcttggggaaggtgggagaaagcctcagccggatctgctgtgtccgcccgccggtggagcgtttcacctttgtagatgagaatgccaatctgggcacggtgatgcggtatgaagagattgagctacggatcctgctgctgtgtggtagtgacctgctggagtccttctgcatcccagggctctggaacgaggcagatatggaggtgattgttggtgactttgggattgtggtggtgccccgggatgcagccgacacagaccgaatcatgaatcactcctcaatactccgcaaatacaaaaacaacatcatggtggtgaaggatgacatcaaccatcccatgtctgttgtcagctcaaccaagagcaggctggccctgcagcatggggacggccatgttgtggattacctgtcccagccggtcatcgactacatcctcaaaagccagctgtacatcaatgcctccggctagcagcccctcgtcctccggcaacacaatggcccctccatctttgtcagccccctgtttctctcctgcctctctgtttctccatctcctcgtcttgactgttttccctacttgctgacttaaccccccatagtgtgggggacctgcagagaaccatggcattccctattccacagtcatctttggacagactttcctctagtctccgggttgggggtgggtgagggaatggggtgggagtcgggggaagtgcagtccttggagatgtactggtgtccgtctcccagcatgctctagagaggcggctctggtgcccatcctcccagcacgctctggggaggcggctctggtgcccatcctcccagcatgctctagagaggcggctctggtgcccctcctcccagcatgctctggggaggcggctctggctcttgccttcccagcatgccctttactacaaagggctatttttcttttctttcttttgtttatttatttttctttgttcactccctgtagaacttggatgaaatcagtgtccatggttctttatgtttgtagtcttgatgtgctcctgtggtattacttcccctctgataggacattgtagccagcctcagcactcagtgagttcatcagggccacacccagtagagaaggccaagcaacctccacttcttcagcaccacacacacgcacacacacacacacgcacacatgcgtgtgcacccgcgcacgcacatacacacacacatatagcagtagcagcagcagcagcagcagcagcaacctttgatcaggagtgagattttcgggttctgaaacctgggacacgagtctgtgaatagtcggttttctcagaataatttgaatctgttttcttagtttcaaatgaccatttccctgatgctctgagcttatgatcacacagagccagtccatcctcatttcctggtggcatctgttcatttacctttgtggactgtagctgatggcacagtgcgggttccctaccagccaggggtttccaagggacctttggaggccatgcttagacacattcctgtacctgagaacaaccacataggcaggaccagatccacatcgtgcagtcgtgtcataaaaaaacaaaacaaaacaaaaaaacactaggagtccactcaaccctggaggtctttgctaattggaattatgtattgtctgttgggctgggaaatgtctctttcatattgtaagtccaggatgaactaggagaaagcaatttgttgccctgatgataactgatgattttcaccctctctagctgaggtaactcagacagtgcatgaggtcagtttcttcttgagaagcagtgccttggtcttgtttctgtggttggttctagcccctgcagagcctgggagctgcaggaactgtctgagaaaatctccctaataggggagtgggttcccagaagggagatctgggaggggtcaggagccactaagttgcttcactccttttttctctaattttctaccttcctctctgttcctgcagacagttttgccagctttgcttctggttactagggtctcatgcgtgtcctgcttggagagccataaggaaattgctgtcttgtgctttgtgtctctcatccagtctctggctcttgggattctggtctttgagaaatagtccctgagtattaggatacttttatcaaaatctagtaccagctacggccagaaagggccaggtgggacctgaaagcaaagacaatgttctttaccacacgtttcacatctgcaacatccttcaattgcgggaaaaggaacttgatttaacagaagaacatggtagagcagcatccagaaagtctgttattcctcttggattttttgaaataatcttcagaggaaggaaggaaaatcctattttggggtatcagtgtttgactagggatcatgaaataataaactgaaaaaaactttagagttcagttgatccaacactttcctttaaaagttgagggagcagaggcccatgggattaaatggctggtccaggtcagccagcaggtgtagggcctgacaagaacatattgtttccctgacccctaggccgtcacaccacaccctccatttcctcatgttgctgaccaggtgcccatatgatttctacacttcccaagccttaccctggcatctttcttttaaattatatctgtcccaggtgctctccacacataggatggtaatgccagtcccaggggagggtgtgatagtaaggaaggccactgttaggtttcctttagaaataaagagatctcagcagcttggaagaaatcccagaagcggactccatcaatccaagaaagagttgctttgtggaaggtgaaggaagacccacagagtgctcaggatgatgctattgctggagagcgaaagatggaacagccttgtccaggcagaacagtcataagccaggaaatgaaacaaaggaaaacaggtgcctgaatttcctggggaaacatggcttgtttaaggacttggagttatggatggaatttatgggacccacgtgagcagacctgaggaaggctcgatttcttttgtttcttggtccactctgtcactctgctctggtcaagccccatttggtctacagcccatgagaaggaatgaggctggttctgcactctcagcatgcagtccgaaagcatgtgggagtggggagggaaagtgagatgaattaagacaaagaacaggtgccatagaagtagatttctaggaatgaagtggggcagatcttatctttgtggattacaggcactgtactaaaaacaggtttcctatttaatataaaaagaaagtgaatcttcttttggatagaatcatccattcccatcgccgcaccccctaccccccaaacacacacacacacacacacacacacacacacacacacacacacacacacgccctactcttcatttgctaggggaaggtcacagcacaactaaatccaggacaggacattgtgaccatgacccagccacagtcaataccagaaagatgattcagagtctgaagtggtgccccaggtgccaacaggataacctctaccccccgactttgtctctggggtcctgttccttcctgcaaagcccaatccaagactggcatggctcagaggttgtgagaaaggcatggactggaacaatcatgtccagaggggtctggagctttgtttcctgttcaccagcaaaaaatgtctctcccatttttctgaaagtggctgatgtaagaacaggcagaaggaaaaccctttttgtcaataactctgtccttaaggaatggtcctctgggagggctgtgctgctagtgggtacctcagtcacacacccccaaccccaggcagcctctagagccttcttgctttcattttccttgaatgtacataggaacaagggggaaagtctcttactgaagtgcctgaaacccaaagctagagcttctagagacgccgttcttcctgtctcagcttggccagcctttcaacaatgttctctagtttcaagctccagcttctcagaaagaattaaagaacttgctgttcaaattaagtagaaagtgagactcaataataactgaactacagcaaaaggcagagaattacagggagaaaaaacttgtacttaccagcccaattctactctcctcaaactgacacacacacacacacacacacacacacacacacacacacactcttttaggggactaagagagagaagcatgttattacattttactcatccaaacagtaatgcaaaaataaaacggtagaatatgaaaagctcaggatctctcccaaggctacctactgcaggagggccaacaggtgagatgggaagaatggaaacagggaccgattttgtagctcatacaattaggacaccttaggaatagcattgtagtaatggtgatgaatatgctctgccaaattcatccagtctgcaccatcttatagctgcccagcacactcgactgttcatgtggtctctttgtagtgtgagtttggagtgtcctattagcctgttctggttaggaatgagttaacggctctttccctcaaccttagtctagtcccagggctgaggattcagctggatccacatggtcttgagggttggcatgaggagggggaagcttttttgaatcgctttttgatcacataatctgccattttaagagtaagatttgctttatggaaatcaattcattaataaaaaatgatattcaagttgcaataccatttcacagtgaaatattttgagtacaattttgttgctagaatagtcatgggcaagagttttatgcaaaatgtttcaattatgttaataaataagacaatgctacaaga

SEQ ID NO: 159323 - DNA, 1569 bp, Homo sapiens
  Payload ID: 11182
  Gene Symbol: NMNAT3
  Gene Name: nicotinamide nucleotide adenylyltransferase 3
  Uniprot ID: Q96T66
  ENST ID: ENST00000296202
  CDS Start-End: 383-1141
gggagcgcaaggtcaagttcgccttggccccgcctccagctcaggtactaggggatctagacctgaggctgcccgggccggaggcagccttgagtcccgagaccaaacgtcgtttccctctcggacctcgggcgccgggccgcgcgctgaccgacagcccctgctaggcccagcaggtcccctagtcccccgcagtcccccgagactcgccgagcgccgttgctgagccctgcaaatagcagctacctgcttcagcctagatcctgccatgaagcggactgctgctccctggctcccactctgatctgcttttcactcttgccttgtctcccaattaataagcagggtggccactgcaacaggtgtggatgtgcctgacaagatgaagagccgaatacctgtggtgctcctggcctgtggctcctttaaccccatcaccaacatgcacctgcgcatgtttgaggtggccagagatcacctacaccaaacaggaatgtaccaggtcatccagggtatcatctctcctgtcaacgacacctatgggaagaaagacctcgcagcttctcatcaccgagtggccatggcccggctggccctgcagacatccgactggatccgggtggacccttgggagagtgagcaggcacagtggatggagacagtgaaggtgctgaggcatcatcacagcaaactgctcagatctccaccccagatggaaggcccagaccatggcaaggcactcttctcgacccctgcagctgtgcctgagctgaagcttctctgtggggcagacgtcttgaagaccttccagacccccaacctctggaaggatgcgcacatccaggaaatagtggagaagtttggcttggtgtgcgtgggccgagtaggtcacgacccaaaaggttacatcgcagaatctcccatcctacggatgcaccagcacaacattcacctggccaaggagcctgtgcagaatgagatcagtgccacatacatcaggcgagccttgggccaagggcagagcgtaaagtacctgattcccgatgctgtcatcacgtacatcaaggaccatggcctctacaccaagggcagtacctggaaaggcaaaagcacccagagcactgagggcaagacaagctagggaggggggactcagcacccacacctcctccaacaagctcctgctggggagagggctgttaaggtttctgttttactttggtttttgcttctccatttttcatttgctttatttctacagtgattctacttctgaggagtcttctgtcccaggaagagataccttctttacaggagaggaaaggtctaaatcacaaggatagacatttatcaaagaagttaaaatggtgtggcaggtcattaggattaggcagaatctctcagagctgctggacaaggaggtctacttattttgtgtggatggtaattatggcatgcacgctgaatgcagttctgagcatggcagcggcccctgagggtcagatcagaattgcccacaatgtgttttttaactaggaccaggtgcagcatgctagtcttgattggaaa

SEQ ID NO: 159324 - DNA, 1863 bp, Homo sapiens
  Payload ID: 11182
  Gene Symbol: NMNAT3
  Gene Name: nicotinamide nucleotide adenylyltransferase 3
  Uniprot ID: Q96T66
  ENST ID: ENST00000339837
  CDS Start-End: 397-1044
gggcggggcgcagatctgtttccctcagactccatctgcccggggccgctaagggagcgcaaggtcaagttcgccttggccccgcctccagctcaggtactaggggatctagacctgaggctgcccgggccggaggcagccttgagtcccgagaccaaacgtcgtttccctctcggacctcgggcgccgggccgcgcgctgaccgacagcccctgctaggcccagcaggtcccctagtcccccgcagtcccccgagactcgccgagcgccgttgctgagccctgcaaatagcagctacctgcttcagcctagatcctgccatgaagcggactgctgctccctggctcccactctgatctgcttttcactcttgccttgtctcccaattaataaggaatgtaccaggtcatccagggtatcatctctcctgtcaacgacacctatgggaagaaagacctcgcagcttctcatcaccgagtggccatggcccggctggccctgcagacatccgactggatccgggtggacccttgggagagtgagcaggcacagtggatggagacagtgaaggtgctgaggcatcatcacagcaaactgctcagatctccaccccagatggaaggcccagaccatggcaaggcactcttctcgacccctgcagctgtgcctgagctgaagcttctctgtggggcagacgtcttgaagaccttccagacccccaacctctggaaggatgcgcacatccaggaaatagtggagaagtttggcttggtgtgcgtgggccgagtaggtcacgacccaaaaggttacatcgcagaatctcccatcctacggatgcaccagcacaacattcacctggccaaggagcctgtgcagaatgagatcagtgccacatacatcaggcgagccttgggccaagggcagagcgtaaagtacctgattcccgatgctgtcatcacgtacatcaaggaccatggcctctacaccaagggcagtacctggaaaggcaaaagcacccagagcactgagggcaagacaagctagggaggggggactcagcacccacacctcctccaacaagctcctgctggggagagggctgttaaggtttctgttttactttggtttttgcttctccatttttcatttgctttatttctacagtgattctacttctgaggagtcttctgtcccaggaagagataccttctttacaggagaggaaaggtctaaatcacaaggatagacatttatcaaagaagttaaaatggtgtggcaggtcattaggattaggcagaatctctcagagctgctggacaaggaggtctacttattttgtgtggatggtaattatggcatgcacgctgaatgcagttctgagcatggcagcggcccctgagggtcagatcagaattgcccacaatgtgttttttaactaggaccaggtgcagcatgctagtcttgattggaaagatttgacaggatgctaattactgaacagtgggttttgtcaacgccctggtttcagaatatgaactgaggagtcaaacagttggaaacagcacattgctgatttacactggatcttgccttagaaaccattgtctgcctgcctaaccagcttttcataaaatttaaacaaaactctttctacgtagtgatcctcaagcaatatttttgatacagcaagtgtcaaacttgctatagcataaaagccggggctcctgatttccaggtttctaaaaaggaactgaggtaaaacagatgcctgaccgttttaaaggatcttttttaatgttttatgactgcctgtctgtttgaatactggcaaagggataaataataaattgacatcaaaaagta

SEQ ID NO: 159325 - DNA, 1223 bp, Homo sapiens
  Payload ID: 11182
  Gene Symbol: NMNAT3
  Gene Name: nicotinamide nucleotide adenylyltransferase 3
  Uniprot ID: Q96T66
  ENST ID: ENST00000406164
  CDS Start-End: 37-795
gtggccactgcaacaggtgtggatgtgcctgacaagatgaagagccgaatacctgtggtgctcctggcctgtggctcctttaaccccatcaccaacatgcacctgcgcatgtttgaggtggccagagatcacctacaccaaacaggaatgtaccaggtcatccagggtatcatctctcctgtcaacgacacctatgggaagaaagacctcgcagcttctcatcaccgagtggccatggcccggctggccctgcagacatccgactggatccgggtggacccttgggagagtgagcaggcacagtggatggagacagtgaaggtgctgaggcatcatcacagcaaactgctcagatctccaccccagatggaaggcccagaccatggcaaggcactcttctcgacccctgcagctgtgcctgagctgaagcttctctgtggggcagacgtcttgaagaccttccagacccccaacctctggaaggatgcgcacatccaggaaatagtggagaagtttggcttggtgtgcgtgggccgagtaggtcacgacccaaaaggttacatcgcagaatctcccatcctacggatgcaccagcacaacattcacctggccaaggagcctgtgcagaatgagatcagtgccacatacatcaggcgagccttgggccaagggcagagcgtaaagtacctgattcccgatgctgtcatcacgtacatcaaggaccatggcctctacaccaagggcagtacctggaaaggcaaaagcacccagagcactgagggcaagacaagctagggaggggggactcagcacccacacctcctccaacaagctcctgctggggagagggctgttaaggtttctgttttactttggtttttgcttctccatttttcatttgctttatttctacagtgattctacttctgaggagtcttctgtcccaggaagagataccttctttacaggagaggaaaggtctaaatcacaaggatagacatttatcaaagaagttaaaatggtgtggcaggtcattaggattaggcagaatctctcagagctgctggacaaggaggtctacttattttgtgtggatggtaattatggcatgcacgctgaatgcagttctgagcatggcagcggcccctgagggtcagatcagaattgcccacaatgtgttttttaactaggaccaggtgcagcatgctagtcttgattggaaa

SEQ ID NO: 159326 - DNA, 1711 bp, Homo sapiens
  Payload ID: 11182
  Gene Symbol: NMNAT3
  Gene Name: nicotinamide nucleotide adenylyltransferase 3
  Uniprot ID: Q96T66
  ENST ID: ENST00000413939
  CDS Start-End: 402-893
atctgcccggggccgctaagggagcgcaaggtcaagttcgccttggccccgcctccagctcaggtactaggggatctagacctgaggctgcccgggccggaggcagccttgagtcccgagaccaaacgtcgtttccctctcggacctcgggcgccgggccgcgcgctgaccgacagcccctgctaggcccagcaggtcccctagtcccccgcagtcccccgagactcgccgagcgccgttgctgagccctgcaaatagcagctacctgcttcagcctagatcctgccatgaagcggactgctgctccctggctcccactctgatctgcttttcactcttgccttgtctcccaattaataagcagggtggccactgcaacaggtgtggatgtgcctgacaagatgaagagccgaatacctgtggtgctcctggcctgtggctcctttaaccccatcaccaacatgcacctgcgcatgtttgaggtggccagagatcacctacaccaaacagctgtgcctgagctgaagcttctctgtggggcagacgtcttgaagaccttccagacccccaacctctggaaggatgcgcacatccaggaaatagtggagaagtttggcttggtgtgcgtgggccgagtaggtcacgacccaaaaggttacatcgcagaatctcccatcctacggatgcaccagcacaacattcacctggccaaggagcctgtgcagaatgagatcagtgccacatacatcaggcgagccttgggccaagggcagagcgtaaagtacctgattcccgatgctgtcatcacgtacatcaaggaccatggcctctacaccaagggcagtacctggaaaggcaaaagcacccagagcactgagggcaagacaagctagggaggggggactcagcacccacacctcctccaacaagctcctgctggggagagggctgttaaggtttctgttttactttggtttttgcttctccatttttcatttgctttatttctacagtgattctacttctgaggagtcttctgtcccaggaagagataccttctttacaggagaggaaaggtctaaatcacaaggatagacatttatcaaagaagttaaaatggtgtggcaggtcattaggattaggcagaatctctcagagctgctggacaaggaggtctacttattttgtgtggatggtaattatggcatgcacgctgaatgcagttctgagcatggcagcggcccctgagggtcagatcagaattgcccacaatgtgttttttaactaggaccaggtgcagcatgctagtcttgattggaaagatttgacaggatgctaattactgaacagtgggttttgtcaacgccctggtttcagaatatgaactgaggagtcaaacagttggaaacagcacattgctgatttacactggatcttgccttagaaaccattgtctgcctgcctaaccagcttttcataaaatttaaacaaaactctttctacgtagtgatcctcaagcaatatttttgatacagcaagtgtcaaacttgctatagcataaaagccggggctcctgatttccaggtttctaaaaaggaactgaggtaaaacagatgcctgaccgttttaaaggatcttttttaatgttttatgactgcctgtctgtttgaatactggcaaagggataaataataaattgacatcaaaaagt

SEQ ID NO: 159327 - DNA, 2454 bp, Homo sapiens
  Payload ID: 11182
  Gene Symbol: NMNAT3
  Gene Name: nicotinamide nucleotide adenylyltransferase 3
  ENST ID: ENST00000506254
  CDS Start-End: 454-750
agggcccgccccagcgaaggggcggggcgcagatctgtttccctcagactccatctgcccggggccgctaagggagcgcaaggtcaagttcgccttggccccgcctccagctcaggtactaggggatctagacctgaggctgcccgggccggaggcagccttgagtcccgagaccaaacgtcgtttccctctcggacctcgggcgccgggccgcgcgctgaccgacagcccctgctaggcccagcaggtcccctagtcccccgcagtcccccgagactcgccgagcgccgttgctgagccctgcaaatagcagctacctgcttcagcctagatcctgccatgaagcggactgctgctccctggctcccactctgatctgcttttcactcttgccttgtctcccaattaataagcagggtggccactgcaacaggtgtggatgtgcctgacaagatgaagagccgaatacctgtggtgctcctggcctgtggctcctttaaccccatcaccaacatgcacctgcgcatgtttgaggtggccagagatcacctacaccaaacaggaatgtaccaggtcatccagggtatcatctctcctgtcaacgacacctatgggaagaaagacctcgcagcttctcatcaccgagtggccatggcccggctggccctgcagacatccgactggatccgggtggacccttgggagagtgagcaggcacagtggatggagacagtgaaggtgctgagataaagaaactgaggctcagagaggctacgttaatcacggtcacacacaaataggacgtggagctcccatctgtggagctctgaagccatgcttatggccatcttcaaaacagggatctgcaggctgggaacatgatgtggctggctttacacctcccacagttgccctccaatctttcctgaagaccagtgggactgctgaggacaccaagaacatgcccccagggtcaatccacaggcccaaggtaccactcaggcaggcagcaagaagcagttaatggtcatgccccatagaggcgcagtggaagtccctggcaaatgcatgttgtattggaagtaattatttccacaacaaagttcagagatccagctaatattcaaagtagggtcaacctgaactaggaccttcaaggcatcatcacagcaaactgctcagatctccaccccagatggaaggcccagaccatggcaaggcactcttctcgacccctgcagctgtgcctgagctgaagcttctctgtggggcagacgtcttgaagaccttccagacccccaacctctggaaggatgcgcacatccaggaaatagtggagaagtttggcttggtgtgcgtgggccgagtaggtcacgacccaaaaggttacatcgcagaatctcccatcctacggatgcaccagcacaacattcacctggccaaggagcctgtgcagaatgagatcagtgccacatacatcaggcgagccttgggccaagggcagagcgtaaagtacctgattcccgatgctgtcatcacgtacatcaaggaccatggcctctacaccaagggcagtacctggaaaggcaaaagcacccagagcactgagggcaagacaagctagggaggggggactcagcacccacacctcctccaacaagctcctgctggggagagggctgttaaggtttctgttttactttggtttttgcttctccatttttcatttgctttatttctacagtgattctacttctgaggagtcttctgtcccaggaagagataccttctttacaggagaggaaaggtctaaatcacaaggatagacatttatcaaagaagttaaaatggtgtggcaggtcattaggattaggcagaatctctcagagctgctggacaaggaggtctacttattttgtgtggatggtaattatggcatgcacgctgaatgcagttctgagcatggcagcggcccctgagggtcagatcagaattgcccacaatgtgttttttaactaggaccaggtgcagcatgctagtcttgattggaaagatttgacaggatgctaattactgaacagtgggttttgtcaacgccctggtttcagaatatgaactgaggagtcaaacagttggaaacagcacattgctgatttacactggatcttgccttagaaaccattgtctgcctgcctaaccagcttttcataaaatttaaacaaaactctttctacgtagtgatcctcaagcaatatttttgatacagcaagtgtcaaacttgctatagcataaaagccggggctcctgatttccaggtttctaaaaaggaactgaggtaaaacagatgcctgaccgttttaaaggatcttttttaatgttttatgactgcctgtctgtttgaatactggcaaagggataaataataaattgacatcaaaaagtactaatgaaaaa

SEQ ID NO: 159328 - DNA, 873 bp, Homo sapiens
  Payload ID: 11182
  Gene Symbol: NMNAT3
  Gene Name: nicotinamide nucleotide adenylyltransferase 3
  ENST ID: ENST00000511444
  CDS Start-End: 141-332
actcgccgagcgccgttgctgagccctgcaaatagcagctacctgcttcagcctagatcctgccatgaagcggactgctgctccctggctcccactctgatctgcttttcactcttgccttgtctcccaattaataaggaatgtaccaggtcatccagggtatcatctctcctgtcaacgacacctatgggaagaaagacctcgcagcttctcatcaccgagtggccatggcccggctggccctgcagacatccgactggatccgggtggacccttgggagagtgagcaggcacagtggatggagacagtgaaggtgctgagctgtgcctgagctgaagcttctctgtggggcagacgtcttgaagaccttccagacccccaacctctggaaggatgcgcacatccaggaaatagtggagaagtttggcttggtgtgcgtgggccgagtaggtcacgacccaaaaggttacatcgcagaatctcccatcctacggatgcaccagcacaacattcacctggccaaggagcctgtgcagaatgagatcagtgccacatacatcaggcgagccttgggccaagggcagagcgtaaagtacctgattcccgatgctgtcatcacgtacatcaaggaccatggcctctacaccaagggcagtacctggaaaggcaaaagcacccagagcactgagggcaagacaagctagggaggggggactcagcacccacacctcctccaacaagctcctgctggggagagggctgttaaggtttctgttttactttggtttttgcttctccatttttcatttgctttatttctacagtgattctacttctgaggagtcttctgtcccaggaagagataccttctt

SEQ ID NO: 159329 - DNA, 794 bp, Homo sapiens
  Payload ID: 11182
  Gene Symbol: NMNAT3
  Gene Name: nicotinamide nucleotide adenylyltransferase 3
  ENST ID: ENST00000512391
  CDS Start-End: 442-744
agcgaaggggcggggcgcagatctgtttccctcagactccatctgcccggggccgctaagggagcgcaaggtcaagttcgccttggccccgcctccagctcaggtactaggggatctagacctgaggctgcccgggccggaggcagccttgagtcccgagaccaaacgtcgtttccctctcggacctcgggcgccgggccgcgcgctgaccgacagcccctgctaggcccagcaggtcccctagtcccccgcagtcccccgagactcgccgagcgccgttgctgagccctgcaaatagcagctacctgcttcagcctagatcctgccatgaagcggactgctgctccctggctcccactctgatctgcttttcactcttgccttgtctcccaattaataagcagggtggccactgcaacaggtgtggatgtgcctgacaagatgaagagccgaatacctgtggtgctcctggcctgtggctcctttaaccccatcaccaacatgcacctgcgcatgtttgaggtggccagagatcacctacaccaaacaggaatgtaccaggtcatccagggtatcatctctcctgtcaacgacacctatgggaagaaagacctcgcagcttctcatcaccgagtggccatggcccggctggccctgcagacatccgactggatccgggtggacccttgggagagtgagcaggcacagtggatggagacagtgaaggtgctgagctgtgcctgagctgaagcttctctgtggggcagacgtcttgaagaccttccagaccccca

SEQ ID NO: 159330 - DNA, 584 bp, Homo sapiens
  Payload ID: 11182
  Gene Symbol: NMNAT3
  Gene Name: nicotinamide nucleotide adenylyltransferase 3
  ENST ID: ENST00000514703
  CDS Start-End: 155-451
cctgcaaatagcagctacctgcttcagcctagatcctgccatgaagcggactgctgctccctggctcccactctgatctgcttttcactcttgccttgtctcccaattaataagcagggtggccactgcaacaggtgtggatgtgcctgacaagatgaagagccgaatacctgtggtgctcctggcctgtggctcctttaaccccatcaccaacatgcacctgcgcatgtttgaggtggccagagatcacctacaccaaacagatttttgtctttcaaggcctttgtttcccagggtgcacttcagccaacacaaccaagggaagaagaaaatgggcaaaagtgtgcatgaggtggtaggggccagactgtgcttgtgcccacagaaacaccaagcttctcccagcaaaagccccagaactgaagtctgcaaaagggaagaggcaaattagtaatcattctgtgctacagagcagccacgtctgagcattacctaatgcttttctcaattgttttgacacatgtagttttgttttaaatatgtatggtaatttttaataaaatgctgataagtgtgccaagcca

SEQ ID NO: 159331 - DNA, 763 bp, Homo sapiens
  Payload ID: 11182
  Gene Symbol: NMNAT3
  Gene Name: nicotinamide nucleotide adenylyltransferase 3
  ENST ID: ENST00000509291
  CDS Start-End: 423-763
cgctaagggagcgcaaggtcaagttcgccttggccccgcctccagctcaggtactaggggatctagacctgaggctgcccgggccggaggcagccttgagtcccgagaccaaacgtcgtttccctctcggacctcgggcgccgggccgcgcgctgaccgacagcccctgctaggcccagcaggtcccctagtcccccgcagtcccccgagactcgccgagcgccgttgctgagccctgcaaatagcagctacctgcttcagcctagatcctgccatgaagcggactgctgctccctggctcccactctgatctgcttttcactcttgccttgtctcccaattaataaggggtggctggcagaggatccttacaccgacaaggaagggtggccactgcaacaggtgtggatgtgcctgacaagatgaagagccgaatacctgtggtgctcctggcctgtggctcctttaaccccatcaccaacatgcacctgcgcatgtttgaggtggccagagatcacctacaccaaacaggaatgtaccaggtcatccagggtatcatctctcctgtcaacgacacctatgggaagaaagacctcgcagcttctcatcaccgagtggccatggcccggctggccctgcagacatccgactggatccgggtggacccttgggagagtgagcaggcacagtggatggagacagtgaaggtgctgaggcatcatcacagcaaactgctcagatctccaccccagatggaaggccc

SEQ ID NO: 159332 - DNA, 6483 bp, Homo sapiens
  Payload ID: 11183
  Gene Symbol: NNT
  Gene Name: nicotinamide nucleotide transhydrogenase
  Uniprot ID: Q13423
  ENST ID: ENST00000264663
  CDS Start-End: 222-3482
gatttttcctagcgagctggaggaaaggcaggtacccggagtggagttatattacctgtttctttgttctgatgggaccccagagaggacatcacgctttgtaactggttcttcaaggggagaagcaaatgtgtccctgaaaacttcagctgccgcgtttggcaccagtgatttgccttcaaggaaactggggagtcagaaaattgggaactcatatcaacatggcaaacctattgaaaacagtggtgactggctgctcgtgtcctctacttagcaatttggggtcctgtaagggtctacgtgtgaagaaggattttttacgaacattttatactcaccaagaactgtggtgtaaagcgcctgtaaaaccaggaattccatataagcaactgactgttggagtccccaaagagatattccaaaatgagaagcgagtggcattgtctcctgctggtgttcagaacttggtcaagcagggttttaatgttgtcgtggaatcgggtgcgggcgaagcttccaagttctcagatgatcactatagagtggcaggtgcccaaatccaaggggcaaaggaagtgctggcttctgatttggtggtcaaagtgcgagcccctatggttaatccaacattaggtgttcatgaagctgaccttttaaagacatcaggaacgctgattagttttatttacccagcccaaaatccagagttgctaaataaactttcccaaagaaaaactacagttctggcaatggaccaggttccaagagtcacaattgctcagggatatgatgcgctaagctccatggccaacattgcgggttataaggctgttgtcctagcagcaaatcattttggacgtttttttactggtcagatcacagctgctggaaaagttcctccagctaagattctgatagttggtggtggtgttgctgggcttgcttctgcaggcgcagcaaagtcgatgggtgcaattgttcgaggatttgacacaagagctgcagctttggaacagttcaagtctcttggtgctgagcccttggaggtggacttgaaggaatctggtgagggacaaggaggatatgcaaaagagatgtccaaagagttcattgaagctgaaatgaaactctttgctcaacaatgcaaggaggtagacatccttatcagcacagcacttattccaggtaaaaaagctccagttttatttaataaagaaatgattgagtcaatgaaggaaggttcagttgttgtggatttagctgctgaggctggtggaaactttgaaaccactaagccaggagaactctacattcataagggaattactcacataggctacacagacctgcccagccgaatggccactcaggccagcaccctatattccaacaacatcaccaaactcctgaaggccatcagcccggacaaagataatttttattttgatgtgaaagatgactttgactttggtacgatgggtcatgtcattagaggaactgtagtgatgaaagatggtaaagtgattttcccagctcccacaccgaaaaatattcctcaaggtgccccagtaaaacagaagacagtggctgagctggaagctgaaaaagcagctaccattacacccttcaggaagacaatgtcaacggcttctgcatatacagcaggtctcacagggatactgggtttgggcattgcggctcccaatctagccttttctcagatggtgaccacttttggcttggctggcattgtggggtatcataccgtctggggagtgacccctgctctccactcaccactgatgtctgtgacaaatgcaatctcagggctgactgcagttggtgggttggcactgatgggaggacatttgtatccttccacaacttctcagggccttgctgctcttgctgcattcatatcctctgtcaacattgcaggtggctttctggtgactcagagaatgctggacatgttcaagcgtcccactgaccccccagaatacaactacctgtacctgctccctgccggcacctttgttggtggatatttagctgccctctacagtggttataacattgaacagatcatgtacctaggctcgggtttgtgctgtgtcggtgccttggctggcctctccacccagggaacagcacgtcttggcaatgcactgggcatgattggggttgctggaggactggcagccaccctcggagtcctaaaaccgggcccagaattactagctcagatgtctggagcgatggctttgggtggtaccattggattgacaattgccaaacgcatccagatttctgatttacctcaattagttgctgcttttcacagtttagtgggtttggcagctgtacttacttgcatagctgagtacattatagaatatccacattttgctacggatgcagcagcaaatctcaccaagattgtggcctacctcggcacttacattggtggcgtcacctttagtgggtctctcattgcctatggaaaattgcagggtctcctgaaatctgcccctctcctactgcctggaaggcacttactcaatgcaggcttactggctgctagtgtgggcgggataatcccattcatggtggacccaagctttactactggcatcacctgtctgggttcagtgtctgctctctctgctgtcatgggtgtgactttgacagctgctattgggggtgctgacatgcccgtcgttatcactgtgctgaacagctactcaggctgggccctgtgtgcagagggcttcctgctcaacaacaatctgctgaccatcgtgggtgcactcataggctcgtctggtgctatcctgtcatacatcatgtgtgtggcaatgaatcgctccctggctaatgtgattcttggaggctatggcaccacttcaacagctggtggaaaacccatggaaatttctggcacacatacggaaatcaaccttgacaatgcaattgacatgattcgagaagctaatagcattattattacaccaggctatggtctctgtgcagccaaagctcaataccccattgctgatttggtaaagatgctcactgagcaaggcaaaaaagtcaggtttggaattcacccagttgcaggccgaatgcctggtcagcttaatgtgctgctggctgaggctggtgtgccatatgacattgtgttggaaatggatgagatcaaccatgattttccagatactgatttggtccttgtaattggagctaatgacactgttaattcagcagctcaagaagatcccaactctattattgcaggcatgccagtccttgaggtctggaaatcaaagcaggtgattgttatgaagaggtctttgggtgttggctatgctgcagtggacaatccaatcttctacaaacctaacacggccatgcttctaggtgatgccaagaaaacatgtgacgcgctccaggcgaaagttagagaatcctatcagaagtaaatattaaggatcaagctgttagctaataatgccacctctgcagttttgggaacaggcaaataaagtatcagtatacatggtgatgtacatctgtagcaaagctcttggagaaaatgaagactgaagaaagcaaagcaaaaactgtatagagagatttttcaaaagcagtaatccctcaattttaaaaaaggattgaaaattctaaatgtctttctgtgcatattttttgtgttaggaatcaaaagtattttataaaaggagaaagaacagcctcattttagatgtagtcctgttggattttttatgcctcctcagtaaccagaaatgttttaaaaaactaagtgtttaggatttcaagacaacattatacatggctctgaaatatctgacacaatgtaaacattgcaggcacctgcattttatgttttttttttcaacaaatgtgactaatttgaaacttttatgaacttctgagctgtccccttgcaattcaaccgcagtttgaattaatcatatcaaatcagttttaattttttaaattgtacttcagagtctatatttcaagggcacattttctcactactattttaatacattaaaggactaaataatctttcagagatgctggaaacaaatcatttgctttatatgtttcattagaataccaatgaaacatacaacttgaaaattagtaatagtatttttgaagatcccatttctaattggagatctctttaatttcgatcaacttataatgtgtagtactatattaagtgcacttgagtggaattcaacatttgactaataaaatgagttcatcatgttggcaagtgatgtggcaattatctctggtgacaaaagagtaaaatcaaatatttctgcctgttacaaatatcaaggaagacctgctactatgaaatagatgacattaatctgtcttcactgtttataatacggatggattttttttcaaatcagtgtgtgttttgaggtcttatgtaattgatgacatttgagagaaatggtggctttttttagctacctctttgttcatttaagcaccagtaaagatcatgtctttttatagaagtgtagattttctttgtgactttgctatcgtgcctaaagctctaaatataggtgaatgtgtgatgaatactcagattatttgtctctctatataattagtttggtactaagtttctcaaaaaattattaacacatgaaagacaatctctaaaccagaaaaagaagtagtacaaattttgttactgtaatgctcgcgtttagtgagtttaaaacacacagtatcttttggttttataatcagtttctattttgctgtgcctgagattaagatctgtgtatgtgtgtgtgtgtgtgtgtgcgtttgtgtgttaaagcagaaaagacttttttaaaagttttaagtgataaatgcaatttgttaattgatcttagatcactagtaaactcagggctgaattataccatgtatattctattagaagaaagtaaacaccatctttattcctgccctttttcttctctcaaagtagttgtagttatatctagaaagaagcaattttgatttcttgaaaaggtagttcctgcactcagtttaaactaaaaataatcatacttggattttatttatttttgtcatagtaaaaattttaatttatatatatttttatttagtattatcttattctttgctatttgccaatcctttgtcatcaattgtgttaaatgaattgaaaattcatgccctgttcattttattttactttattggttaggatatttaaaggatttttgtatatataatttcttaaattaatattccaaaaggttagtggacttagattataaattatggcaaaaatctaaaaacaacaaaaatgatttttatacattctatttcattattcctctttttccaataagtcatacaattggtagatatgacttattttatttttgtattattcactatatctttatgatatttaagtataaataattaaaaaaatttattgtaccttatagtctgtcaccaaaaaaaaaaaattatctgtaggtagtgaaatgctaatgttgatttgtctttaagggcttgttaactatcctttattttctcatttgtcttaaattaggagtttgtgtttaaattactcatctaagcaaaaaatgtatataaatcccattactgggtatatacccaaaggattataaatcatgctgctataaagacacatgcacacgtatgtttattgcagcactattcacaatagcaaagacttggaaccaacccaaatgtccatcaatgatagacttgattaagaaaatgtgcacatatacaccatggaatactatgcagccataaaaaaggatgagttcatgtcctttgtagggacatggataaagctggaaaccatcattctgagcaaactattgcaaggacagaaaaccaaacactgcatgttctcactcataggtgggaattgaacaatgagaacacttggacacaaggtggggaacaccacacaccagggcctgtcatggggtggggggagtggggagggatagcattaggagatatacctaatgtaaatgatgagttaatgggtgcagcacaccaacatggcacatgtatacatatgtagcaaacctgcacgttgtgcacatgtaccctagaacttaaagtataattaaaaaaaaaaagaaaacagaagctatttataaagaagttatttgctgaaataaatgtgatctttcccattaaaaaaataaagaaattttggggtaaaaaaacacaatatattgtattcttgaaaaattctaagagagtggatgtgaagtgttctcaccacaaaagtgataactaattgaggtaatgcacatattaattagaaagattttgtcattccacaatgtatatatacttaaaaatatgttatacacaataaatacatacattaaaaaataagtaaatgta

SEQ ID NO: 159333 - DNA, 4310 bp, Homo sapiens
  Payload ID: 11183
  Gene Symbol: NNT
  Gene Name: nicotinamide nucleotide transhydrogenase
  Uniprot ID: Q13423
  ENST ID: ENST00000344920
  CDS Start-End: 222-3482
cgaggtgggagcggagctgcagtcacgtggccgcccgccgccgcggagttggggctgttcttccgggttggaggcgcagcgccgcggggcccaagcccgggtctgccagcgcgacgtcctctcgcggccctcagggcacagcccaaggctgtcagcctcccggcccagtgatttgccttcaaggaaactggggagtcagaaaattgggaactcatatcaacatggcaaacctattgaaaacagtggtgactggctgctcgtgtcctctacttagcaatttggggtcctgtaagggtctacgtgtgaagaaggattttttacgaacattttatactcaccaagaactgtggtgtaaagcgcctgtaaaaccaggaattccatataagcaactgactgttggagtccccaaagagatattccaaaatgagaagcgagtggcattgtctcctgctggtgttcagaacttggtcaagcagggttttaatgttgtcgtggaatcgggtgcgggcgaagcttccaagttctcagatgatcactatagagtggcaggtgcccaaatccaaggggcaaaggaagtgctggcttctgatttggtggtcaaagtgcgagcccctatggttaatccaacattaggtgttcatgaagctgaccttttaaagacatcaggaacgctgattagttttatttacccagcccaaaatccagagttgctaaataaactttcccaaagaaaaactacagttctggcaatggaccaggttccaagagtcacaattgctcagggatatgatgcgctaagctccatggccaacattgcgggttataaggctgttgtcctagcagcaaatcattttggacgtttttttactggtcagatcacagctgctggaaaagttcctccagctaagattctgatagttggtggtggtgttgctgggcttgcttctgcaggcgcagcaaagtcgatgggtgcaattgttcgaggatttgacacaagagctgcagctttggaacagttcaagtctcttggtgctgagcccttggaggtggacttgaaggaatctggtgagggacaaggaggatatgcaaaagagatgtccaaagagttcattgaagctgaaatgaaactctttgctcaacaatgcaaggaggtagacatccttatcagcacagcacttattccaggtaaaaaagctccagttttatttaataaagaaatgattgagtcaatgaaggaaggttcagttgttgtggatttagctgctgaggctggtggaaactttgaaaccactaagccaggagaactctacattcataagggaattactcacataggctacacagacctgcccagccgaatggccactcaggccagcaccctatattccaacaacatcaccaaactcctgaaggccatcagcccggacaaagataatttttattttgatgtgaaagatgactttgactttggtacgatgggtcatgtcattagaggaactgtagtgatgaaagatggtaaagtgattttcccagctcccacaccgaaaaatattcctcaaggtgccccagtaaaacagaagacagtggctgagctggaagctgaaaaagcagctaccattacacccttcaggaagacaatgtcaacggcttctgcatatacagcaggtctcacagggatactgggtttgggcattgcggctcccaatctagccttttctcagatggtgaccacttttggcttggctggcattgtggggtatcataccgtctggggagtgacccctgctctccactcaccactgatgtctgtgacaaatgcaatctcagggctgactgcagttggtgggttggcactgatgggaggacatttgtatccttccacaacttctcagggccttgctgctcttgctgcattcatatcctctgtcaacattgcaggtggctttctggtgactcagagaatgctggacatgttcaagcgtcccactgaccccccagaatacaactacctgtacctgctccctgccggcacctttgttggtggatatttagctgccctctacagtggttataacattgaacagatcatgtacctaggctcgggtttgtgctgtgtcggtgccttggctggcctctccacccagggaacagcacgtcttggcaatgcactgggcatgattggggttgctggaggactggcagccaccctcggagtcctaaaaccgggcccagaattactagctcagatgtctggagcgatggctttgggtggtaccattggattgacaattgccaaacgcatccagatttctgatttacctcaattagttgctgcttttcacagtttagtgggtttggcagctgtacttacttgcatagctgagtacattatagaatatccacattttgctacggatgcagcagcaaatctcaccaagattgtggcctacctcggcacttacattggtggcgtcacctttagtgggtctctcattgcctatggaaaattgcagggtctcctgaaatctgcccctctcctactgcctggaaggcacttactcaatgcaggcttactggctgctagtgtgggcgggataatcccattcatggtggacccaagctttactactggcatcacctgtctgggttcagtgtctgctctctctgctgtcatgggtgtgactttgacagctgctattgggggtgctgacatgcccgtcgttatcactgtgctgaacagctactcaggctgggccctgtgtgcagagggcttcctgctcaacaacaatctgctgaccatcgtgggtgcactcataggctcgtctggtgctatcctgtcatacatcatgtgtgtggcaatgaatcgctccctggctaatgtgattcttggaggctatggcaccacttcaacagctggtggaaaacccatggaaatttctggcacacatacggaaatcaaccttgacaatgcaattgacatgattcgagaagctaatagcattattattacaccaggctatggtctctgtgcagccaaagctcaataccccattgctgatttggtaaagatgctcactgagcaaggcaaaaaagtcaggtttggaattcacccagttgcaggccgaatgcctggtcagcttaatgtgctgctggctgaggctggtgtgccatatgacattgtgttggaaatggatgagatcaaccatgattttccagatactgatttggtccttgtaattggagctaatgacactgttaattcagcagctcaagaagatcccaactctattattgcaggcatgccagtccttgaggtctggaaatcaaagcaggtgattgttatgaagaggtctttgggtgttggctatgctgcagtggacaatccaatcttctacaaacctaacacggccatgcttctaggtgatgccaagaaaacatgtgacgcgctccaggcgaaagttagagaatcctatcagaagtaaatattaaggatcaagctgttagctaataatgccacctctgcagttttgggaacaggcaaataaagtatcagtatacatggtgatgtacatctgtagcaaagctcttggagaaaatgaagactgaagaaagcaaagcaaaaactgtatagagagatttttcaaaagcagtaatccctcaattttaaaaaaggattgaaaattctaaatgtctttctgtgcatattttttgtgttaggaatcaaaagtattttataaaaggagaaagaacagcctcattttagatgtagtcctgttggattttttatgcctcctcagtaaccagaaatgttttaaaaaactaagtgtttaggatttcaagacaacattatacatggctctgaaatatctgacacaatgtaaacattgcaggcacctgcattttatgttttttttttcaacaaatgtgactaatttgaaacttttatgaacttctgagctgtccccttgcaattcaaccgcagtttgaattaatcatatcaaatcagttttaattttttaaattgtacttcagagtctatatttcaagggcacattttctcactactattttaatacattaaaggactaaataatctttcagagatgctggaaacaaatcatttgctttatatgtttcattagaataccaatgaaacatacaacttgaaaattagtaatagtatttttgaagatcccatttctaattggagatctctttaatttcgatcaacttataatgtgtagtactatattaagtgcacttgagtggaattcaacatttgactaataaaatgagttcatcatgttggc

SEQ ID NO: 159334 - DNA, 682 bp, Homo sapiens
  Payload ID: 11183
  Gene Symbol: NNT
  Gene Name: nicotinamide nucleotide transhydrogenase
  ENST ID: ENST00000503651
  CDS Start-End: 1-174
gatggtaaagtgattttcccagctcccacaccgaaaaatattcctcaaggtgccccagtaaaacagaagacagtggctgagctggaagctgaaaaagcagctaccattacacccttcaggaagacaatgtcaacggcttctgcatatacagcagatgaagacagagagggttgataattttacctatgaagacactgaagcacagagaggttaagtaacttgcctgagatgacacagctagggagcagcagaaccaggattcaaaccagactgacttaagaaaacatattcttattcacaaccctatgcaacttctctaatttttaactggaagacaaaatagtgttgtatctaactctctcaccagatggttaatgggctatgcactggaactttggatacatgatatgtgggtaggaaaataaattaaaactacagtcatattgaatgatttaatgtaaaattaatgtcaatccctagatattccagtggtgccacttccaaagtaatagtttacatcaaggaaaaaggtaccttattcaggaaagttaacttctagttccctggtcacccactgtcattttctttttactgaccactaggtaacactttcttctgttgcagaacaactgtccacatgtttgctatcaaggaaggcgataattaaagatgtatgttcaga

SEQ ID NO: 159335 - DNA, 754 bp, Homo sapiens
  Payload ID: 11183
  Gene Symbol: NNT
  Gene Name: nicotinamide nucleotide transhydrogenase
  ENST ID: ENST00000512422
  CDS Start-End: 103-754
ctctgttacagaagttctgatttttcctagcgagctggaggaaaggcagtgatttgccttcaaggaaactggggagtcagaaaattgggaactcatatcaacatggcaaacctattgaaaacagtggtgactggctgctcgtgtcctctacttagcaatttggggtcctgtaagggtctacgtgtgaagaaggattttttacgaacattttatactcaccaagaactgtggtgtaaagcgcctgtaaaaccaggaattccatataagcaactgactgttggagtccccaaagagatattccaaaatgagaagcgagtggcattgtctcctgctggtgttcagaacttggtcaagcagggttttaatgttgtcgtggaatcgggtgcgggcgaagcttccaagttctcagatgatcactatagagtggcaggtgcccaaatccaaggggcaaaggaagtgctggcttctgatttggtggtcaaagtgcgagcccctatggttaatccaacattaggtgttcatgaagctgaccttttaaagacatcaggaacgctgattagttttatttacccagcccaaaatccagagttgctaaataaactttcccaaagaaaaactacagttctggcaatggaccaggttccaagagtcacaattgctcagggatatgatgcgctaagctccatggccaacattgcgggttataaggctgttgtcctagcagcaaatcattttggacgtttttttactggtc

SEQ ID NO: 159336 - DNA, 634 bp, Homo sapiens
  Payload ID: 11183
  Gene Symbol: NNT
  Gene Name: nicotinamide nucleotide transhydrogenase
  ENST ID: ENST00000503059
  CDS Start-End: 1-35
tgctcactgagcaaggcaaaaaagtcagatactgatttggtccttgtaattggagctaatgacactgttaattcagcagctcaagaagatcccaactctattattgcaggcatgccagtccttgaggtctggaaatcaaagcaggtgattgttatgaagaggtctttgggtgttggctatgctgcagtggacaatccaatcttctacaaacctaacacggccatgcttctaggtgatgccaagaaaacatgtgacgcgctccaggcgaaagttagagaatcctatcagaagtaaatattaaggatcaagctgttagctaataatgccacctctgcagttttgggaacaggcaaataaagtatcagtatacatggtgatgtacatctgtagcaaagctcttggagaaaatgaagactgaagaaagcaaagcaaaaactgtatagagagatttttcaaaagcagtaatccctcaattttaaaaaaggattgaaaattctaaatgtctttctgtgcatattttttgtgttaggaatcaaaagtattttataaaaggagaaagaacagcctcattttagatgtagtcctgttggattttttatgcctcctcagtaaccagaaatgttttaaaaaacta

SEQ ID NO: 159337 - DNA, 747 bp, Homo sapiens
  Payload ID: 11183
  Gene Symbol: NNT
  Gene Name: nicotinamide nucleotide transhydrogenase
  ENST ID: ENST00000515208
  CDS Start-End: 573-747
aaatccaaggggcaaaggaagtgctggcttctgatttggtggtcaaagtaattattcctttttcctctcccatttacagcatgctgactttttgaaatcttttcatagaaaaattaaattactttatctggagttacaccttttcctattttcaaacagtgtatttttctcaaagaaatgactgcatgtcgtcatattcttcatgctccagtaaaacttttatcagacaatatgatctatgtttaaccatgaggagagaaaaagtgatcttcatttttacatttgctatatggacattttcttttaattggctaggaaaaatttgttctacatggtccatatatatccagagtacccacacgtgaacatttactgctagaatggaaagaaggtatggaacttagtctgggactaaatgttcagtgatcttctgacacctgaaggcgcaatgacttacactgacatacgtgctatttctagagagggcatgactattttggagaaagcagctttgggctgagtggcgagtagctttacctactctaaaataagttcttaaggtgcgagcccctatggttaatccaacattaggtgttcatgaagctgaccttttaaagacatcaggaacgctgattagttttatttacccagcccaaaatccagagttgctaaataaactttcccaaagaaaaactacagttctggcaatggaccaggttccaagagtcacaattgctcagggatatg

SEQ ID NO: 159338 - DNA, 4288 bp, Homo sapiens
  Payload ID: 11183
  Gene Symbol: NNT
  Gene Name: nicotinamide nucleotide transhydrogenase
  ENST ID: ENST00000512996
  CDS Start-End: 339-3206
ggcgcagcgccgcggggcccaagcccgggtctgccagcgcgacgtcctctcgcggccctcagggcacagcccaaggctgtcagcctcccggcccaggaattccatataagcaactgactgttggagtccccaaagagatattccaaaatgagaagcgagtggcattgtctcctgctggtgttcagaacttggtcaagcagggttttaatgttgtcgtggaatcgggtgcgggcgaagcttccaagttctcagatgatcactatagagtggcaggtgcccaaatccaaggggcaaaggaagtgctggcttctgatttggtggtcaaagtgcgagcccctatggttaatccaacattaggtgttcatgaagctgaccttttaaagacatcaggaacgctgattagttttatttacccagcccaaaatccagagttgctaaataaactttcccaaagaaaaactacagttctggcaatggaccaggttccaagagtcacaattgctcagggatatgatgcgctaagctccatggccaacattgcgggttataaggctgttgtcctagcagcaaatcattttggacgtttttttactggtcagatcacagctgctggaaaagttcctccagctaagattctgatagttggtggtggtgttgctgggcttgcttctgcaggcgcagcaaagtcgatgggtgcaattgttcgaggatttgacacaagagctgcagctttggaacagttcaagtctcttggtgctgagcccttggaggtggacttgaaggaatctggtgagggacaaggaggatatgcaaaagagatgtccaaagagttcattgaagctgaaatgaaactctttgctcaacaatgcaaggaggtagacatccttatcagcacagcacttattccaggtaaaaaagctccagttttatttaataaagaaatgattgagtcaatgaaggaaggttcagttgttgtggatttagctgctgaggctggtggaaactttgaaaccactaagccaggagaactctacattcataagggaattactcacataggctacacagacctgcccagccgaatggccactcaggccagcaccctatattccaacaacatcaccaaactcctgaaggccatcagcccggacaaagataatttttattttgatgtgaaagatgactttgactttggtacgatgggtcatgtcattagaggaactgtagtgatgaaagatggtaaagtgattttcccagctcccacaccgaaaaatattcctcaaggtgccccagtaaaacagaagacagtggctgagctggaagctgaaaaagcagctaccattacacccttcaggaagacaatgtcaacggcttctgcatatacagcaggtctcacagggatactgggtttgggcattgcggctcccaatctagccttttctcagatggtgaccacttttggcttggctggcattgtggggtatcataccgtctggggagtgacccctgctctccactcaccactgatgtctgtgacaaatgcaatctcagggctgactgcagttggtgggttggcactgatgggaggacatttgtatccttccacaacttctcagggccttgctgctcttgctgcattcatatcctctgtcaacattgcaggtggctttctggtgactcagagaatgctggacatgttcaagcgtcccactgaccccccagaatacaactacctgtacctgctccctgccggcacctttgttggtggatatttagctgccctctacagtggttataacattgaacagatcatgtacctaggctcgggtttgtgctgtgtcggtgccttggctggcctctccacccagggaacagcacgtcttggcaatgcactgggcatgattggggttgctggaggactggcagccaccctcggagtcctaaaaccgggcccagaattactagctcagatgtctggagcgatggctttgggtggtaccattggattgacaattgccaaacgcatccagatttctgatttacctcaattagttgctgcttttcacagtttagtgggtttggcagctgtacttacttgcatagctgagtacattatagaatatccacattttgctacggatgcagcagcaaatctcaccaagattgtggcctacctcggcacttacattggtggcgtcacctttagtgggtctctcattgcctatggaaaattgcagggtctcctgaaatctgcccctctcctactgcctggaaggcacttactcaatgcaggcttactggctgctagtgtgggcgggataatcccattcatggtggacccaagctttactactggcatcacctgtctgggttcagtgtctgctctctctgctgtcatgggtgtgactttgacagctgctattgggggtgctgacatgcccgtcgttatcactgtgctgaacagctactcaggctgggccctgtgtgcagagggcttcctgctcaacaacaatctgctgaccatcgtgggtgcactcataggctcgtctggtgctatcctgtcatacatcatgtgtgtggcaatgaatcgctccctggctaatgtgattcttggaggctatggcaccacttcaacagctggtggaaaacccatggaaatttctggcacacatacggaaatcaaccttgacaatgcaattgacatgattcgagaagctaatagcattattattacaccaggctatggtctctgtgcagccaaagctcaataccccattgctgatttggtaaagatgctcactgagcaaggcaaaaaagtcaggtttggaattcacccagttgcaggccgaatgcctggtcagcttaatgtgctgctggctgaggctggtgtgccatatgacattgtgttggaaatggatgagatcaaccatgattttccagatactgatttggtccttgtaattggagctaatgacactgttaattcagcagctcaagaagatcccaactctattattgcaggcatgccagtccttgaggtctggaaatcaaagcaggtgattgttatgaagaggtctttgggtgttggctatgctgcagtggacaatccaatcttctacaaacctaacacggccatgcttctaggtgatgccaagaaaacatgtgacgcgctccaggcgaaagttagagaatcctatcagaagtaaatattaaggatcaagctgttagctaataatgccacctctgcagttttgggaacaggcaaataaagtatcagtatacatggtgatgtacatctgtagcaaagctcttggagaaaatgaagactgaagaaagcaaagcaaaaactgtatagagagatttttcaaaagcagtaatccctcaattttaaaaaaggattgaaaattctaaatgtctttctgtgcatattttttgtgttaggaatcaaaagtattttataaaaggagaaagaacagcctcattttagatgtagtcctgttggattttttatgcctcctcagtaaccagaaatgttttaaaaaactaagtgtttaggatttcaagacaacattatacatggctctgaaatatctgacacaatgtaaacattgcaggcacctgcattttatgttttttttttcaacaaatgtgactaatttgaaacttttatgaacttctgagctgtccccttgcaattcaaccgcagtttgaattaatcatatcaaatcagttttaattttttaaattgtacttcagagtctatatttcaagggcacattttctcactactattttaatacattaaaggactaaataatctttcagagatgctggaaacaaatcatttgctttatatgtttcattagaataccaatgaaacatacaacttgaaaattagtaatagtatttttgaagatcccatttctaattggagatctctttaatttcgatcaacttataatgtgtagtactatattaagtgcacttgagtggaattcaacatttgactaataaaatgagttcatcatgttggcaagtgatgtggcaattatctctggtgacaaaagagtaaaatcaaatatttctgcctgttacaaatatcaaggaagacctgctactatgaaatagatgacattaatctgtcttcactgtttataatacggatggattttttttcaaatcagtgtgtgttttgaggtcttatgtaattgatgacatttgagagaaatggtggctttttttagctacctctttgttcatttaagcaccagtaaagatcatgtctttt

SEQ ID NO: 159339 - DNA, 708 bp, Homo sapiens
  Payload ID: 11183
  Gene Symbol: NNT
  Gene Name: nicotinamide nucleotide transhydrogenase
  ENST ID: ENST00000505678
  CDS Start-End: 112-708
tcccttgggtcctctctgttacagaagttctgatttttcctagcgagctggaggaaagtgatttgccttcaaggaaactggggagtcagaaaattgggaactcatatcaacatggcaaacctattgaaaacagtggtgactggctgctcgtgtcctctacttagcaatttggggtcctgtaagggtctacgtgtgaagaaggattttttacgaacattttatactcaccaagaactgtggtgtaaagcgcctgtaaaaccaggaattccatataagcaactgactgttggagtccccaaagagatattccaaaatgagaagcgagtggcattgtctcctgctggtgttcagaacttggtcaagcagggttttaatgttgtcgtggaatcgggtgcgggcgaagcttccaagttctcagatgatcactatagagtggcaggtgcccaaatccaaggggcaaaggaagtgctggcttctgatttggtggtcaaagtgcgagcccctatggttaatccaacattaggtgttcatgaagctgaccttttaaagacatcaggaacgctgattagttttatttacccagcccaaaatccagagttgctaaataaactttcccaaagaaaaactacagttctggcaatggaccaggttccaagagtcacaattgctcagggatatgatgcgctaagctccatggccaacattgcg

SEQ ID NO: 159340 - DNA, 4582 bp, Homo sapiens
  Payload ID: 11184
  Gene Symbol: NAMPT
  Gene Name: nicotinamide phosphoribosyltransferase
  Uniprot ID: P43490
  ENST ID: ENST00000222553
  CDS Start-End: 309-1784
gctgccgcgccccgccctttctcggcccccggagggtgacggggtgaaggcgggggaaccgaggtggggagtccgccagagctcccagactgcgagcacgcgagccgccgcagccgtcacccgcgccgcgtcacggctcccgggcccgccctcctctgacccctcccctctctccgtttccccctctccccctcctccgccgaccgagcagtgacttaagcaacggagcgcggtgaagctcatttttctccttcctcgcagccgcgccagggagctcgcggcgcgcggcccctgtcctccggcccgagatgaatcctgcggcagaagccgagttcaacatcctcctggccaccgactcctacaaggttactcactataaacaatatccacccaacacaagcaaagtttattcctactttgaatgccgtgaaaagaagacagaaaactccaaattaaggaaggtgaaatatgaggaaacagtattttatgggttgcagtacattcttaataagtacttaaaaggtaaagtagtaaccaaagagaaaatccaggaagccaaagatgtctacaaagaacatttccaagatgatgtctttaatgaaaagggatggaactacattcttgagaagtatgatgggcatcttccaatagaaataaaagctgttcctgagggctttgtcattcccagaggaaatgttctcttcacggtggaaaacacagatccagagtgttactggcttacaaattggattgagactattcttgttcagtcctggtatccaatcacagtggccacaaattctagagagcagaagaaaatattggccaaatatttgttagaaacttctggtaacttagatggtctggaatacaagttacatgattttggctacagaggagtctcttcccaagagactgctggcataggagcatctgctcacttggttaacttcaaaggaacagatacagtagcaggacttgctctaattaaaaaatattatggaacgaaagatcctgttccaggctattctgttccagcagcagaacacagtaccataacagcttgggggaaagaccatgaaaaagatgcttttgaacatattgtaacacagttttcatcagtgcctgtatctgtggtcagcgatagctatgacatttataatgcgtgtgagaaaatatggggtgaagatctaagacatttaatagtatcaagaagtacacaggcaccactaataatcagacctgattctggaaaccctcttgacactgtgttaaaggttttggagattttaggtaagaagtttcctgttactgagaactcaaagggttacaagttgctgccaccttatcttagagttattcaaggggatggagtagatattaataccttacaagagattgtagaaggcatgaaacaaaaaatgtggagtattgaaaatattgccttcggttctggtggaggtttgctacagaagttgacaagagatctcttgaattgttccttcaagtgtagctatgttgtaactaatggccttgggattaacgtcttcaaggacccagttgctgatcccaacaaaaggtccaaaaagggccgattatctttacataggacgccagcagggaattttgttacactggaggaaggaaaaggagaccttgaggaatatggtcaggatcttctccatactgtcttcaagaatggcaaggtgacaaaaagctattcatttgatgaaataagaaaaaatgcacagctgaatattgaactggaagcagcacatcattaggctttatgactgggtgtgtgttgtgtgtatgtaatacataatgtttattgtacagatgtgtggggtttgtgttttatgatacattacagccaaattatttgttggtttatggacatactgccctttcattttttttcttttccagtgtttaggtgatctcaaattaggaaatgcatttaaccatgtaaaagatgagtgctaaagtaagctttttagggccctttgccaataggtagtcattcaatctggtattgatcttttcacaaataacagaactgagaaacttttatatataactgatgatcacataaaacagatttgcataaaattaccatgattgctttatgtttatatttaacttgtatttttgtacaaacaagattgtgtaagatatatttgaagtttcagtgatttaacagtctttccaacttttcatgatttttatgagcacagactttcaagaaaatacttgaaaataaattacattgccttttgtccattaatcagcaaataaaacatggccttaacaaagttgtttgtgttattgtacaatttgaaaattatgtcgggacataccctatagaattactaaccttactgccccttgtagaatatgtattaatcattctacattaaagaaaataatggttcttactggaatgtctaggcactgtacagttattatatatcttggttgttgtattgtaccagtgaaatgccaaatttgaaaggcctgtactgcaattttatatgtcagagattgcctgtggctctaatatgcacctcaagattttaaggagataatgtttttagagagaatttctgcttccactatagaatatatacataaatgtaaaatacttacaaaagtggaagtagtgtattttaaagtaattacacttctgaatttatttttcatattctatagttggtatgacttaaatgaattactggagtgggtagtgagtgtacttaaatgtttcaattctgttatattttttattaagtttttaaaaaattaaattggatattaaattgtatggacatcatttattaattttaaactgaatgccctcaataagtaatactgaagcacattcttaaatgaagataaattatctccaatgaaaagcatgacatgtgtttcaatagaagaatcttaagttggctaaattcaaagtgcttgacatcaaaatgttctagagtgattagctactagattctgaatcatacatcacatctgactagagaccagtttctttcgaatgattcttttatgtatgtagatctgttcttctgaggcagcggttggccaactatagcccaaaggccaaatttggacttctttttataaatgcagattgtctatggctgctttcccactactccagcctaaggtaaacagctgcaatagaagccaaatgagaatcgcaaagcccaaaatgtttattaacctgccctttacacaaaattacacaaaaagtttcctgatctctgttctaagaaaaggagtgtgccttgcatttaaaaggaaatgttggtttctagggaagggaggaggctaaataattgatacggaattttcctcttttgtcttcttttttctcacttaagaatccgatactggaagactgatttagaaaagtttttaacatgacattaaatgtgaaattttaaaaattgaaaagccataaatcatctgttttaaatagttacatgagaaaatgatcactagaataacctaattagaagtgttatcttcattaaatgttttttgtaagtggtattagaaagaatatgtttttcagatggttctttaaacatgtagtgagaacaataagcattattcacttttagtaagtcttctgtaatccatgatataaaataattttaaaatgattttttaatgtatttgagtaaagatgagtagtattaagaaaaacacacatttcttcacaaaatgtgctaaggggcgtgtaaagaatcaaaagaaactattaccaataatagttttgataatcacccataattttgtgtttaaacattgaaattatagtacagacagtattctctgtgttctgtgaatttcagcagcttcagaatagagtttaatttagaaatttgcagtgaaaaaagctatctctttgttcacaaccataaatcaggagatggagattaattctattggctcttagtcacttggaactgattaattctgactttctgtcactaagcacttggtatttggccatctccattctgagcaccaaacggttaacacgaatgtccactagaactctgctgtgtgtcacccttaaatcagtctaaatcttccagacaaaagcaaatggcatttatggatttaagtcattagattttcaactgacattaattaatccctcttgattgattatatcatcaagtatttatatcttaaataggaggtaggatttctgtgttaagactcttatttgtaccctataattaaagtaaaatgttttttatgagtatcccttgttttcccttcttaaattgttatcaaacaatttttataatgaaatctatcttggaaaattagaaagaaaaatggcaaggtatttattgttctgtttgccataatttagaactcacacttaagtattttgtagttttacattcctttttaacccattcagtggagaatgtcagcttttctcccaagttgtatgttaagtctattctaatatgtactcaacatcaagttataaacatgtaataaacatggaaataaagtttagctctattagtgaagtgttaaa

SEQ ID NO: 159341 - DNA, 1213 bp, Homo sapiens
  Payload ID: 11184
  Gene Symbol: NAMPT
  Gene Name: nicotinamide phosphoribosyltransferase
  ENST ID: ENST00000354289
  CDS Start-End: 38-1144
gagctcgcggcgcgcggcccctgtcctccggcccgagatgaatcctgcggcagaagccgagttcaacatcctcctggccaccgactcctacaaggttactcactataaacaatatccacccaacacaagcaaagtttattcctactttgaatgccgtgaaaagaagacagaaaactccaaattaaggaaggtgaaatatgaggaaacagtattttatgggttgcagtacattcttaataagtacttaaaaggtaaagtagtaaccaaagagaaaatccaggaagccaaagatgtctacaaagaacatttccaagatgatgtctttaatgaaaagggatggaactacattcttgagaagtatgatgggcatcttccaatagaaataaaagctgttcctgagggctttgtcattcccagaggaaatgttctcttcacggtggaaaacacagatccagagtgttactggcttacaaattggattgagactattcttgttcagtcctggtatccaatcacagtggccacaaattctagagagcagaagaaaatattggccaaatatttgttagaaacttctggtaacttagatggtctggaatacaagttacatgattttggctacagaggagtctcttcccaagagactgctggcataggagcatctgctcacttggttaacttcaaaggaacagatacagtagcaggacttgctctaattaaaaaatattatggaacgaaagatcctgttccaggctattctgttccagcagcagaacacagtaccataacagcttgggggaaagaccatgaaaaagatgcttttgaacatattgtaacacagttttcatcagtgcctgtatctgtggtcagcgatagctatgacatttataatgcgtgtgagaaaatatggggtgaagatctaagacatttaatagtatcaagaagtacacaggcaccactaataatcagacctgattctggaaaccctcttgacactgtgttaaaggttttggagattttaggtaagaagtttcctgttactgagaactcaaagggttacaagttgctgccaccttatcttagagttattcaaggggatggagtagatattaataccttacaagaggtatgtgttttatattaaaagtttcaataaggcatttcttataattaagtttgtttatgtttgataaagaacacaatataaatacaa

SEQ ID NO: 159342 - DNA, 1147 bp, Homo sapiens
  Payload ID: 11184
  Gene Symbol: NAMPT
  Gene Name: nicotinamide phosphoribosyltransferase
  ENST ID: ENST00000424768
  CDS Start-End: 884-1147
tagtgttgactgaggttgtctttattagaagtctcagccatgcctccagtttcgagatgaatctcaattcacaagttccactatgaatctcaattcacaagttccactaccaccaccaccatcactgcccccagatagaatgagacttctaataacttgaaagacaagtctataaatatcctgtaatcgttttcactgtatcactttttcctggctacttttatccgataaaaacctcaatttatttttaagctattaaacatgcggacaaagggaatcttagttttatgcaaaaacgcaaccacgcatgagaactgcgcaagtctttcttggaatggtctgtatttgggtgaagtcatcagacgtcattacacttctttattttggggttgccaactcgtttcccaggatttaaagactataacgatgataaaagtcagtgtcgcaccctgtcaaaggcttggcccgttgccttttccttcccggcaatactcggttcaattaggtcttgtcccctcattatctgtgaggactgaattccacccccgcttttcaacgcaggctctttgctcgggaaaagtcaaaccatctctcaaaggatcaaagagctcagccatagacagagccgccggaggaaagcggagtcgctgcatcagatgaaaggggcccctcagcctcactcctcaccgcagctcctgggatcttaaagacagggtcaggaggatcaggagggacaagagggatggaggcgaaaggctggatccttaatccaggccggagacaaagtgacttaagcaacggagcgcggtgaagctcatttttctccttcctcgcagccgcgccagggagctcgcggcgcgcggcccctgtcctccggcccgagatgaatcctgcggcagaagccgagttcaacatcctcctggccaccgactcctacaaggttactcactataaacaatatccacccaacacaagcaaagtttattcctactttgaatgccgtgaaaagaagacagaaaactccaaattaaggaaggtgaaatatgaggaaacagtattttatgggttgcagtacattcttaataagtacttaaaaggtaaagtagtaaccaaagagaaaatccaggaagccaaagatgtctacaaa

SEQ ID NO: 159343 - DNA, 300 bp, Homo sapiens
  Payload ID: 11184
  Gene Symbol: NAMPT
  Gene Name: nicotinamide phosphoribosyltransferase
  ENST ID: ENST00000417537
  CDS Start-End: 120-300
gtcaggaggatcaggagggacaagagggatggaggcgaaaggctggatccttaatccaggccggagacaaagccgcgccagggagctcgcggcgcgcggcccctgtcctccggcccgagatgaatcctgcggcagaagccgagttcaacatcctcctggccaccgactcctacaaggttactcactataaacaatatccacccaacacaagcaaagtttattcctactttgaatgccgtgaaaagaagacagaaaactccaaattaaggaaggtgaaatatgaggaaacagtattttatg

SEQ ID NO: 159344 - DNA, 1185 bp, Homo sapiens
  Payload ID: 11185
  Gene Symbol: NMRK1
  Gene Name: nicotinamide riboside kinase 1
  Uniprot ID: Q9NWW6
  ENST ID: ENST00000361092
  CDS Start-End: 238-837
gctggaacccggcgccgagagtagagaaaaggggcctctggtgaccgcccctacctggcatccctctaacccaggaggagcgtggggaaaggggctgtgggcctctcggggagcgagctgcgggtagcggcgcactgggtacaggcgcgcgcttggctgtcgcctctgccgctgtgtttgggaggactcgaactggcgccaggaaatattaggaagctgtgattttcaaagctaattatgaaaacatttatcattggaatcagtggtgtgacaaacagtggcaaaacaacactggctaagaatttgcagaaacacctcccaaattgcagtgtcatatctcaggatgatttcttcaagccagagtctgagatagagacagataaaaatggatttttgcagtacgatgtgcttgaagcacttaacatggaaaaaatgatgtcagccatttcctgctggatggaaagcgcaagacactctgtggtatcaacagaccaggaaagtgctgaggaaattcccattttaatcatcgaaggttttcttctttttaattataagccccttgacactatatggaatagaagctatttcctgactattccatatgaagaatgtaaaaggaggaggagtacaagggtctatcagcctccagactctccgggatactttgatggccatgtgtggcccatgtatctaaagtacagacaagaaatgcaggacatcacatgggaagttgtgtacctggatggaacaaaatctgaagaggacctctttttgcaagtatatgaagatctaatacaagaactagcaaagcaaaagtgtttgcaagtgacagcataaagacggaacacaacaaatccttcctgaagtgaattaggaaactccaaggagtaatttaagaaccttcaccaagatacaatgtatactgtggtacaatgacagccattgtttcatatgtttgatttttattgcacatggttttcccaacatgtggaacaataaatatccatgccaatggacaggactgtaccttagcaagttgctccctctccagggagcgcatagatacagcagagctcacagtgagtcagaaagtctccactttctgaacatagctctataacaatgattgtcaaacttttctaactggagctcagagtaagaaataaagattacatcacaatccaa

SEQ ID NO: 159345 - DNA, 1121 bp, Homo sapiens
  Payload ID: 11185
  Gene Symbol: NMRK1
  Gene Name: nicotinamide riboside kinase 1
  Uniprot ID: Q9NWW6
  ENST ID: ENST00000376808
  CDS Start-End: 246-773
caacgggggctggaacccggcgccgagagtagagaaaaggggcctctggtgaccgcccctacctggcatccctctaacccaggaggagcgtggggaaaggggctgtgggcctctcggggagcgagctgcgggtagcggcgcactgggtacaggcgcgcgcttggctgtcgcctctgccgctgtgtttgggaggactcgaactggcgccaggaaatattaggaagctgtgattttcaaagctaattatgaaaacatttatcattggaatcagtggtgtgacaaacagtggcaaaacaacactggctaagaatttgcagaaacacctcccaaattgcagtgtcatatctcaggatgatttcttcaagccagagtctgagatagagacagataaaaatggatttttgcagtacgatgtgcttgaagcacttaacatggaaaaaatgatgtcagccatttcctgctggatggaaagcgcaagacactctgtggtatcaacagaccaggaaagtgctgaggaaattcccattttaatcatcgaaggttttcttctttttaattataatacaagggtctatcagcctccagactctccgggatactttgatggccatgtgtggcccatgtatctaaagtacagacaagaaatgcaggacatcacatgggaagttgtgtacctggatggaacaaaatctgaagaggacctctttttgcaagtatatgaagatctaatacaagaactagcaaagcaaaagtgtttgcaagtgacagcataaagacggaacacaacaaatccttcctgaagtgaattaggaaactccaaggagtaatttaagaaccttcaccaagatacaatgtatactgtggtacaatgacagccattgtttcatatgtttgatttttattgcacatggttttcccaacatgtggaacaataaatatccatgccaatggacaggactgtaccttagcaagttgctccctctccagggagcgcatagatacagcagagctcacagtgagtcagaaagtctccactttctgaacatagctctataacaatgattgtcaaacttttctaactggagctcagagtaagaaataaagattacatcacaatccaa

SEQ ID NO: 159346 - DNA, 2050 bp, Homo sapiens
  Payload ID: 11185
  Gene Symbol: NMRK1
  Gene Name: nicotinamide riboside kinase 1
  ENST ID: ENST00000376811
  CDS Start-End: 464-1075
agtagagaaaaggggcctctggtgaccgcccctacctggcatccctctaacccaggaggagcgtggggaaaggggctgtgggcctctcggggagcgagctgcgggtagcggcgcactgggtacaggcgcgcgcttggctgtcgcctctgccgctgtgtttgggaggactcgaactggcgccaggaaatattaggaagctgtgattttcaaagctaattatgaaaacatttatcattggaatcagtggacatgagccccaggttaaaacacgctttcaataaatgactgaatcgagaagtgcctccctcccgtgtgatctcctcgatgctgcaaaactagatctaaagaggagtaactcagtgccccttctcctggacttcacagtccggtcagaagagacaaataactggcctgttgtgataagctacagcagacctcccagctggcccccaggtggagagagatggggaaaaggaggcatcgcagaggaaatgtgatttcatgtgtgacaaacagtggcaaaacaacactggctaagaatttgcagaaacacctcccaaattgcagtgtcatatctcaggatgatttcttcaagccagagtctgagatagagacagataaaaatggatttttgcagtacgatgtgcttgaagcacttaacatggaaaaaatgatgtcagccatttcctgctggatggaaagcgcaagacactctgtggtatcaacagaccaggaaagtgctgaggaaattcccattttaatcatcgaaggttttcttctttttaattataagccccttgacactatatggaatagaagctatttcctgactattccatatgaagaatgtaaaaggaggaggagtacaagggtctatcagcctccagactctccgggatactttgatggccatgtgtggcccatgtatctaaagtacagacaagaaatgcaggacatcacatgggaagttgtgtacctggatggaacaaaatctgaagaggacctctttttgcaagtatatgaagatctaatacaagaactagcaaagcaaaagtgtttgcaagtgacagcataaagacggaacacaacaaatccttcctgaagtgaattaggaaactccaaggagtaatttaagaaccttcaccaagatacaatgtatactgtggtacaatgacagccattgtttcatatgtttgatttttattgcacatggttttcccaacatgtggaacaataaatatccatgccaatggacaggactgtaccttagcaagttgctccctctccagggagcgcatagatacagcagagctcacagtgagtcagaaagtctccactttctgaacatagctctataacaatgattgtcaaacttttctaactggagctcagagtaagaaataaagattacatcacaatccaatatctgtggaattcattgtgtatgtttatgtatttgtgtgtaggtgtgtatgtgtgtgtgtgatacatacatacatcaagtatcacaagacattgaccttatatattatgcactgtgatgtttttccgtctttaattataaaaaacatattgatcacaaccacaatttggaaaatgttgctccataccatcccataccaacactcaccacctgcaaataatagcattactaggagctgcagtcacaatgaataaatcaacaattcgctacaagatctaggattatttgtgtattttgttgagtgtgtgtgtgtgtgtgtgtgtgtgtgtgtgtgtgtgttggcgtgtatctaataccattgtatctcattgttgagactttgttacaaatagggtttctggtttctttctcccccctcgtggttcattttgtttttgtcaaaccagtggtctaaaatcacagaaataagcaattacttcaatcatgtggaatccaggggacctatctttggaaagcacagaaggagatctgaattgtgtgatctcttgaggctgctttcaatgctggaatttaaattatgtactgaacaatcttttgcttattaataaaaagattacacacaaccat

SEQ ID NO: 159347 - DNA, 1903 bp, Homo sapiens
  Payload ID: 11185
  Gene Symbol: NMRK1
  Gene Name: nicotinamide riboside kinase 1
  ENST ID: ENST00000494066
  CDS Start-End: 238-558
gctggaacccggcgccgagagtagagaaaaggggcctctggtgaccgcccctacctggcatccctctaacccaggaggagcgtggggaaaggggctgtgggcctctcggggagcgagctgcgggtagcggcgcactgggtacaggcgcgcgcttggctgtcgcctctgccgctgtgtttgggaggactcgaactggcgccaggaaatattaggaagctgtgattttcaaagctaattatgaaaacatttatcattggaatcagtggtgtgacaaacagtggcaaaacaacactggctaagaatttgcagaaacacctcccaaattgcagtgtcatatctcaggatgatttcttcaagccagagtctgagatagagacagataaaaatggatttttgcagtacgatgtgcttgaagcacttaacatggaaaaaatgatgtcagccatttcctgctggatggaaagcgcaagacactctgtggtatcaacagaccaggaaagtgctgaggaaattcccattttaatcatcgaaggttttcttctttttaattataagtaagcatctccaccctaatattgtctctgagtgaatggggggataaaaacccttgtgaactaagtatgctgttattttaggccccttgacactatatggaatagaagctatttcctgactattccatatgaagaatgtaaaaggaggaggaggtaagttttgaagccatctttgtgagttgtaattcaaaacaaaaaatgtagaagaaaaatgaggacagcaacattattgagcaatgcgtatacgtcatttttcagagacaggaagccttaactcttttacaaaaggagcaaaactcttttccataaatggtcatccgcatggagtaatgcaaattactttctaagaaaagggccttatatcaagctttcggctcatttctcctaaatcctcaaacaaagcaagcccatggtgattaggattttaatgtaagtgagcctgttctgccacagctacaaagaacaccaattagttcaaagcttaatccaacatagtggtctctccattgttatttacactatttgtctcttagttctcttataaagcactagaaggaaaaagaataattaagaatgatagtcagtggattacaaagttaattttaatatcaaagaactaaatccatgttactgtcgttctaactgccattgagttaaaacatgtagtacatgtagtcctaatcctgtttagattcagcctctgagtgatttccccattatcctgaccattcatattttactttatcaattgtgtgtttctgtcaacataaagtttcctacgtgttttgatagtacaagggtctatcagcctccagactctccgggatactttgatggccatgtgtggcccatgtatctaaagtacagacaagaaatgcaggacatcacatgggaagttgtgtacctggatggaacaaaatctgaagaggacctctttttgcaagtatatgaagatctaatacaagaactagcaaagcaaaagtgtttgcaagtgacagcataaagacggaacacaacaaatccttcctgaagtgaattaggaaactccaaggagtaatttaagaaccttcaccaagatacaatgtatactgtggtacaatgacagccattgtttcatatgtttgatttttattgcacatggttttcccaacatgtggaacaataaatatccatgccaatggacaggactgtaccttagcaagttgctccctctccagggagcgcatagatacagcagagctcacagtgagtcagaaagtctccactttctgaacatagctctataacaatgattgtcaaacttttctaactggagctcagagtaagaaataaagattacatcacaatcc

SEQ ID NO: 159348 - DNA, 1126 bp, Homo sapiens
  Payload ID: 11186
  Gene Symbol: NMRK2
  Gene Name: nicotinamide riboside kinase 2
  Uniprot ID: Q9NPI5
  ENST ID: ENST00000168977
  CDS Start-End: 291-983
ttggccctgacctcgttggaaaacgaagctccccgcagggtcccggcctctagggctgctgtgcgggcgggggtggcctggagctatttccattcggcggcgggaacaggtgccggcgcctccgccccatccccaggggccgcctcccccggggcggcctccaggctgccgagacctataaaggcgccaggttttctcaatgaagccgggacgcactccggagcgcactgcgtggtcgcaccctacccgggctgccttggaagtcgtccccgccgcccctccgcaccggcatgaagctcatcgtgggcatcggaggcatgaccaacggcggcaagaccacgctgaccaacagcctgctcagagccctgcccaactgctgcgtgatccatcaggatgacttcttcaagccccaagaccaaatagcagttggggaagacggcttcaaacagtgggacgtgctggagtctctggacatggaggccatgctggacaccgtgcaggcctggctgagcagcccgcagaagtttgcccgtgcccacggggtcagcgtccagccagaggcctcggacacccacatcctcctcctggaaggcttcctgctctacagctacaagcccctggtggacttgtacagccgccggtacttcctgaccgtcccgtatgaagagtgcaagtggaggagaagtacccgcaactacacagtccctgatccccccggcctcttcgatggccacgtgtggcccatgtaccagaagtataggcaggagatggaggccaacggtgtggaagtggtctacctggacggcatgaagtcccgagaggagctcttccgtgaagtcctggaagacattcagaactcgctgctgaaccgctcccaggaatcagccccctccccggctcgcccagccaggacacagggacccggacgcggatgcggccacagaacggccaggcctgcagcgtcccagcaggacagcatgtgagcgtttccctatgggggtgtctgtacgtaggagagtggaggccccactcccagttgggcgtcccggagctcagggactgagccccaagacgcctctgtaacctcgctgcagcttcagtagtaaactgggtcctgtttttttaa

SEQ ID NO: 159349 - DNA, 484 bp, Homo sapiens
  Payload ID: 11186
  Gene Symbol: NMRK2
  Gene Name: nicotinamide riboside kinase 2
  ENST ID: ENST00000597889
  CDS Start-End: 1-251
ccctgcccaactgctgcgtgatccatcaggatgacttcttcaagccccaagaccaaatagcagttggggaagacggcttcaaacagtgggacgtgctggagtctctggacatggaggccatgctggacaccgtgcaggcctggctgagcagcccgcagaagcctcggacacccacatcctcctcctggaaggcttcctgctctacagctacaagcccctggtggacttgtacagccgccggtacttcctgaccgtcccgtatgaagagtgcaagtggaggagaagtacccgcaactacacagtccctgatccccccggcctcttcgatggccacgtgtggcccatgtaccagaagtataggcaggagatggaggccaacggtgtggaagtggtctacctggacggcatgaagtcccgagaggagctcttccgtgaagtcctggaagacattcagaactcgctgctgaaccgctcccaggaatca

SEQ ID NO: 159350 - DNA, 691 bp, Homo sapiens
  Payload ID: 11186
  Gene Symbol: NMRK2
  Gene Name: nicotinamide riboside kinase 2
  ENST ID: ENST00000599576
  CDS Start-End: 65-403
cgttggaaaacgaagctccccgcagggtcccggcctctagggctgctgtgcgggcgggggtggcatgaccaacggcggcaagaccacgctgaccaacagcctgctcagagccctgcccaactgctgcgtgatccatcaggatgacttcttcaagccccaagaccaaatagcagttggggaagacggcttcaaacagtgggacgtgctggagtctctggacatggaggccatgctggacaccgtgcaggcctggctgagcagcccgcagaagtttgcccgtgcccacggggtcagcgtccagccagaggcctcggacacccacatcctcctcctggaaggcttcctgctctacagctacaatctacctggacggcatgaagtcccgagaggagctcttccgtgaagtcctggaagacattcagaactcgctgctgaaccgctcccaggaatcagccccctccccggctcgcccagccaggacacagggacccggacgcggatgcggccacagaacggccaggcctgcagcgtcccagcaggacagcatgtgagcgtttccctatgggggtgtctgtacgtaggagagtggaggccccactcccagttgggcgtcccggagctcagggactgagccccaagacgcctctgtaacctcgctgcagcttcagtagtaaactgggtcctgtttttt

SEQ ID NO: 159351 - DNA, 869 bp, Homo sapiens
  Payload ID: 11186
  Gene Symbol: NMRK2
  Gene Name: nicotinamide riboside kinase 2
  Uniprot ID: Q9NPI5
  ENST ID: ENST00000593949
  CDS Start-End: 66-773
cactgcgtggtcgcaccctacccgggctgccttggaagtcgtccccgccgcccctccgcaccggcatgaagctcatcgtgggcatcggaggcatgaccaacggcggcaagaccacgctgaccaacagcctgctcagagccctgcccaactgctgcgtgatccatcaggatgacttcttcaaggctcctctgtttcagccccaagaccaaatagcagttggggaagacggcttcaaacagtgggacgtgctggagtctctggacatggaggccatgctggacaccgtgcaggcctggctgagcagcccgcagaagtttgcccgtgcccacggggtcagcgtccagccagaggcctcggacacccacatcctcctcctggaaggcttcctgctctacagctacaagcccctggtggacttgtacagccgccggtacttcctgaccgtcccgtatgaagagtgcaagtggaggagaagtacccgcaactacacagtccctgatccccccggcctcttcgatggccacgtgtggcccatgtaccagaagtataggcaggagatggaggccaacggtgtggaagtggtctacctggacggcatgaagtcccgagaggagctcttccgtgaagtcctggaagacattcagaactcgctgctgaaccgctcccaggaatcagccccctccccggctcgcccagccaggacacagggacccggacgcggatgcggccacagaacggccaggcctgcagcgtcccagcaggacagcatgtgagcgtttccctatgggggtgtctgtacgtaggagagtggaggccccactcccagttgggcgtcccggagctcagggactgagccccaagacgcctct

SEQ ID NO: 159352 - DNA, 1139 bp, Homo sapiens
  Payload ID: 11186
  Gene Symbol: NMRK2
  Gene Name: nicotinamide riboside kinase 2
  Uniprot ID: Q9NPI5
  ENST ID: ENST00000616156
  CDS Start-End: 291-998
ttggccctgacctcgttggaaaacgaagctccccgcagggtcccggcctctagggctgctgtgcgggcgggggtggcctggagctatttccattcggcggcgggaacaggtgccggcgcctccgccccatccccaggggccgcctcccccggggcggcctccaggctgccgagacctataaaggcgccaggttttctcaatgaagccgggacgcactccggagcgcactgcgtggtcgcaccctacccgggctgccttggaagtcgtccccgccgcccctccgcaccggcatgaagctcatcgtgggcatcggaggcatgaccaacggcggcaagaccacgctgaccaacagcctgctcagagccctgcccaactgctgcgtgatccatcaggatgacttcttcaaggctcctctgtttcagccccaagaccaaatagcagttggggaagacggcttcaaacagtgggacgtgctggagtctctggacatggaggccatgctggacaccgtgcaggcctggctgagcagcccgcagaagtttgcccgtgcccacggggtcagcgtccagccagaggcctcggacacccacatcctcctcctggaaggcttcctgctctacagctacaagcccctggtggacttgtacagccgccggtacttcctgaccgtcccgtatgaagagtgcaagtggaggagaagtacccgcaactacacagtccctgatccccccggcctcttcgatggccacgtgtggcccatgtaccagaagtataggcaggagatggaggccaacggtgtggaagtggtctacctggacggcatgaagtcccgagaggagctcttccgtgaagtcctggaagacattcagaactcgctgctgaaccgctcccaggaatcagccccctccccggctcgcccagccaggacacagggacccggacgcggatgcggccacagaacggccaggcctgcagcgtcccagcaggacagcatgtgagcgtttccctatgggggtgtctgtacgtaggagagtggaggccccactcccagttgggcgtcccggagctcagggactgagccccaagacgcctctgtaacctcgctgcagcttcagtagtaaactgggtcctgttttttt

SEQ ID NO: 159353 - DNA, 1774 bp, Homo sapiens
  Payload ID: 11187
  Gene Symbol: NAPRT
  Gene Name: nicotinate phosphoribosyltransferase
  ENST ID: ENST00000340490
  CDS Start-End: 22-1774
agtccggacgtcgggagcaggatggcggcggagcaggaccccgaggcgcgcgcggcggcgcggccgctgctcactgacctctaccaggccaccatggcgttgggctattggcgcgcgggccgggcgcgggacgccgccgagttcgagctcttcttccgccgctgcccgttcggcggcgccttcgccttggccgccggcttgcgcgactgtgtgcgcttcctgcgcgccttccgcctgcgggacgccgacgtgcagttcctggcctcggtgctgcccccagacacggatcctgcgttcttcgagcaccttcgggccctcgactgctccgaggtgacggtgcgagccctgcccgagggctccctcgccttccccggagtgccgctcctgcaggtgtccgggccgctcctggtggtgcagctgctggagacaccgctgctctgcctggtcagctacgccagcctggtggccaccaacgcagcgcggcttcgcttgatcgcagggccagagaagcggctgctagagatgggcctgaggcgggctcagggccccgatgggggcctgacagcctccacctacagctacctgggcggcttcgacagcagcagcaacgtgctagcgggccagctgcgaggtgtgccggtggccgggaccctggcccactccttcgtcacttccttttcaggcagcgaggtgccccctgacccgatgttggcgccagcagctggtgagggccctggggtggacctggcggccaaagcccaggtgtggctggagcaggtgtgtgcccacctggggctgggggtgcaggagccgcatccaggcgagcgggcagcctttgtggcctatgccttggcttttccccgggccttccagggcctcctggacacctacagcgtgtggaggagtggtctccccaacttcctagcagtcgccctggccctgggagagctgggctaccgggcagtgggcgtgaggctggacagtggtgacctgctacagcaggctcaggagatccgcaaggtcttccgagctgctgcagcccagttccaggtgccctggctggagtcagtcctcatcgtagtcagcaacaacattgacgaggaggcgctggcccgactggcccaggagggcagtgaggtgaatgtcattggcattggcaccagtgtggtcacctgcccccaacagccttccctgggtggcgtctataagctggtggccgtggggggccagccacgaatgaagctgaccgaggaccccgagaagcagacgttgcctgggagcaaggctgctttccggctcctgggctctgacgggtctccactcatggacatgctgcagttagcagaagagccagtgccacaggctgggcaggagctgagggtgtggcctccaggggcccaggagccctgcaccgtgaggccagcccaggtggagccactactgcggctctgcctccagcagggacagctgtgtgagccgctcccatccctggcagagtctagagccttggcccagctgtccctgagccgactcagccctgagcacaggcggctgcggagccctgcacagtaccaggttggggggaggcccaccctgtcattctgccctgtgcgcccccgccctcaccctgcccaccgctcctgtcctctgctccctgcaggtggtgctgtccgagaggctgcaggccctggtgaacagtctgtgtgcggggcagtccccctgagactcggagcggggctgactggaaacaacacgaatcactcacttttcccca

SEQ ID NO: 159354 - DNA, 1654 bp, Homo sapiens
  Payload ID: 11187
  Gene Symbol: NAPRT
  Gene Name: nicotinate phosphoribosyltransferase
  Uniprot ID: Q6XQN6
  ENST ID: ENST00000426292
  CDS Start-End: 26-1603
gcggagtccggacgtcgggagcaggatggcggcggagcaggaccccgaggcgcgcgcggcggcgcggccgctgctcactgacctctaccaggccaccatggcgttgggctattggcgcgcgggccgggcgcgggacgccgccgagttcgagctcttcttccgccgctgcccgttcggcggcgccttcgccttggccgccggcttgcgcgactgtgtgcgcttcctgcgcgccttccgcctgcgggacgccgacgtgcagttcctggcctcggtgctgcccccagacacggatcctgcgttcttcgagcaccttcgggccctcgactgctccgaggtgacggtgcgagccctgcccgagggctccctcgccttccccggagtgccgctcctgcaggtgtccgggccgctcctggtggtgcagctgctggagacaccgctgctctgcctggtcagctacgccagcctggtggccaccaacgcagcgcggcttcgcttgatcgcagggccagagaagcggctgctagagatgggcctgaggcgggctcagggccccgatgggggcctgacagcctccacctacagctacctgggcggcttcgacagcagcagcaacgtgctagcgggccagctgcgaggtgtgccggtggccgggaccctggcccactccttcgtcacttccttttcaggcagcgaggtgccccctgacccgatgttggcgccagcagctggtgagggccctggggtggacctggcggccaaagcccaggtgtggctggagcaggtgtgtgcccacctggggctgggggtgcaggagccgcatccaggcgagcgggcagcctttgtggcctatgccttggcttttccccgggccttccagggcctcctggacacctacagcgtgtggaggagtggtctccccaacttcctagcagtcgccctggccctgggagagctgggctaccgggcagtgggcgtgaggctggacagtggtgacctgctacagcaggctcaggagatccgcaaggtcttccgagctgctgcagcccagttccaggtgccctggctggagtcagtcctcatcgtagtcagcaacaacattgacgaggaggcgctggcccgactggcccaggagggcagtgaggtgaatgtcattggcattggcaccagtgtggtcacctgcccccaacagccttccctgggtggcgtctataagctggtggccgtggggggccagccacgaatgaagctgaccgaggaccccgagaagcagacgttgcctgggagcaaggctgctttccggctcctgggctctgacgggtctccactcatggacatgctgcagttagcagaagagccagtgccacaggctgggcaggagctgagggtgtggcctccaggggcccaggagccctgcaccgtgaggccagcccagctgtgtgagccgctcccatccctggcagagtctagagccttggcccagctgtccctgagccgactcagccctgagcacaggcggctgcggagccctgcacagtaccaggtggtgctgtccgagaggctgcaggccctggtgaacagtctgtgtgcggggcagtccccctgagactcggagcggggctgactggaaacaacacgaatcactcacttttcccca

SEQ ID NO: 159355 - DNA, 1965 bp, Homo sapiens
  Payload ID: 11187
  Gene Symbol: NAPRT
  Gene Name: nicotinate phosphoribosyltransferase
  Uniprot ID: Q6XQN6
  ENST ID: ENST00000449291
  CDS Start-End: 296-1912
gagacacgagcgactgggggcacctctggtgaccaagaccgggctgcgctccaaagaggccgttgggcctggagtggggttggggggtccgagaggagttgggtgacatcccccaccccatcccgggtccagctgtttcagcccctctcggcgcgccgatactattagccccacccgtcctccatcgagtcccgtgccgctcccaaacggcacgataagccccacagggagtgcgccataggccggggcgcgtcacggggtcggggcggggcggagtccggacgtcgggagcaggatggcggcggagcaggaccccgaggcgcgcgcggcggcgcggccgctgctcactgacctctaccaggccaccatggcgttgggctattggcgcgcgggccgggcgcgggacgccgccgagttcgagctcttcttccgccgctgcccgttcggcggcgccttcgccttggccgccggcttgcgcgactgtgtgcgcttcctgcgcgccttccgcctgcgggacgccgacgtgcagttcctggcctcggtgctgcccccagacacggatcctgcgttcttcgagcaccttcgggccctcgactgctccgaggtgacggtgcgagccctgcccgagggctccctcgccttccccggagtgccgctcctgcaggtgtccgggccgctcctggtggtgcagctgctggagacaccgctgctctgcctggtcagctacgccagcctggtggccaccaacgcagcgcggcttcgcttgatcgcagggccagagaagcggctgctagagatgggcctgaggcgggctcagggccccgatgggggcctgacagcctccacctacagctacctgggcggcttcgacagcagcagcaacgtgctagcgggccagctgcgaggtgtgccggtggccgggaccctggcccactccttcgtcacttccttttcaggcagcgaggtgccccctgacccgatgttggcgccagcagctggtgagggccctggggtggacctggcggccaaagcccaggtgtggctggagcaggtgtgtgcccacctggggctgggggtgcaggagccgcatccaggcgagcgggcagcctttgtggcctatgccttggcttttccccgggccttccagggcctcctggacacctacagcgtgtggaggagtggtctccccaacttcctagcagtcgccctggccctgggagagctgggctaccgggcagtgggcgtgaggctggacagtggtgacctgctacagcaggctcaggagatccgcaaggtcttccgagctgctgcagcccagttccaggtgccctggctggagtcagtcctcatcgtagtcagcaacaacattgacgaggaggcgctggcccgactggcccaggagggcagtgaggtgaatgtcattggcattggcaccagtgtggtcacctgcccccaacagccttccctgggtggcgtctataagctggtggccgtggggggccagccacgaatgaagctgaccgaggaccccgagaagcagacgttgcctgggagcaaggctgctttccggctcctgggctctgacgggtctccactcatggacatgctgcagttagcagaagagccagtgccacaggctgggcaggagctgagggtgtggcctccaggggcccaggagccctgcaccgtgaggccagcccaggtggagccactactgcggctctgcctccagcagggacagctgtgtgagccgctcccatccctggcagagtctagagccttggcccagctgtccctgagccgactcagccctgagcacaggcggctgcggagccctgcacagtaccaggtggtgctgtccgagaggctgcaggccctggtgaacagtctgtgtgcggggcagtccccctgagactcggagcggggctgactggaaacaacacgaatcactcacttttccccaca

SEQ ID NO: 159356 - DNA, 1877 bp, Homo sapiens
  Payload ID: 11187
  Gene Symbol: NAPRT
  Gene Name: nicotinate phosphoribosyltransferase
  ENST ID: ENST00000435154
  CDS Start-End: 26-1498
gcggagtccggacgtcgggagcaggatggcggcggagcaggaccccgaggcgcgcgcggcggcgcggccgctgctcactgacctctaccaggccaccatggcgttgggctattggcgcgcgggccgggcgcgggacgccgccgagttcgagctcttcttccgccgctgcccgttcggcggcgccttcgccttggccgccggcttgcgcgactgtgtgcgcttcctgcgcgccttccgcctgcgggacgccgacgtgcagttcctggcctcggtgctgcccccagacacggatcctgcgttcttcgagcaccttcgggccctcgactgctccgaggtgacggtgcgagccctgcccgagggctccctcgccttccccggagtgccgctcctgcaggtgtccgggccgctcctggtggtgcagctgctggagacaccgctgctctgcctggtcagctacgccagcctggtggccaccaacgcagcgcggcttcgcttgatcgcagggccagagaagcggctgctagagatgggcctgaggcgggctcagggccccgatgggggcctgacagcctccacctacagctacctgggcggcttcgacagcagcagcaacgtgctagcgggccagctgcgaggtgtgccggtggccgggaccctggcccactccttcgtcacttccttttcaggcagcgaggtgccccctgacccgatgttggcgccagcagctggtgagggccctggggtggacctggcggccaaagcccaggtgtggctggagcaggtgtgtgcccacctggggctgggggtgcaggagccgcatccaggcgagcgggcagcctttgtggcctatgccttggcttttccccgggccttccagggcctcctggacacctacagcgtgtggaggagtggtctccccaacttcctagcagtcgccctggccctgggagagctgggctaccgggcagtgggcgtgaggctggacagtggtgacctgctacagcaggctcaggagatccgcaaggtcttccgagctgctgcagcccagttccaggtgccctggctggagtcagtcctcatcgtagtcagcaacaacattgacgaggaggcgctggcccgactggcccaggagggcagtgaggtgaatgtcattggcattggcaccagtgtggtcacctgcccccaacagccttccctgggtggcgtctataagctggtggccgtggggggccagccacgaatgaagctgaccgaggaccccgagaagcagacgttgcctgggagcaaggctgctttccggctcctgggctctgacgggtctccactcatggacatgctgcagttagcagaagagccagtgccacaggctgggcaggagctgagggtgtggcctccaggggcccaggagccctgcaccgtgaggccagcccaggtggagccactactgcggctctgcctccagcagggacaggtggctgccccaccgccctcatcctgacccccagccccggtagagccctgactgggagctagccccaagcttctctttccttacctcctccctgcagctgtgtgagccgctcccatccctggcagagtctagagccttggcccagctgtccctgagccgactcagccctgagcacaggcggctgcggagccctgcacagtaccaggttggggggaggcccaccctgtcattctgccctgtgcgcccccgccctcaccctgcccaccgctcctgtcctctgctccctgcaggtggtgctgtccgagaggctgcaggccctggtgaacagtctgtgtgcggggcagtccccctgagactcggagcggggctgactggaaacaacacgaatcactcacttttccccaca

SEQ ID NO: 159357 - DNA, 866 bp, Homo sapiens
  Payload ID: 11187
  Gene Symbol: NAPRT
  Gene Name: nicotinate phosphoribosyltransferase
  ENST ID: ENST00000532645
  CDS Start-End: 1-386
tcgccttggccgccggcttgcgcgactgtgtgcgcttcctgcgcgccttccgcctgcgggacgccgacgtgcagttcctggcctcggtgctgcccccagacacggatcctgcgttcttcgagcaccttcgggccctcgactgctccgaggtgccgctcctgcaggtgtccgggccgctcctggtggtgcagctgctggagacaccgctgctctgcctggtcagctacgccagcctggtggccaccaacgcagcgcggcttcgcttgatcgcagggccagagaagcggctgctagagatgggcctgaggcgggctcagggccccgatgggggcctgacagcctccacctacagctacctgggcgatgttggcgccagcagctggtgagggccctggggtggacctggcggccaaagcccaggtgtggctggagcaggtgtgtgcccacctggggctgggggtgcaggagccgcatccaggcgagcgggcagcctttgtggcctatgccttggcttttccccgggccttccagggcctcctggacacctacagcgtgtggaggagtggtctccccaacttcctagcagtcgccctggccctgggagagctgggctaccgggcagtgggcgtgaggctggacagtggtgacctgctacagcaggctcaggagatccgcaaggtcttccgagctgctgcagcccagttccaggtgccctggctggagtcagtcctcatcgtagtcagcaacaacattgacgaggaggcgctggcccgactggcccaggagggcagtgaggtgaatgtcattggcattggcaccagtgtggtcacctgcccccaacagccttccctgggtggcgtctataa

SEQ ID NO: 159358 - DNA, 1066 bp, Homo sapiens
  Payload ID: 11187
  Gene Symbol: NAPRT
  Gene Name: nicotinate phosphoribosyltransferase
  ENST ID: ENST00000525583
  CDS Start-End: 1-491
gggcgcgggacgccgccgagttcgagctcttcttccgccgctgcccgttcggcggcgccttcgccttggccgccggcttgcgcgactgtgtgcgcttcctgcgcgccttccgcctgcgggacgccgacgtgcagttcctggcctcggtgctgcccccagacacggatcctgcgttcttcgagcaccttcgggccctcgactgctccgaggtgacggtgcgagccctgcccgagggctccctcgccttccccggagtgccgctcctgcaggtgtccgggccgctcctggtggtgcagctgctggagacaccgctgctctgcctggtcagctacgccagcctggtggccaccaacgcagcgcggcttcgcttgatcgcagggccagagaagcggctgctagagatgggcctgaggcgggctcagggccccgatgggggcctgacagcctccacctacagctacctgggcgatgttggcgccagcagctggtgagggccctggggtggacctggcggccaaagcccaggtgtggctggagcaggtgtgtgcccacctggggctgggggtgcaggagccgcatccaggcgagcgggcagcctttgtggcctatgccttggcttttccccgggccttccagggcctcctggacacctacagcgtgtggaggagtggtctccccaacttcctagcagtcgccctggccctgggagagctgggctaccgggcagtgggcgtgaggctggacagtggtgacctgctacagcaggctcaggagatccgcaaggtcttccgagctgctgcagcccagttccaggtgccctggctggagtcagtcctcatcgtagtcagcaacaacattgacgaggaggcgctggcccgactggcccaggagggcagtgaggtgaatgtcattggcattggcaccagtgtggtcacctgcccccaacagccttccctgggtggcgtctataagctggtggccgtggggggccagccacgaatgaagctgaccgaggaccccgagaagcagacgttgcctgggagcaaggctgctttccggctcctgg

SEQ ID NO: 159359 - DNA, 694 bp, Homo sapiens
  Payload ID: 11187
  Gene Symbol: NAPRT
  Gene Name: nicotinate phosphoribosyltransferase
  ENST ID: ENST00000460623
  CDS Start-End: 1-694
gttccaggtgccctggctggagtcagtcctcatcgtagtcagcaacaacattgacgaggaggcgctggcccgactggcccaggagggcagtgaggtgaatgtcattggcattggcaccagtgtggtcacctgcccccaacagccttccctgggtggcgtctataagctggtggccgtggggggccagccacgaatgaagctgaccgaggaccccgagaagcagacgttgcctgggagcaaggctgctttccggctcctgggctctgacgggtctccactcatggacatgctgcagttagcagaagagccagtgccacaggctgggcaggagctgagggtgtggcctccaggggcccaggagccctgcaccgtgaggccagcccagctgtgtgagccgctcccatccctggcagagtctagagccttggcccagctgtccctgagccgactcagccctgagcacaggcggctgcggagccctgcacagtaccaggttggggggaggcccaccctgtcattctgccctgtgcgcccccgccctcaccctgcccaccgctcctgtcctctgctccctgcaggtggtgctgtccgagaggctgcaggccctggtgaacagtctgtgtgcggggcagtccccctgagactcggagcggggctgactggaaacaacacgaatcactcacttttccccaca

SEQ ID NO: 159360 - DNA, 1702 bp, Homo sapiens
  Payload ID: 11187
  Gene Symbol: NAPRT
  Gene Name: nicotinate phosphoribosyltransferase
  Uniprot ID: Q6XQN6
  ENST ID: ENST00000621955
  CDS Start-End: 34-1650
ggggcggggcggagtccggacgtcgggagcaggatggcggcggagcaggaccccgaggcgcgcgcggcggcgcggccgctgctcactgacctctaccaggccaccatggcgttgggctattggcgcgcgggccgggcgcgggacgccgccgagttcgagctcttcttccgccgctgcccgttcggcggcgccttcgccttggccgccggcttgcgcgactgtgtgcgcttcctgcgcgccttccgcctgcgggacgccgacgtgcagttcctggcctcggtgctgcccccagacacggatcctgcgttcttcgagcaccttcgggccctcgactgctccgaggtgacggtgcgagccctgcccgagggctccctcgccttccccggagtgccgctcctgcaggtgtccgggccgctcctggtggtgcagctgctggagacaccgctgctctgcctggtcagctacgccagcctggtggccaccaacgcagcgcggcttcgcttgatcgcagggccagagaagcggctgctagagatgggcctgaggcgggctcagggccccgatgggggcctgacagcctccacctacagctacctgggcggcttcgacagcagcagcaacgtgctagcgggccagctgcgaggtgtgccggtggccgggaccctggcccactccttcgtcacttccttttcaggcagcgaggtgccccctgacccgatgttggcgccagcagctggtgagggccctggggtggacctggcggccaaagcccaggtgtggctggagcaggtgtgtgcccacctggggctgggggtgcaggagccgcatccaggcgagcgggcagcctttgtggcctatgccttggcttttccccgggccttccagggcctcctggacacctacagcgtgtggaggagtggtctccccaacttcctagcagtcgccctggccctgggagagctgggctaccgggcagtgggcgtgaggctggacagtggtgacctgctacagcaggctcaggagatccgcaaggtcttccgagctgctgcagcccagttccaggtgccctggctggagtcagtcctcatcgtagtcagcaacaacattgacgaggaggcgctggcccgactggcccaggagggcagtgaggtgaatgtcattggcattggcaccagtgtggtcacctgcccccaacagccttccctgggtggcgtctataagctggtggccgtggggggccagccacgaatgaagctgaccgaggaccccgagaagcagacgttgcctgggagcaaggctgctttccggctcctgggctctgacgggtctccactcatggacatgctgcagttagcagaagagccagtgccacaggctgggcaggagctgagggtgtggcctccaggggcccaggagccctgcaccgtgaggccagcccaggtggagccactactgcggctctgcctccagcagggacagctgtgtgagccgctcccatccctggcagagtctagagccttggcccagctgtccctgagccgactcagccctgagcacaggcggctgcggagccctgcacagtaccaggtggtgctgtccgagaggctgcaggccctggtgaacagtctgtgtgcggggcagtccccctgagactcggagcggggctgactggaaacaacacgaatcactcacttttccccac

SEQ ID NO: 159361 - DNA, 866 bp, Homo sapiens; identical to SEQ ID NO: 159357
  Payload ID: 11187
  Gene Symbol: NAPRT
  Gene Name: nicotinate phosphoribosyltransferase
  ENST ID: ENST00000632020
  CDS Start-End: 1-386

SEQ ID NO: 159362 - DNA, 694 bp, Homo sapiens; identical to SEQ ID NO: 159359
  Payload ID: 11187
  Gene Symbol: NAPRT
  Gene Name: nicotinate phosphoribosyltransferase
  ENST ID: ENST00000632672
  CDS Start-End: 1-694

SEQ ID NO: 159363 - DNA, 1066 bp, Homo sapiens; identical to SEQ ID NO: 159358
  Payload ID: 11187
  Gene Symbol: NAPRT
  Gene Name: nicotinate phosphoribosyltransferase
  ENST ID: ENST00000632636
  CDS Start-End: 1-491

SEQ ID NO: 159364 - DNA, 1774 bp, Homo sapiens; identical to SEQ ID NO: 159353
  Payload ID: 11187
  Gene Symbol: NAPRT
  Gene Name: nicotinate phosphoribosyltransferase
  ENST ID: ENST00000633197
  CDS Start-End: 22-1774

SEQ ID NO: 159365 - DNA, 1650 bp, Homo sapiens
  Payload ID: 11187
  Gene Symbol: NAPRT
  Gene Name: nicotinate phosphoribosyltransferase
  Uniprot ID: Q6XQN6
  ENST ID: ENST00000632139
  CDS Start-End: 22-1599
agtccggacgtcgggagcaggatggcggcggagcaggaccccgaggcgcgcgcggcggcgcggccgctgctcactgacctctaccaggccaccatggcgttgggctattggcgcgcgggccgggcgcgggacgccgccgagttcgagctcttcttccgccgctgcccgttcggcggcgccttcgccttggccgccggcttgcgcgactgtgtgcgcttcctgcgcgccttccgcctgcgggacgccgacgtgcagttcctggcctcggtgctgcccccagacacggatcctgcgttcttcgagcaccttcgggccctcgactgctccgaggtgacggtgcgagccctgcccgagggctccctcgccttccccggagtgccgctcctgcaggtgtccgggccgctcctggtggtgcagctgctggagacaccgctgctctgcctggtcagctacgccagcctggtggccaccaacgcagcgcggcttcgcttgatcgcagggccagagaagcggctgctagagatgggcctgaggcgggctcagggccccgatgggggcctgacagcctccacctacagctacctgggcggcttcgacagcagcagcaacgtgctagcgggccagctgcgaggtgtgccggtggccgggaccctggcccactccttcgtcacttccttttcaggcagcgaggtgccccctgacccgatgttggcgccagcagctggtgagggccctggggtggacctggcggccaaagcccaggtgtggctggagcaggtgtgtgcccacctggggctgggggtgcaggagccgcatccaggcgagcgggcagcctttgtggcctatgccttggcttttccccgggccttccagggcctcctggacacctacagcgtgtggaggagtggtctccccaacttcctagcagtcgccctggccctgggagagctgggctaccgggcagtgggcgtgaggctggacagtggtgacctgctacagcaggctcaggagatccgcaaggtcttccgagctgctgcagcccagttccaggtgccctggctggagtcagtcctcatcgtagtcagcaacaacattgacgaggaggcgctggcccgactggcccaggagggcagtgaggtgaatgtcattggcattggcaccagtgtggtcacctgcccccaacagccttccctgggtggcgtctataagctggtggccgtggggggccagccacgaatgaagctgaccgaggaccccgagaagcagacgttgcctgggagcaaggctgctttccggctcctgggctctgacgggtctccactcatggacatgctgcagttagcagaagagccagtgccacaggctgggcaggagctgagggtgtggcctccaggggcccaggagccctgcaccgtgaggccagcccagctgtgtgagccgctcccatccctggcagagtctagagccttggcccagctgtccctgagccgactcagccctgagcacaggcggctgcggagccctgcacagtaccaggtggtgctgtccgagaggctgcaggccctggtgaacagtctgtgtgcggggcagtccccctgagactcggagcggggctgactggaaacaacacgaatcactcacttttcccca

SEQ ID NO: 159366 - DNA, 5864 bp, Homo sapiens
  Payload ID: 11188
  Gene Symbol: NID1
  Gene Name: nidogen 1
  Uniprot ID: P14543
  ENST ID: ENST00000264187
  CDS Start-End: 84-3827
ggctgccaggggcgtccggttacatccccgccttcctctgtcctggccgcgggaccgggtttgcgggaccgcagttcgggaacatgttggcctcgagcagccggatccgggctgcgtggacgcgggcgctgctgctgccgctgctgctggcggggcctgtgggctgcctgagccgccaggagctctttcccttcggccccggacagggggacctggagctggaggacggggatgacttcgtctctcctgccctggagctgagtggggcgctccgcttctacgacagatccgacatcgacgcagtctacgtcaccacaaatggcatcattgctacgagtgaacccccggccaaagaatcccatcccgggctcttcccaccaacattcggtgcagtcgcccctttcctggcggacttggacacgaccgatggcctggggaaggtttattatcgagaagacttatccccctccatcactcagcgagcagcagagtgtgtccacagagggttcccggagatctctttccagcctagtagcgcggtggttgtcacttgggaatccgtggccccctaccaagggcccagcagggacccagaccagaaaggcaagagaaacacgttccaggctgttctagcctcctctgattccagctcctatgccattttcctttatcctgaggatggtctgcagttccatacgacattctcaaagaaggaaaacaaccaagttcctgccgtggttgcattcagtcaaggttcagtgggattcttatggaagagcaacggagcttataacatatttgctaatgacagggaatcagttgaaaatttggccaagagtagtaactctgggcagcagggtgtctgggtgtttgagattgggagtccagccaccaccaatggcgtggtgcctgcagacgtgatcctcggaactgaagatggggcagagtatgatgatgaggatgaagattatgacctggcgaccactcgtctgggcctggaggatgtgggcaccacgcccttctcctacaaggctctgagaaggggaggtgctgacacatacagtgtgcccagcgtcctctccccgcgccgggcagctaccgaaaggccccttggacctcccacagagagaaccaggtctttccagttggcagtggagacttttcaccagcagcaccctcaggtcatagatgtggatgaagttgaggaaacaggagttgttttcagctataacacggattcccgccagacgtgtgctaacaacagacaccagtgctcggtgcacgcagagtgcagggactacgccacgggcttctgctgcagctgtgtcgctggctatacgggcaatggcaggcaatgtgttgcagaaggttccccccagcgagtcaatggcaaggtgaaaggaaggatctttgtggggagcagccaggtccccattgtctttgagaacactgacctccactcttacgtagtaatgaaccacgggcgctcctacacagccatcagcaccattcccgagaccgttggatattctctgcttccactggccccagttggaggcatcattggatggatgtttgcagtggagcaggacggattcaagaatgggttcagcatcaccgggggtgagttcactcgccaggctgaggtgaccttcgtggggcacccgggcaatctggtcattaagcagcggttcagcggcatcgatgagcatgggcacctgaccatcgacacggagctggagggccgcgtgccgcagattccgttcggctcctccgtgcacattgagccctacacggagctgtaccactactccacctcagtgatcacttcctcctccacccgggagtacacggtgactgagcccgagcgagatggggcatctccttcacgcatctacacttaccagtggcgccagaccatcaccttccaggaatgcgtccacgatgactcccggccagccctgcccagcacccagcagctctcggtggacagcgtgttcgtcctgtacaaccaggaggagaagatcttgcgctatgctctcagcaactccattgggcctgtgagggaaggctcccctgatgctcttcagaatccctgctacatcggcactcatgggtgtgacaccaacgcggcctgtcgccctggtcccaggacacagttcacctgcgagtgctccatcggcttccgaggagacgggcgaacctgctatgatattgatgaatgttcagaacaaccctcagtgtgtgggagccacacaatctgcaataatcacccaggaaccttccgctgcgagtgtgtggagggctaccagttttcagatgagggaacgtgtgtggctgtcgtggaccagcgccccatcaactactgtgaaactggccttcataactgcgacataccccagcgggcccagtgtatctacacaggaggctcctcctacacctgttcctgcttgccaggcttttctggggatggccaagcctgccaagatgtagatgaatgccagccaagccgatgtcaccctgacgccttctgctacaacactccaggctctttcacgtgccagtgcaaacctggttatcagggagacggcttccgttgcgtgcccggagaggtggagaaaacccggtgccagcacgagcgagaacacattctcggggcagcgggggcgacagacccacagcgacccattcctccggggctgttcgttcctgagtgcgatgcgcacgggcactacgcgcccacccagtgccacggcagcaccggctactgctggtgcgtggatcgcgacggccgcgaggtggagggcaccaggaccaggcccgggatgacgcccccgtgtctgagtacagtggctcccccgattcaccaaggacctgcggtgcctaccgccgtgatccccttgcctcctgggacccatttactctttgcccagactgggaagattgagcgcctgcccctggagggaaataccatgaggaagacagaagcaaaggcgttccttcatgtcccggctaaagtcatcattggactggcctttgactgcgtggacaagatggtttactggacggacatcactgagccttccattgggagagctagtctacatggtggagagccaaccaccatcattagacaagatcttggaagtccagaaggtatcgctgttgatcaccttggccgcaacatcttctggacagactctaacctggatcgaatagaagtggcgaagctggacggcacgcagcgccgggtgctctttgagactgacttggtgaatcccagaggcattgtaacggattccgtgagagggaacctttactggacagactggaacagagataaccccaagattgaaacttcctacatggacggcacgaaccggaggatccttgtgcaggatgacctgggcttgcccaatggactgaccttcgatgcgttctcatctcagctctgctgggtggatgcaggcaccaatcgggcggaatgcctgaaccccagtcagcccagcagacgcaaggctctcgaagggctccagtatccttttgctgtgacgagctacgggaagaatctgtatttcacagactggaagatgaattccgtggttgctctcgatcttgcaatttccaaggagacggatgctttccaaccccacaagcagacccggctgtatggcatcaccacggccctgtctcagtgtccgcaaggccataactactgctcagtgaacaatggcggctgcacccacctatgcttggccaccccagggagcaggacctgccgttgccctgacaacaccttgggagttgactgtatcgaacagaaatgaagacaagagtgccttatttcctttccaagtatttcacagcaacactctacttgaagcaacttggtccagattgaaaagtgtcctctggctgagtggccactaggcccagacccagcccagcctgagccccaacaacttttccctcactgttccccaaaacatgcaccctggacttctctaatagaaaagtctccacccctacacaaggacagaaccctccacccctacccccaaccctcagacagacttatacacccctgagtgaggattacatgcccatcccagtgtcctaggaccttttcccaatactagccccccagtggtgaacagaacctcccaaatttgagttgcacccttccctgtggccttatgagctcagcctcgctttgaggtacccaccgtcctgtcagctccttgacctatgagccggggcctgactaggaaaagttgggagttaaggaggaaattagcattccttaatgttttgttttggtgctctgaatttcttctttattatagtcctatagttttactcctcagttcctcaccatcatcatcttgtctaagacccccattataatattcatgcgctgctttttcatcaaaacctaccctgtcctagagatctatgggcatttggtggatgataatgagcagcccctcccagatagaatgtcaatatttgagcagtaggatattggcatttgttagttaaaggcttaaatcaaaagaatgtccaatggtaggaatttcaaggtgtaggtcagatatttgagaataggggatttttttgatgtgccttaaattataccaaagattactaattattcctctttgcccaaaatacttgcatccaaggttctagtctctgttgctgtgctggtctttagccccactgcttgcactgatgtccctccttttcacggagacctatctgaggtacaggatggggctggcaccagatgatgtcccaccacagtccctcacctccggcctccacatgacagaaccaatttacactcaaccatgacctcacccctccttggtttctccctcgatctgtggccctttttggatgtattcttatctaacaacacaatccggaaagactgaattgaatatttatactaatggttcatatcctttattgctcaatgatctaattaaagggatcattgccacatttcatgtttatatttctacaatttgtttagaaaacatctcctgaccatatcagtagctcgtgttatctttttatcaactgcttcccagagtcctaaaacaatagaaattttggattgaaaagttcagcataaggagtttgagtcagtaaaggatgggataaaggagtcgagatgattcaatgaaaagtatcacaaaaaagagattgatcaacaagagaaataaaaaagcccaagaggaagtggtaggggaaggaatttaagaacagcaataagtaaaactcttaagtaactccaaaaagaaaatggtacattttgccaaagaccacttatacttgagaacatggaagaatttgcctgatactctctttggggaaaagagtctctcctcttttcctcaaaccccagtacactcagcctctctgccccaccttctcctgactttgtcctcacttgcttctgcagtacattggaacctgaattgaaagaaagtcttccttgaataattggagtttgtcttgagaggcaaatatagccccaagaatcacaagattcgaggaccatgtaggtcttttacgtagcccaaatccataaattagtctcactttttgtatttatcgtttcatattaaaccctctatatcaaatgttcatcatgattttgtatgatttttataactattttattcattttattagatttattctaaaattttttaatggtaaattcttaaactgtggaaaccactgaaggtgcttattaactgttctcccagatttgtacaagtattggatgattccttgagtttacagctgtacaaatagtgtggaaaataaactttttttaaaaaagaaaa

SEQ ID NO: 159367 - DNA, 5412 bp, Homo sapiens
  Payload ID: 11188
  Gene Symbol: NID1
  Gene Name: nidogen 1
  Uniprot ID: P14543
  ENST ID: ENST00000366595
  CDS Start-End: 31-3375
accgggtttgcgggaccgcagttcgggaacatgttggcctcgagcagccggatccgggctgcgtggacgcgggcgctgctgctgccgctgctgctggcggggcctgtgggctgcctgagccgccaggagctctttcccttcggccccggacagggggacctggagctggaggacggggatgacttcgtctctcctgccctggagctgagtggggcgctccgcttctacgacagatccgacatcgacgcagtctacgtcaccacaaatggcatcattgctacgagtgaacccccggccaaagaatcccatcccgggctcttcccaccaacattcggtgcagtcgcccctttcctggcggacttggacacgaccgatggcctggggaaggtttattatcgagaagacttatccccctccatcactcagcgagcagcagagtgtgtccacagagggttcccggagatctctttccagcctagtagcgcggtggttgtcacttgggaatccgtggccccctaccaagggcccagcagggacccagaccagaaaggcaagagaaacacgttccaggctgttctagcctcctctgattccagctcctatgccattttcctttatcctgaggatggtctgcagttccatacgacattctcaaagaaggaaaacaaccaagttcctgccgtggttgcattcagtcaaggttcagtgggattcttatggaagagcaacggagcttataacatatttgctaatgacagggaatcagttgaaaatttggccaagagtagtaactctgggcagcagggtgtctgggtgtttgagattgggagtccagccaccaccaatggcgtggtgcctgcagacgtgatcctcggaactgaagatggggcagagtatgatgatgaggatgaagattatgacctggcgaccactcgtctgggcctggaggatgtgggcaccacgcccttctcctacaaggctctgagaaggggaggtgctgacacatacagtgtgcccagcgtcctctccccgcgccgggcagctaccgaaaggccccttggacctcccacagagagaaccaggtctttccagttggcagtggagacttttcaccagcagcaccctcaggtcatagatgtggatgaagttgaggaaacaggagttgttttcagctataacacggattcccgccagacgtgtgctaacaacagacaccagtgctcggtgcacgcagagtgcagggactacgccacgggcttctgctgcagctgtgtcgctggctatacgggcaatggcaggcaatgtgttgcagaaggttccccccagcgagtcaatggcaaggtgaaaggaaggatctttgtggggagcagccaggtccccattgtctttgagaacactgacctccactcttacgtagtaatgaaccacgggcgctcctacacagccatcagcaccattcccgagaccgttggatattctctgcttccactggccccagttggaggcatcattggatggatgtttgcagtggagcaggacggattcaagaatgggttcagcatcaccgggggtgagttcactcgccaggctgaggtgaccttcgtggggcacccgggcaatctggtcattaagcagcggttcagcggcatcgatgagcatgggcacctgaccatcgacacggagctggagggccgcgtgccgcagattccgttcggctcctccgtgcacattgagccctacacggagctgtaccactactccacctcagtgatcacttcctcctccacccgggagtacacggtgactgagcccgagcgagatggggcatctccttcacgcatctacacttaccagtggcgccagaccatcaccttccaggaatgcgtccacgatgactcccggccagccctgcccagcacccagcagctctcggtggacagcgtgttcgtcctgtacaaccaggaggagaagatcttgcgctatgctctcagcaactccattgggcctgtgagggaaggctcccctgatgctcttcagaatccctgctacatcggcactcatgggtgtgacaccaacgcggcctgtcgccctggtcccaggacacagttcacctgcgagtgctccatcggcttccgaggagacgggcgaacctgctatgaggtggagaaaacccggtgccagcacgagcgagaacacattctcggggcagcgggggcgacagacccacagcgacccattcctccggggctgttcgttcctgagtgcgatgcgcacgggcactacgcgcccacccagtgccacggcagcaccggctactgctggtgcgtggatcgcgacggccgcgaggtggagggcaccaggaccaggcccgggatgacgcccccgtgtctgagtacagtggctcccccgattcaccaaggacctgcggtgcctaccgccgtgatccccttgcctcctgggacccatttactctttgcccagactgggaagattgagcgcctgcccctggagggaaataccatgaggaagacagaagcaaaggcgttccttcatgtcccggctaaagtcatcattggactggcctttgactgcgtggacaagatggtttactggacggacatcactgagccttccattgggagagctagtctacatggtggagagccaaccaccatcattagacaagatcttggaagtccagaaggtatcgctgttgatcaccttggccgcaacatcttctggacagactctaacctggatcgaatagaagtggcgaagctggacggcacgcagcgccgggtgctctttgagactgacttggtgaatcccagaggcattgtaacggattccgtgagagggaacctttactggacagactggaacagagataaccccaagattgaaacttcctacatggacggcacgaaccggaggatccttgtgcaggatgacctgggcttgcccaatggactgaccttcgatgcgttctcatctcagctctgctgggtggatgcaggcaccaatcgggcggaatgcctgaaccccagtcagcccagcagacgcaaggctctcgaagggctccagtatccttttgctgtgacgagctacgggaagaatctgtatttcacagactggaagatgaattccgtggttgctctcgatcttgcaatttccaaggagacggatgctttccaaccccacaagcagacccggctgtatggcatcaccacggccctgtctcagtgtccgcaaggccataactactgctcagtgaacaatggcggctgcacccacctatgcttggccaccccagggagcaggacctgccgttgccctgacaacaccttgggagttgactgtatcgaacagaaatgaagacaagagtgccttatttcctttccaagtatttcacagcaacactctacttgaagcaacttggtccagattgaaaagtgtcctctggctgagtggccactaggcccagacccagcccagcctgagccccaacaacttttccctcactgttccccaaaacatgcaccctggacttctctaatagaaaagtctccacccctacacaaggacagaaccctccacccctacccccaaccctcagacagacttatacacccctgagtgaggattacatgcccatcccagtgtcctaggaccttttcccaatactagccccccagtggtgaacagaacctcccaaatttgagttgcacccttccctgtggccttatgagctcagcctcgctttgaggtacccaccgtcctgtcagctccttgacctatgagccggggcctgactaggaaaagttgggagttaaggaggaaattagcattccttaatgttttgttttggtgctctgaatttcttctttattatagtcctatagttttactcctcagttcctcaccatcatcatcttgtctaagacccccattataatattcatgcgctgctttttcatcaaaacctaccctgtcctagagatctatgggcatttggtggatgataatgagcagcccctcccagatagaatgtcaatatttgagcagtaggatattggcatttgttagttaaaggcttaaatcaaaagaatgtccaatggtaggaatttcaaggtgtaggtcagatatttgagaataggggatttttttgatgtgccttaaattataccaaagattactaattattcctctttgcccaaaatacttgcatccaaggttctagtctctgttgctgtgctggtctttagccccactgcttgcactgatgtccctccttttcacggagacctatctgaggtacaggatggggctggcaccagatgatgtcccaccacagtccctcacctccggcctccacatgacagaaccaatttacactcaaccatgacctcacccctccttggtttctccctcgatctgtggccctttttggatgtattcttatctaacaacacaatccggaaagactgaattgaatatttatactaatggttcatatcctttattgctcaatgatctaattaaagggatcattgccacatttcatgtttatatttctacaatttgtttagaaaacatctcctgaccatatcagtagctcgtgttatctttttatcaactgcttcccagagtcctaaaacaatagaaattttggattgaaaagttcagcataaggagtttgagtcagtaaaggatgggataaaggagtcgagatgattcaatgaaaagtatcacaaaaaagagattgatcaacaagagaaataaaaaagcccaagaggaagtggtaggggaaggaatttaagaacagcaataagtaaaactcttaagtaactccaaaaagaaaatggtacattttgccaaagaccacttatacttgagaacatggaagaatttgcctgatactctctttggggaaaagagtctctcctcttttcctcaaaccccagtacactcagcctctctgccccaccttctcctgactttgtcctcacttgcttctgcagtacattggaacctgaattgaaagaaagtcttccttgaataattggagtttgtcttgagaggcaaatatagccccaagaatcacaagattcgaggaccatgtaggtcttttacgtagcccaaatccataaattagtctcactttttgtatttatcgtttcatattaaaccctctatatcaaatgttcatcatgattttgtatgatttttataactattttattcattttattagatttattctaaaattttttaatggtaaattcttaaactgtggaaaccactgaaggtgcttattaactgttctcccagatttgtacaagtattggatgattccttgagtttacagctgtacaaatagtgtggaaaataaactttttttaaaaaagaaaa

SEQ ID NO: 159368 - DNA, 4811 bp, Homo sapiens
  Payload ID: 11189
  Gene Symbol: NID2
  Gene Name: nidogen 2 (osteonidogen)
  Uniprot ID: Q14112
  ENST ID: ENST00000216286
  CDS Start-End: 1-4128
atggagggggaccgggtggccgggcggccggtgctgtcgtcgttaccagtgctactgctgctgccgttgctaatgttgcgggccgcggcgctgcacccagacgagctcttcccacacggggagtcgtggggggaccagctcctgcaggaaggcgacgacgaaagctcagccgtggtgaagctggcgaatcccctgcacttctacgaagcccgattcagcaacctctacgtgggcaccaacggcatcatctccactcaggacttccccagggaaacgcagtatgtggactatgatttccccaccgacttcccggccatcgccccttttctggcggacatcgacacgagccacggcagaggccgagtcctgtaccgagaggacacctcccccgcagtgctgggcctggccgcccgctatgtgcgcgctggcttcccgcgctctgcgcgctttacccccacccacgccttcctggccacctgggagcaggtaggcgcttacgaggaggtcaagcgcggggcgctgccctcgggagagctgaacactttccaggcagttttggcatctgatgggtctgatagctacgccctctttctttatcctgccaacggcctgcagttccttggaacccgccccaaagagtcttacaatgtccagcttcagcttccagctcgggtgggcttctgccgaggggaggctgatgatctgaagtcagaaggaccatatttcagcttgactagcactgaacagtctgtgaaaaatctctatcaactaagcaacctggggatccctggagtgtgggctttccatatcggcagcacttccccgttggacaatgtcaggccagctgcagttggagacctttccgctgcccactcttctgttcccctgggacgttccttcagccatgctacagccctggaaagtgactataatgaggacaatttggattactatgatgtgaatgaggaggaagctgaataccttccgggtgaaccagaggaggcattgaatggccacagcagcattgatgtttccttccaatccaaagtggatacaaagcctttagaggaatcttccaccttggatcctcacaccaaagaaggaacatctctgggagaggtagggggcccagatttaaaaggccaagttgagccctgggatgagagagagaccagaagcccagctccaccagaggtagacagagattcactggctccttcctgggaaaccccaccaccgtaccccgaaaacggaagcatccagccctacccagatggagggccagtgccttcggaaatggatgttcccccagctcatcctgaagaagaaattgttcttcgaagttaccctgcttcaggtcacactacacccttaagtcgagggacgtatgaggtgggactggaagacaacataggttccaacaccgaggtcttcacgtataatgctgccaacaaggaaacctgtgaacacaaccacagacaatgctcccggcatgccttctgcacggactatgccactggcttctgctgccactgccaatccaagttttatggaaatgggaagcactgtctgcctgaaggggcacctcaccgagtgaatgggaaagtgagtggccacctccacgtgggccatacacccgtgcacttcactgatgtggacctgcatgcgtatatcgtgggcaatgatggcagagcctacacggccatcagccacatcccacagccagcagcccaggccctcctccccctcacaccaattggaggcctgtttggctggctctttgctttagaaaaacctggctctgagaacggcttcagcctcgcaggtgctgcctttacccatgacatggaagttacattctacccgggagaggagacggttcgtatcactcaaactgctgagggacttgacccagagaactacctgagcattaagaccaacattcaaggccaggtgccttacgtctcagcaaatttcacagcccacatctctccctacaaggagctgtaccactactccgactccactgtgacctctacaagttccagagactactctctgacttttggtgcaatcaaccaaacatggtcctaccgcatccaccagaacatcacttaccaggtgtgcaggcacgcccccagacacccgtccttccccaccacccagcagctgaacgtggaccgggtctttgccttgtataatgacgaagaaagagtgcttagatttgctgtgaccaatcaaattggcccggtcaaagaggattcagaccccactccggggaatccttgctatgatgggagccacatgtgtgacacaacagcacggtgccatccagggacaggtgtagattacacctgtgagtgcgcatctgggtaccagggagatggacggaactgtgtggatgaaaatgaatgtgcaactggctttcatcgctgtggccccaactctgtatgtatcaacttgcctggaagctacaggtgtgagtgccggagtggttatgagtttgcagatgaccggcatacttgcatcttgatcaccccacctgccaacccctgtgaggatggcagtcatacctgtgctcctgctgggcaggcccggtgtgttcaccatggaggcagcacgttcagctgtgcctgcctgcctggttatgccggcgatgggcaccagtgcactgatgtagatgaatgctcagaaaacagatgtcaccctgcagctacctgctacaatactcctggttccttctcctgccgttgtcaacccggatattatggggatggatttcagtgcatacctgactccacctcaagcctgacaccctgtgaacaacagcagcgccatgcccaggcccagtatgcctaccctggggcccggttccacatcccccaatgcgacgagcagggcaacttcctgcccctacagtgtcatggcagcactggtttctgctggtgcgtggaccctgatggtcatgaagttcctggtacccagactccacctggctccaccccgcctcactgtggaccatcaccagagcccacccagaggcccccgaccatctgtgagcgctggagggaaaacctgctggagcactacggtggcaccccccgggatgaccagtacgtgccccagtgcgatgacctgggccacttcatccccctgcagtgccacggaaagagcgacttctgctggtgtgtggacaaagatggcagagaggtgcagggcacccgctcccagccaggcaccacccctgcgtgtatacccaccgtcgctccacccatggtccggcccacgccccggccagatgtgacccctccatctgtgggcaccttcctgctctatactcagggccagcagattggctacttacccctcaatggcaccaggcttcagaaggatgcagctaagaccctgctgtctctgcatggctccataatcgtgggaattgattacgactgccgggagaggatggtgtactggacagatgttgctggacggacaatcagccgtgctggtctggaactgggagcagagcctgagacgatcgtgaattcaggtctgataagccctgaaggacttgccatagaccacatccgcagaacaatgtactggacggacagtgtcctggataagatagagagcgccctgctggatggctctgagcgcaaggtcctcttctacacagatctggtgaatccccgtgccatcgctgtggatccaatccgaggcaacttgtactggacagactggaatagagaagctcctaaaattgaaacgtcatctttagatggagaaaacagaagaattctgatcaatacagacattggattgcccaatggcttaacctttgaccctttctctaaactgctctgctgggcagatgcaggaaccaaaaaactggagtgtacactacctgatggaactggacggcgtgtcattcaaaacaacctcaagtaccccttcagcatcgtaagctatgcagatcacttctaccacacagactggaggagggatggtgttgtatcagtaaataaacatagtggccagtttactgatgagtatctcccagaacaacgatctcacctctacgggataactgcagtctacccctactgcccaacaggaagaaagtaagtacagtaatgtaaaggaagacttggagtttacaatcagaacctggaccctaaagaacagtgactgcaaaggcaaagaaagtaaaaaaggaattggccattagacgttcctgagcatccaagatgaacattttgtagtgcaaaaagacttttgtgaaaagctgatacctcaatctttactactgtatttttaaaaatgaaggttgttattgcaagtttaaaaaggtaacagaattttaactgttgcttattaaagcaacttcttgtaaacatttatcattaatatttaaaagatcaaattcattcaactaagaattagagtttaagactctaaacctgatttttgccatggattccttctggccaagaaattaaagcacatgtgatcaatataacaatataatcctaaaccttgacagttggagaagccaatgcagaactgatgggaaaggaccaattatttatagtttcccaacaaaagttctaagattttttacctctgcatcagtgcatttctatttatatcaaaaggtgctaaaatgattcaatttgcattttctgatcctgtagtgcctctatagaagtacccacagaaagtaaagtatcacatttataaataccaaagatgtaacaattttaaaattttctagattactccaataaagtgttttaagttttcctatg

SEQ ID NO: 159369 - DNA, 4798 bp, Homo sapiens
  Payload ID: 11189
  Gene Symbol: NID2
  Gene Name: nidogen 2 (osteonidogen)
  ENST ID: ENST00000541773
  CDS Start-End: 1-4122
atggagggggaccgggtggccgggcggccggtgctgtcgtcgttaccagtgctactgctgctgccgttgctaatgttgcgggccgcggcgctgcacccagacgagctcttcccacacggggagtcgtggggggaccagctcctgcaggaaggcgaccgaaagctcagccgtggtgaagctggcgaatcccctgcacttacgaagcccgattcagcaacctctacgtgggcaccaacggcatcatctccactcaggacttccccagggaaacgcagtatgtggactatgatttccccaccgacttcccggccatcgccccttttctggcggacatcgacacgagccacggcagaggccgagtcctgtaccgagaggacacctcccccgcagtgctgggcctggccgcccgctatgtgcgcgctggcttcccgcgctctgcgcgctttaccccacccacgccttcctggccacctgggagcaggtaggcgcttacgaggaggtcaagcgcgggcgctgccctcgggagagctgaacactttccaggcagttttggcatctgatgggtctgatagctacgccctctttctttatcctgccaacggcctgcagttccttggaacccgccccaaagagtcttacaatgtccagcttcagcttccagctcgggtgggcttctgccgaggggaggctgatgatctgaagtcagaaggaccatatttcagcttgactagcactgaacagtctgtgaaaaatctctatcaactaagcaacctggggatccctggagtgtgggctttccatatcggcagcacttccccgttggacaatgtcaggccagctgcagttggagacctttccgctgcccactcttctgttcccctgggacgttccttcagccatgctacagccctggaaagtgactataatgaggacaatttggattactatgatgtgaatgaggaggaagctgaataccttccgggtgaaccagaggaggcattgaatggccacagcagcattgatgtttccttccaatccaaagtggatacaaagcctttagaggaatcttccaccttggatcctcacaccaaagaaggaacatctctgggagaggtagggggcccagatttaaaaggccaagttgagccctgggatgagagagagaccagaagcccagctccaccagaggtagacagagattcactggctccttcctgggaaaccccaccaccgtaccccgaaaacggaagcatccagccctacccagatggagggccagtgccttcggaaatggatgttcccccagctcatcctgaagaagaaattgttcttcgaagttaccctgcttcaggtcacactacacccttaagtcgagggacgtatgaggtgggactggaagacaacataggttccaacaccgaggtcttcacgtataatgctgccaacaaggaaacctgtgaacacaaccacagacaatgctcccggcatgccttctgcacggactatgccactggcttctgctgccactgccaatccaagttttatggaaatgggaagcactgtctgcctgaaggggcacctcaccgagtgaatgggaaagtgagtggccacctccacgtgggccatacacccgtgcacttcactgatgtggacctgcatgcgtatatcgtgggcaatgatggcagagcctacacggccatcagccacatcccacagccagcagcccaggccctcctccccctcacaccaattggaggcctgtttggctggctctttgctttagaaaaacctggctctgagaacggcttcagcctcgcaggtgctgcctttacccatgacatggaagttacattctacccgggagaggagacggttcgtatcactcaaactgctgagggacttgacccagagaactacctgagcattaagaccaacattcaaggccaggtgccttacgtctcagcaaatttcacagcccacatctctccctacaaggagctgtaccactactccgactccactgtgacctctacaagttccagagactactctctgacttttggtgcaatcaaccaaacatggtcctaccgcatccaccagaacatcacttaccaggtgtgcaggcacgcccccagacacccgtccttccccaccacccagcagctgaacgtggaccgggtctttgccttgtataatgacgaagaaagagtgcttagatttgctgtgaccaatcaaattggcccggtcaaagaggattcagaccccactccggggaatccttgctatgatgggagccacatgtgtgacacaacagcacggtgccatccagggacaggtgtagattacacctgtgagtgcgcatctgggtaccagggagatggacggaactgtgtggatgaaaatgaatgtgcaactggctttcatcgctgtggccccaactctgtatgtatcaacttgcctggaagctacaggtgtgagtgccggagtggttatgagtttgcagatgaccggcatacttgcatcttgatcaccccacctgccaacccctgtgaggatggcagtcatacctgtgctcctgctgggcaggcccggtgtgttcaccatggaggcagcacgttcagctgtgcctgcctgcctggttatgccggcgatgggcaccagtgcactgatgtagatgaatgctcagaaaacagatgtcaccctgcagctacctgctacaatactcctggttccttctcctgccgttgtcaacccggatattatggggatggatttcagtgcatacctgactccacctcaagcctgacaccctgtgaacaacagcagcgccatgcccaggcccagtatgcctaccctggggcccggttccacatcccccaatgcgacgagcagggcaacttcctgcccctacagtgtcatggcagcactggtttctgctggtgcgtggaccctgatggtcatgaagttcctggtacccagactccacctggctccaccccgcctcactgtggaccatcaccagagcccacccagaggcccccgaccatctgtgagcgctggagggaaaacctgctggagcactacggtggcaccccccgggatgaccagtacgtgccccagtgcgatgacctgggccacttcatccccctgcagtgccacggaaagagcgacttctgctggtgtgtggacaaagatggcagagaggtgcagggcacccgctcccagccaggcaccacccctgcgtgtatacccaccgtcgctccacccatggtccggcccacgccccggccagatgtgacccctccatctgtgggcaccttcctgctctatactcagggccagcagattggctacttacccctcaatggcaccaggcttcagaaggatgcagctaagaccctgctgtctctgcatggctccataatcgtgggaattgattacgactgccgggagaggatggtgtactggacagatgttgctggacggacaatcagccgtgctggtctggaactgggagcagagcctgagacgatcgtgaattcaggtctgataagccctgaaggacttgccatagaccacatccgcagaacaatgtactggacggacagtgtcctggataagatagagagcgccctgctggatggctctgagcgcaaggtcctcttctacacagatctggtgaatccccgtgccatcgctgtggatccaatccgaggcaacttgtactggacagactggaatagagaagctcctaaaattgaaacgtcatctttagatggagaaaacagaagaattctgatcaatacagacattggattgcccaatggcttaacctttgaccctttctctaaactgctctgctgggcagatgcaggaaccaaaaaactggagtgtacactacctgatggaactggacggcgtgtcattcaaaacaacctcaagtaccccttcagcatcgtaagctatgcagatcacttctaccacacagactggaggagggatggtgttgtatcagtaaataaacatagtggccagtttactgatgagtatctcccagaacaacgatctcacctctacgggataactgcagtctacccctactgcccaacaggaagaaagtaagtacagtaatgtaaaggaagacttggagtttacaatcagaacctggaccctaaagaacagtgactgcaaaggcaaagaaagtaaaaaaggaattggccattagacgttcctgagcatccaagatgaacattttgtagtgcaaaaagacttttgtgaaaagctgatacctcaatctttactactgtatttttaaaaatgaaggttgttattgcaagtttaaaaaggtaacagaattttaactgttgcttattaaagcaacttcttgtaaacatttatcattaatatttaaaagatcaaattcattcaactaagaattagagtttaagactctaaacctgatttttgccatggattccttctggccaagaaattaaagcacatgtgatcaatataacaatataatcctaaaccttgacagttggagaagccaatgcagaactgatgggaaaggaccaattatttatagtttcccaacaaaagttctaagattttttacctctgcatcagtgcatttctatttatatcaaaaggtgctaaaatgattcaatttgcattttctgatcctgtagtgcctctatagaagtacccacagaaagtaaagtatcacatttataaataccaaagatgtaacaattttaaaattttctagattactccaataaagtgttttaagttt

SEQ ID NO: 159370 - DNA, 1964 bp, Homo sapiens
  Payload ID: 11189
  Gene Symbol: NID2
  Gene Name: nidogen 2 (osteonidogen)
  ENST ID: ENST00000556572
  CDS Start-End: 1-1933
ctactctctgacttttggtgcaatcaaccaaacatggtcctaccgcatccaccagaacatcacttaccaggtgtgcaggcacgcccccagacacccgtccttccccaccacccagcagctgaacgtggaccgggtctttgccttgtataatgacgaagaaagagtgcttagatttgctgtgaccaatcaaattggcccggtcaaagaggattcagaccccactccggggaatccttgctatgatgggagccacatgtgtgacacaacagcacggtgccatccagggacaggtgtagattacacctgtgagtgcgcatctgggtaccagggagatggacggaactgtgtggatgaaaatgaatgtgcaactggctttcatcgctgtggccccaactctgtatgtatcaacttgcctggaagctacaggtgtgagtgccggagtggttatgagtttgcagatgaccggcatacttgcatctatgtagatgaatgctcagaaaacagatgtcaccctgcagctacctgctacaatactcctggttccttctcctgccgttgtcaacccggatattatggggatggatttcagtgcatacctgactccacctcaagcctgacaccctgtgaacaacagcagcgccatgcccaggcccagtatgcctaccctggggcccggttccacatcccccaatgcgacgagcagggcaacttcctgcccctacagtgtcatggcagcactggtttctgctggtgcgtggaccctgatggtcatgaagttcctggtacccagactccacctggctccaccccgcctcactgtggaccatcaccagagcccacccagaggcccccgaccatctgtgagcgctggagggaaaacctgctggagcactacggtggcaccccccgggatgaccagtacgtgccccagtgcgatgacctgggccacttcatccccctgcagtgccacggaaagagcgacttctgctggtgtgtggacaaagatggcagagaggtgcagggcacccgctcccagccaggcaccacccctgcgtgtatacccaccgtcgctccacccatggtccggcccacgccccggccagatgtgacccctccatctgtgggcaccttcctgctctatactcagggccagcagattggctacttacccctcaatggcaccaggcttcagaaggatgcagctaagaccctgctgtctctgcatggctccataatcgtgggaattgattacgactgccgggagaggatggtgtactggacagatgttgctggacggacaatcagccgtgctggtctggaactgggagcagagcctgagacgatcgtgaattcaggtctgataagccctgaaggacttgccatagaccacatccgcagaacaatgtactggacggacagtgtcctggataagatagagagcgccctgctggatggctctgagcgcaaggtcctcttctacacagatctggtgaatccccgtgccatcgctgtggatccaatccgaggcaacttgtactggacagactggaatagagaagctcctaaaattgaaacgtcatctttagatggagaaaacagaagaattctgatcaatacagacattggattgcccaatggcttaacctttgaccctttctctaaactgctctgctgggcagatgcaggaaccaaaaaactggagtgtacactacctgatggaactggacggcgtgtcattcaaaacaacctcaagtaccccttcagcatcgtaagctatgcagatcacttctaccacacagactggaggagggatggtgttgtatcagtaaataaacatagtggccagtttactgatgagtatctcccagaacaacgatctcacctctacgggataactgcagtctacccctactgcccaacaggaagaaagtaagtacagtaatgtaaaggaagacttggagttt

SEQ ID NO: 159371 - DNA, 3827 bp, Homo sapiens
  Payload ID: 11189
  Gene Symbol: NID2
  Gene Name: nidogen 2 (osteonidogen)
  ENST ID: ENST00000617139
  CDS Start-End: 235-3144
gccttagaaaagttaacgagaaccagatgtggtggccactgccgaactttctcagagccggtgattggtccccagccgagggcctcagccaattagcttgctgggtgggcctggagtcccgccccgcccaggcgcccgcggagatccaggttcgaggctggcgcggcgcggagagtgggctggaggccggggcgggacgcgttgtgcagcgggtaagcgcacggccgagcgagcatggagggggaccgggtggccgggcggccggtgctgtcgtcgttaccagtgctactgctgctgccgttgctaatgttgcgggccgcggcgctgcacccagacgagctcttcccacacggggagtcgtggggggaccagctcctgcaggaaggcgacgacgaaagctcagccgtggtgaagctggcgaatcccctgcacttctacgaagcccgattcagcaacctctacgtgggcaccaacggcatcatctccactcaggacttccccagggaaacgcagtatgtggactatgatttccccaccgacttcccggccatcgccccttttctggcggacatcgacacgagccacggcagaggccgagtcctgtaccgagtgaatgggaaagtgagtggccacctccacgtgggccatacacccgtgcacttcactgatgtggacctgcatgcgtatatcgtgggcaatgatggcagagcctacacggccatcagccacatcccacagccagcagcccaggccctcctccccctcacaccaattggaggcctgtttggctggctctttgctttagaaaaacctggctctgagaacggcttcagcctcgcaggtgctgcctttacccatgacatggaagttacattctacccgggagaggagacggttcgtatcactcaaactgctgagggacttgacccagagaactacctgagcattaagaccaacattcaaggccaggtgccttacgtctcagcaaatttcacagcccacatctctccctacaaggagctgtaccactactccgactccactgtgacctctacaagttccagagactactctctgacttttggtgcaatcaaccaaacatggtcctaccgcatccaccagaacatcacttaccaggtgtgcaggcacgcccccagacacccgtccttccccaccacccagcagctgaacgtggaccgggtctttgccttgtataatgacgaagaaagagtgcttagatttgctgtgaccaatcaaattggcccggtcaaagaggattcagaccccactccggggaatccttgctatgatgggagccacatgtgtgacacaacagcacggtgccatccagggacaggtgtagattacacctgtgagtgcgcatctgggtaccagggagatggacggaactgtgtggatgaaaatgaatgtgcaactggctttcatcgctgtggccccaactctgtatgtatcaacttgcctggaagctacaggtgtgagtgccggagtggttatgagtttgcagatgaccggcatacttgcatcttgatcaccccacctgccaacccctgtgaggatggcagtcatacctgtgctcctgctgggcaggcccggtgtgttcaccatggaggcagcacgttcagctgtgcctgcctgcctggttatgccggcgatgggcaccagtgcactgatgtagatgaatgctcagaaaacagatgtcaccctgcagctacctgctacaatactcctggttccttctcctgccgttgtcaacccggatattatggggatggatttcagtgcatacctgactccacctcaagcctgacaccctgtgaacaacagcagcgccatgcccaggcccagtatgcctaccctggggcccggttccacatcccccaatgcgacgagcagggcaacttcctgcccctacagtgtcatggcagcactggtttctgctggtgcgtggaccctgatggtcatgaagttcctggtacccagactccacctggctccaccccgcctcactgtggaccatcaccagagcccacccagaggcccccgaccatctgtgagcgctggagggaaaacctgctggagcactacggtggcaccccccgggatgaccagtacgtgccccagtgcgatgacctgggccacttcatccccctgcagtgccacggaaagagcgacttctgctggtgtgtggacaaagatggcagagaggtgcagggcacccgctcccagccaggcaccacccctgcgtgtatacccaccgtcgctccacccatggtccggcccacgccccggccagatgtgacccctccatctgtgggcaccttcctgctctatactcagggccagcagattggctacttacccctcaatggcaccaggcttcagaaggatgcagctaagaccctgctgtctctgcatggctccataatcgtgggaattgattacgactgccgggagaggatggtgtactggacagatgttgctggacggacaatcagccgtgctggtctggaactgggagcagagcctgagacgatcgtgaattcaggtctgataagccctgaaggacttgccatagaccacatccgcagaacaatgtactggacggacagtgtcctggataagatagagagcgccctgctggatggctctgagcgcaaggtcctcttctacacagatctggtgaatccccgtgccatcgctgtggatccaatccgaggcaacttgtactggacagactggaatagagaagctcctaaaattgaaacgtcatctttagatggagaaaacagaagaattctgatcaatacagacattggattgcccaatggcttaacctttgaccctttctctaaactgctctgctgggcagatgcaggaaccaaaaaactggagtgtacactacctgatggaactggacggcgtgtcattcaaaacaacctcaagtaccccttcagcatcgtaagctatgcagatcacttctaccacacagactggaggagggatggtgttgtatcagtaaataaacatagtggccagtttactgatgagtatctcccagaacaacgatctcacctctacgggataactgcagtctacccctactgcccaacaggaagaaagtaagtacagtaatgtaaaggaagacttggagtttacaatcagaacctggaccctaaagaacagtgactgcaaaggcaaagaaagtaaaaaaggaattggccattagacgttcctgagcatccaagatgaacattttgtagtgcaaaaagacttttgtgaaaagctgatacctcaatctttactactgtatttttaaaaatgaaggttgttattgcaagtttaaaaaggtaacagaattttaactgttgcttattaaagcaacttcttgtaaacatttatcattaatatttaaaagatcaaattcattcaactaagaattagagtttaagactctaaacctgatttttgccatggattccttctggccaagaaattaaagcacatgtgatcaatataacaatataatcctaaaccttgacagttggagaagccaatgcagaactgatgggaaaggaccaattatttatagtttcccaacaaaagttctaagattttttacctctgcatcagtgcatttctatttatatcaaaaggtgctaaaatgattcaatttgcattttctgatcctgtagtgcctctatagaagtacccacagaaagtaaagtatcacatttataaataccaaagatgtaacaattttaaaattttctagattactccaataaagtgttttaagttttcctatg

SEQ ID NO: 159372 - DNA, 5157 bp, Homo sapiens
  Payload ID: 11190
  Gene Symbol: NPC1
  Gene Name: Niemann-Pick disease, type C1
  Uniprot ID: O15118
  ENST ID: ENST00000269228
  CDS Start-End: 556-4392
cagattcctttcaggtgactgggttgggaggagaagtcgctcagcgtaattgtcggagccgaaataaacagagactccgcggccgggcgggaccttacccggaagtcccccagaacagcactacccttcgctgaaacctcgcccgccccctccaacccagagacgaaaagggaaagcatcacggccagaaaccgttggcacaactccacagatactctcccgggccgagccagactccataagtcccgcgcctggcccccggggattgcaggggctgaggagaagggcaacacggggaccttgaagcggggtcgcggcggcgccccagcccgggccagggagtcccggcagcggcacctcccagaaagggcggagccgacgacgccttcttccttcctgaccggcgcgcgcagcctgctgccgcggtcagcgcctgctcctgctcctccgctcctcctgcgcggggtgctgaaacagcccggggaagtagagccgcctccggggagcccaaccagccgaacgccgccggcgtcagcagccttgcgcggccacagcatgaccgctcgcggcctggcccttggcctcctcctgctgctactgtgtccagcgcaggtgttttcacagtcctgtgtttggtatggagagtgtggaattgcatatggggacaagaggtacaattgcgaatattctggcccaccaaaaccattgccaaaggatggatatgacttagtgcaggaactctgtccaggattcttctttggcaatgtcagtctctgttgtgatgttcggcagcttcagacactaaaagacaacctgcagctgcctctacagtttctgtccagatgtccatcctgtttttataacctactgaacctgttttgtgagctgacatgtagccctcgacagagtcagtttttgaatgttacagctactgaagattatgttgatcctgttacaaaccagacgaaaacaaatgtgaaagagttacaatactacgtcggacagagttttgccaatgcaatgtacaatgcctgccgggatgtggaggccccctcaagtaatgacaaggccctgggactcctgtgtgggaaggacgctgacgcctgtaatgccaccaactggattgaatacatgttcaataaggacaatggacaggcaccttttaccatcactcctgtgttttcagattttccagtccatgggatggagcccatgaacaatgccaccaaaggctgtgacgagtctgtggatgaggtcacagcaccatgtagctgccaagactgctctattgtctgtggccccaagccccagcccccacctcctcctgctccctggacgatccttggcttggacgccatgtatgtcatcatgtggatcacctacatggcgtttttgcttgtgttttttggagcattttttgcagtgtggtgctacagaaaacggtattttgtctccgagtacactcccatcgatagcaatatagctttttctgttaatgcaagtgacaaaggagaggcgtcctgctgtgaccctgtcagcgcagcatttgagggctgcttgaggcggctgttcacacgctgggggtctttctgcgtccgaaaccctggctgtgtcattttcttctcgctggtcttcattactgcgtgttcgtcaggcctggtgtttgtccgggtcacaaccaatccagttgacctctggtcagcccccagcagccaggctcgcctggaaaaagagtactttgaccagcactttgggcctttcttccggacggagcagctcatcatccgggcccctctcactgacaaacacatttaccagccatacccttcgggagctgatgtaccctttggacctccgcttgacatacagatactgcaccaggttcttgacttacaaatagccatcgaaaacattactgcctcttatgacaatgagactgtgacacttcaagacatctgcttggcccctctttcaccgtataacacgaactgcaccattttgagtgtgttaaattacttccagaacagccattccgtgctggaccacaagaaaggggacgacttctttgtgtatgccgattaccacacgcactttctgtactgcgtacgggctcctgcctctctgaatgatacaagtttgctccatgacccttgtctgggtacgtttggtggaccagtgttcccgtggcttgtgttgggaggctatgatgatcaaaactacaataacgccactgcccttgtgattaccttccctgtcaataattactataatgatacagagaagctccagagggcccaggcctgggaaaaagagtttattaattttgtgaaaaactacaagaatcccaatctgaccatttccttcactgctgaacgaagtattgaagatgaactaaatcgtgaaagtgacagtgatgtcttcaccgttgtaattagctatgccatcatgtttctatatatttccctagccttggggcacatgaaaagctgtcgcaggcttctggtggattcgaaggtctcactaggcatcgcgggcatcttgatcgtgctgagctcggtggcttgctccttgggtgtcttcagctacattgggttgcccttgaccctcattgtgattgaagtcatcccgttcctggtgctggctgttggagtggacaacatcttcattctggtgcaggcctaccagagagatgaacgtcttcaaggggaaaccctggatcagcagctgggcagggtcctaggagaagtggctcccagtatgttcctgtcatccttttctgagactgtagcatttttcttaggagcattgtccgtgatgccagccgtgcacaccttctctctctttgcgggattggcagtcttcattgactttcttctgcagattacctgtttcgtgagtctcttggggttagacattaaacgtcaagagaaaaatcggctagacatcttttgctgtgtcagaggtgctgaagatggaacaagcgtccaggcctcagagagctgtttgtttcgcttcttcaaaaactcctattctccacttctgctaaaggactggatgagaccaattgtgatagcaatatttgtgggtgttctgtcattcagcatcgcagtcctgaacaaagtagatattggattggatcagtctctttcgatgccagatgactcctacatggtggattatttcaaatccatcagtcagtacctgcatgcgggtccgcctgtgtactttgtcctggaggaagggcacgactacacttcttccaaggggcagaacatggtgtgcggcggcatgggctgcaacaatgattccctggtgcagcagatatttaacgcggcgcagctggacaactatacccgaataggcttcgccccctcgtcctggatcgacgattatttcgactgggtgaagccacagtcgtcttgctgtcgagtggacaatatcactgaccagttctgcaatgcttcagtggttgaccctgcctgcgttcgctgcaggcctctgactccggaaggcaaacagaggcctcaggggggagacttcatgagattcctgcccatgttcctttcggataaccctaaccccaagtgtggcaaagggggacatgctgcctatagttctgcagttaacatcctccttggccatggcaccagggtcggagccacgtacttcatgacctaccacaccgtgctgcagacctctgctgactttattgacgctctgaagaaagcccgacttatagccagtaatgtcaccgaaaccatgggcattaacggcagtgcctaccgagtatttccttacagtgtgttttatgtcttctacgaacagtacctgaccatcattgacgacactatcttcaacctcggtgtgtccctgggcgcgatatttctggtgaccatggtcctcctgggctgtgagctctggtctgcagtcatcatgtgtgccaccatcgccatggtcttggtcaacatgtttggagttatgtggctctggggcatcagtctgaacgctgtatccttggtcaacctggtgatgagctgtggcatctccgtggagttctgcagccacataaccagagcgttcacggtgagcatgaaaggcagccgcgtggagcgcgcggaagaggcacttgcccacatgggcagctccgtgttcagtggaatcacacttacaaaatttggagggattgtggtgttggcttttgccaaatctcaaattttccagatattctacttcaggatgtatttggccatggtcttactgggagccactcacggattaatatttctccctgtcttactcagttacatagggccatcagtaaataaagccaaaagttgtgccactgaagagcgatacaaaggaacagagcgcgaacggcttctaaatttctagccctctcgcagggcatcctgactgaactgtgtctaagggtcggtcggtttaccactggacgggtgctgcatcggcaaggccaagttgaacaccggatggtgccaaccatcggttgtttggcagcagctttgaacgtagcgcctgtgaactcaggaatgcacagttgacttgggaagcagtattactagatctggaggcaaccacaggacactaaacttctcccagcctcttcaggaaagaaacctcattctttggcaagcaggaggtgacactagatggctgtgaatgtgatccgctcactgacactctgtaaaggccaatcaatgcactgtctgtctctccttttaggagtaagccatcccacaagttctataccatatttttagtgacagttgaggttgtagatacactttataacattttatagtttaaagagctttattaatgcaataaattaactttgtacacatttttatataaaaaaacagcaagtgatttcagaatgttgtaggcctcattagagcttggtctccaaaaatctgtttgaaaaaagcaacatgttcttcacagtgttcccctagaaaggaagagatttaattgccagttagatgtggcatgaaatgagggacaaagaaagcatctcgtaggtgtgtctactgggttttaacttatttttctttaataaaatacattgttttcctaagttttggggttaccctatctgctttgagagacaaatacaaaagctaaatggaagagattcta

SEQ ID NO: 159373 - DNA, 755 bp, Homo sapiens
  Payload ID: 11190
  Gene Symbol: NPC1
  Gene Name: Niemann-Pick disease, type C1
  ENST ID: ENST00000590723
  CDS Start-End: 1-180
gtgttcagtggaatcacacttacaaaatttggagggattgtggtgttggcttttgccaaatctcaaattttccagatattctacttcaggatgtatttggccatggtcttactgggagccactcacggattaatatttctccctgtcttactcagttacataggcccattcaattcctgagcacgcccacccagtggcagcacagtgggcaagacacacggatgcatcaagccgccagggctcacagcccagcaggaaacaaaaggagagtcactaacctctgaaaatgctttgcagcccacactacctagatccccagaccctcagtggattcctgatttcctcctattgatctctgcacgggctgttactgtgaccaggcctcgcatctgttcccttatgaccagatggttagaacctgatgcctcctaactggtcctgtaccaccggaacagagctgaaggttctaagccaggggtgtccaatgttttggcttccctgggccttaagaggaagaagaagaatggtcttgggccacacataaaatacactaacactaacaatagctgatgagcttaaaaaatatcattaaaaaaatctcataatgttttaagaaagtttaagaatttgtgttgggctgcattcaaagctgtcctgggccacatgtggcccacagaccgtgggttggacaggcttgttctaaatgtttagtttttttcccccaattcaccagcagttaccttcatgccaagtgg

SEQ ID NO: 159374 - DNA, 1607 bp, Homo sapiens
  Payload ID: 11190
  Gene Symbol: NPC1
  Gene Name: Niemann-Pick disease, type C1
  ENST ID: ENST00000593280
  CDS Start-End: 1-127
attctacttcaggatgtatttggccatggtcttactgggagccactcacggattaatatttctccctgtcttactcagttacatagatgatttgaaggtacctgtactgcaatctgaaactggttaagagaacgaatgtattccatcagcacggctatcacaaatttatgaggcatctcctagggagaaaaaaatgtggtcttacaaataccaacgaggtgcaaaagaggctgcatataactctctatccaacccccaccttgtttccatcttaaaatggcccagtgttcatctttcactggttttgcacacatcgctccagaaccacccgtcaacaattatgctttaggcctcagcattagaagccaaactaccagctctagggcctcacccaaggaaactccagtgattctaatcacttcaagtgactctaatcacatgaagtctcctcgttttcagcaacttccttgttttgagcattctcagtccagaagaggcggaaagctgcagcccaccttcttttccacaaaggctgacaggacatgggtgtacacatctgactggtccagcaccgcctgggtccgcaccggcctcttgaggagcgggctgcttcggctctgccctgcttccaccgcctgaaagaaaaaaaccacaaactatgatcttcggcatcttagaggaagggtgctgtttacagttcatccacaaggactgaattcttcgatgtggacccaggatatgagcggaaaacactttctctacttagatacaactttttcctgtgcgcatgcctgtaatcccagctactcaggaggctgaggcaggagaatcccttgaacccaggaggcagaggttgcggtgagccaagatctcaccattgcactccagcctgggcaataagaacaaaactccgtctcaaaaaaaaaaaagcagttcagatccgtgcagattatgcaatagctgtggggtgtagcctgagaacttgcatttccaagaaactccagatgctgctcatgtggctggtcagtggcccacactgctgagtcatgacggtttatggagcccagcagaccgtgtgggacggcacagaaactgccatttgggatcagacctactgattcccacagcccagaacacccacagcaatagagtccaaaaggactcagccatccctcacgtctggcagcgtaggaatggacactgtcccagcaactggccctcttcagtgcctgtctcagacctcttacccttccatgaacagctaaaggggagtggagttctggggcttttgttggtttaaaaccattttcagcctaggactaatcagatcctggaattgaaataattcattctccttgtcctaaacttttcttctggcttcagaagatatgatgtacaagtaatacagcgggaattggtggcgataagccatggttattaccttgactacaaacacgcctgctaagtgctaacactgaatcgtcactatctcaacaggattctttcccaaaagggaagaaaggtgtggcaaatataaatatttctaatttaattttctaagtcctcactctggcataacagaaaaatatacaaaatattgcaaagca

SEQ ID NO: 159375 - DNA, 3171 bp, Homo sapiens
  Payload ID: 11190
  Gene Symbol: NPC1
  Gene Name: Niemann-Pick disease, type C1
  ENST ID: ENST00000591051
  CDS Start-End: 1-2915
ctgctccctggacgatccttggcttggacgccatgtatgtcatcatgtggatcacctacatggcgtttttgcttgtgttttttggagcattttttgcagtgtggtgctacagaaaacggtattttgtctccgagtacactcccatcgatagcaatatagctttttctgttaatgcaagtgacaaaggaacggcttggctcttaacctccaccttcccttcctctcccgttcttccaggagaggcgtcctgctgtgaccctgtcagcgcagcatttgagggctgcttgaggcggctgttcacacgctgggggtctttctgcgtccgaaaccctggctgtgtcattttcttctcgctggtcttcattactgcgtgttcgtcaggcctggtgtttgtccgggtcacaaccaatccagttgacctctggtcagcccccagcagccaggctcgcctggaaaaagagtactttgaccagcactttgggcctttcttccggacggagcagctcatcatccgggcccctctcactgacaaacacatttaccagccatacccttcgggagctgatgtaccctttggacctccgcttgacatacagatactgcaccaggttcttgacttacaaatagccatcgaaaacattactgcctcttatgacaatgagactgtgacacttcaagacatctgcttggcccctctttcaccgtataacacgaactgcaccattttgagtgtgttaaattacttccagaacagccattccgtgctggaccacaagaaaggggacgacttctttgtgtatgccgattaccacacgcactttctgtactgcgtacggtttattaattttgtgaaaaactacaagaatcccaatctgaccatttccttcactgctgaacgaagtattgaagatgaactaaatcgtgaaagtgacagtgatgtcttcaccgttgtaattagctatgccatcatgtttctatatatttccctagccttggggcacatgaaaagctgtcgcaggcttctggtggattcgaaggtctcactaggcatcgcgggcatcttgatcgtgctgagctcggtggcttgctccttgggtgtcttcagctacattgggttgcccttgaccctcattgtgattgaagtcatcccgttcctggtgctggctgttggagtggacaacatcttcattctggtgcaggcctaccagagagatgaacgtcttcaaggggaaaccctggatcagcagctgggcagggtcctaggagaagtggctcccagtatgttcctgtcatccttttctgagactgtagcatttttcttaggagcattgtccgtgatgccagccgtgcacaccttctctctctttgcgggattggcagtcttcattgactttcttctgcagattacctgtttcgtgagtctcttggggttagacattaaacgtcaagagaaaaatcggctagacatcttttgctgtgtcagaggtgctgaagatggaacaagcgtccaggcctcagagagctgtttgtttcgcttcttcaaaaactcctattctccacttctgctaaaggactggatgagaccaattgtgatagcaatatttgtgggtgttctgtcattcagcatcgcagtcctgaacaaagtagatattggattggatcagtctctttcgatgccagatgactcctacatggtggattatttcaaatccatcagtcagtacctgcatgcgggtccgcctgtgtactttgtcctggaggaagggcacgactacacttcttccaaggggcagaacatggtgtgcggcggcatgggctgcaacaatgattccctggtgcagcagatatttaacgcggcgcagctggacaactatacccgaataggcttcgccccctcgtcctggatcgacgattatttcgactgggtgaagccacagtcgtcttgctgtcgagtggacaatatcactgaccagttctgcaatgcttcagtggttgaccctgcctgcgttcgctgcaggcctctgactccggaaggcaaacagaggcctcaggggggagacttcatgagattcctgcccatgttcctttcggataaccctaaccccaagtgtggcaaagggggacatgctgcctatagttctgcagttaacatcctccttggccatggcaccagggtcggagccacgtacttcatgacctaccacaccgtgctgcagacctctgctgactttattgacgctctgaagaaagcccgacttatagccagtaatgtcaccgaaaccatgggcattaacggcagtgcctaccgagtatttccttacagtgtgttttatgtcttctacgaacagtacctgaccatcattgacgacactatcttcaacctcggtgtgtccctgggcgcgatatttctggtgaccatggtcctcctgggctgtgagctctggtctgcagtcatcatgtgtgccaccatcgccatggtcttggtcaacatgtttggagttatgtggctctggggcatcagtctgaacgctgtatccttggtcaacctggtgatgagctgtggcatctccgtggagttctgcagccacataaccagagcgttcacggtgagcatgaaaggcagccgcgtggagcgcgcggaagaggcacttgcccacatgggcagctccgtgttcagtggaatcacacttacaaaatttggagggattgtggtgttggcttttgccaaatctcaaattttccagatattctacttcaggatgtatttggccatggtcttactgggagccactcacggattaatatttctccctgtcttactcagttacatagggccatcagtaaataaagccaaaagttgtgccactgaagagcgatacaaaggaacagagcgcgaacggcttctaaatttctagccctctcgcagggcatcctgactgaactgtgtctaagggtcggtcggtttaccactggacgggtgctgcatcggcaaggccaagttgaacaccggatggtgccaaccatcggttgtttggcagcagctttgaacgtagcgcctgtgaactcaggaatgcacagttgacttgggaagcagtattactagatctggaggcaaccacaggacactaaacttctcccagcctcttcaggaaagaaacctcattctttggc

SEQ ID NO: 159376 - DNA, 571 bp, Homo sapiens
  Payload ID: 11190
  Gene Symbol: NPC1
  Gene Name: Niemann-Pick disease, type C1
  ENST ID: ENST00000586150
  CDS Start-End: 1-526
tgtgttttatgtcttctacgaacagtacctgaccatcattgacgacactatcttcaacctcggtgtgtccctgggcgcgatatttctggtgaccatggtcctcctgggctgtgagctctggtctgcagtcatcatgtgtgccaccatcgccatggtcttggtcaacatgtttggagttatgtggctctggggcatcagtctgaacgctgtatccttggtcaacctggtgatgagctgtggcatctccgtggagttctgcagccacataaccagagcgttcacggtgagcatgaaaggcagccgcgtggagcgcgcggaagaggcacttgcccacatgggcagctccgtgttcagtggaatcacacttacaaaatttggagggattgtggtgttggcttttgccaaatctcaaattttccagatattctacttcaggatgtatttggccatggtcttactgggagccactcacggattaatatttctccctgtcttactcagttacatagcaacttccttgttttgagcattctcagtccagaagaggcggaaagctgcagcccaccttctt

SEQ ID NO: 159377 - DNA, 890 bp, Homo sapiens
  Payload ID: 11190
  Gene Symbol: NPC1
  Gene Name: Niemann-Pick disease, type C1
  ENST ID: ENST00000591107
  CDS Start-End: 1-538
gatatttctggtgaccatggtcctcctgggctgtgagctctggtctgcagtcatcatgtgtgccaccatcgccatggtcttggtcaacatgtttggagttatgtggctctggggcatcagtctgaacgctgtatccttggtcaacctggtgatgagctgtggcatctccgtggagttctgcagccacataaccagagcgttcacggtgagcatgaaaggcagccgcgtggagcgcgcggaagaggcacttgcccacatgggcagctccgtgttcagtggaatcacacttacaaaatttggagggattgtggtgttggcttttgccaaatctcaaattttccagatattctacttcaggatgtatttggccatggtcttactgggagccactcacggattaatatttctccctgtcttactcagttacatagcaaagcttctggaaagaactatctacttgtgcatctcacagcacattcattatgcaacccagatggctccactacagtgtctcatgaccgcctcagacagatgttaaaaagtgaactcagctgggcacagcggcctacacctgtaatcccagcactgtgagaggatgaagcaggaggatcacaggaattcgagaccagcctcagcaacacagtgagaccccgtctctattccaatacatacattttttaaattaaaaattcatttaaaaaaaaaaaactcaagggatggattacagaagggcccaaggaaacttttcggggtctgaacatgttcattgccttgattgtggtgatggtttcatgggtgtatacatgtcaaaactcacatattgcataatattaagtgtgtacagtttattatgtgtcaactatgcctcaataaagctgcttttaaaaatc

SEQ ID NO: 159378 - DNA, 796 bp, Homo sapiens
  Payload ID: 11191
  Gene Symbol: NPC2
  Gene Name: Niemann-Pick disease, type C2
  ENST ID: ENST00000238633
  CDS Start-End: 18-464
gaacttcgttatccgcgatgcgtttcctggcagctacattcctgctcctggcgctcagcaccgctgcccaggccgaaccggtgcagttcaaggactgcggttctgtggatggagttataaaggaagtgaatgtgagcccatgccccacccaaccctgccagctgagcaaaggacagtcttacagcgtcaatgtcaccttcaccagcaatattcagtctaaaagcagcaaggccgtggtgcatggcatcctgatgggcgtcccagttccctttcccattcctgagcctgatggttgtaagagtggaattaactgccctatccaaaaagacaagacctatagctacctgaataaactaccagtgaaaagcgaatatccctctataaaactggtggtggagtggcaacttcaggatgacaaaaaccaaagtctcttctgctgggaaatcccagtttctcatctctaagtgcctcattgagttcggtgcatctggccaatgagtctgctgagactcttgacagcacctccagctctgctgcttcaacaacagtgacttgctctccaatggtatccagtgattcgttgaagaggaggtgctctgtagcagaaactgagctccgggtggctggttctcagtggttgtctcatgtctctttttctgtcttaggtggtttcattaaatgcagcacttggttagcagatgtttaattttttttttaacaacattaacttgtggcctctttctacacctggaaatttactcttgaataaataaaaactcgtttgtcttgtcttctg

SEQ ID NO: 159379 - DNA, 875 bp, Homo sapiens
  Payload ID: 11191
  Gene Symbol: NPC2
  Gene Name: Niemann-Pick disease, type C2
  ENST ID: ENST00000434013
  CDS Start-End: 34-639
ttctttcccgagcttggaacttcgttatccgcgatgcgtttcctggcagctacattcctgctcctggcgctcagcaccgctgcccaggccgaaccggtgcagttcaaggactgcggttctgtggatggagttataaaggaagtgaatgtgagcccatgccccacccaaccctgccagctgagcaaaggacagtcttacagcgtcaatgtcaccttcaccagcaatattcagtctaaaagcagcaaggccgtggtgcatggcatcctgatgggcgtcccagttccctttcccattcctgagcctgatggttgtaagagtggaattaactgccctatccaaaaagacaagacctatagctacctgaataaactaccagtgaaaagcgaatatccctctataaaactggtggtggagtggcaacttcaggatgacaaaaaccaaagtctcttctgctgggaaatcccagtacagatcatgttcccatgcctgttctctgctcactgcccaatgctagccacagagcacaggtgtttgcagttgcaaatggagactaagagcctgagattctggagcagacgtggcatgtcagtgtggctcccctcacctgcaggggcttggagaaggacggctcccttctagcaggccgtcctccacaaatcatatgtcccagataagcagccagcaggcagaaagatcagcttagctctgactgccagtgggtaaggccaagaaggagcctggcagacaaatggatggctgctggccttgaacatggcagagctgctgggtgtgccagatcaaaaagcagagagcaggccagcagcagcagactgttctcagcgctggagaaatgcattgctctgcccactacaccc

SEQ ID NO: 159380 - DNA, 1436 bp, Homo sapiens
  Payload ID: 11191
  Gene Symbol: NPC2
  Gene Name: Niemann-Pick disease, type C2
  Uniprot ID: P61916
  ENST ID: ENST00000541064
  CDS Start-End: 8-385
atccgcgatgcgtttcctggcagctacattcctgctcctggcgctcagcaccgctgcccaggccgaaccggtgcagttcaaggactgcggttctgtggatggagttataaaggaagtgaatgtgagcccatgccccacccaaccctgccagctgagcaaaggacagtcttacagcgtcaatgtcaccttcaccagcaatattcagtctaaaagcagcaaggccgtggtgcatggcatcctgatgggcgtcccagttccctttcccattcctgagcctgatggttgtaagagtggaattaactgccctatccaaaaagacaagacctatagctacctgaataaactaccagtgaaaagcgaatatccctctgtttctcatctctaagtgcctcattgagttcggtgcatctggccaatgagtctgctgagactcttgacagcacctccagctctgctgcttcaacaacagtgacttgctctccaatggtatccagtgattcgttgaagaggaggtgctctgtagcagaaactgagctccgggtggctggttctcagtggttgtctcatgtctctttttctgtcttaggtggtttcattaaatgcagcacttggttagcagatgtttaattttttttttaacaacattaacttgtggcctctttctacacctggaaatttactcttgaataaataaaaactcgtttgtcttgtcttctgcatgtgggctgtggtcttctcctgctcctttcagggtacattctgctagaaccatggaaggcaggcccccagttccgtggtcccagagtgcactgaagacatgactttttcagaaactctttttcctcctttttgtccagtaagaccatatctattttatataaaatggccttgttttgctttatttgacacaatcttataccaccaagcatgctcgaaagaagcagtgaaagtaaaaatcacctagttgaataataacgcctgaaaggttgaaggaactgaatttggtggggagggcaggtaggggttagggattacaggttaggatgaggcatggtgatcttttgggaacactgctgtgaagaaagcctagaagcttaaaaatgaaatgtgaagttgtagcaagtaatggctaaattaattaaatcttggagtttcctatcttaaagtacaagtataatcatgggcatatattttgccacctattttgagtcagtatactagcagtcagctcttaggtggtacagggattacaaccccattcacaattgagttgaataacatggaccttaggtcatccattgttagggcaaaaggaaggaacattcatacaaagtgcttgtgagcaagtgattgatttgatccagttcttttcatcccactaatttcactagacccttggatttctttggtctgtgagtttcccaggaaaaccacca

SEQ ID NO: 159381 - DNA, 699 bp, Homo sapiens
  Payload ID: 11191
  Gene Symbol: NPC2
  Gene Name: Niemann-Pick disease, type C2
  ENST ID: ENST00000556009
  CDS Start-End: 1-521
cgccgctccgcgtccggcctcctacctggacgcaactgtctgtgaggcggatctgcccttcgccggcctcggggctggaggacgacgcctcccgacgcgcctggggtcccagggaggccgtgaggagcctgcgcgcaagggaggagggttctgtggatggagttataaaggaagtgaatgtgagcccatgccccacccaaccctgccagctgagcaaaggacagtcttacagcgtcaatgtcaccttcaccagcaatattcagtctaaaagcagcaaggccgtggtgcatggcatcctgatgggcgtcccagttccctttcccattcctgagcctgatggttgtaagagtggaattaactgccctatccaaaaagacaagacctatagctacctgaataaactaccagtgaaaagcgaatatccctctataaaactggtggtggagtggcaacttcaggatgacaaaaaccaaagtctcttctgctgggaaatcccagtacagatcgtttctcatctctaagtgcctcattgagttcggtgcatctggccaatgagtctgctgagactcttgacagcacctccagctctgctgcttcaacaacagtgacttgctctccaatggtatccagtgattcgttgaagaggaggtgctctgtagcagaaactgagctccgggtggctggttctcagtggttgtc

SEQ ID NO: 159382 - DNA, 469 bp, Homo sapiens
  Payload ID: 11191
  Gene Symbol: NPC2
  Gene Name: Niemann-Pick disease, type C2
  ENST ID: ENST00000555592
  CDS Start-End: 103-469
agacggcagcggcggggacgcacccaggaagccggagaggtttgtcttgtgaccgcgggcggccgctgcttctttcccgagcttggaacttcgttatccgcgatgcgtttcctggcagctacattcctgctcctggcgctcagcaccgctgcccaggccgaaccggtgcagttcaaggactgcggttctgtggatggagttataaaggaagtgaatgtgagcccatgccccacccaaccctgccagctgagcaaaggacagtcttacagcgtcaatgtcaccttcaccagcaatattcagtctaaaagcagcaaggccgtggtgcatggcatcctgatgggcgtcccagttccctttcccattcctgagcctgatggttgtaagagtggaattaactgccctatccaaaaagacaagacctatagctacctgaataaactaccagtgaaaagcgaatatccctctgtaa

SEQ ID NO: 159383 - DNA, 1035 bp, Homo sapiens
  Payload ID: 11191
  Gene Symbol: NPC2
  Gene Name: Niemann-Pick disease, type C2
  Uniprot ID: P61916
  ENST ID: ENST00000555619
  CDS Start-End: 239-694
ggtccgggcgggtcaggcctctgaggggatggcatgggcggagactgcaggcttctgggcctgagagggctggagctggctttccggagccgggggcggggcgcgggcgggcctcagctgtggttactggtgacaggtcgcctgactgggctcctccccgggcccgccccgacaggtttgtcttgtgaccgcgggcggccgctgcttctttcccgagcttggaacttcgttatccgcgatgcgtttcctggcagctacattcctgctcctggcgctcagcaccgctgcccaggccgaaccggtgcagttcaaggactgcggttctgtggatggagttataaaggaagtgaatgtgagcccatgccccacccaaccctgccagctgagcaaaggacagtcttacagcgtcaatgtcaccttcaccagcaatattcagtctaaaagcagcaaggccgtggtgcatggcatcctgatgggcgtcccagttccctttcccattcctgagcctgatggttgtaagagtggaattaactgccctatccaaaaagacaagacctatagctacctgaataaactaccagtgaaaagcgaatatccctctataaaactggtggtggagtggcaacttcaggatgacaaaaaccaaagtctcttctgctgggaaatcccagtacagatcgtttctcatctctaagtgcctcattgagttcggtgcatctggccaatgagtctgctgagactcttgacagcacctccagctctgctgcttcaacaacagtgacttgctctccaatggtatccagtgattcgttgaagaggaggtgctctgtagcagaaactgagctccgggtggctggttctcagtggttgtctcatgtctctttttctgtcttaggtggtttcattaaatgcagcacttggttagcagatgtttaattttttttttaacaacattaacttgtggcctctttctacacctggaaatttactcttgaataaataaaaactcgtttgtcttgtcttctgcatgtgggc

SEQ ID NO: 159384 - DNA, 729 bp, Homo sapiens
  Payload ID: 11191
  Gene Symbol: NPC2
  Gene Name: Niemann-Pick disease, type C2
  ENST ID: ENST00000553490
  CDS Start-End: 66-729
aggtttgtcttgtgaccgcgggcggccgctgcttctttcccgagcttggaacttcgttatccgcgatgcgtttcctggcagctacattcctgctcctggcgctcagcaccgctgcccaggccgaaccggtgcagttcaaggactgcggttctgtggatggagttataaaggaagtgaatgtgagcccatgccccacccaaccctgccagctgagcaaaggacagtcttacagcgtcaatgtcaccttcaccagcaatattcagtctaaaagcagcaaggccgtggtgcatggcatcctgatgggcgtcccagttccctttcccattcctgagcctgatggttgtaagagtggaattaactgccctatccaaaaagacaagacctatagctacctgaataaactaccagtgaaaagcgaatatccctctataaaactggtggtggagtggcaacttcaggatgacaaaaaccaaagtctcttctgctgggaaatcccagtacagatcgtaagtctatctgggggtttctcatctctaagtgcctcattgagttcggtgcatctggccaatgagtctgctgagactcttgacagcacctccagctctgctgcttcaacaacagtgacttgctctccaatggtatccagtgattcgttgaagaggaggtgctctgtagcagaaactgagctccgggtggctggttctcagtggttgtctcatgtctcttttt

SEQ ID NO: 159385 - DNA, 1029 bp, Homo sapiens
  Payload ID: 11191
  Gene Symbol: NPC2
  Gene Name: Niemann-Pick disease, type C2
  ENST ID: ENST00000557510
  CDS Start-End: 74-598
gccccgacaggtttgtcttgtgaccgcgggcggccgctgcttctttcccgagcttggaacttcgttatccgcgatgcgtttcctggcagctacattcctgctcctggcgctcagcaccgctgcccaggccgaaccggtgcagttcaaggactgcggttctgtggatggagttataaaggaagtgaatgtgagcccatgccccacccaaccctgccagctgagcaaaggacagtcttacagcgtcaatgtcaccttcaccagcaatattcagtctaaaagcagcaaggccgtggtgcatggcatcctgatgggcgtcccagttccctttcccattcctgagcctgatggttgtaagagtggaattaactgccctatccaaaaagacaagacctatagctacctgaataaactaccagtgaaaagcgaatatccctctataaaactggtggtggagtggcaacttcaggatgacaaaaaccaaagtctcttctgctgggaaatcccagtacagatcgtaagtctatctgggggtgagagggcatgggtggagggaagaaagtggaggagaaatcagactgaaactaaatcagtgccataagataaaaggaatttcaagactgctgttttatgcctctcaacctctaaaagcatctgagaccctatttcctgagagctcagaactgttgcctttgtaatatcctttgttaaaaaaaaaaaaggttgaaggaaagaagagagagtgagactgtagagattgatttaactgtcttcattggtttttttctgtcggagtaaggaaggtccagccagacaggacctgaaggaggttgcttaggaatgtctgataacttgccctagggttattgccctgacagtggaggaaaggttccaaaccacttccactgagctgggacattacatccacaggtttctcatctctaagtgcctcattgagttcggtgcatctggccaatgagtctgctgagactcttgacagcacctccagctctgctgcttcaacaacagtga

SEQ ID NO: 159386 - DNA, 583 bp, Homo sapiens
  Payload ID: 11191
  Gene Symbol: NPC2
  Gene Name: Niemann-Pick disease, type C2
  ENST ID: ENST00000554482
  CDS Start-End: 1-162
ggcgctcagcaccgctgcccaggccgaaccggtgcagttcaaggactgcggttctgtggatggagttataaaggaagtgaatgtgagcccatgccccacccaaccctgccagctgagcaaaggacagtcttacagcgtcaatgtcaccttcaccagcaataaaactggtggtggagtggcaacttcaggatgacaaaaaccaaagtctcttctgctgggaaatcccagtacagatcgtttctcatctctaagtgcctcattgagttcggtgcatctggccaatgagtctgctgagactcttgacagcacctccagctctgctgcttcaacaacagtgacttgctctccaatggtatccagtgattcgttgaagaggaggtgctctgtagcagaaactgagctccgggtggctggttctcagtggttgtctcatgtctctttttctgtcttaggtggtttcattaaatgcagcacttggttagcagatgtttaattttttttttaacaacattaacttgtggcctctttctacacctggaaatttactcttgaataaataaaaactcgtttgtcttgtcttctg

SEQ ID NO: 159387 - DNA, 1626 bp, Homo sapiens
  Payload ID: 11192
  Gene Symbol: NIF3L1
  Gene Name: NIF3 NGG1 interacting factor 3-like 1
  Uniprot ID: Q9GZT8
  ENST ID: ENST00000359683
  CDS Start-End: 322-1374
actggtgagtagtgggcgatttaaaaacccgcgagtgtagttgtgaccttcgcggtaggtgccggttggggccggctgtgattgttatcttggtgctgcagaggacagcagaagaggagattgggtcagaaaactgccctgccgcaccagagcacagcgcactagtgggacaggggtcctgactcagacttaactggctgtgtctcgtggtttttcactgtcctggaaaaggcctgaagtggcactgaaatgaggcatagatgagtccccacgacagtccggtttgtagattccctgatctgcaattcttcccgttccttcatggatttgaaggctctcctttcttccttgaatgactttgcatccctctcgtttgctgagagttgggacaatgttggattactggtggaaccaagcccaccacatactgtaaatacactcttcctgaccaatgacctgactgaggaagtgatggaggaggtgctgcaaaagaaggcagacctcattctctcctaccatccgcctatcttccgacccatgaagcgcataacctggaacacatggaaggagcgcctggtgatccgggctctggagaacagagtcggtatctactctcctcatacagcctatgatgctgcgccccagggcgtcaacaactggttggctaaagggcttggagcttgtacctccaggcccatacatccttccaaagctcccaactaccctacagagggaaaccaccgagtagaattcaacgttaactacacccaagacctggacaaagtcatgtctgcagtgaaaggaattgacggtgtttctgtcacttctttttctgctaggactggtaatgaggaacaaacacggattaatctgaattgtactcagaaggctttgatgcaggtggtagattttctttcccggaacaaacaactttatcagaagacggaaattctgtcactggagaagcctttgcttctacatactggaatgggacggttatgcacactggatgaatctgtctccctggcaaccatgattgatcgaataaaaagacacctaaaactatctcatattcgcttagcccttggggtggggagaaccttagagtctcaagtcaaagtcgtggccctgtgtgctggttctgggagcagcgttctgcagggtgttgaggctgacctttacctcacaggtgagatgtcccatcatgatactttggatgctgcttcccaaggaataaatgtcatcctctgtgaacacagcaacactgaacgaggctttctttctgaccttcgagatatgctggattctcacttggagaataagataaatattatcctatcagagactgacagggaccctcttcaggtggtataattgcagaaacatcaggataacacattctacaaatcagctggatgccaacttaaatttgtaacatgagtcagtgggactggtgtgcttccagagagtgtcttcgagggtatcatcatttccggtttgttaatcttattcaccaaatgttctatcgctcgtaaggtaaaactgtaatataactaccatattaaataacaaatgttcattataaactctaggaaagattgaataaaatctgtttacttaacattc

SEQ ID NO: 159388 - DNA, 1680 bp, Homo sapiens
  Payload ID: 11192
  Gene Symbol: NIF3L1
  Gene Name: NIF3 NGG1 interacting factor 3-like 1
  Uniprot ID: Q9GZT8
  ENST ID: ENST00000409020
  CDS Start-End: 295-1428
gggactggtgagtagtgggcgatttaaaaacccgcgagtgtagttgtgaccttcgcggtaggtgccggttggggccggctgtgattgttatcttggtgctgcagaggacagcagaagaggagattgggtcagaaaactgccctgccgcaccagagcacagcgcactagtgggacaggggtcctgactcagacttaactggctgtgtctcgtggtttttcactgtcctggaaaaggcctgaagtggcactgaaatgaggcatagatgagaaacttgaactttacctgatttctgtatgttgtcatcttgcgtacgcccagtccccacgacagtccggtttgtagattccctgatctgcaattcttcccgttccttcatggatttgaaggctctcctttcttccttgaatgactttgcatccctctcgtttgctgagagttgggacaatgttggattactggtggaaccaagcccaccacatactgtaaatacactcttcctgaccaatgacctgactgaggaagtgatggaggaggtgctgcaaaagaaggcagacctcattctctcctaccatccgcctatcttccgacccatgaagcgcataacctggaacacatggaaggagcgcctggtgatccgggctctggagaacagagtcggtatctactctcctcatacagcctatgatgctgcgccccagggcgtcaacaactggttggctaaagggcttggagcttgtacctccaggcccatacatccttccaaagctcccaactaccctacagagggaaaccaccgagtagaattcaacgttaactacacccaagacctggacaaagtcatgtctgcagtgaaaggaattgacggtgtttctgtcacttctttttctgctaggactggtaatgaggaacaaacacggattaatctgaattgtactcagaaggctttgatgcaggtggtagattttctttcccggaacaaacaactttatcagaagacggaaattctgtcactggagaagcctttgcttctacatactggaatgggacggttatgcacactggatgaatctgtctccctggcaaccatgattgatcgaataaaaagacacctaaaactatctcatattcgcttagcccttggggtggggagaaccttagagtctcaagtcaaagtcgtggccctgtgtgctggttctgggagcagcgttctgcagggtgttgaggctgacctttacctcacaggtgagatgtcccatcatgatactttggatgctgcttcccaaggaataaatgtcatcctctgtgaacacagcaacactgaacgaggctttctttctgaccttcgagatatgctggattctcacttggagaataagataaatattatcctatcagagactgacagggaccctcttcaggtggtataattgcagaaacatcaggataacacattctacaaatcagctggatgccaacttaaatttgtaacatgagtcagtgggactggtgtgcttccagagagtgtcttcgagggtatcatcatttccggtttgttaatcttattcaccaaatgttctatcgctcgtaaggtaaaactgtaatataactaccatattaaataacaaatgttcattataaactctaggaaagattgaataaaatctgtttacttaacattc

SEQ ID NO: 159389 - DNA, 1269 bp, Homo sapiens
  Payload ID: 11192
  Gene Symbol: NIF3L1
  Gene Name: NIF3 NGG1 interacting factor 3-like 1
  Uniprot ID: Q9GZT8
  ENST ID: ENST00000409588
  CDS Start-End: 28-885
gaaacttgaactttacctgatttctgtatgttgtcatcttgcgtacgcccagtccccacgacagtccggtttgtagattccctgatctgcaattcttcccgttccttcatggatttgaaggctctcctttcttccttgaatgactttgcatccctctcgtttgctgagagttgggacaatgttggattactggtggaaccaagcccaccacatactgtaaatacactcttcctgaccaatgacctgactgaggaagtgatggaggaggtgctgcaaaagaaggcagacctcattctctcctaccatccgcctatcttccgacccatgaagcgcataacctggaacacatggaaggagcgcctggtgatccgggctctggagaacagagtcggtatctactctcctcatacagcctatgatgctgcgccccagggcgtcaacaactggttggctaaagggcttggagcttgtacctccaggcccatacatccttccaaagctcccaactaccctacagagggaaaccaccgagtagaattcaacgttaactacacccaagacctggacaaagtcatgtctgcagtgaaaggaattgacggtgtttctgtcacttctttttctgctaggactggtaatgaggaacaaacacggattaatctgaattgtactcagaaggctttgatgcaggtggtagattttctttcccggaacaaacaactttatcagaagacggaaattctgtcactggagaagagtctcaagtcaaagtcgtggccctgtgtgctggttctgggagcagcgttctgcagggtgttgaggctgacctttacctcacaggtgagatgtcccatcatgatactttggatgctgcttcccaaggaataaatgtcatcctctgtgaacacagcaacactgaacgaggctttctttctgaccttcgagatatgctggattctcacttggagaataagataaatattatcctatcagagactgacagggaccctcttcaggtggtataattgcagaaacatcaggataacacattctacaaatcagctggatgccaacttaaatttgtaacatgagtcagtgggactggtgtgcttccagagagtgtcttcgagggtatcatcatttccggtttgttaatcttattcaccaaatgttctatcgctcgtaaggtaaaactgtaatataactaccatattaaataacaaatgttcattataaactctaggaaagattgaataaaatctgtttacttaa

SEQ ID NO: 159390 - DNA, 813 bp, Homo sapiens
  Payload ID: 11192
  Gene Symbol: NIF3L1
  Gene Name: NIF3 NGG1 interacting factor 3-like 1
  ENST ID: ENST00000409129
  CDS Start-End: 326-813
tgccggttggggccggctgtgattgttatcttggtgctgcagaggacagcagaagaggagattgggtcagaaaactgccctgccgcaccagagcacagcgcactagtgggacaggggtcctgactcagacttaactggctgtgtctcgtggtttttcactgtcctggaaaaggcctgaagtggcactgaaatgaggcatagatgagttggctatgctttcttattgtgcatactatgaaatgtttttcttcaaaaagtgtttataagtgtccccacgacagtccggtttgtagattccctgatctgcaattcttcccgttccttcatggatttgaaggctctcctttcttccttgaatgactttgcatccctctcgtttgctgagagttgggacaatgttggattactggtggaaccaagcccaccacatactgtaaatacactcttcctgaccaatgacctgactgaggaagtgatggaggaggtgctgcaaaagaaggcagacctcattctctcctaccatccgcctatcttccgacccatgaagcgcataacctggaacacatggaaggagcgcctggtgatccgggctctggagaacagagtcggtatctactctcctcatacagcctatgatgctgcgccccagggcgtcaacaactggttggctaaagggcttggagcttgtacctccaggcccatacatccttccaaagctcccaactaccctacagagggaaaccaccgagtagaattcaacgttaactacacccaagacctggacaaagtcatgtctgcagtgaaaggaattga

SEQ ID NO: 159391 - DNA, 1679 bp, Homo sapiens
  Payload ID: 11192
  Gene Symbol: NIF3L1
  Gene Name: NIF3 NGG1 interacting factor 3-like 1
  Uniprot ID: Q9GZT8
  ENST ID: ENST00000409357
  CDS Start-End: 328-1461
cccgcgagtgtagttgtgaccttcgcggtaggtgccggttggggccggctgtgattgttatcttggtgctgcagaggacagcagaagaggagattgggtcagaaaactgccctgccgcaccagagcacagcgcactagtgggacaggggtcctgactcagacttaactggctgtgtctcgtggtttttcactgtcctggaaaaggcctgaagtggcactgaaatgaggcatagatgagttggctatgctttcttattgtgcatactatgaaatgtttttcttcaaaaagtgtttataagtgaaacttgaactttacctgatttctgtatgttgtcatcttgcgtacgcccagtccccacgacagtccggtttgtagattccctgatctgcaattcttcccgttccttcatggatttgaaggctctcctttcttccttgaatgactttgcatccctctcgtttgctgagagttgggacaatgttggattactggtggaaccaagcccaccacatactgtaaatacactcttcctgaccaatgacctgactgaggaagtgatggaggaggtgctgcaaaagaaggcagacctcattctctcctaccatccgcctatcttccgacccatgaagcgcataacctggaacacatggaaggagcgcctggtgatccgggctctggagaacagagtcggtatctactctcctcatacagcctatgatgctgcgccccagggcgtcaacaactggttggctaaagggcttggagcttgtacctccaggcccatacatccttccaaagctcccaactaccctacagagggaaaccaccgagtagaattcaacgttaactacacccaagacctggacaaagtcatgtctgcagtgaaaggaattgacggtgtttctgtcacttctttttctgctaggactggtaatgaggaacaaacacggattaatctgaattgtactcagaaggctttgatgcaggtggtagattttctttcccggaacaaacaactttatcagaagacggaaattctgtcactggagaagcctttgcttctacatactggaatgggacggttatgcacactggatgaatctgtctccctggcaaccatgattgatcgaataaaaagacacctaaaactatctcatattcgcttagcccttggggtggggagaaccttagagtctcaagtcaaagtcgtggccctgtgtgctggttctgggagcagcgttctgcagggtgttgaggctgacctttacctcacaggtgagatgtcccatcatgatactttggatgctgcttcccaaggaataaatgtcatcctctgtgaacacagcaacactgaacgaggctttctttctgaccttcgagatatgctggattctcacttggagaataagataaatattatcctatcagagactgacagggaccctcttcaggtggtataattgcagaaacatcaggataacacattctacaaatcagctggatgccaacttaaatttgtaacatgagtcagtgggactggtgtgcttccagagagtgtcttcgagggtatcatcatttccggtttgttaatcttattcaccaaatgttctatcgctcgtaaggtaaaactgtaatataactaccatattaaataacaaatgttcattataaactctag

SEQ ID NO: 159392 - DNA, 719 bp, Homo sapiens
  Payload ID: 11192
  Gene Symbol: NIF3L1
  Gene Name: NIF3 NGG1 interacting factor 3-like 1
  ENST ID: ENST00000454952
  CDS Start-End: 232-719
acgcagagaagtttccgggactggtgagaaaacaagattggagaggttaaatggcttacctaagttacagtgtgctggtaagtggcagagccactatttgaacccagatctctatgacgacagctcttttgcccatatgttttgatgcctcaaagatccaggcctaaagtatacctgtgtaccattttctttgttttgacatcagaaacttgaactttacctgatttctgtatgttgtcatcttgcgtacgcccagtccccacgacagtccggtttgtagattccctgatctgcaattcttcccgttccttcatggatttgaaggctctcctttcttccttgaatgactttgcatccctctcgtttgctgagagttgggacaatgttggattactggtggaaccaagcccaccacatactgtaaatacactcttcctgaccaatgacctgactgaggaagtgatggaggaggtgctgcaaaagaaggcagacctcattctctcctaccatccgcctatcttccgacccatgaagcgcataacctggaacacatggaaggagcgcctggtgatccgggctctggagaacagagtcggtatctactctcctcatacagcctatgatgctgcgccccagggcgtcaacaactggttggctaaagggcttggagcttgtacctccaggcccatacatccttccaaagctcccaactaccctac

SEQ ID NO: 159393 - DNA, 479 bp, Homo sapiens
  Payload ID: 11192
  Gene Symbol: NIF3L1
  Gene Name: NIF3 NGG1 interacting factor 3-like 1
  ENST ID: ENST00000436412
  CDS Start-End: 1-254
agcctttgcttctacatactggaatgggacggttatgcacactggatgaatctgtctccctggcaaccatgattgatcgaataaaaagacacctaaaactatctcatattcgcttagcccttggggtggggagaaccttagagtctcaagtcaaagtcgtggccctgtgtgctggttctgggagcagcgttctgcagggtgttgaggctgacctttacctcacaggtggtataattgcagaaacatcaggataacacattctacaaatcagctggatgccaacttaaatttgtaacatgagtcagtgggactggtgtgcttccagagagtgtcttcgagggtatcatcatttccggtttgttaatcttattcaccaaatgttctatcgctcgtaaggtaaaactgtaatataactaccatattaaataacaaatgttcattataaactctaggaaagattgaataaaatctgtttactt

SEQ ID NO: 159394 - DNA, 967 bp, Homo sapiens
  Payload ID: 11192
  Gene Symbol: NIF3L1
  Gene Name: NIF3 NGG1 interacting factor 3-like 1
  ENST ID: ENST00000416651
  CDS Start-End: 30-788
cagaaacttgaactttacctgatttctgtatgttgtcatcttgcgtacgcccagtccccacgacagtccggtttgtagattccctgatctgcaattcttcccgttccttcatggatttgaaggctctcctttcttccttgaatgactttgcatccctctcgtttgctgagagttgggacaatgttggattactggtggaaccaagcccaccacatactgtaaatacactcttcctgaccaatgacctgactgaggaagtgatggaggaggtgctgcaaaagaaggcagacctcattctctcctaccatccgcctatcttccgacccatgaagcgcataacctggaacacatggaaggagcgcctggtgatccgggctctggagaacagagtcggtatctactctcctcatacagcctatgatgctgcgccccagggcgtcaacaactggttggctaaagggcttggagcttgtacctccaggcccatacatccttccaaagctcccaactaccctacagagggaaaccaccgagtagaattcaacgttaactacacccaagacctggacaaagtcatgtctgcagtgaaaggaattgacggtgtttctgtcacttctttttctgctaggactggtaatgaggaacaaacacggattaatctgaattgtactcagaaggctttgatgcaggtggtagattttctttcccggaacaaacaactttatcagaaacatcaggataacacattctacaaatcagctggatgccaacttaaatttgtaacatgagtcagtgggactggtgtgcttccagagagtgtcttcgagggtatcatcatttccggtttgttaatcttattcaccaaatgttctatcgctcgtaaggtaaaactgtaatataactaccatattaaataacaaatgttcattataaactctaggaaagattgaataaaatctgtttactt

SEQ ID NO: 159395 - DNA, 749 bp, Homo sapiens
  Payload ID: 11192
  Gene Symbol: NIF3L1
  Gene Name: NIF3 NGG1 interacting factor 3-like 1
  ENST ID: ENST00000426253
  CDS Start-End: 122-749
aagtgccacagcatccggagcgccgacgcgggaccggaagtgacgcagagaagtttccgggactgtccccacgacagtccggtttgtagattccctgatctgcaattcttcccgttccttcatggatttgaaggctctcctttcttccttgaatgactttgcatccctctcgtttgctgagagttgggacaatgttggattactggtggaaccaagcccaccacatactgtaaatacactcttcctgaccaatgacctgactgaggaagtgatggaggaggtgctgcaaaagaaggcagacctcattctctcctaccatccgcctatcttccgacccatgaagcgcataacctggaacacatggaaggagcgcctggtgatccgggctctggagaacagagtcggtatctactctcctcatacagcctatgatgctgcgccccagggcgtcaacaactggttggctaaagggcttggagcttgtacctccaggcccatacatccttccaaagctcccaactaccctacagagggaaaccaccgagtagaattcaacgttaactacacccaagacctggacaaagtcatgtctgcagtgaaaggaattgacggtgtttctgtcacttctttttctgctaggactggtaatgaggaacaaacacggattaatctgaattgtactcagaaggctttgatgcaggtggtagattttctttcccggaacaaacaactttatcagaagacggaaa

SEQ ID NO: 159396 - DNA, 8062 bp, Homo sapiens
  Payload ID: 11193
  Gene Symbol: NRK
  Gene Name: Nik related kinase
  Uniprot ID: Q7Z2Y5
  ENST ID: ENST00000243300
  CDS Start-End: 304-5052
acagcgctctcgacacggagcacccttctagcttcttcgtctccaggactgacgctcaggctcctctctcgccttagcccaacttgctttcccgcctcgcaaactccggtttccctccactcccaactcttttcactacacgtttcccctcctctatctcccacgccacgaaccccgatccccagactcctctctcccgccctcctccttcctctctcctcccttcaactcttcatccgcttccacctcagactctgcgcgcacccaattcagtcgcccgctcccgttcggctcctcgaagccatggcgggacctgggggctggagggacagggaggtcacggatctgggccacctgccggatccaactggaatattctcactagataaaaccattggccttggtacttatggcagaatctatttgggacttcatgagaagactggtgcatttacagctgttaaagtgatgaacgctcgtaagacccctttacctgaaataggaaggcgagtgagagtgaataaatatcaaaaatctgttgggtggagatacagtgatgaggaagaggatctcaggactgaactcaaccttctgaggaagtactctttccacaaaaacattgtgtccttctatggagcatttttcaagctgagtccccctggtcagcggcaccaactttggatggtgatggagttatgtgcagcaggttcggtcactgatgtagtgagaatgaccagtaatcagagtttaaaagaagattggattgcttatatctgccgagaaatccttcagggcttagctcaccttcacgcacaccgagtaattcaccgggacatcaaaggtcagaatgtgctgctgactcataatgctgaagtaaaactggttgattttggagtgagtgcccaggtgagcagaactaatggaagaaggaatagtttcattgggacaccatactggatggcacctgaggtgattgactgtgatgaggacccaagacgctcctatgattacagaagtgatgtgtggtctgtgggaattactgccattgaaatggctgaaggagcccctcctctgtgtaaccttcaacccttggaagctctcttcgttattttgcgggaatctgctcccacagtcaaatccagcggatggtcccgtaagttccacaatttcatggaaaagtgtacgataaaaaatttcctgtttcgtcctacttctgcaaacatgcttcaacacccatttgttcgggatataaaaaatgaacgacatgttgttgagtcattaacaaggcatcttactggaatcattaaaaaaagacagaaaaaaggaatacctttgatctttgaaagagaagaagctattaaggaacagtacaccgtgagaagattcagaggaccctcttgcactcacgagcttctgagattgccaaccagcagcagatgcagaccacttagagtcctgcatggggaaccctctcagccaaggtggctacctgatcgagaagagccacaggtccaggcacttcagcagctacagggagcagccagggtattcatgccactgcaggctctggacagtgcacctaagcctctaaaggggcaggctcaggcacctcaacgactacaaggggcagctcgggtgttcatgccactacaggctcaggtgaaggctaaggcctctaaacctctacaaatgcagattaaggcacctccacgactacggagggcagccagggtgctcatgccactacaggcacaggttagggcacctaggcttctgcaggtacagtcccaggtatccaaaaagcagcaggcccagacccagacatcagaaccacaagatttggaccaggtaccagaggaatttcagggtcaagatcaggtacccgaacaacaaaggcagggccaggcccctgaacaacagcagaggcacaaccaggtgcctgaacaagagctggagcagaaccaggcacctgaacagccagaggtacaggaacaggctgccgagcctgcacaggcagagactgaggcagaggaacctgagtcattacgagtaaatgcccaggtatttctgcccctgctatcacaagatcaccatgtgctgttgccactacatttggatactcaggtgctcattccagtagaggggcaaactgaaggatcacctcaggcacaggcttggacactagaacccccacaggcaattggctcagttcaagcactgatagagggactatcaagagacttgcttcgggcaccaaactcaaataactcaaagccacttggtccgttgcaaaccctgatggaaaatctgtcatcaaataggttttactcacaaccagaacaggcacgggagaaaaaatcaaaagtttctactctgaggcaagcactggcaaaaagactatcaccaaagaggttcagggcaaagtcatcatggagacctgaaaagcttgaactctcggatttagaagcccgcaggcaaaggcgccaacgcagatgggaagatatctttaatcagcatgaggaagaattgagacaagttgataaagacaaagaagatgaatcatcagacaatgatgaagtatttcattcgattcaggctgaagtccagatagagccattgaagccatacatttcaaatcctaaaaaaattgaggttcaagagagatctccttctgtgcctaacaaccaggatcatgcacatcatgtcaagttctcttcaagcgttcctcagcggtctcttttggaacaagctcagaagcccattgacatcagacaaaggagttcgcaaaatcgtcaaaattggctggcagcatcagaatcttcttctgaggaagaaagtcctgtgactggaaggaggtctcagtcatcaccaccttattctactattgatcagaagttgctggttgacatccatgttccagatggatttaaagtaggaaaaatatcaccccctgtatacttgacaaacgaatgggtaggctataatgcactctctgaaatcttccggaatgattggttaactccggcacctgtcattcagccacctgaagaggatggtgattatgttgaactctatgatgccagtgctgatactgatggtgatgatgatgatgagtctaatgatacttttgaagatacctatgatcatgccaatggcaatgatgacttggataaccaggttgatcaggctaatgatgtttgtaaagaccatgatgatgacaacaataagtttgttgatgatgtaaataataattattatgaggcgcctagttgtccaagggcaagctatggcagagatggaagctgcaagcaagatggttatgatggaagtcgtggaaaagaggaagcctacagaggctatggaagccatacagccaatagaagccatggaggaagtgcagccagtgaggacaatgcagccattggagatcaggaagaacatgcagccaatataggcagtgaaagaagaggcagtgagggtgatggaggtaagggagtcgttcgaaccagtgaagagagtggagcccttggactcaatggagaagaaaattgctcagagacagatggtccaggattgaagagacctgcgtctcaggactttgaatatctacaggaggagccaggtggtggaaatgaggcctcaaatgccattgactcaggtgctgcaccgtcagcacctgatcatgagagtgacaataaggacatatcagaatcatcaacacaatcagatttttctgccaatcactcatctccttccaaaggttctgggatgtctgctgatgctaactttgccagtgccatcttatacgctggattcgtagaagtacctgaggaatcacctaagcaaccctctgaagtcaatgttaacccactctatgtctctcctgcatgtaaaaaaccactaatccacatgtatgaaaaggagttcacttctgagatctgctgtggttctttgtggggagtcaatttgctgttgggaacccgatctaatctatatctgatggacagaagtggaaaggctgacattactaaacttataaggcgaagaccattccgccagattcaagtcttagagccactcaatttgctgattaccatctcaggtcataagaacagacttcgggtgtatcatctgacctggttgaggaacaagattttgaataatgatccagaaagtaaaagaaggcaagaagaaatgctgaagacagaggaagcctgcaaagctattgataagttaacaggctgtgaacacttcagtgtcctccaacatgaagaaacaacatatattgcaattgctttgaaatcatcaattcacctttatgcatgggcaccaaagtcctttgatgaaagcactgctattaaagtatgcattgatcaatcagcagactctgaaggagactacatgtcctatcaagcctatatacgaatactggcaaaaatacaggcagctgatccagtgaaccggtttaagagaccagatgagctccttcatttgctgaagctcaaggtatttccaacacttgatcataagccagtgacagttgacctggctattggttctgaaaaaagactaaagattttcttcagctcagcagatggatatcacctcatcgatgcagaatctgaggttatgtctgatgtgaccctgccaaagaatcccctggaaatcattataccacagaatatcatcattttacctgattgcttgggaattggcatgatgctcaccttcaatgctgaagccctctctgtggaagcaaatgaacaactcttcaagaagatccttgaaatgtggaaagacataccatcttctatagcttttgaatgtacacagcgaaccacaggatggggccaaaaggccattgaagtgcgctctttgcaatccagggttctggaaagtgagctgaagcgcaggtcaattaagaagctgagattcctgtgcacccggggtgacaagctgttctttacctctaccctgcgcaatcaccacagccgggtttacttcatgacacttggaaaacttgaagagctccaaagcaattatgatgtctaaaagtttccagtgatttattaccacattataaacatcatgtataggcagtctgcatcttcagatttcagagattaaatgagtattcagttttatttttagtaaagattaaatccaaaactttacttttaatgtagcacagaatagttttaatgagaaatgcagctttatgtataaaattaactatagcaagctctaggtactccaatggtgtacaatgtcttttgcacaaactttgtaacttttgttactgtgaattcaaacattactctttggacagtttggacagtatctgtattcagattttacaacatggagtaaagaaacctgttatgaattagattacaagcagccttcaaaagaattggcactgggataagatttttcagaaaaagaaaaacatcggcaaactgtgtgtgatttttccaaagctatataaagaaccaaaggtttagtcaagaaacaaaaatcttaaagattattataacccagactaaggttgaacaacctgcatgcccagagaaaactatggcgacaaaggggaaaaggccaccactcgttttctcactgattcatgccaattaagcctacagttaaagaccagttttgttcttttcacccatttttaagctggttttctcctgataagaagaaaggaagaaagccccagacgcttggtttttctcagaacccccaaaagatgtgcaatagctgttgttacaaaccaccaaataatacagttgtgagcctgaatacaggactgaactcctatacacgtgtactgtagaatgagtattttttaataccttaaggtaggcgtcaaattctactccccaaagcagagatagattgatttatcaaaattattatctggccaacagtgtgactatcagacagcatcaaatatttgcccaatccaagattagactacacaaaagcttccttccagtattaaacaaaaagaattaaacataactatgaaaaaactttgctaatatctgtgtttttcagatttcattttttgtaaaatcagaaattaatctaaacatattcagtgataagttcatgtgtaacgacttaatgttaaaggttaaaaaaaagatttcacaaaatatacaactttcaccatatatataagcctgcaaaattagagtagtgaaagtcatgctagtccatcacccaaatatgttatagacgccatagacaggtgatgtttggtcacctatggtaactgctacctgatgaagagcataatttctgcatatccatcctcaataccatggtaaattctggggcaatagagaagcaacagaactgccacaaagtatacctcaatataattcctctagttctgcttctaaaatctgaggacagtgctagtgggaaaataattttcaaactacctggttaaccaaaatacaaaagcagctgactatgtgtgatttcataatagcacatttcttgacacttagtgctagaaatgaagatttggattttcctaacaacttacatcaagaatgtagtgtagctcattattgagaatttaggaaagcctgaatccattaattaaggaaataaatgtgactcacatttcttttactgtgacacaataatgtgatcctaaaactggcttatccttgagtgtttacaactcaaacaactttttgaatgcagtagttttttttttttaaaaacaaacttttatgtcaaattttttttcttagaagtagtcttcattattataaatttgtacaccaaaaggccatggggaactttgtgcaagtacctcatcgctgagcaaatggagcttgctatgttttaatttcagaaaatttcctcatatacgtagtgtgtagaatcaagtcttttaataattcattttttcttcataatatttactcaaagttaagcttaaaaataagttttatcttaaaatcatatttgaagacagtaagacagtaaactattttaggaagtcaacccccattgcactctgtggcagttattctggtaaaaataggcaaaagtgacctgaatctacaatgatgtcccaaagtaaccaagtaagagagattgtaaatgataaaccgagctttaaaggataaagtgttaataaagaaaggaagctgggcacatgtcaaaaagggagatcgaaatgttaggtaatcatttagaaaggacagaaaatatttaaagtggctcataggtaatgaatatttctgacttagatgtaaatccatctggaatctttacatcctttgccagctgaaacaagaaagtgaagggacaatgatatttcatggtcagtttattttgtaagagacagaagaaattatatctatacattaccttgtagcagcagtacctggaagccccagcccgtcacagaagtgtggaggggggctcctgactagacaatttccctagcccttgtgatttgaagcatgaaagttctggcaggttatgagcagcactagggataaagtatggttttattttggtgtaatttaggtttttcaacaaagcccttgtctaaaataaaaggcattattggaaatatttgaaaactagaaaatgatggataaaagggctgataagaaaatttctgactgtcagtagaagtgagataagatcctcagaggaaacagtaagaagggataatcattaagatagtaaaacaggcaaagcagaatcacatgtgcacacacacatacacatgtaaacattggaatgcataagttttaatattttagcgctatcagtttctaaatgcattaattactaactgccctctcccaagattcatttagttcaaacagtatccgtaaactaggaataatgccacatgcattcaatgggatcttttaagtactcttcagtttgttccaagaaatgtgcctactgaaatcaaattaatttgtattcaatgtgtacttcaagactgctaattgtttcatctgaaagcctacaatgaatcattgttcaaccttgaaaaataaaattttgtaaaaca

SEQ ID NO: 159397 - DNA, 1687 bp, Homo sapiens
  Payload ID: 11193
  Gene Symbol: NRK
  Gene Name: Nik related kinase
  ENST ID: ENST00000540278
  CDS Start-End: 203-694
attacaaaagctgtaatgatacaagggaaccatgtgtgctaaagaatatctagttacttcaggaatcatctgagaagcatctgaggctgtatggatttgcagcagtccagtttttttctaaacagattttattaagacaaccttctttcctgcaatttcttttactctcttcctttatcttttttttctgattcaattgctcatgcaagtgcccagggaacgcattaaaattgcttttcgtctctggatccccattttagttataaggattgttgttgctgggacatggcctcaagcacctggcctgagtacgctgggtttgaatatcatcattttacctgattgcttgggaattggcatgatgctcaccttcaatgctgaagccctctctgtggaagcaaatgaacaactcttcaagaagatccttgaaatgtggaaagacataccatcttctatagcttttgaatgtacacagcgaaccacaggatggggccaaaaggccattgaagtgcgctctttgcaatccagggttctggaaagtgagctgaagcgcaggtcaattaagaagctgagattcctgtgcacccggggtgacaagctgttctttacctctaccctgcgcaatcaccacagccgggtttacttcatgacacttggaaaacttgaagagctccaaagcaattatgatgtctaaaagtttccagtgatttattaccacattataaacatcatgtataggcagtctgcatcttcagatttcagagattaaatgagtattcagttttatttttagtaaagattaaatccaaaactttacttttaatgtagcacagaatagttttaatgagaaatgcagctttatgtataaaattaactatagcaagctctaggtactccaatggtgtacaatgtcttttgcacaaactttgtaacttttgttactgtgaattcaaacattactctttggacagtttggacagtatctgtattcagattttacaacatggagtaaagaaacctgttatgaattagattacaagcagccttcaaaagaattggcactgggataagatttttcagaaaaagaaaaacatcggcaaactgtgtgtgatttttccaaagctatataaagaaccaaaggtttagtcaagaaacaaaaatcttaaagattattataacccagactaaggttgaacaacctgcatgcccagagaaaactatggcgacaaaggggaaaaggccaccactcgttttctcactgattcatgccaattaagcctacagttaaagaccagttttgttcttttcacccatttttaagctggttttctcctgataagaagaaaggaagaaagccccagacgcttggtttttctcagaacccccaaaagatgtgcaatagctgttgttacaaaccaccaaataatacagttgtgagcctgaatacaggactgaactcctatacacgtgtactgtagaatgagtattttttaataccttaaggtaggcgtcaaattctactccccaaagcagagatagattgatttatcaaaattattatctggccaacagtgtgactatcagacagcatcaaatatttgcccaatccaagattagactacacaaaagcttccttccagtattaaacaaaaagaattaaacataactatgaaaaaactttgctaat

SEQ ID NO: 159398 - DNA, 5201 bp, Homo sapiens
  Payload ID: 11193
  Gene Symbol: NRK
  Gene Name: Nik related kinase
  ENST ID: ENST00000428173
  CDS Start-End: 266-1333
gtctccaggactgacgctcaggctcctctctcgccttagcccaacttgctttcccgcctcgcaaactccggtttccctccactcccaactcttttcactacacgtttcccctcctctatctcccacgccacgaaccccgatccccagactcctctctcccgccctcctccttcctctctcctcccttcaactcttcatccgcttccacctcagactctgcgcgcacccaattcagtcgcccgctcccgttcggctcctcgaagccatggcgggacctgggggctggagggacagggaggtcacggatctgggccacctgccggatccaactggaatattctcactagataaaaccattggccttggtacttatggcagaatctatttgggacttcatgagaagactggtgcatttacagctgttaaagtgatgaacgctcgtaagacccctttacctgaaataggaaggcgagtgagagtgaataaatatcaaaaatctgttgggtggagatacagtgatgaggaagaggatctcaggactgaactcaaccttctgaggaagtactctttccacaaaaacattgtgtccttctatggagcatttttcaagctgagtccccctggtcagcggcaccaactttggatggtgatggagttatgtgcagcaggttcggtcactgatgtagtgagaatgaccagtaatcagagtttaaaagaagattggattgcttatatctgccgagaaatccttcagggcttagctcaccttcacgcacaccgagtaattcaccgggacatcaaaggtcagaatgtgctgctgactcataatgctgaagtaaaactggttgattttggagtgagtgcccaggtgagcagaactaatggaagaaggaatagtttcattgggacaccatactggatggcacctgaggtgattgactgtgatgaggacccaagacgctcctatgattacagaagtgatgtgtggtctgtgggaattactgccattgaaatggctgaaggagcccctcctctgtgtaaccttcaacccttggaagctctcttcgttattttgcgggaatctgctcccacagtcaaatccagcggatggtcccgtaagttccacaatttcatggaaaagtgtacgataaaaaatttcctgtttcgtcctacttctgcaaacatgcttcaacacccatttgttcgggatataaaaaatgaacgacatgttgttgagtcattaacaaggcatcttactggaatcattaaaaaaagacagaaaaaaggatttgcagtgagccaagatcatgccactgcactccagcccgggtgacagaacaagacgctgcctcaaaaaaataaaaataaaagtaccaggatggattttcaccaagtccagaagaagcccctgggaagtcctaactttatatattatattacatattccacatttgattttgcggaccataggcagagttgagagtaacaatggaatgtaaaagggaaaacttgaaaaagcaggcatcctcagatcagctgtgggattgattgtagtggggcttgttgtatctatacatgtatcatgttttgaggcaaggagcagcaagaattaatttatttacctatggtaatgaagttattcagccaactttacagaggccagccagtttcaaatgggttcaggaaaaccacacatctatatggtaatttgctaatttccagaattgcaaaatttccaaaatgttacctgtaggaaaagttccatttatatggaagttacactaaagatataaatatagttgccctgaacattttaatataggaaattcaaaataaaactcttgtttgtaatcttctatatttcagtagtcacagtacagctgatgataggaaagaagctgaatgttttcaatgtgtttagtgtaaaacacagaattaagaatttgccttctcattgaaaagaccaaatatcaacctcaagccataaagtccttacatctagagcccacagctgtaagccatgctcaccactatttagagtttctcttgtctcattctccctttgtcccattctctcttcttcctctttagaattgcagaaatcaagttgctaaattttctctgttcagagaaattaatctgcatgcaatagctatattgtgctgcaaaagtgggcctagaaactagaatatggtctacatcacaaaccaagtacttttgaagggctaccttcttgcccttgtaattcactccacatcctaagaagcagagggaacaaggtgattaagtggataacatgcttatctgctgactgtttatgcattatgtttttctcttttgtaaaaaaaggaatacctttgatctttgaaagagaagaagctattaaggaacagtacaccgtgagaagattcagaggaccctcttgcactcacgagcttctgagattgccaaccagcagcagatgcagaccacttagagtcctgcatggggaaccctctcagccaaggtggctacctgatcgagaagagccacaggtccaggcacttcagcagctacagggagcagccagggtattcatgccactgcaggctctggacagtgcacctaagcctctaaaggggcaggctcaggcacctcaacgactacaaggggcagctcgggtgttcatgccactacaggctcaggtgaaggctaaggcctctaaacctctacaaatgcagattaaggcacctccacgactacggagggcagccagggtgctcatgccactacaggcacaggttagggcacctaggcttctgcaggtacagtcccaggtatccaaaaagcagcaggcccagacccagacatcagaaccacaagatttggaccaggtaccagaggaatttcagggtcaagatcaggtacccgaacaacaaaggcagggccaggcccctgaacaacagcagaggcacaaccaggtgcctgaacaagagctggagcagaaccaggcacctgaacagccagaggtacaggaacaggctgccgagcctgcacaggcagagactgaggcagaggaacctgagtcattacgagtaaatgcccaggtatttctgcccctgctatcacaagatcaccatgtgctgttgccactacatttggatactcaggtgctcattccagtagaggggcaaactgaaggatcacctcaggcacaggcttggacactagaacccccacaggcaattggctcagttcaagcactgatagagggactatcaagagacttgcttcgggcaccaaactcaaataactcaaagccacttggtccgttgcaaaccctgatggaaaatctgtcatcaaataggttttactcacaaccagaacaggcacgggagaaaaaatcaaaagtttctactctgaggcaagcactggcaaaaagactatcaccaaagaggttcagggcaaagtcatcatggagacctgaaaagcttgaactctcggatttagaagcccgcaggcaaaggcgccaacgcagatgggaagatatctttaatcagcatgaggaagaattgagacaagttgataaagacaaagaagatgaatcatcagacaatgatgaagtatttcattcgattcaggctgaagtccagatagagccattgaagccatacatttcaaatcctaaaaaaattgaggttcaagagagatctccttctgtgcctaacaaccaggatcatgcacatcatgtcaagttctcttcaagcgttcctcagcggtctcttttggaacaagctcagaagcccattgacatcagacaaaggagttcgcaaaatcgtcaaaattggctggcagcatcagaatcttcttctgaggaagaaagtcctgtgactggaaggaggtctcagtcatcaccaccttattctactattgatcagaagttgctggttgacatccatgttccagatggatttaaagtaggaaaaatatcaccccctgtatacttgacaaacgaatgggtaggctataatgcactctctgaaatcttccggaatgattggttaactccggcacctgtcattcagccacctgaagaggatggtgattatgttgaactctatgatgccagtgctgatactgatggtgatgatgatgatgagtctaatgatacttttgaagatacctatgatcatgccaatggcaatgatgacttggataaccaggttgatcaggctaatgatgtttgtaaagaccatgatgatgacaacaataagtttgttgatgatgtaaataataattattatgaggcgcctagttgtccaagggcaagctatggcagagatggaagctgcaagcaagatggttatgatggaagtcgtggaaaagaggaagcctacagaggctatggaagccatacagccaatagaagccatggaggaagtgcagccagtgaggacaatgcagccattggagatcaggaagaacatgcagccaatataggcagtgaaagaagaggcagtgagggtgatggaggtaagggagtcgttcgaaccagtgaagagagtggagcccttggactcaatggagaagaaaattgctcagagacagatggtccaggattgaagagacctgcgtctcaggactttgaatatctacaggaggagccaggtggtggaaatgaggcctcaaatgccattgactcaggtgctgcaccgtcagcacctgatcatgagagtgacaataaggacatatcagaatcatcaacacaatcagatttttctgccaatcactcatctccttccaaaggttctgggatgtctgctgatgctaactttgccagtgccatcttatacgctggattcgtagaagtacctgaggaatcacctaagcaaccctctgaagtcaatgttaacccactctatgtctctcctgcatgtaaaaaaccactaatccacatgtatgaaaaggagttcacttctgagatctgctgtggttctttgtggggagtcaatttgctgttgggaacccgatctaatctatatctgatggacagaagtggaaaggctgacattactaaacttataaggcgaagaccattccgccagattcaagtcttagagccactcaatttgctgattaccatctcaggtcataagaacagacttcgggtgtatcatctgacctggttgaggaacaagattttgaataatgatccagaaagt

SEQ ID NO: 159399 - DNA, 908 bp, Homo sapiens
  Payload ID: 11193
  Gene Symbol: NRK
  Gene Name: Nik related kinase
  Uniprot ID: Q7Z2Y5
  ENST ID: ENST00000536164
  CDS Start-End: 294-860
cgacacggagcacccttctagcttcttcgtctccaggactgacgctcaggctcctctctcgccttagcccaacttgctttcccgcctcgcaaactccggtttccctccactcccaactcttttcactacacgtttcccctcctctatctcccacgccacgaaccccgatccccagactcctctctcccgccctcctccttcctctctcctcccttcaactcttcatccgcttccacctcagactctgcgcgcacccaattcagtcgcccgctcccgttcggctcctcgaagccatggcgggacctgggggctggagggacagggaggtcacggatctgggccacctgccggatccaactggaatattctcactagataaaaccattggccttggtacttatggcagaatctatttgggacttcatgagaagactggtgcatttacagctgttaaagtgatgaacgctcgtaagacccctttacctgaaataggaaggcgagtgagagtgaataaatatcaaaaatctgttgggtggagatacagtgatgaggaagaggatctcaggactgaactcaaccttctgaggaagtactctttccacaaaaacattgtgtccttctatggagcatttttcaagctgagtccccctggtcagcggcaccaactttggatggtgatggagttatgtgcagcaggttcggtcactgatgtagtgagaatgaccagtaatcagagtttaaaagaagattggattgcttatatctgccgagaaatccttcagccaaaagtcatatttctgggaacgggttgtagtgattccagcctaaagaaagaattgtgtctgaaacatcaaaattaagctgtttctcttatcaaaagtttttccaaaaatactaagaactgtacc

SEQ ID NO: 159400 - DNA, 2313 bp, Homo sapiens
  Payload ID: 11194
  Gene Symbol: NIM1K
  Gene Name: NIM1 serine/threonine protein kinase
  Uniprot ID: Q8IY84
  ENST ID: ENST00000326035
  CDS Start-End: 882-2192
ggggtttgccctgggccgctgccggtcaggtcggccgcccctgacagctccgggagcctcaagcgcgacagcggcgccctcacctcgggacatccacacaccgaccgctcctgctccagaggcaacaacccagcgcgcctagcctggcgccgtgcagcgaagcccaagagctggcctcgccacgaaggttgaaccagccaaattttcgagacagctcacggcttagaggaaggttcatctaaataaaggccggctaaagtgacattgcagggattaaatccttctttggctgcctgtgtgaccagaaggcttatttgcaagtttcttctttcctggggtccagattattaggtctccagcgccctgcagcttgacagaaagagaagcatgaaatgaaggtcagagatgagatcccgcagcagggacgtgggggcctcccaggggcatttacgcaccagagtgcaagattctctggccatcaagggaaatagcaaacagaagcctttgtcctggggcacagccacctaccacaaagcatcagactccacgtctggccagaaagttcctggagtcccatcaggccagtgggtatgtaacatgtgcctaattgtacagctagagcctgcaagttcaacgtgagggaaggtgggaaatgtcttgagtgaggcgagcagctcctggctgggctgggcagactcagctaccacgttcactgccttcctctcactaaagccgagagggaggctgctcagctctcaggaaaactcttttgaaccctgggcacctgctgtcctcagttggcatctcccaccctctgagcctcttctgctcctgcacaacctgcctcttcgctgagatggagacgtgagcccccgtggacgatgactgcagtgtatatgaatggaggtggcctggtgaacccccactatgcccggtgggatcggcgcgacagtgtagaaagtggctgtcagaccgagagtagcaaggagggtgaggagggacagccccgccagctgacgcccttcgagaaactgacacaggacatgtcccaggatgagaaggtggtgagggagatcacgctggggaaacggataggcttctaccgaattcgaggggaaatcggaagtggaaacttctcccaagtgaagcttgggattcactccctaaccaaagaaaaggtggccattaagatcctggacaagaccaagttagaccagaaaacccagaggctactatcccgagaaatctccagcatggaaaagctgcaccatcccaacatcatccgcctttacgaagtggtggagaccctatccaagctgcacttggtgatggagtatgcagggggtggggagctcttcggaaaaattagcactgaggggaagctctctgaaccagaaagcaagctcatcttctcccagattgtgtctgccgtgaagcacatgcatgaaaaccaaattattcatagagatctgaaagcagaaaatgtattctataccagtaatacttgtgtgaaggtgggcgattttggattcagcacagtaagcaaaaaaggtgaaatgctgaacactttctgtgggtctcctccctacgctgcgcctgaactcttccgggacgagcactacatcggcatttacgtggatatctgggccttgggggtgcttttgtacttcatggtgactggcaccatgccatttcgggcagaaaccgtggccaaactaaaaaagagcatcctcgagggcacatacagtgtaccgccgcacgtgtcagagccctgccaccgactcatccgaggagtccttcagcagatccccacggagaggtacggaatcgactgcatcatgaatgatgaatggatgcaaggggtgccataccctacacctttggaacctttccaactggatcccaaacatttgtcggaaaccagcactctcaaggaagaagaaaatgaggtcaaaagcactttagaacatttgggcattacagaagagcatattcgaaataaccaagggagagatgctcgcagctcaatcacaggggtctatagaattattttacatagagtccaaaggaagaaggctttggaaagtgtcccagtcatgatgctaccagaccctaaagaaagagacctcaaaaaagggtcccgtgtctacagagggataagacacacatccaaattttgctcgattttataaattgcactagactgcttgtaactaaccaagatgattgttgctgcttctaaatttttttcaaggacaacttgagtggagacatttttgtaatttttaaataaacttaaatttgagatatgca

SEQ ID NO: 159401 - DNA, 2929 bp, Homo sapiens
  Payload ID: 11194
  Gene Symbol: NIM1K
  Gene Name: NIM1 serine/threonine protein kinase
  Uniprot ID: Q8IY84
  ENST ID: ENST00000512796
  CDS Start-End: 1500-2810
agagccctaaggcaccagaccaaatctggagcgtttgttacaagggcagaagaccggcgtgatctccccacgcgcgccggccggtgctgctggtggagagaactgacatctaacgcatgtggcccaggagaacaaaaccttccattgcaccccacgccgcgactctccccagcgaaaggtgcttcttttggaagaccgcacgaagtaaggaagagcctcttttcctcttcctggatatccctccaggaatattagaagctccaggactccttgatacgaccaggaaaagatcgcaaccgggtctttaaaatatcgattccagccagcttctgcgtgcttgacacatcttggcagatggagaagtcaaggcaatagataacatgggcagcaaagattctgctatagcacttctttcctttctgttttttccttccctccttccctccttttccctcttctccctccctcctttcctcctcctcctctccccttctcttctcctcctccctccctccctttctccctttctcctctcttttccccttccctcccctgttttcgtcctcctgagtacagtagacaagagggctctctgtctaccccccctcccccaccccattcctcatcccgtttcaaaataagagcgaatgaatcacattctaagctcttacccgtgcagttctgacaagtttggaaattacacaaatcgcgtttgcaattgaggccgcgggaatccaaaagggaaacaaacgaaaccagatgaaaaaaagtgattccaagtcaagatttcaaatggaaatctaaggttgaaccagccaaattttcgagacagctcacggcttagaggaaggttcatctaaataaaggccggctaaagtgacattgcagggattaaatccttctttggctgcctgtgtgaccagaaggcttatttgcaagtttcttctttcctggggtccagattattaggtctccagcgccctgcagcttgacagaaagagaagcatgaaatgaaggtcagagatgagatcccgcagcagggacgtgggggcctcccaggggcatttacgcaccagagtgcaagattctctggccatcaagggaaatagcaaacagaagcctttgtcctggggcacagccacctaccacaaagcatcagactccacgtctggccagaaagttcctggagtcccatcaggccagtgggtatgtaacatgtgcctaattgtacagctagagcctgcaagttcaacgtgagggaaggtgggaaatgtcttgagtgaggcgagcagctcctggctgggctgggcagactcagctaccacgttcactgccttcctctcactaaagccgagagggaggctgctcagctctcaggaaaactcttttgaaccctgggcacctgctgtcctcagttggcatctcccaccctctgagcctcttctgctcctgcacaacctgcctcttcgctgagatggagacgtgagcccccgtggacgatgactgcagtgtatatgaatggaggtggcctggtgaacccccactatgcccggtgggatcggcgcgacagtgtagaaagtggctgtcagaccgagagtagcaaggagggtgaggagggacagccccgccagctgacgcccttcgagaaactgacacaggacatgtcccaggatgagaaggtggtgagggagatcacgctggggaaacggataggcttctaccgaattcgaggggaaatcggaagtggaaacttctcccaagtgaagcttgggattcactccctaaccaaagaaaaggtggccattaagatcctggacaagaccaagttagaccagaaaacccagaggctactatcccgagaaatctccagcatggaaaagctgcaccatcccaacatcatccgcctttacgaagtggtggagaccctatccaagctgcacttggtgatggagtatgcagggggtggggagctcttcggaaaaattagcactgaggggaagctctctgaaccagaaagcaagctcatcttctcccagattgtgtctgccgtgaagcacatgcatgaaaaccaaattattcatagagatctgaaagcagaaaatgtattctataccagtaatacttgtgtgaaggtgggcgattttggattcagcacagtaagcaaaaaaggtgaaatgctgaacactttctgtgggtctcctccctacgctgcgcctgaactcttccgggacgagcactacatcggcatttacgtggatatctgggccttgggggtgcttttgtacttcatggtgactggcaccatgccatttcgggcagaaaccgtggccaaactaaaaaagagcatcctcgagggcacatacagtgtaccgccgcacgtgtcagagccctgccaccgactcatccgaggagtccttcagcagatccccacggagaggtacggaatcgactgcatcatgaatgatgaatggatgcaaggggtgccataccctacacctttggaacctttccaactggatcccaaacatttgtcggaaaccagcactctcaaggaagaagaaaatgaggtcaaaagcactttagaacatttgggcattacagaagagcatattcgaaataaccaagggagagatgctcgcagctcaatcacaggggtctatagaattattttacatagagtccaaaggaagaaggctttggaaagtgtcccagtcatgatgctaccagaccctaaagaaagagacctcaaaaaagggtcccgtgtctacagagggataagacacacatccaaattttgctcgattttataaattgcactagactgcttgtaactaaccaagatgattgttgctgcttctaaatttttttcaaggacaacttgagtggagacatttttgtaatttttaaataaacttaaatttgagatatg

SEQ ID NO: 159402 - DNA, 5653 bp, Homo sapiens
  Payload ID: 11195
  Gene Symbol: NEK1
  Gene Name: NIMA-related kinase 1
  Uniprot ID: Q96PY6
  ENST ID: ENST00000439128
  CDS Start-End: 642-4418
gtgacgcgccggccgctctcccttagtccgcattcgctccagggttttgggaccctaggttgcggagtccttaccctaccctggcctctcgagcagttgtccccataactcggaatctagagccgctgttgcgaggcaggagcacgtggcagtcaagtagcttcccagtcccgaacgccgcccgtccccaccccgccgtggccactagcaacgacctctgtgaagttggagaggcggtaacggaggcactccccctgctgcaccccgccgtttctacggggctcagaaaccagtttgtttgtttcgtcggggtagtgtcgacctgtcttacgggcgtcgcccgagacaggacggagtcaaacccgtggtatcaactgaagacgagtgtcaggtgtggagagtctcagtgccccctttcagtctggactgtgagctgctgctggttagacagtcttggtttctctttcaggatgtcattttcaaaatgcgggatggtacctctgctttattaagccccgtaggaagactgccacacctagactgatgcttattagtcatcaccgttattcctactaacgtcctgtgtcactgagttttttaaatgtctagcatatctgtaaagatgccttagaaaaagaatcatggagaagtatgttagactacagaagattggagaaggttcatttggaaaagccattcttgttaaatctacagaagatggcagacagtatgttatcaaggaaattaacatctcaagaatgtccagtaaagaaagagaagaatcaaggagagaagttgcagtattggcaaacatgaagcatccaaatattgtccagtatagagaatcatttgaagaaaatggctctctctacatagtaatggattactgtgagggaggggatctgtttaagcgaataaatgctcagaaaggcgttttgtttcaagaggatcagattttggactggtttgtacagatatgtttggccctgaaacatgtacatgatagaaaaattcttcatcgagacattaaatctcagaacatatttttaactaaagatggaacagtacaacttggagattttggaattgctagagttcttaatagtactgtagagctggctcgaacttgcatagggaccccatactacttgtcacctgaaatctgtgaaaacaaaccttacaataataaaagtgacatttgggctctggggtgtgtcctttatgagctgtgtacacttaaacatgcttttgaagctggcagtatgaaaaacctggtactgaagataatatctggatcttttccacctgtgtctttgcattattcctatgatctccgcagtttggtgtctcagttatttaaaagaaatcctagggatagaccatcagtcaactccatattggagaaaggttttatagccaaacgcattgaaaagtttctctctcctcagcttattgcagaagaattttgtctaaaaacattttcgaagtttggatcacagcctataccagctaaaagaccagcttcaggacaaaactcgatttctgttatgcctgctcagaaaattacaaagcctgccgctaaatatggaatacctttagcatataagaaatatggagataaaaaattacacgaaaagaaaccactgcaaaaacataaacaggcccatcaaactccagagaagagagtgaatactggagaagaaaggaggaaaatatctgaggaagcagcaagaaagagaaggctggaatttattgaaaaagaaaagaaacaaaaggatcagattattagtttaatgaaggctgaacaaatgaaaaggcaagaaaaggaaaggttggaaagaataaatagggccagggaacaaggatggagaaatgtgctaagtgctggtggaagtggtgaagtaaaggctccttttctgggcagtggagggactatagctccatcatctttttcttctcgaggacagtatgaacattaccatgccatttttgaccaaatgcagcaacaaagagcagaagataatgaagctaaatggaaaagagaaatatatggtcgaggtcttccagaaagaggaattctgcctggagttcgtccaggatttccttatggggctgcaggtcatcaccattttcctgatgctgatgatattagaaaaactttgaaaagattgaaggcggtgtctaaacaagccaatgcaaacaggcaaaaagggcagctagctgtagaaagagctaaacaagtagaagagttcctgcagcgaaaacgggaagctatgcagaataaagctcgagccgaaggacatatggtttatctggcaagactgaggcaaataagactacagaatttcaatgagcgccaacagattaaagccaaacttcgtggtgaaaagaaagaagctaatcattctgaaggacaagaaggaagtgaagaggctgacatgaggcgcaaaaaaatcgaatcactgaaggcccatgcaaatgcacgtgctgctgtactaaaagaacaactagaacgaaagagaaaggaggcttatgagagagaaaaaaaagtgtgggaagagcatttggtggctaaaggagttaagagttctgatgtttctccacctttgggacagcatgaaacaggtggctctccatcaaagcaacagatgagatctgttatttctgtaacttcagctttgaaagaagttggcgtggacagtagtttaactgatacccgggaaacttcagaagagatgcaaaagaccaacaatgctatttcaagtaagcgagaaatacttcgtagattaaatgaaaatcttaaagctcaagaagatgaaaaaggaaagcagaatctctctgatacttttgagataaatgttcatgaagatgccaaagagcatgaaaaagaaaaatcagtttcatctgatcgcaagaagtgggaggcaggaggtcaacttgtgattcctctggatgagttaacactagatacatccttctctacaactgaaagacatacagtgggagaagttattaaattaggtcctaatggatctccaagaagagcctgggggaaaagtccgacagattctgttctaaagatacttggagaagctgaactacaacttcagacagaactattagaaaatacaactattagaagtgagatttctcccgaaggggaaaagtacaaacccttaattactggagaaaaaaaagtacaatgtatttcacatgaaataaacccatcagctattgttgattctcctgttgagacaaaaagtcccgagttcagtgaggcatctccacagatgtcattgaaactggaaggaaatttagaagaacctgatgatttggaaacagaaattctacaagagccaagtggaacaaacaaagatgagagcttgccatgcactattactgatgtgtggattagtgaggaaaaagaaacaaaggaaactcagtcggcagataggatcaccattcaggaaaatgaagtttctgaagatggagtctcgagtactgtggaccaacttagtgacattcatatagagcctggaaccaatgattctcagcactctaaatgtgatgtagataagtctgtgcaaccggaaccatttttccataaggtggttcattctgaacacttgaacttagtccctcaagttcaatcagttcagtgttcaccagaagaatcctttgcatttcgatctcactcgcatttaccaccaaaaaataaaaacaagaattccttgctgattggactttcaactggtctgtttgatgcaaacaacccaaagatgttaaggacatgttcacttccagatctctcaaagctgttcagaacccttatggatgttcccaccgtaggagatgttcgtcaagacaatcttgaaatagatgaaattgaagatgaaaacattaaagaaggaccttctgattctgaagacattgtgtttgaagaaactgacacagatttacaagagctgcaggcctcgatggaacagttacttagggaacaacctggtgaagaatacagtgaagaagaagagtcagtcttgaagaacagtgatgtggagccaactgcaaatgggacagatgtggcagatgaagatgacaatcccagcagtgaaagtgccctgaacgaagaatggcactcagataacagtgatggtgaaattgctagtgaatgtgaatgcgatagtgtctttaaccatttagaggaactgagacttcatctggagcaggaaatgggctttgaaaaattctttgaggtttatgagaaaataaaggctattcatgaagatgaagatgaaaatattgaaatttgttcaaaaatagttcaaaatattttgggaaatgaacatcagcatctttatgccaagattcttcatttagtcatggcagatggagcctaccaagaagataatgatgaataatcctcaaaatgttttttaatcctcaactatatgaaagcatttgaatttggcttatcagaataacaagcttcagtgggaaatacagcaattatttatttaaaaaatcagatttaagatggactttcttattgcatgaaaaagatggagaaacatgccatttttcagtgaagattctaatattttatctattttgttcattgaattccatggttaaatctcataaaatatatactttattaaatcatccaaccaaagcataggaaacattgacccagaacctgacttaatggttttgaagatttactatgcaatagggtaactttgagtttcagcaaatgtctttaggttgaaggaattacctatgtcatgaaggacctgtctgtggtttttcaatggagtctttaagcatgatcttttttctgtctagtacttgttttcattctggccagcagttctacattaaatcaccttgtcaagggctctgtttacatctatacattttgaagatgaaatttttagccttaaagtttatattctcaagtccttttacaatcagtgtgtctcctgaactagcacacaggctgtagaaacagtcttagaaatcattgaaagatttgattatgaaagaatagcaaaattatatttcttgacatataaaaagttggtttaatgcctttatttctctttaaggaccagaaccaggaatactatatcgaaaaattagtctgtggatttaacactgacttagcatatagcttaaagttgctcttttggtttttaacttcctccatacataagcttcaaggacaataagatgttaaaaaggaggaaataattatttttattttgacactgtgacagttttggtaactaggatcctagggagggaaatgtttgcctgttgaacttctttctgttatgagaggatttagttaggtcattaagatgttgatcacacagcttcaatcacaatatgccaagtataacctggtttcgttagaggtgtctacagtccagatgttcttcgtaataaaagcaaagtttttgaacctctgagtccaaagcaggctggttggcataatatgtaatttgaaaaataaaatcttatcttgcagcactatcagtatgttgaatttattatgtatattatttctaatatccgaaactaaatacttgattttttaatatgtgtgtttattttatgatattgctattaaatttttattatctacctg

SEQ ID NO: 159403 - DNA, 688 bp, Homo sapiens
  Payload ID: 11195
  Gene Symbol: NEK1
  Gene Name: NIMA-related kinase 1
  ENST ID: ENST00000505119
  CDS Start-End: 1-370
ttttccacctgtgtctttgcattattcctatgatctccgcagtttggtgtctcagttatttaaaagaaatcctagggatagaccatcagtcaactccatattggagaaaggttttatagccaaacgcattgaaaagtttctctctcctcagcttattgcagaagaattttgtctaaaaacattttcgaagtttggatcacagcctataccagctaaaagaccagcttcaggacaaaactcgatttctgttatgcctgctcagaaaattacaaagcctgccgctaaatatggaatacctttagcatataagaaatatggagataaaaaattacacgaaaagaaaccactgcaaaaacataaacaggtatgatcatgttacataccatgtgttaataacaaattcaattcaaccttatttcattgcagctcaattcagttaccttgatattataggattacttttattaagttaccaaggaatgtcctccttctgtgttttaccagtcctctaaaactgagaagccttacaggagtcataaaaagtcattaagtaaatatattaagtaatataattagtgtaataaaaagcgagtgacattataaatgaaataacttttgagcaacctaagcagagccatttgtttttgtgcataaatgaaataaatacctatgacattcttgataaaaa

SEQ ID NO: 159404 - DNA, 5536 bp, Homo sapiens
  Payload ID: 11195
  Gene Symbol: NEK1
  Gene Name: NIMA-related kinase 1
  Uniprot ID: Q96PY6
  ENST ID: ENST00000511633
  CDS Start-End: 579-4307
cacacgccagcgccggtgacgcgccggccgctctcccttagtccgcattcgctccagggttttgggaccctaggttgcggagtccttaccctaccctggcctctcgagcagttgtccccataactcggaatctagagccgctgttgcgaggcaggagcacgtggcagtcaagtagcttcccagtcccgaacgccgcccgtccccaccccgccgtggccactagcaacgacctctgtgaagttggagaggcggtaacggaggcactccccctgctgcaccccgccgtttctacggggctcagaaaccagtttgtttgtttcgtcggggtagtgtcgacctgtcttacgggcgtcgcccgagacaggacggagtcaaacccgtggtatcaactgaagacgagtgtcaggatgtcattttcaaaatgcgggatggtacctctgctttattaagccccgtaggaagactgccacacctagactgatgcttattagtcatcaccgttattcctactaacgtcctgtgtcactgagttttttaaatgtctagcatatctgtaaagatgccttagaaaaagaatcatggagaagtatgttagactacagaagattggagaaggttcatttggaaaagccattcttgttaaatctacagaagatggcagacagtatgttatcaaggaaattaacatctcaagaatgtccagtaaagaaagagaagaatcaaggagagaagttgcagtattggcaaacatgaagcatccaaatattgtccagtatagagaatcatttgaagaaaatggctctctctacatagtaatggattactgtgagggaggggatctgtttaagcgaataaatgctcagaaaggcgttttgtttcaagaggatcagattttggactggtttgtacagatatgtttggccctgaaacatgtacatgatagaaaaattcttcatcgagacattaaatctcagaacatatttttaactaaagatggaacagtacaacttggagattttggaattgctagagttcttaatagtactgtagagctggctcgaacttgcatagggaccccatactacttgtcacctgaaatctgtgaaaacaaaccttacaataataaaagtgacatttgggctctggggtgtgtcctttatgagctgtgtacacttaaacatgcttttgaagctggcagtatgaaaaacctggtactgaagataatatctggatcttttccacctgtgtctttgcattattcctatgatctccgcagtttggtgtctcagttatttaaaagaaatcctagggatagaccatcagtcaactccatattggagaaaggttttatagccaaacgcattgaaaagtttctctctcctcagcttattgcagaagaattttgtctaaaaacattttcgaagtttggatcacagcctataccagctaaaagaccagcttcaggacaaaactcgatttctgttatgcctgctcagaaaattacaaagcctgccgctaaatatggaatacctttagcatataagaaatatggagataaaaaattacacgaaaagaaaccactgcaaaaacataaacaggcccatcaaactccagagaagagagtgaatactggagaagaaaggaggaaaatatctgaggaagcagcaagaaagagaaggctggaatttattgaaaaagaaaagaaacaaaaggatcagattattagtttaatgaaggctgaacaaatgaaaaggcaagaaaaggaaaggttggaaagaataaatagggccagggaacaaggatggagaaatgtgctaagtgctggtggaagtggtgaagtaaaggctccttttctgggcagtggagggactatagctccatcatctttttcttctcgaggacagtatgaacattaccatgccatttttgaccaaatgcagcaacaaagagcagaagataatgaagctaaatggaaaagagaaatatatggtcgaggtcttccagaaaggcaaaaagggcagctagctgtagaaagagctaaacaagtagaagagttcctgcagcgaaaacgggaagctatgcagaataaagctcgagccgaaggacatatgggaatcctgcaaaacctggcagctatgtatggaggcaggcccagctcttcaagaggagggaagccaagaaacaaagaggaagaggtttatctggcaagactgaggcaaataagactacagaatttcaatgagcgccaacagattaaagccaaacttcgtggtgaaaagaaagaagctaatcattctgaaggacaagaaggaagtgaagaggctgacatgaggcgcaaaaaaatcgaatcactgaaggcccatgcaaatgcacgtgctgctgtactaaaagaacaactagaacgaaagagaaaggaggcttatgagagagaaaaaaaagtgtgggaagagcatttggtggctaaaggagttaagagttctgatgtttctccacctttgggacagcatgaaacaggtggctctccatcaaagcaacagatgagatctgttatttctgtaacttcagctttgaaagaagttggcgtggacagtagtttaactgatacccgggaaacttcagaagagatgcaaaagaccaacaatgctatttcaagtaagcgagaaatacttcgtagattaaatgaaaatcttaaagctcaagaagatgaaaaaggaaagcagaatctctctgatacttttgagataaatgttcatgaagatgccaaagagcatgaaaaagaaaaatcagtttcatctgatcgcaagaagtgggaggcaggaggtcaacttgtgattcctctggatgagttaacactagatacatccttctctacaactgaaagacatacagtgggagaagttattaaattaggtcctaatggatctccaagaagagcctgggggaaaagtccgacagattctgttctaaagatacttggagaagctgaactacaacttcagacagaactattagaaaatacaactattagaagtgagatttctcccgaaggggaaaagtacaaacccttaattactggagaaaaaaaagtacaatgtatttcacatgaaataaacccatcagctattgttgattctcctgttgagacaaaaagtcccgagttcagtgaggcatctccacagatgtcattgaaactggaaggaaatttagaagaacctgatgatttggaaacagaaattctacaagagccaagtggaacaaacaaagatgagagcttgccatgcactattactgatgtgtggattagtgaggaaaaagaaacaaaggaaactcagtcggcagataggatcaccattcaggaaaatgaagtttctgaagatggagtctcgagtactgtggaccaacttagtgacattcatatagagcctggaaccaatgattctcagcactctaaatgtgatgtagataagtctgtgcaaccggaaccatttttccataaggtggttcattctgaacacttgaacttagtccctcaagttcaatcagttcagtgttcaccagaagaatcctttgcatttcgatctcactcgcatttaccaccaaaaaataaaaacaagaattccttgctgattggactttcaactggtctgtttgatgcaaacaacccaaagatgttaaggacatgttcacttccagatctctcaaagctgttcagaacccttatggatgttcccaccgtaggagatgttcgtcaagacaatcttgaaatagatgaaattgaagatgaaaacattaaagaaggaccttctgattctgaagacattgtgtttgaagaaactgacacagatttacaagagctgcaggcctcgatggaacagttacttagggaacaacctggtgaagaatacagtgaagaagaagagtcagtcttgaagaacagtgatgtggagccaactgcaaatgggacagatgtggcagatgaagatgacaatcccagcagtgaaagtgccctgaacgaagaatggcactcagataacagtgatggtgaaattgctagtgaatgtgaatgcgatagtgtctttaaccatttagaggaactgagacttcatctggagcaggaaatgggctttgaaaaattctttgaggtttatgagaaaataaaggctattcatgaagatgaagatgaaaatattgaaatttgttcaaaaatagttcaaaatattttgggaaatgaacatcagcatctttatgccaagattcttcatttagtcatggcagatggagcctaccaagaagataatgatgaataatcctcaaaatgttttttaatcctcaactatatgaaagcatttgaatttggcttatcagaataacaagcttcagtgggaaatacagcaattatttatttaaaaaatcagatttaagatggactttcttattgcatgaaaaagatggagaaacatgccatttttcagtgaagattctaatattttatctattttgttcattgaattccatggttaaatctcataaaatatatactttattaaatcatccaaccaaagcataggaaacattgacccagaacctgacttaatggttttgaagatttactatgcaatagggtaactttgagtttcagcaaatgtctttaggttgaaggaattacctatgtcatgaaggacctgtctgtggtttttcaatggagtctttaagcatgatcttttttctgtctagtacttgttttcattctggccagcagttctacattaaatcaccttgtcaagggctctgtttacatctatacattttgaagatgaaatttttagccttaaagtttatattctcaagtccttttacaatcagtgtgtctcctgaactagcacacaggctgtagaaacagtcttagaaatcattgaaagatttgattatgaaagaatagcaaaattatatttcttgacatataaaaagttggtttaatgcctttatttctctttaaggaccagaaccaggaatactatatcgaaaaattagtctgtggatttaacactgacttagcatatagcttaaagttgctcttttggtttttaacttcctccatacataagcttcaaggacaataagatgttaaaaaggaggaaataattatttttattttgacactgtgacagttttggtaactaggatcctagggagggaaatgtttgcctgttgaacttctttctgttatgagaggatttagttaggtcattaagatgttgatcacacagcttcaatcacaatatgccaagtataacctggtttcgttagaggtgtctacagtccagatgttcttcgtaataaaagcaaagtttttgaacctctgagtccaaagcaggctggttggcataatatgtaatttgaaaaataaaatcttatcttgcagcactatcagtatgttgaatttattatgtatattatttctaatatccgaaactaaatacttgattttttaatatgtgtgtttattttatgatattgctattaaatttttattatc

SEQ ID NO: 159405 - DNA, 1304 bp, Homo sapiens
  Payload ID: 11195
  Gene Symbol: NEK1
  Gene Name: NIMA-related kinase 1
  ENST ID: ENST00000510108
  CDS Start-End: 595-732
attcgctccagggttttgggaccctaggttgcggagtccttaccctaccctggcctctcgagcagttgtccccataactcggaatctagagccgctgttgcgaggcaggagcacgtggcagtcaagtagcttcccagtcccgaacgccgcccgtccccaccccgccgtggccactagcaacgacctctgtgaagttggagaggcggtaacggaggcactccccctgctgcaccccgccgtttctacggggctcagaaaccagtttgtttgtttcgtcggggtagtgtcgacctgtcttacgggcgtcgcccgagacaggacggagtcaaacccgtggtatcaactgaagacgagtgtcaggtgtggagagtctcagtgccccctttcagtctggactgtgagctgctgctggttagacagtcttggtttctctttcaggatgtcattttcaaaatgcgggatggtacctctgctttattaagccccgtaggaagactgccacacctagactgatgcttattagtcatcaccgttattcctactaacgtcctgtgtcactgagcatatctgtaaagatgccttagaaaaagaatcatggagaagtatgttagactacagaagattggagaaggttcatttggaaaagccattcttgttaaatctacagaagatggcagacagtatgttatcaaggaaattaacatctcaagaaaaatggctctctctacatagtaatggattactgtgagggaggggatctgtttaagcgaataaatgctcagaaaggcgttttgtttcaagaggatcagattttggactggtttgtacagatatgtttggccctgaaacatgtacatgatagaaaaattcttcatcgagacattaaatctcagaacatatttttaactaaagatggaacagtacaacttggagattttggaattgctagagttcttaatagtactgtagagctggctcgaacttgcatagggaccccatactacttgtcacctgaaatctgtgaaaacaaaccttacaataataaaagtgacatttgggctctggggtgtgtcctttatgagctgtgtacacttaaacatgcttttgaagctggcagtatgaaaaacctggtactgaagataatatctggatcttttccacctgtgtctttgcattattcctatgatctccgcagtttggtgtctcagttatttaaaagaaatcctagggatagaccatcagtcaactccatattggagaaaggttttatagccaaacgcattgaaaagtttctctctcctcag

SEQ ID NO: 159406 - DNA, 5556 bp, Homo sapiens
  Payload ID: 11195
  Gene Symbol: NEK1
  Gene Name: NIMA-related kinase 1
  Uniprot ID: Q96PY6
  ENST ID: ENST00000507142
  CDS Start-End: 581-4441
gtcacacgccagcgccggtgacgcgccggccgctctcccttagtccgcattcgctccagggttttgggaccctaggttgcggagtccttaccctaccctggcctctcgagcagttgtccccataactcggaatctagagccgctgttgcgaggcaggagcacgtggcagtcaagtagcttcccagtcccgaacgccgcccgtccccaccccgccgtggccactagcaacgacctctgtgaagttggagaggcggtaacggaggcactccccctgctgcaccccgccgtttctacggggctcagaaaccagtttgtttgtttcgtcggggtagtgtcgacctgtcttacgggcgtcgcccgagacaggacggagtcaaacccgtggtatcaactgaagacgagtgtcaggatgtcattttcaaaatgcgggatggtacctctgctttattaagccccgtaggaagactgccacacctagactgatgcttattagtcatcaccgttattcctactaacgtcctgtgtcactgagttttttaaatgtctagcatatctgtaaagatgccttagaaaaagaatcatggagaagtatgttagactacagaagattggagaaggttcatttggaaaagccattcttgttaaatctacagaagatggcagacagtatgttatcaaggaaattaacatctcaagaatgtccagtaaagaaagagaagaatcaaggagagaagttgcagtattggcaaacatgaagcatccaaatattgtccagtatagagaatcatttgaagaaaatggctctctctacatagtaatggattactgtgagggaggggatctgtttaagcgaataaatgctcagaaaggcgttttgtttcaagaggatcagattttggactggtttgtacagatatgtttggccctgaaacatgtacatgatagaaaaattcttcatcgagacattaaatctcagaacatatttttaactaaagatggaacagtacaacttggagattttggaattgctagagttcttaatagtactgtagagctggctcgaacttgcatagggaccccatactacttgtcacctgaaatctgtgaaaacaaaccttacaataataaaagtgacatttgggctctggggtgtgtcctttatgagctgtgtacacttaaacatgcttttgaagctggcagtatgaaaaacctggtactgaagataatatctggatcttttccacctgtgtctttgcattattcctatgatctccgcagtttggtgtctcagttatttaaaagaaatcctagggatagaccatcagtcaactccatattggagaaaggttttatagccaaacgcattgaaaagtttctctctcctcagcttattgcagaagaattttgtctaaaaacattttcgaagtttggatcacagcctataccagctaaaagaccagcttcaggacaaaactcgatttctgttatgcctgctcagaaaattacaaagcctgccgctaaatatggaatacctttagcatataagaaatatggagataaaaaattacacgaaaagaaaccactgcaaaaacataaacaggcccatcaaactccagagaagagagtgaatactggagaagaaaggaggaaaatatctgaggaagcagcaagaaagagaaggctggaatttattgaaaaagaaaagaaacaaaaggatcagattattagtttaatgaaggctgaacaaatgaaaaggcaagaaaaggaaaggttggaaagaataaatagggccagggaacaaggatggagaaatgtgctaagtgctggtggaagtggtgaagtaaaggctccttttctgggcagtggagggactatagctccatcatctttttcttctcgaggacagtatgaacattaccatgccatttttgaccaaatgcagcaacaaagagcagaagataatgaagctaaatggaaaagagaaatatatggtcgaggtcttccagaaagaggaattctgcctggagttcgtccaggatttccttatggggctgcaggtcatcaccattttcctgatgctgatgatattagaaaaactttgaaaagattgaaggcggtgtctaaacaagccaatgcaaacaggcaaaaagggcagctagctgtagaaagagctaaacaagtagaagagttcctgcagcgaaaacgggaagctatgcagaataaagctcgagccgaaggacatatgggaatcctgcaaaacctggcagctatgtatggaggcaggcccagctcttcaagaggagggaagccaagaaacaaagaggaagaggtttatctggcaagactgaggcaaataagactacagaatttcaatgagcgccaacagattaaagccaaacttcgtggtgaaaagaaagaagctaatcattctgaaggacaagaaggaagtgaagaggctgacatgaggcgcaaaaaaatcgaatcactgaaggcccatgcaaatgcacgtgctgctgtactaaaagaacaactagaacgaaagagaaaggaggcttatgagagagaaaaaaaagtgtgggaagagcatttggtggctaaaggagttaagagttctgatgtttctccacctttgggacagcatgaaacaggtggctctccatcaaagcaacagatgagatctgttatttctgtaacttcagctttgaaagaagttggcgtggacagtagtttaactgatacccgggaaacttcagaagagatgcaaaagaccaacaatgctatttcaagtaagcgagaaatacttcgtagattaaatgaaaatcttaaagctcaagaagatgaaaaaggaaagcagaatctctctgatacttttgagataaatgttcatgaagatgccaaagagcatgaaaaagaaaaatcagtttcatctgatcgcaagaagtgggaggcaggaggtcaacttgtgattcctctggatgagttaacactagatacatccttctctacaactgaaagacatacagtgggagaagttattaaattaggtcctaatggatctccaagaagagcctgggggaaaagtccgacagattctgttctaaagatacttggagaagctgaactacaacttcagacagaactattagaaaatacaactattagaagtgagatttctcccgaaggggaaaagtacaaacccttaattactggagaaaaaaaagtacaatgtatttcacatgaaataaacccatcagctattgttgattctcctgttgagacaaaaagtcccgagttcagtgaggcatctccacagatgtcattgaaactggaaggaaatttagaagaacctgatgatttggaaacagaaattctacaagagccaagtggaacaaacaaagatgagagcttgccatgcactattactgatgtgtggattagtgaggaaaaagaaacaaaggaaactcagtcggcagataggatcaccattcaggaaaatgaagtttctgaagatggagtctcgagtactgtggaccaacttagtgacattcatatagagcctggaaccaatgattctcagcactctaaatgtgatgtagataagtctgtgcaaccggaaccatttttccataaggtggttcattctgaacacttgaacttagtccctcaagttcaatcagttcagtgttcaccagaagaatcctttgcatttcgatctcactcgcatttaccaccaaaaaataaaaacaagaattccttgctgattggactttcaactggtctgtttgatgcaaacaacccaaagatgttaaggacatgttcacttccagatctctcaaagctgttcagaacccttatggatgttcccaccgtaggagatgttcgtcaagacaatcttgaaatagatgaaattgaagatgaaaacattaaagaaggaccttctgattctgaagacattgtgtttgaagaaactgacacagatttacaagagctgcaggcctcgatggaacagttacttagggaacaacctggtgaagaatacagtgaagaagaagagtcagtcttgaagaacagtgatgtggagccaactgcaaatgggacagatgtggcagatgaagatgacaatcccagcagtgaaagtgccctgaacgaagaatggcactcagataacagtgatggtgaaattgctagtgaatgtgaatgcgatagtgtctttaaccatttagaggaactgagacttcatctggagcaggaaatgggctttgaaaaattctttgaggtttatgagaaaataaaggctattcatgaagatgaagatgaaaatattgaaatttgttcaaaaatagttcaaaatattttgggaaatgaacatcagcatctttatgccaagattcttcatttagtcatggcagatggagcctaccaagaagataatgatgaataatcctcaaaatgttttttaatcctcaactatatgaaagcatttgaatttggcttatcagaataacaagcttcagtgggaaatacagcaattatttatttaaaaaatcagatttaagatggactttcttattgcatgaaaaagatggagaaacatgccatttttcagtgaagattctaatattttatctattttgttcattgaattccatggttaaatctcataaaatatatactttattaaatcatccaaccaaagcataggaaacattgacccagaacctgacttaatggttttgaagatttactatgcaatagggtaactttgagtttcagcaaatgtctttaggttgaaggaattacctatgtcatgaaggacctgtctgtggtttttcaatggagtctttaagcatgatcttttttctgtctagtacttgttttcattctggccagcagttctacattaaatcaccttgtcaagggctctgtttacatctatacattttgaagatgaaatttttagccttaaagtttatattctcaagtccttttacaatcagtgtgtctcctgaactagcacacaggctgtagaaacagtcttagaaatcattgaaagatttgattatgaaagaatagcaaaattatatttcttgacatataaaaagttggtttaatgcctttatttctctttaaggaccagaaccaggaatactatatcgaaaaattagtctgtggatttaacactgacttagcatatagcttaaagttgctcttttggtttttaacttcctccatacataagcttcaaggacaataagatgttaaaaaggaggaaataattatttttattttgacactgtgacagttttggtaactaggatcctagggagggaaatgtttgcctgttgaacttctttctgttatgagaggatttagttaggtcattaagatgttgatcacacagcttcaatcacaatatgccaagtataacctggtttcgttagaggtgtctacagtccagatgttcttcgtaataaaagcaaagtttttgaacctctgagtccaaagcaggctggttggcataatatgtaatttgaaaaataaaatcttatcttgcag

SEQ ID NO: 159407 - DNA, 4430 bp, Homo sapiens
  Payload ID: 11195
  Gene Symbol: NEK1
  Gene Name: NIMA-related kinase 1
  Uniprot ID: Q96PY6
  ENST ID: ENST00000512193
  CDS Start-End: 579-4148
cacacgccagcgccggtgacgcgccggccgctctcccttagtccgcattcgctccagggttttgggaccctaggttgcggagtccttaccctaccctggcctctcgagcagttgtccccataactcggaatctagagccgctgttgcgaggcaggagcacgtggcagtcaagtagcttcccagtcccgaacgccgcccgtccccaccccgccgtggccactagcaacgacctctgtgaagttggagaggcggtaacggaggcactccccctgctgcaccccgccgtttctacggggctcagaaaccagtttgtttgtttcgtcggggtagtgtcgacctgtcttacgggcgtcgcccgagacaggacggagtcaaacccgtggtatcaactgaagacgagtgtcaggatgtcattttcaaaatgcgggatggtacctctgctttattaagccccgtaggaagactgccacacctagactgatgcttattagtcatcaccgttattcctactaacgtcctgtgtcactgagttttttaaatgtctagcatatctgtaaagatgccttagaaaaagaatcatggagaagtatgttagactacagaagattggagaaggttcatttggaaaagccattcttgttaaatctacagaagatggcagacagtatgttatcaaggaaattaacatctcaagaatgtccagtaaagaaagagaagaatcaaggagagaagttgcagtattggcaaacatgaagcatccaaatattgtccagtatagagaatcatttgaagaaaatggctctctctacatagtaatggattactgtgagggaggggatctgtttaagcgaataaatgctcagaaaggcgttttgtttcaagaggatcagattttggactggtttgtacagatatgtttggccctgaaacatgtacatgatagaaaaattcttcatcgagacattaaatctcagaacatatttttaactaaagatggaacagtacaacttggagattttggaattgctagagttcttaatagtactgtagagctggctcgaacttgcatagggaccccatactacttgtcacctgaaatctgtgaaaacaaaccttacaataataaaagtgacatttgggctctggggtgtgtcctttatgagctgtgtacacttaaacatgcttttgaagctggcagtatgaaaaacctggtactgaagataatatctggatcttttccacctgtgtctttgcattattcctatgatctccgcagtttggtgtctcagttatttaaaagaaatcctagggatagaccatcagtcaactccatattggagaaaggttttatagccaaacgcattgaaaagtttctctctcctcagcttattgcagaagaattttgtctaaaaacattttcgaagtttggatcacagcctataccagctaaaagaccagcttcaggacaaaactcgatttctgttatgcctgctcagaaaattacaaagcctgccgctaaatatggaatacctttagcatataagaaatatggagataaaaaattacacgaaaagaaaccactgcaaaaacataaacaggcccatcaaactccagagaagagagtgaatactggagaagaaaggaggaaaatatctgaggaagcagcaagaaagagaaggctggaatttattgaaaaagaaaagaaacaaaaggatcagattattagtttaatgaaggctgaacaaatgaaaaggcaagaaaaggaaagggctccttttctgggcagtggagggactatagctccatcatctttttcttctcgaggacagtatgaacattaccatgccatttttgaccaaatgcagcaacaaagagcagaagataatgaagctaaatggaaaagagaaatatatggtcgaggtcttccagaaaggcaaaaagggcagctagctgtagaaagagctaaacaagtagaagagttcctgcagcgaaaacgggaagctatgcagaataaagctcgagccgaaggacatatggtttatctggcaagactgaggcaaataagactacagaatttcaatgagcgccaacagattaaagccaaacttcgtggtgaaaagaaagaagctaatcattctgaaggacaagaaggaagtgaagaggctgacatgaggcgcaaaaaaatcgaatcactgaaggcccatgcaaatgcacgtgctgctgtactaaaagaacaactagaacgaaagagaaaggaggcttatgagagagaaaaaaaagtgtgggaagagcatttggtggctaaaggagttaagagttctgatgtttctccacctttgggacagcatgaaacaggtggctctccatcaaagcaacagatgagatctgttatttctgtaacttcagctttgaaagaagttggcgtggacagtagtttaactgatacccgggaaacttcagaagagatgcaaaagaccaacaatgctatttcaagtaagcgagaaatacttcgtagattaaatgaaaatcttaaagctcaagaagatgaaaaaggaaagcagaatctctctgatacttttgagataaatgttcatgaagatgccaaagagcatgaaaaagaaaaatcagtttcatctgatcgcaagaagtgggaggcaggaggtcaacttgtgattcctctggatgagttaacactagatacatccttctctacaactgaaagacatacagtgggagaagttattaaattaggtcctaatggatctccaagaagagcctgggggaaaagtccgacagattctgttctaaagatacttggagaagctgaactacaacttcagacagaactattagaaaatacaactattagaagtgagatttctcccgaaggggaaaagtacaaacccttaattactggagaaaaaaaagtacaatgtatttcacatgaaataaacccatcagctattgttgattctcctgttgagacaaaaagtcccgagttcagtgaggcatctccacagatgtcattgaaactggaaggaaatttagaagaacctgatgatttggaaacagaaattctacaagagccaagtggaacaaacaaagatgagagcttgccatgcactattactgatgtgtggattagtgaggaaaaagaaacaaaggaaactcagtcggcagataggatcaccattcaggaaaatgaagtttctgaagatggagtctcgagtactgtggaccaacttagtgacattcatatagagcctggaaccaatgattctcagcactctaaatgtgatgtagataagtctgtgcaaccggaaccatttttccataaggtggttcattctgaacacttgaacttagtccctcaagttcaatcagttcagtgttcaccagaagaatcctttgcatttcgatctcactcgcatttaccaccaaaaaataaaaacaagaattccttgctgattggactttcaactggtctgtttgatgcaaacaacccaaagatgttaaggacatgttcacttccagatctctcaaagctgttcagaacccttatggatgttcccaccgtaggagatgttcgtcaagacaatcttgaaatagatgaaattgaagatgaaaacattaaagaaggaccttctgattctgaagacattgtgtttgaagaaactgacacagatttacaagagctgcaggcctcgatggaacagttacttagggaacaacctggtgaagaatacagtgaagaagaagagtcagtcttgaagaacagtgatgtggagccaactgcaaatgggacagatgtggcagatgaagatgacaatcccagcagtgaaagtgccctgaacgaagaatggcactcagataacagtgatggtgaaattgctagtgaatgtgaatgcgatagtgtctttaaccatttagaggaactgagacttcatctggagcaggaaatgggctttgaaaaattctttgaggtttatgagaaaataaaggctattcatgaagatgaagatgaaaatattgaaatttgttcaaaaatagttcaaaatattttgggaaatgaacatcagcatctttatgccaagattcttcatttagtcatggcagatggagcctaccaagaagataatgatgaataatcctcaaaatgttttttaatcctcaactatatgaaagcatttgaatttggcttatcagaataacaagcttcagtgggaaatacagcaattatttatttaaaaaatcagatttaagatggactttcttattgcatgaaaaagatggagaaacatgccatttttcagtgaagattctaatattttatctattttgttcattgaattccatggttaaatctcataaaatatatactttattaaatcatccaaccaaagcataggaaacattgacccagaacctga

SEQ ID NO: 159408 - DNA, 5377 bp, Homo sapiens
  Payload ID: 11195
  Gene Symbol: NEK1
  Gene Name: NIMA-related kinase 1
  Uniprot ID: Q96PY6
  ENST ID: ENST00000510533
  CDS Start-End: 613-4257
gcattcgctccagggttttgggaccctaggttgcggagtccttaccctaccctggcctctcgagcagttgtccccataactcggaatctagagccgctgttgcgaggcaggagcacgtggcagtcaagtagcttcccagtcccgaacgccgcccgtccccaccccgccgtggccactagcaacgacctctgtgaagttggagaggcggtaacggaggcactccccctgctgcaccccgccgtttctacggggctcagaaaccagtttgtttgtttcgtcggggtagtgtcgacctgtcttacgggcgtcgcccgagacaggacggagtcaaacccgtggtatcaactgaagacgagtgtcaggtgtggagagtctcagtgccccctttcagtctggactgtgagctgctgctggttagacagtcttggtttctctttcaggatgtcattttcaaaatgcgggatggtacctctgctttattaagccccgtaggaagactgccacacctagactgatgcttattagtcatcaccgttattcctactaacgtcctgtgtcactgagttttttaaatgtctagcatatctgtaaagatgccttagaaaaagaatcatggagaagtatgttagactacagaagattggagaaggttcatttggaaaagccattcttgttaaatctacagaagatggcagacagtatgttatcaaggaaattaacatctcaagaatgtccagtaaagaaagagaagaatcaaggagagaagttgcagtattggcaaacatgaagcatccaaatattgtccagtatagagaatcatttgaagaaaatggctctctctacatagtaatggattactgtgagggaggggatctgtttaagcgaataaatgctcagaaaggcgttttgtttcaagaggatcagattttggactggtttgtacagatatgtttggccctgaaacatgtacatgatagaaaaattcttcatcgagacattaaatctcagaacatatttttaactaaagatggaacagtacaacttggagattttggaattgctagagttcttaatagtactgtagagctggctcgaacttgcatagggaccccatactacttgtcacctgaaatctgtgaaaacaaaccttacaataataaaagtgacatttgggctctggggtgtgtcctttatgagctgtgtacacttaaacatgcttttgaagctggcagtatgaaaaacctggtactgaagataatatctggatcttttccacctgtgtctttgcattattcctatgatctccgcagtttggtgtctcagttatttaaaagaaatcctagggatagaccatcagtcaactccatattggagaaaggttttatagccaaacgcattgaaaagtttctctctcctcagcttattgcagaagaattttgtctaaaaacattttcgaagtttggatcacagcctataccagctaaaagaccagcttcaggacaaaactcgatttctgttatgcctgctcagaaaattacaaagcctgccgctaaatatggaatacctttagcatataagaaatatggagataaaaaattacacgaaaagaaaccactgcaaaaacataaacaggcccatcaaactccagagaagagagtgaatactggagaagaaaggaggaaaatatctgaggaagcagcaagaaagagaaggctggaatttattgaaaaagaaaagaaacaaaaggatcagattattagtttaatgaaggctgaacaaatgaaaaggcaagaaaaggaaaggttggaaagaataaatagggccagggaacaaggatggagaaatgtgctaagtgctggtggaagtggtgaagtaaaggctccttttctgggcagtggagggactatagctccatcatctttttcttctcgaggacagtatgaacattaccatgccatttttgaccaaatgcagcaacaaagagcagaagataatgaagctaaatggaaaagagaaatatatggtcgaggtcttccagaaaggcaaaaagggcagctagctgtagaaagagctaaacaagtagaagagttcctgcagcgaaaacgggaagctatgcagaataaagctcgagccgaaggacatatggtttatctggcaagactgaggcaaataagactacagaatttcaatgagcgccaacagattaaagccaaacttcgtggtgaaaagaaagaagctaatcattctgaaggacaagaaggaagtgaagaggctgacatgaggcgcaaaaaaatcgaatcactgaaggcccatgcaaatgcacgtgctgctgtactaaaagaacaactagaacgaaagagaaaggaggcttatgagagagaaaaaaaagtgtgggaagagcatttggtggctaaaggagttaagagttctgatgtttctccacctttgggacagcatgaaacaggtggctctccatcaaagcaacagatgagatctgttatttctgtaacttcagctttgaaagaagttggcgtggacagtagtttaactgatacccgggaaacttcagaagagatgcaaaagaccaacaatgctatttcaagtaagcgagaaatacttcgtagattaaatgaaaatcttaaagctcaagaagatgaaaaaggaaagcagaatctctctgatacttttgagataaatgttcatgaagatgccaaagagcatgaaaaagaaaaatcagtttcatctgatcgcaagaagtgggaggcaggaggtcaacttgtgattcctctggatgagttaacactagatacatccttctctacaactgaaagacatacagtgggagaagttattaaattaggtcctaatggatctccaagaagagcctgggggaaaagtccgacagattctgttctaaagatacttggagaagctgaactacaacttcagacagaactattagaaaatacaactattagaagtgagatttctcccgaaggggaaaagtacaaacccttaattactggagaaaaaaaagtacaatgtatttcacatgaaataaacccatcagctattgttgattctcctgttgagacaaaaagtcccgagttcagtgaggcatctccacagatgtcattgaaactggaaggaaatttagaagaacctgatgatttggaaacagaaattctacaagagccaagtggaacaaacaaagatgagagcttgccatgcactattactgatgtgtggattagtgaggaaaaagaaacaaaggaaactcagtcggcagataggatcaccattcaggaaaatgaagtttctgaagatggagtctcgagtactgtggaccaacttagtgacattcatatagagcctggaaccaatgattctcagcactctaaatgtgatgtagataagtctgtgcaaccggaaccatttttccataaggtggttcattctgaacacttgaacttagtccctcaagttcaatcagttcagtgttcaccagaagaatcctttgcatttcgatctcactcgcatttaccaccaaaaaataaaaacaagaattccttgctgattggactttcaactggtctgtttgatgcaaacaacccaaagatgttaaggacatgttcacttccagatctctcaaagctgttcagaacccttatggatgttcccaccgtaggagatgttcgtcaagacaatcttgaaatagatgaaattgaagatgaaaacattaaagaaggaccttctgattctgaagacattgtgtttgaagaaactgacacagatttacaagagctgcaggcctcgatggaacagttacttagggaacaacctggtgaagaatacagtgaagaagaagagtcagtcttgaagaacagtgatgtggagccaactgcaaatgggacagatgtggcagatgaagatgacaatcccagcagtgaaagtgccctgaacgaagaatggcactcagataacagtgatggtgaaattgctagtgaatgtgaatgcgatagtgtctttaaccatttagaggaactgagacttcatctggagcaggaaatgggctttgaaaaattctttgaggtttatgagaaaataaaggctattcatgaagatgaagatgaaaatattgaaatttgttcaaaaatagttcaaaatattttgggaaatgaacatcagcatctttatgccaagattcttcatttagtcatggcagatggagcctaccaagaagataatgatgaataatcctcaaaatgttttttaatcctcaactatatgaaagcatttgaatttggcttatcagaataacaagcttcagtgggaaatacagcaattatttatttaaaaaatcagatttaagatggactttcttattgcatgaaaaagatggagaaacatgccatttttcagtgaagattctaatattttatctattttgttcattgaattccatggttaaatctcataaaatatatactttattaaatcatccaaccaaagcataggaaacattgacccagaacctgacttaatggttttgaagatttactatgcaatagggtaactttgagtttcagcaaatgtctttaggttgaaggaattacctatgtcatgaaggacctgtctgtggtttttcaatggagtctttaagcatgatcttttttctgtctagtacttgttttcattctggccagcagttctacattaaatcaccttgtcaagggctctgtttacatctatacattttgaagatgaaatttttagccttaaagtttatattctcaagtccttttacaatcagtgtgtctcctgaactagcacacaggctgtagaaacagtcttagaaatcattgaaagatttgattatgaaagaatagcaaaattatatttcttgacatataaaaagttggtttaatgcctttatttctctttaaggaccagaaccaggaatactatatcgaaaaattagtctgtggatttaacactgacttagcatatagcttaaagttgctcttttggtttttaacttcctccatacataagcttcaaggacaataagatgttaaaaaggaggaaataattatttttattttgacactgtgacagttttggtaactaggatcctagggagggaaatgtttgcctgttgaacttctttctgttatgagaggatttagttaggtcattaagatgttgatcacacagcttcaatcacaatatgccaagtataacctggtttcgttagaggtgtctacagtccagatgttcttcgtaataaaagcaaagtttttgaacctctgagtccaaagcaggctggttggcataatatgtaatttgaaaaataaaatcttatcttgcagcacta

SEQ ID NO: 159409 - DNA, 2871 bp, Homo sapiens
  Payload ID: 11196
  Gene Symbol: NEK10
  Gene Name: NIMA-related kinase 10
  Uniprot ID: Q6ZWH5
  ENST ID: ENST00000295720
  CDS Start-End: 230-1684
agaaataatgtatggagggactatacaagggcatatatactagtaaaagtgttttctcaatagatcaccaaagaatttgccacacctgatatatagaaaagtttattgtgcagcacctctaccttcgctctcctgctcctgctctggccacataaaacgtgctggctcctcctttgccttctgctatcattggaagcttcctgatgcctcccaagaagcaaatgccatcatggttcctgtacagcctgcagaaccccccgaggtactgaagagtgagccgtatggggagaaggctgatgtctgggcagtaggctgcatcctttatcagatggcgactttgagtccccccttctacagcactaacatgctgtccttggctacaaaaatagtggaggcggtatatgaaccagtcccagaaggtatctactctgaaaaagtaacagacaccatcagcaggtgcctcactcctgatgcggaagctcgtccagatattgtagaagtcagttcgatgatatcagatgtcatgatgaaatatttagacaacttatctacatcccagttgtccttggaaaagaagctagaacgggaacgaagacgcacacaaaggtattttatggaagccaaccggaacaccgtcacatgtcaccatgagctggctgttctatctcacgagacctttgagaaggcaagtttgagtagcagcagcagtggagcagccagcctgaaaagtgaactttcagaaagcgcagacctgccccctgaaggcttccaggcctcctatggtaaagacgaagacagggcctgtgacgaaatcctgtcagatgataacttcaacctggaaaatgctgagaaagatacatattcagaggtagatgatgaattggacatttcggataactccagcagctccagttcaagccctctgaaagaatctacattcaacattttaaagagaagttttagtgcttcaggaggagaaagacaatcccaaacaagggacttcactggaggaacaggatcaagaccaagaccagctttgctgcctcttgacctgcttctgaaagtgccaccccacatgctcagggcccacattaaggaaatagaggctgagttagtgacagggtggcagtcccatagccttcctgctgtgattcttcgaaatctcaaagatcatgggccacagatgggcacattcttgtggcaagcatcagcaggaattgctgtgtcccagaggaaagtgcgtcagatcagtgatcctattcagcagatattaattcagctgcacaaaataatctatatcacacagcttcctccagctttgcaccacaatttgaaaagaagggttatagagagattcaagaaatccctcttcagccagcagagtaacccttgtaatttgaaatctgaaattaaaaagttatctcagggatctccagaaccgattgagcccaactttttcacagcagattaccatttattacatcgttcatccggtggaaacagcctgtccccaaatgaccctacaggtttaccaaccagcattgaattggaggaaggaataacatatgaacagatgcagactgtgattgaagaagtccttgaggaaagtggctattacaattttacatctaacaggtatcattcctatccatgggggaccaagaatcacccaaccaaaagatgaaaatgctgcattttgagtggacttgattttctcagtgaagttcaagttctggacttcagccgctattgcaagatgcccaaggattgggtgctgctagagggtgtggaaaagaccaagatgccatggggcctgcaggacttctttctgggggtcctgtgctggagtatatgacagctgcggtacttgagggcttcattgccagaacacattatatacaggatgtcagagctaccagtgtgctgctgggagaaaatgctgcaaaattcatcttttggagggtggggggaaaacccaaaaacaacaacaaaaaaactctcttacagaattttccttaacattaaaaaaaacttgtcatatttttcaaaggcacatttgatactcagaattgctaaaagtatatttaaagacatctagccttccatatgtaaaaaatattttagataaagacagttacaggactcagaataatatattgggtgattcactgtatcctccatttttacatttaaagaaattcaaaatacgtgattaaatttttttttttttaatggatgggttggttctcgcttaaccacttgggtgctagtggtcttgaactgtgatacagtgtagacagtatttgtaaccttgcacagcctctgggggtaactgtcaaactgtcagatttaacttagactaatagaatatattgctgtacagtgtgtgtatatgtttatatatgagggcggaaggagagaggttttgattagactaatgctttgctgctaatcaaacttatagtatttttagagcactttgaagagtttatagaatctatgaaaaagatgcaatattcctcatcctaaatccctccttattacaattacctaaattgtttatgaattgtttaggattttgaaatgaaaataagttaaatcccttttttactcattgaggcagctcagtggaagtgaaatcagaatgccaaactgtgtatcatcctttatgccgggagaattatgatgaaaatctgctagattctcactgggcttaaactccttctcttcaatcagcttcttaaaactctggtgtaatgtcaagaaatacccttattgcgaaatctgtctacacttctagctacctaaagagcaatttattctacataattagtaatctgaaagttgaaattatactttttatttactttt

SEQ ID NO: 159410 - DNA, 2638 bp, Homo sapiens
  Payload ID: 11196
  Gene Symbol: NEK10
  Gene Name: NIMA-related kinase 10
  Uniprot ID: Q6ZWH5
  ENST ID: ENST00000341435
  CDS Start-End: 275-2413
ctggaggaggatttgattggaaaaccaacggtgcagctggccgcggtgtccctgaggttgaggggaccgggaataggctggggggaggacgggacgggctgagactggacgggacccccggtctgcagcagcaggtgacagcagcagggacaatgataaggagattggcctgaaggagggaccgtccctcccgcgcgaaaagtcagaaatggccaatgaagcttttgcttataaaaggaatgcgatgttaattctggggcattgatgttttacaatgcctgatcaagataaaaaggtgaagaccacagaaaaatcaactgataaacagcaagaaatcaccatcagggactattcagatcttaaaagacttcggtgccttttgaacgtccaatcaagcaaacaacagcttccagccattaacttcgatagtgcccaaaatagcatgacgaagtctgagcccgccatcagggcgggtggacacagagctcggggtcagtggcatgaatccacagaagctgttgaacttgaaaattttagtataaactacaagaatgagagaaatttcagcaaacatcctcagcgtaaactatttcaggagatctttaccgccttggtgaaaaatagactcataagcagagagtgggttaatcgagccccatctattcattttctgagagtgttaatctgtctgaggctactaatgagggatccatgttatcaggaaatactccatagcttgggtgggattgaaaacctagctcagtatatggagattgtagccaatgagtacctcggctatggagaagagcagcacactgtggacaagctggtcaacatgacatatatttttcaaaaacttgctgcagtcaaagatcaaagagaatgggtcaccacaagtggagcccacaagacattagtaaatttacttggtgcccgagatactaatgttctattgggttcccttctggctctggctagtttagcagaaagtcaagaatgtagggagaagataagtgaactcaacattgtagaaaatctgttgatgattttacatgaatatgacttgctttctaaaagactaacagcggagttgctgcgcctactttgtgcagagccccaggtgaaagagcaggtgaagctctatgaggggataccggtcctcctcagtctgctccactctgaccacttgaagctcctctggagcattgtctggattctggtacaggtttgtgaggaccctgagaccagcgtggaaattcgcatttggggaggcatcaaacagcttcttcatattttacaaggagacagaaattttgtttctgatcactcctccattggaagcctgtccagtgcaaatgctgcaggccgaatccagcagcttcatttatcagaagacttgagccctagggaaatacaagaaaatactttctcacttcaagcagcctgctgtgctgccctcactgagctggtgctcaatgacaccaatgcccaccaggtggttcaggaaaatggtgtatatacaatagcaaaattaattttaccaaataagcaaaagaatgcagcaaaaagtaatctattacagtgttatgctttcagagccttgagatttctcttcagtatggaaagaaacagaccactctttaaaagacttttccccacagacttgtttgagatcttcattgacatagggcattatgtacgtgatatcagtgcttatgaagaattggtatccaagctgaatttattagtggaggatgaactgaagcaaattgctgaaaatattgaaagcattaatcagaacaaagctcctttgaaatatataggcaactatgcaattttggatcatcttggaagtggagcttttggctgtgtttacaaggttagaaagcatagtggtcaaaatcttttagcaatgaaagaggtcaatttacataacccagcatttggaaaggataagaaagatcgagacagcagcgtaaggaatattgtttctgaattaacaataattaaagagcagctttatcatcccaacattgtacgttattacaaaacatttctggaaaatgataggttgtacatagttatggagctgatagaaggagccccgcttggagagcatttcagttctttgaaggaaaaacatcaccattttactgaagaaagactatggaaaatatttatacagctgtgcttagctcttcgatacttacacaaggagaagaggattgtccatagagatctgacaccaaacaacattatgttgggggataaggacaaagtaaccgttactgactttggcctggcaaagcaaaaacaagaaaacagtaaactcacctctgtggttggaacaatcctgtattcttgtgtgcagcacctctaccttcgctctcctgctcctgctctggccacataaaacgtgctggctcctcctttgccttctgctatcattggaagcttcctgatgcctcccaagaagcaaatgccatcatggttcctgtacagcctgcagaaccgtgagccaattaaacctctcttctttctaaattacctagtctcaggtatttctttgtagtagtgcaagaacggattcatacactctttaaatgtgataaacaaaataaagtacaatccttatttc

SEQ ID NO: 159411 - DNA, 1257 bp, Homo sapiens
  Payload ID: 11196
  Gene Symbol: NEK10
  Gene Name: NIMA-related kinase 10
  ENST ID: ENST00000383770
  CDS Start-End: 1-1257
cccgaggtactgaagagtgagccgtatggggagaaggctgatgtctgggcagtaggctgcatcctttatcagatggcgactttgagtccccccttctacagcactaacatgctgtccttggctacaaaaatagtggaggcggtatatgaaccagtcccagaaggtatctactctgaaaaagtaacagacaccatcagcaggtgcctcactcctgatgcggaagctcgtccagatattgtagaagtcagttcgatgatatcagatgtcatgatgaaatatttagacaacttatctacatcccagttgtccttggaaaagaagctagaacgggaacgaagacgcacacaaaggtattttatggaagccaaccggaacaccgtcacatgtcaccatgagctggctgttctatctcacgagacctttgagaaggcaagtttgagtagcagcagcagtggagcagccagcctgaaaagtgaactttcagaaagcgcagacctgccccctgaaggcttccaggcctcctatggtaaagacgaagacagggcctgtgacgaaatcctgtcagatgataacttcaacctggaaaatgctgagaaagatacatattcagaggtagatgatgaattggacatttcggataactccagcagctccagttcaagccctctgaaagaatctacattcaacattttaaagagaagttttagtgcttcaggaggagaaagacaatcccaaacaagggacttcactggaggaacaggatcaagaccaagaccagcatcagcaggaattgctgtgtcccagaggaaagtgcgtcagatcagtgatcctattcagcagatattaattcagctgcacaaaataatctatatcacacagcttcctccagctttgcaccacaatttgaaaagaagggttatagagagattcaagaaatccctcttcagccagcagagtaacccttgtaatttgaaatctgaaattaaaaagttatctcagggatctccagaaccgattgagcccaactttttcacagcagattaccatttattacatcgttcatccggtggaaacagcctgtccccaaatgaccctacaggtttaccaaccagcattgaattggaggaaggaataacatatgaacagatgcagactgtgattgaagaagtccttgaggaaagtggctattacaattttacatctaacaggtatcattcctatccatgggggaccaagaatcacccaaccaaaagatga

SEQ ID NO: 159412 - DNA, 2023 bp, Homo sapiens
  Payload ID: 11196
  Gene Symbol: NEK10
  Gene Name: NIMA-related kinase 10
  Uniprot ID: Q6ZWH5
  ENST ID: ENST00000383771
  CDS Start-End: 230-1654
agaaataatgtatggagggactatacaagggcatatatactagtaaaagtgttttctcaatagatcaccaaagaatttgccacacctgatatatagaaaagtttattgtgcagcacctctaccttcgctctcctgctcctgctctggccacataaaacgtgctggctcctcctttgccttctgctatcattggaagcttcctgatgcctcccaagaagcaaatgccatcatggttcctgtacagcctgcagaaccccccgaggtactgaagagtgagccgtatggggagaaggctgatgtctgggcagtaggctgcatcctttatcagatggcgactttgagtccccccttctacagcactaacatgctgtccttggctacaaaaatagtggaggcggtatatgaaccagtcccagaaggtatctactctgaaaaagtaacagacaccatcagcaggtgcctcactcctgatgcggaagctcgtccagatattgtagaagtcagttcgatgatatcagatgtcatgatgaaatatttagacaacttatctacatcccagttgtccttggaaaagaagctagaacgggaacgaagacgcacacaaaggtattttatggaagccaaccggaacaccgtcacatgtcaccatgagctggctgttctatctcacgagacctttgagaaggcaagtttgagtagcagcagcagtggagcagccagcctgaaaagtgaactttcagaaagcgcagacctgccccctgaaggcttccaggcctcctatggtaaagacgaagacagggcctgtgacgaaatcctgtcagatgataacttcaacctggaaaatgctgagaaagatacatattcagaggtagatgatgaattggacatttcggataactccagcagctccagttcaagccctctgaaagaatctacattcaacattttaaagagaagttttagtgcttcaggaggagaaagacaatcccaaacaagggacttcactggaggaacaggatcaagaccaagaccagctttgctgcctcttgacctgcttctgaaagtgccaccccacatgctcagggcccacattaaggaaatagaggctgagttagtgacagggtggcagtcccatagccttcctgctgtgattcttcgaaatctcaaagatcatgcatcagcaggaattgctgtgtcccagaggaaagtgcgtcagatcagtgatcctattcagcagatattaattcagctgcacaaaataatctatatcacacagcttcctccagctttgcaccacaatttgaaaagaagggttatagagagattcaagaaatccctcttcagccagcagagtaacccttgtaatttgaaatctgaaattaaaaagttatctcagggatctccagaaccgattgagcccaactttttcacagcagattaccatttattacatcgttcatccggtggaaacagcctgtccccaaatgaccctacaggtttaccaaccagcattgaattggaggaaggaataacatatgaacagatgcagactgtgattgaagaagtccttgaggaaagtggctattacaattttacatctaacaggtatcattcctatccatgggggaccaagaatcacccaaccaaaagatgaaaatgctgcattttgagtggacttgattttctcagtgaagttcaagttctggacttcagccgctattgcaagatgcccaaggattgggtgctgctagagggtgtggaaaagaccaagatgccatggggcctgcaggacttctttctgggggtcctgtgctggagtatatgacagctgcggtacttgagggcttcattgccagaacacattatatacaggatgtcagagctaccagtgtgctgctgggagaaaatgctgcaaaattcatcttttggagggtggggggaaaacccaaaaacaacaacaaaaaaactctcttacagaattttccttaacattaaaaaaaacttgtcatatttttcaaaggca

SEQ ID NO: 159413 - DNA, 743 bp, Homo sapiens
  Payload ID: 11196
  Gene Symbol: NEK10
  Gene Name: NIMA-related kinase 10
  ENST ID: ENST00000424275
  CDS Start-End: 1-590
tcattgacatagggcattatgtacgtgatatcagtgcttatgaagaattggtatccaagctgaatttattagtggaggatgaactgaagcaaattgctgaaaatattgaaagcattaatcagaacaaagctcctttgaaatatataggcaactatgcaattttggatcatcttggaagtggagcttttggctgtgtttacaagctttatcatcccaacattgtacgttattacaaaacatttctggaaaatgataggttgtacatagttatggagctgatagaaggagccccgcttggagagcatttcagttctttgaaggaaaaacatcaccattttactgaagaaagactatggaaaatatttatacagctgtgcttagctcttcgatacttacacaaggagaagaggattgtccatagagatctgacaccaaacaacattatgttgggggataaggacaaagtaaccgttactgactttggcctggcaaagcaaaaacaagaaaacagtaaactcacctctgtggttggaacaatcctgtattcttgtggtttcatgagaagatgcaaagaaactgtggcaggctaacatgtaccttgtaagctgcaagcttatatgatgtctacttatcctcttaacagtaaggctgacctactcgttactttctgagagaagaataattttcttttgtttcactgtgtactgtttttataaaataaacaataaaatttgatcataaaa

SEQ ID NO: 159414 - DNA, 671 bp, Homo sapiens
  Payload ID: 11196
  Gene Symbol: NEK10
  Gene Name: NIMA-related kinase 10
  ENST ID: ENST00000435750
  CDS Start-End: 274-671
gaattgtcggcattggcctggccagcgctggttggtggcctggaggaggatttgattggaaaaccaacggtgcagctggccgcggtgtccctgaggttgaggggaccgggaataggctggggggaggacgggacgggctgagactggacgggacccccggtctgcagcagcaggtgacagcagcagggacaatgataaggagattggcctgaaggagggaccgtccctcccgcgcggaatgcgatgttaattctggggcattgatgttttacaatgcctgatcaagataaaaaggtgaagaccacagaaaaatcaactgataaacagcaagaaatcaccatcagggactattcagatcttaaaagacttcggtgccttttgaacgtccaatcaagcaaacaacagcttccagccattaacttcgatagtgcccaaaatagcatgacgaagtctgagcccgccatcagggcgggtggacacagagctcggggtcagtggcatgaatccacagaagctgttgaacttgaaaattttagtataaactacaagaatgagagaaatttcagcaaacatcctcagcgtaaactatttcaggagatctttaccgccttggtgaaaaatagactcataagcagagagtgggttaatcgagccccatctattcattttct

SEQ ID NO: 159415 - DNA, 4250 bp, Homo sapiens
  Payload ID: 11196
  Gene Symbol: NEK10
  Gene Name: NIMA-related kinase 10
  Uniprot ID: Q6ZWH5
  ENST ID: ENST00000429845
  CDS Start-End: 364-3882
ggtgcagctggccgcggtgtccctgaggttgaggggaccgggaataggctggggggaggacgggacgggctgagactggacgggacccccggtctgcagcagcaggtgacagcagcagggacaatgataaggagattggcctgaaggagggaccgtccctcccgcgcgtggtataaccagaagaattcacattcccagacttgtcaacttgcatcagtggagacagtggcattcatataatacacatgtgtatgctacacttgacacaatgtgaatactcatctttcctttaggaaaccttattgtcctgttcatgtatacttgaggaatgcgatgttaattctggggcattgatgttttacaatgcctgatcaagataaaaaggtgaagaccacagaaaaatcaactgataaacagcaagaaatcaccatcagggactattcagatcttaaaagacttcggtgccttttgaacgtccaatcaagcaaacaacagcttccagccattaacttcgatagtgcccaaaatagcatgacgaagtctgagcccgccatcagggcgggtggacacagagctcggggtcagtggcatgaatccacagaagctgttgaacttgaaaattttagtataaactacaagaatgagagaaatttcagcaaacatcctcagcgtaaactatttcaggagatctttaccgccttggtgaaaaatagactcataagcagagagtgggttaatcgagccccatctattcattttctgagagtgttaatctgtctgaggctactaatgagggatccatgttatcaggaaatactccatagcttgggtgggattgaaaacctagctcagtatatggagattgtagccaatgagtacctcggctatggagaagagcagcacactgtggacaagctggtcaacatgacatatatttttcaaaaacttgctgcagtcaaagatcaaagagaatgggtcaccacaagtggagcccacaagacattagtaaatttacttggtgcccgagatactaatgttctattgggttcccttctggctctggctagtttagcagaaagtcaagaatgtagggagaagataagtgaactcaacattgtagaaaatctgttgatgattttacatgaatatgacttgctttctaaaagactaacagcggagttgctgcgcctactttgtgcagagccccaggtgaaagagcaggtgaagctctatgaggggataccggtcctcctcagtctgctccactctgaccacttgaagctcctctggagcattgtctggattctggtacaggtttgtgaggaccctgagaccagcgtggaaattcgcatttggggaggcatcaaacagcttcttcatattttacaaggagacagaaattttgtttctgatcactcctccattggaagcctgtccagtgcaaatgctgcaggccgaatccagcagcttcatttatcagaagacttgagccctagggaaatacaagaaaatactttctcacttcaagcagcctgctgtgctgccctcactgagctggtgctcaatgacaccaatgcccaccaggtggttcaggaaaatggtgtatatacaatagcaaaattaattttaccaaataagcaaaagaatgcagcaaaaagtaatctattacagtgttatgctttcagagccttgagatttctcttcagtatggaaagaaacagaccactctttaaaagacttttccccacagacttgtttgagatcttcattgacatagggcattatgtacgtgatatcagtgcttatgaagaattggtatccaagctgaatttattagtggaggatgaactgaagcaaattgctgaaaatattgaaagcattaatcagaacaaagctcctttgaaatatataggcaactatgcaattttggatcatcttggaagtggagcttttggctgtgtttacaaggttagaaagcatagtggtcaaaatcttttagcaatgaaagaggtcaatttacataacccagcatttggaaaggataagaaagatcgagacagcagcgtaaggaatattgtttctgaattaacaataattaaagagcagctttatcatcccaacattgtacgttattacaaaacatttctggaaaatgataggttgtacatagttatggagctgatagaaggagccccgcttggagagcatttcagttctttgaaggaaaaacatcaccattttactgaagaaagactatggaaaatatttatacagctgtgcttagctcttcgatacttacacaaggagaagaggattgtccatagagatctgacaccaaacaacattatgttgggggataaggacaaagtaaccgttactgactttggcctggcaaagcaaaaacaagaaaacagtaaactcacctctgtggttggaacaatcctgtattcttgccccgaggtactgaagagtgagccgtatggggagaaggctgatgtctgggcagtaggctgcatcctttatcagatggcgactttgagtccccccttctacagcactaacatgctgtccttggctacaaaaatagtggaggcggtatatgaaccagtcccagaaggtatctactctgaaaaagtaacagacaccatcagcaggtgcctcactcctgatgcggaagctcgtccagatattgtagaagtcagttcgatgatatcagatgtcatgatgaaatatttagacaacttatctacatcccagttgtccttggaaaagaagctagaacgggaacgaagacgcacacaaaggtattttatggaagccaaccggaacaccgtcacatgtcaccatgagctggctgttctatctcacgagacctttgagaaggcaagtttgagtagcagcagcagtggagcagccagcctgaaaagtgaactttcagaaagcgcagacctgccccctgaaggcttccaggcctcctatggtaaagacgaagacagggcctgtgacgaaatcctgtcagatgataacttcaacctggaaaatgctgagaaagatacatattcagaggtagatgatgaattggacatttcggataactccagcagctccagttcaagccctctgaaagaatctacattcaacattttaaagagaagttttagtgcttcaggaggagaaagacaatcccaaacaagggacttcactggaggaacaggatcaagaccaagaccagctttgctgcctcttgacctgcttctgaaagtgccaccccacatgctcagggcccacattaaggaaatagaggctgagttagtgacagggtggcagtcccatagccttcctgctgtgattcttcgaaatctcaaagatcatgggccacagatgggcacattcttgtggcaagcatcagcaggaattgctgtgtcccagaggaaagtgcgtcagatcagtgatcctattcagcagatattaattcagctgcacaaaataatctatatcacacagcttcctccagctttgcaccacaatttgaaaagaagggttatagagagattcaagaaatccctcttcagccagcagagtaacccttgtaatttgaaatctgaaattaaaaagttatctcagggatctccagaaccgattgagcccaactttttcacagcagattaccatttattacatcgttcatccggtggaaacagcctgtccccaaatgaccctacaggtttaccaaccagcattgaattggaggaaggaataacatatgaacagatgcagactgtgattgaagaagtccttgaggaaagtggctattacaattttacatctaacaggtatcattcctatccatgggggaccaagaatcacccaaccaaaagatgaaaatgctgcattttgagtggacttgattttctcagtgaagttcaagttctggacttcagccgctattgcaagatgcccaaggattgggtgctgctagagggtgtggaaaagaccaagatgccatggggcctgcaggacttctttctgggggtcctgtgctggagtatatgacagctgcggtacttgagggcttcattgccagaacacattatatacaggatgtcagagctaccagtgtgctgctgggagaaaatgctgcaaaattcatcttttggagggtggggggaaaacccaaaaacaacaacaaaaaaactctcttacagaattttccttaacattaaaaaaaacttgtcatatttttcaaaggc

SEQ ID NO: 159416 - DNA, 652 bp, Homo sapiens
  Payload ID: 11196
  Gene Symbol: NEK10
  Gene Name: NIMA-related kinase 10
  ENST ID: ENST00000435584
  CDS Start-End: 1-499
tttagcaatgaaagaggtcaatttacataacccagcatttggaaaggataagaaagatcgagacagcagcgtaaggaatattgtttctgaattaacaataattaaagagcagctttatcatcccaacattgtacgttattacaaaacatttctggaaaatgataggttgtacatagttatggagctgatagaaggagccccgcttggagagcatttcagttctttgaaggaaaaacatcaccattttactgaagaaagactatggaaaatatttatacagctgtgcttagctcttcgatacttacacaaggagaagaggattgtccatagagatctgacaccaaacaacattatgttgggggataaggacaaagtaaccgttactgactttggcctggcaaagcaaaaacaagaaaacagtaaactcacctctgtggttggaacaatcctgtattcttgtggtttcatgagaagatgcaaagaaactgtggcaggctaacatgtaccttgtaagctgcaagcttatatgatgtctacttatcctcttaacagtaaggctgacctactcgttactttctgagagaagaataattttcttttgtttcactgtgtactgtttttataaaataaacaataaaatttgatcataaaa

SEQ ID NO: 159417 - DNA, 1874 bp, Homo sapiens
  Payload ID: 11197
  Gene Symbol: NEK11
  Gene Name: NIMA-related kinase 11
  Uniprot ID: Q8NG66
  ENST ID: ENST00000356918
  CDS Start-End: 112-1524
cttttcatctttaaggaactgaccaacactggatgaatttgaccatttcttaggagactggaatgttaagtttctataaatgaatgaaccagttctctcttgtttggagcaatgctgaaattccaagaggcagctaagtgtgtgagtggatcaacagccatttccacttatccaaagaccttgattgcaagaagatacgtgcttcaacaaaaacttggcagtggaagttttggaactgtctatctggtttcagacaagaaagccaaacgaggagaggaattaaaggtacttaaggaaatatctgttggagaactaaatccaaatgaaactgtacaggccaatttggaagcccaactcctctccaagctggaccacccagccattgtcaagttccatgcaagttttgtggagcaagataatttctgcattatcacggagtactgtgagggccgagatctggacgataaaattcaggaatataaacaagctggaaaaatctttccagaaaatcaaataatagaatggtttatccagctgctgctgggagttgactacatgcatgagaggaggatacttcatcgagacttaaagtcaaagaatgtatttctgaaaaataatctccttaaaattggagattttggagtttctcgacttctaatgggatcctgtgacctggccacaactttaactggaactccccattatatgagtcctgaggctctgaaacaccaaggctatgacacaaagtcggacatctggtcactggcatgcattttgtatgagatgtgctgcatgaatcatgcattcgctggctccaatttcttatccattgttttaaaaattgttgaaggtgacacaccttctctccctgagagatatccaaaagaactaaatgccatcatggaaagcatgttgaacaagaatccttcattaagaccatctgctatcgaaattttaaaaatcccttaccttgatgagcagctacagaacctaatgtgtagatattcagaaatgactctggaagacaaaaatttggattgtcagaaggaggctgctcatataattaatgccatgcaaaaaaggatccacctgcagactctgagggcactgtcagaagtacagaaaatgacgccaagagaaaggatgcggctgaggaagctccaggcggctgatgagaaagccaggaagctgaaaaagattgtggaagaaaaatatgaagaaaatagcaaacgaatgcaagaattgagatctcggaactttcagcagctgagtgttgatgtactccatgaaaaaacacatttaaaaggaatggaagaaaaggaggagcaacctgagggaagactttcttgttcaccccaggacgaggatgaagagaggtggcaaggcagggaagaggaatctgatgaaccaactttagagaacctgcctgagtctcagcctattccttccatggacctccacgaacttgaatcaattgtagaggatgccacatctgaccttggataccatgcaactcacagctgactttcagagcagtgttttttccaaagctggaatagcctgagactctagggcctgggtctacaaggagcatgactccctaccccaccattcagatgtggagaatgcagtgaagtaggccttggctgcttacccacatcctgaccagctgtcacctcttcatttcctgttcagccactctttaagcaatcactgagcccaatgctcagagatagctcagacctgtaggtggttgtgctttgcttgcctgtaggagccccacatgccctttacagttctgggctgtctatgacttacgatatcacctcttctttttaaatgtccaagtggaaataaagtgatttgaactttgc

SEQ ID NO: 159418 - DNA, 2914 bp, Homo sapiens
  Payload ID: 11197
  Gene Symbol: NEK11
  Gene Name: NIMA-related kinase 11
  Uniprot ID: Q8NG66
  ENST ID: ENST00000383366
  CDS Start-End: 294-2231
ccaaacagccgtggcccgcggtgtctggcgctcggtgggtgtggttgcccctagtttgaggcctgcccgattacccgcaagacttgggcagccccgggcgccgctccgaccacgacagggaaaggaaccttaatctcatctttaaaataaggagaattactgagtgacctgaaggacccttttcagctggaaagtctgaactgaccaacactggatgaatttgaccatttcttaggagactggaatgttaagtttctataaatgaatgaaccagttctctcttgtttggagcaatgctgaaattccaagaggcagctaagtgtgtgagtggatcaacagccatttccacttatccaaagaccttgattgcaagaagatacgtgcttcaacaaaaacttggcagtggaagttttggaactgtctatctggtttcagacaagaaagccaaacgaggagaggaattaaaggtacttaaggaaatatctgttggagaactaaatccaaatgaaactgtacaggccaatttggaagcccaactcctctccaagctggaccacccagccattgtcaagttccatgcaagttttgtggagcaagataatttctgcattatcacggagtactgtgagggccgagatctggacgataaaattcaggaatataaacaagctggaaaaatctttccagaaaatcaaataatagaatggtttatccagctgctgctgggagttgactacatgcatgagaggaggatacttcatcgagacttaaagtcaaagaatgtatttctgaaaaataatctccttaaaattggagattttggagtttctcgacttctaatgggatcctgtgacctggccacaactttaactggaactccccattatatgagtcctgaggctctgaaacaccaaggctatgacacaaagtcggacatctggtcactggcatgcattttgtatgagatgtgctgcatgaatcatgcattcgctggctccaatttcttatccattgttttaaaaattgttgaaggtgacacaccttctctccctgagagatatccaaaagaactaaatgccatcatggaaagcatgttgaacaagaatccttcattaagaccatctgctatcgaaattttaaaaatcccttaccttgatgagcagctacagaacctaatgtgtagatattcagaaatgactctggaagacaaaaatttggattgtcagaaggaggctgctcatataattaatgccatgcaaaaaaggatccacctgcagactctgagggcactgtcagaagtacagaaaatgacgccaagagaaaggatgcggctgaggaagctccaggcggctgatgagaaagccaggaagctgaaaaagattgtggaagaaaaatatgaagaaaatagcaaacgaatgcaagaattgagatctcggaactttcagcagctgagtgttgatgtactccatgaaaaaacacatttaaaaggaatggaagaaaaggaggagcaacctgagggaagactttcttgttcaccccaggacgaggatgaagagaggtggcaaggcagggaagaggaatctgatgaaccaactttagagaacctgcctgagtctcagcctattccttccatggacctccacgaacttgaatcaattgtagaggatgccacatctgaccttggataccatgagatcccagaagacccacttgtggctgaagagtactacgctgatgcatttgattcctattgtgaagagagtgatgaggaggaagaagaaatagcgttagaaagaccagagaaagaaatcaggaatgagggatcccagcctgcttacagaacaaaccaacaggacagtgatatcgaagcgttggccaggtgtttggaaaatgtcctgggttgcacttctctagacacaaagaccatcaccaccatggctgaagacatgtccccaggaccaccaattttcaacagtgtgatggccaggaccaagatgaaacgcatgagggaatcagccatgcagaagctggggacagaagtatttgaagaggtctataattacctcaagagagcaaggcatcagaatgctagcgaagcagagatccgcgagtgtttggaaaaagtggtgcctcaagccagcgactgttttgaagtggaccagctcctgtactttgaagagcagttgctgatcacgatgggaaaagaacctactctccagaaccatctctaggcaactatcaaaaagaagcagaagttcaagtggacaaatttatgtgaaaattcatttaacatataagctgaactctattatggggaatggatacaaaagcagagctcccatcttgactttcaattcctcatcagaagtactggcttctttagagagtagtaagcatggctgcctatgcttggagtcataagtgttatttggactataccctgagataagcttatagatcaagtttggctcccttgaaaagcatttctctcatgtgcgccctcagggcttccagcaggattgagtcaccctgacgatgaccggggagaagccgtgtgctcttcattattttcagctggaggacagagctcagtgcctgactgcctagggtctcatggactgtaggcagcctgccagtgaaggtcactggactctagcctacaacatgctgagctacagcccagaagccagacatgcctgtcttagctgacctgtttttggtccacttttgcccttccatgactaataaggaagatatgtgtgtatttcatacacacacaaggacctggattaaaaatccaaaaagtgattctcttctatgatttatttcaaactcatccatagataattcaagatttgtattcaaaataaacatagttttcacagttacaaaataaatcacctattttatcttt

SEQ ID NO: 159419 - DNA, 2337 bp, Homo sapiens
  Payload ID: 11197
  Gene Symbol: NEK11
  Gene Name: NIMA-related kinase 11
  ENST ID: ENST00000510474
  CDS Start-End: 169-408
agtttgaggcctgcccgattacccgcaagacttgggcagccccgggcgccgctccgaccacgacagggaaaggaactgaccaacactggatgaatttgaccatttcttaggagactggaatgttaagtttctataaatgaatgaaccagttctctcttgtttggagcaatgctgaaattccaagaggcagctaagtgtgtgagtggatcaacagccatttccacttatccaaagaccttgattgcaagaagatacgtgcttcaacaaaaacttggcagtggaagttttggaactgtctatctggtttcagacaagaaagccaaacgaggagaggaattggccgagatctggacgataaaattcaggaatataaacaagctggaaaaatctttccagaaaatcaaataatagaatggtttatccagctgctgctgggagttgactacatgcatgagaggaggatacttcatcgagacttaaagtcaaagaatgtatttctgaaaaataatctccttaaaattggagattttggagtttctcgacttctaatgggatcctgtgacctggccacaactttaactggaactccccattatatgagtcctgaggctctgaaacaccaaggctatgacacaaagtcggacatctggtcactggcatgcattttgtatgagatgtgctgcatgaatcatgcattcgctggctccaatttcttatccattgttttaaaaattgttgaaggtgacacaccttctctccctgagagatatccaaaagaactaaatgccatcatggaaagcatgttgaacaagaatccttcattaagaccatctgctatcgaaattttaaaaatcccttaccttgatgagcagctacagaacctaatgtgtagatattcagaaatgactctggaagacaaaaatttggattgtcagaaggaggctgctcatataattaatgccatgcaaaaaaggatccacctgcagactctgagggcactgtcagaagtacagaaaatgacgccaagagaaaggatgcggctgaggaagctccaggcggctgatgagaaagccaggaagctgaaaaagattgtggaagaaaaatatgaagaaaatagcaaacgaatgcaagaattgagatctcggaactttcagcagctgagtgttgatgtactccatgaatctgatgaaccaactttagagaacctgcctgagtctcagcctattccttccatggacctccacgaacttgaatcaattgtagaggatgccacatctgaccttggataccatgagatcccagaagacccacttgtggctgaagagtactacgctgatgcatttgattcctattgtgaagagagtgatgaggaggaagaagaaatagcgttagaaagaccagagaaagaaatcaggaatgagggatcccagcctgcttacagaacaaaccaacaggacagtgatatcgaagcgttggccaggtgtttggaaaatgtcctgggttgcacttctctagacacaaagaccatcaccaccatggctgaagacatgtccccaggaccaccaattttcaacagtgtgatggccaggaccaagatgaaacgcatgagggaatcagccatgcagaagctggggacagaagtatttgaagaggtctataattacctcaagagagcaaggcatcagaatgctagcgaagcagagatccgcgagtgtttggaaaaagtggtgcctcaagccagcgactgttttgaagtggaccagctcctgtactttgaagagcagttgctgatcacgatgggaaaagaacctactctccagaaccatctctaggcaactatcaaaaagaagcagaagttcaagtggacaaatttatgtgaaaattcatttaacatataagctgaactctattatggggaatggatacaaaagcagagctcccatcttgactttcaattcctcatcagaagtactggcttctttagagagtagtaagcatggctgcctatgcttggagtcataagtgttatttggactataccctgagataagcttatagatcaagtttggctcccttgaaaagcatttctctcatgtgcgccctcagggcttccagcaggattgagtcaccctgacgatgaccggggagaagccgtgtgctcttcattattttcagctggaggacagagctcagtgcctgactgcctagggtctcatggactgtaggcagcctgccagtgaaggtcactggactctagcctacaacatgctgagctacagcccagaagccagacatgcctgtcttagctgacctgtttttggtccacttttgcccttc

SEQ ID NO: 159420 - DNA, 2149 bp, Homo sapiens
  Payload ID: 11197
  Gene Symbol: NEK11
  Gene Name: NIMA-related kinase 11
  ENST ID: ENST00000510769
  CDS Start-End: 254-1876
agtatgccccgcgccgtctccctggccacggttccaaacagccgtggcccgcggtgtctggcgctcggtgggtgtggttgcccctagtttgaggcctgcccgattacccgcaagacttgggcagccccgggcgccgctccgaccacgacagggaaaggaactgaccaacactggatgaatttgaccatttcttaggagactggaatgttaagtttctataaatgaatgaaccagttctctcttgtttggagcaatgctgaaattccaagaggcagctaagtgtgtgagtggatcaacagccatttccacttatccaaagaccttgattgcaagaagatacgtgcttcaacaaaaacttggcagtggaagttttggaactgtctatctggtttcagacaagaaagccaaacgaggagaggaattaaaggtacttaaggaaatatctgttggagaactaaatccaaatgaaactgtacaggccaatttggaagcccaactcctctccaagctggaccacccagccattgtcaagttccatgcaagttttgtggagcaagataatttctgcattatcacggagtactgtgagggccgagatctggacgataaaattcaggaatataaacaagctggaaaaatctttccagaaaatcaaataatagaatggtttatccagctgctgctgggagttgactacatgcatgagaggaggatacttcatcgagacttaaagtcaaagaatgtatttctgaaaaataatctccttaaaattggagattttggagtttctcgacttctaatgggatcctgtgacctggccacaactttaactggaactccccattatatgagtcctgaggctctgaaacaccaaggctatgacacaaagtcggacatctggcaaaaaaggatccacctgcagactctgagggcactgtcagaagtacagaaaatgacgccaagagaaaggatgcggctgaggaagctccaggcggctgatgagaaagccaggaagctgaaaaagattgtggaagaaaaatatgaagaaaatagcaaacgaatgcaagaattgagatctcggaactttcagcagctgagtgttgatgtactccatgaaaaaacacatttaaaaggaatggaagaaaaggaggagcaacctgagggaagactttcttgttcaccccaggacgaggatgaagagaggtggcaaggcagggaagaggaatctgatgaaccaactttagagaacctgcctgagtctcagcctattccttccatggacctccacgaacttgaatcaattgtagaggatgccacatctgaccttggataccatgagatcccagaagacccacttgtggctgaagagtactacgctgatgcatttgattcctattgtgaagagagtgatgaggaggaagaagaaatagcgttagaaagaccagagaaagaaatcaggaatgagggatcccagcctgcttacagaacaaaccaacaggacagtgatatcgaagcgttggccaggtgtttggaaaatgtcctgggttgcacttctctagacacaaagaccatcaccaccatggctgaagacatgtccccaggaccaccaattttcaacagtgtgatggccaggaccaagatgaaacgcatgagggaatcagccatgcagaagctggggacagaagtatttgaagaggtctataattacctcaagagagcaaggcatcagaatgctagcgaagcagagatccgcgagtgtttggaaaaagtggtgcctcaagccagcgactgttttgaagtggaccagctcctgtactttgaagagcagttgctgatcacgatgggaaaagaacctactctccagaaccatctctaggcaactatcaaaaagaagcagaagttcaagtggacaaatttatgtgaaaattcatttaacatataagctgaactctattatggggaatggatacaaaagcagagctcccatcttgactttcaattcctcatcagaagtactggcttctttagagagtagtaagcatggctgcctatgcttggagtcataagtgttatttggactataccctgagataagcttatagatcaagtttggctcccttgaaaagcatttctctcatgtgcgccctca

SEQ ID NO: 159421 - DNA, 1938 bp, Homo sapiens
  Payload ID: 11197
  Gene Symbol: NEK11
  Gene Name: NIMA-related kinase 11
  Uniprot ID: Q8NG66
  ENST ID: ENST00000508196
  CDS Start-End: 1-1938
atgctgaaattccaagaggcagctaagtgtgtgagtggatcaacagccatttccacttatccaaagaccttgattgcaagaagatacgtgcttcaacaaaaacttggcagtggaagttttggaactgtctatctggtttcagacaagaaagccaaacgaggagaggaattaaaggtacttaaggaaatatctgttggagaactaaatccaaatgaaactgtacaggccaatttggaagcccaactcctctccaagctggaccacccagccattgtcaagttccatgcaagttttgtggagcaagataatttctgcattatcacggagtactgtgagggccgagatctggacgataaaattcaggaatataaacaagctggaaaaatctttccagaaaatcaaataatagaatggtttatccagctgctgctgggagttgactacatgcatgagaggaggatacttcatcgagacttaaagtcaaagaatgtatttctgaaaaataatctccttaaaattggagattttggagtttctcgacttctaatgggatcctgtgacctggccacaactttaactggaactccccattatatgagtcctgaggctctgaaacaccaaggctatgacacaaagtcggacatctggtcactggcatgcattttgtatgagatgtgctgcatgaatcatgcattcgctggctccaatttcttatccattgttttaaaaattgttgaaggtgacacaccttctctccctgagagatatccaaaagaactaaatgccatcatggaaagcatgttgaacaagaatccttcattaagaccatctgctatcgaaattttaaaaatcccttaccttgatgagcagctacagaacctaatgtgtagatattcagaaatgactctggaagacaaaaatttggattgtcagaaggaggctgctcatataattaatgccatgcaaaaaaggatccacctgcagactctgagggcactgtcagaagtacagaaaatgacgccaagagaaaggatgcggctgaggaagctccaggcggctgatgagaaagccaggaagctgaaaaagattgtggaagaaaaatatgaagaaaatagcaaacgaatgcaagaattgagatctcggaactttcagcagctgagtgttgatgtactccatgaaaaaacacatttaaaaggaatggaagaaaaggaggagcaacctgagggaagactttcttgttcaccccaggacgaggatgaagagaggtggcaaggcagggaagaggaatctgatgaaccaactttagagaacctgcctgagtctcagcctattccttccatggacctccacgaacttgaatcaattgtagaggatgccacatctgaccttggataccatgagatcccagaagacccacttgtggctgaagagtactacgctgatgcatttgattcctattgtgaagagagtgatgaggaggaagaagaaatagcgttagaaagaccagagaaagaaatcaggaatgagggatcccagcctgcttacagaacaaaccaacaggacagtgatatcgaagcgttggccaggtgtttggaaaatgtcctgggttgcacttctctagacacaaagaccatcaccaccatggctgaagacatgtccccaggaccaccaattttcaacagtgtgatggccaggaccaagatgaaacgcatgagggaatcagccatgcagaagctggggacagaagtatttgaagaggtctataattacctcaagagagcaaggcatcagaatgctagcgaagcagagatccgcgagtgtttggaaaaagtggtgcctcaagccagcgactgttttgaagtggaccagctcctgtactttgaagagcagttgctgatcacgatgggaaaagaacctactctccagaaccatctctag

SEQ ID NO: 159422 - DNA, 2754 bp, Homo sapiens
  Payload ID: 11197
  Gene Symbol: NEK11
  Gene Name: NIMA-related kinase 11
  Uniprot ID: Q8NG66
  ENST ID: ENST00000510688
  CDS Start-End: 225-2024
ggttccaaacagccgtggcccgcggtgtctggcgctcggtgggtgtggttgcccctagtttgaggcctgcccgattacccgcaagacttgggcagccccgggcgccgctccgaccacgacagggaaaggaactgaccaacactggatgaatttgaccatttcttaggagactggaatgttaagtttctataaatgaatgaaccagttctctcttgtttggagcaatgctgaaattccaagaggcagctaagtgtgtgagtggatcaacagccatttccacttatccaaagaccttgattgcaagaagatacgtgcttcaacaaaaacttggcagtggaagttttggaactgtctatctggtttcagacaagaaagccaaacgaggagaggaattaaaggtacttaaggaaatatctgttggagaactaaatccaaatgaaactgtacaggccaatttggaagcccaactcctctccaagctggaccacccagccattgtcaagttccatgcaagttttgtggagcaagataatttctgcattatcacggagtactgtgagggccgagatctggacgataaaattcaggaatataaacaagctggaaaaatctttccagaaaatcaaataatagaatggtttatccagctgctgctgggagttgactacatgcatgagaggaggatacttcatcgagacttaaagtcaaagaatgtatttctgaaaaataatctccttaaaattggagattttggagtttctcgacttctaatgggatcctgtgacctggccacaactttaactggaactccccattatatgagtcctgaggctctgaaacaccaaggctatgacacaaagtcggacatctggtcactggcatgcattttgtatgagatgtgctgcatgaatcatgcattcgctggctccaatttcttatccattgttttaaaaattgttgaaggtgacacaccttctctccctgagagatatccaaaagaactaaatgccatcatggaaagcatgttgaacaagaatccttcattaagaccatctgctatcgaaattttaaaaatcccttaccttgatgagcagctacagaacctaatgtgtagatattcagaaatgactctggaagacaaaaatttggattgtcagaaggaggctgctcatataattaatgccatgcaaaaaaggatccacctgcagactctgagggcactgtcagaagtacagaaaatgacgccaagagaaaggatgcggctgaggaagctccaggcggctgatgagaaagccaggaagctgaaaaagattgtggaagaaaaatatgaagaaaatagcaaacgaatgcaagaattgagatctcggaactttcagcagctgagtgttgatgtactccatgaaaaaacacatttaaaaggaatggaagaaaaggaggagcaacctgagggaagactttcttgttcaccccaggacgaggatgaagagaggtggcaaggcagggaagaggaatctgatgaaccaactttagagaacctgcctgagtctcagcctattccttccatggacctccacgaacttgaatcaattgtagaggatgccacatctgaccttggataccatgagatcccagaagacccacttgtggctgaagagtactacgctgatgcatttgattcctattgtgaagagagtgatgaggaggaagaagaaatagcgttagaaagaccagagaaagaaatcaggaatgagggatcccagcctgcttacagaacaaaccaacaggacagtgatatcgaagcgttggccaggtgtttggaaaatgtcctgggttgcacttctctagatcagccatgcagaagctggggacagaagtatttgaagaggtctataattacctcaagagagcaaggcatcagaatgctagcgaagcagagatccgcgagtgtttggaaaaagtggtgcctcaagccagcgactgttttgaagtggaccagctcctgtactttgaagagcagttgctgatcacgatgggaaaagaacctactctccagaaccatctctaggcaactatcaaaaagaagcagaagttcaagtggacaaatttatgtgaaaattcatttaacatataagctgaactctattatggggaatggatacaaaagcagagctcccatcttgactttcaattcctcatcagaagtactggcttctttagagagtagtaagcatggctgcctatgcttggagtcataagtgttatttggactataccctgagataagcttatagatcaagtttggctcccttgaaaagcatttctctcatgtgcgccctcagggcttccagcaggattgagtcaccctgacgatgaccggggagaagccgtgtgctcttcattattttcagctggaggacagagctcagtgcctgactgcctagggtctcatggactgtaggcagcctgccagtgaaggtcactggactctagcctacaacatgctgagctacagcccagaagccagacatgcctgtcttagctgacctgtttttggtccacttttgcccttccatgactaataaggaagatatgtgtgtatttcatacacacacaaggacctggattaaaaatccaaaaagtgattctcttctatgatttatttcaaactcatccatagataattcaagatttgtattcaaaataaacatagttttcacagttacaaaataaatcacctattttatcttttcctta

SEQ ID NO: 159423 - DNA, 2056 bp, Homo sapiens
  Payload ID: 11197
  Gene Symbol: NEK11
  Gene Name: NIMA-related kinase 11
  Uniprot ID: Q8NG66
  ENST ID: ENST00000511262
  CDS Start-End: 294-1706
ccaaacagccgtggcccgcggtgtctggcgctcggtgggtgtggttgcccctagtttgaggcctgcccgattacccgcaagacttgggcagccccgggcgccgctccgaccacgacagggaaaggaaccttaatctcatctttaaaataaggagaattactgagtgacctgaaggacccttttcagctggaaagtctgaactgaccaacactggatgaatttgaccatttcttaggagactggaatgttaagtttctataaatgaatgaaccagttctctcttgtttggagcaatgctgaaattccaagaggcagctaagtgtgtgagtggatcaacagccatttccacttatccaaagaccttgattgcaagaagatacgtgcttcaacaaaaacttggcagtggaagttttggaactgtctatctggtttcagacaagaaagccaaacgaggagaggaattaaaggtacttaaggaaatatctgttggagaactaaatccaaatgaaactgtacaggccaatttggaagcccaactcctctccaagctggaccacccagccattgtcaagttccatgcaagttttgtggagcaagataatttctgcattatcacggagtactgtgagggccgagatctggacgataaaattcaggaatataaacaagctggaaaaatctttccagaaaatcaaataatagaatggtttatccagctgctgctgggagttgactacatgcatgagaggaggatacttcatcgagacttaaagtcaaagaatgtatttctgaaaaataatctccttaaaattggagattttggagtttctcgacttctaatgggatcctgtgacctggccacaactttaactggaactccccattatatgagtcctgaggctctgaaacaccaaggctatgacacaaagtcggacatctggtcactggcatgcattttgtatgagatgtgctgcatgaatcatgcattcgctggctccaatttcttatccattgttttaaaaattgttgaaggtgacacaccttctctccctgagagatatccaaaagaactaaatgccatcatggaaagcatgttgaacaagaatccttcattaagaccatctgctatcgaaattttaaaaatcccttaccttgatgagcagctacagaacctaatgtgtagatattcagaaatgactctggaagacaaaaatttggattgtcagaaggaggctgctcatataattaatgccatgcaaaaaaggatccacctgcagactctgagggcactgtcagaagtacagaaaatgacgccaagagaaaggatgcggctgaggaagctccaggcggctgatgagaaagccaggaagctgaaaaagattgtggaagaaaaatatgaagaaaatagcaaacgaatgcaagaattgagatctcggaactttcagcagctgagtgttgatgtactccatgaaaaaacacatttaaaaggaatggaagaaaaggaggagcaacctgagggaagactttcttgttcaccccaggacgaggatgaagagaggtggcaaggcagggaagaggaatctgatgaaccaactttagagaacctgcctgagtctcagcctattccttccatggacctccacgaacttgaatcaattgtagaggatgccacatctgaccttggataccatgcaactcacagctgactttcagagcagtgttttttccaaagctggaatagcctgagactctagggcctgggtctacaaggagcatgactccctaccccaccattcagatgtggagaatgcagtgaagtaggccttggctgcttacccacatcctgaccagctgtcacctcttcatttcctgttcagccactctttaagcaatcactgagcccaatgctcagagatagctcagacctgtaggtggttgtgctttgcttgcctgtaggagccccacatgccctttacagttctgggctgtctatgacttacgatatcacctcttctttttaaatgtccaagtggaaataaagtgatttgaactttgc

SEQ ID NO: 159424 - DNA, 2863 bp, Homo sapiens
  Payload ID: 11197
  Gene Symbol: NEK11
  Gene Name: NIMA-related kinase 11
  ENST ID: ENST00000514915
  CDS Start-End: 181-819
gtggttgcccctagtttgaggcctgcccgattacccgcaagacttgggcagccccgggcgccgctccgaccacgacagggaaaggaactgaccaacactggatgaatttgaccatttcttaggagactggaatgttaagtttctataaatgaatgaaccagttctctcttgtttggagcaatgctgaaattccaagaggcagctaagtgtgtgagtggatcaacagccatttccacttatccaaagaccttgattgcaagaagatacgtgcttcaacaaaaacttggcagtggaagttttggaactgtctatctggtttcagacaagaaagccaaacgaggagaggaattaaaggtacttaaggaaatatctgttggagaactaaatccaaatgaaactgtacaggccaatttggaagcccaactcctctccaagctggaccacccagccattgtcaagttccatgcaagttttgtggagcaagataatttctgcattatcacggagtactgtgagggccgagatctggacgataaaattcaggaatataaacaagctggaaaaatctttccagaaaatcaaataatagaatggtttatccagctgctgctgggagttgactacatgcatgagaggaggatacttcatcgagacttaaagtcaaagaatgtatttctgaaaaataatctccttaaaattgctactggatcatctaatcatcatatagggtgtacttggggaaggaaggaaggaaggaataaaagtgtgcaactagttaggagattttggagtttctcgacttctaatgggatcctgtgacctggccacaactttaactggaactccccattatatgagtcctgaggctctgaaacaccaaggctatgacacaaagtcggacatctggtcactggcatgcattttgtatgagatgtgctgcatgaatcatgcattcgctggctccaatttcttatccattgttttaaaaattgttgaaggtgacacaccttctctccctgagagatatccaaaagaactaaatgccatcatggaaagcatgttgaacaagaatccttcattaagaccatctgctatcgaaattttaaaaatcccttaccttgatgagcagctacagaacctaatgtgtagatattcagaaatgactctggaagacaaaaatttggattgtcagaaggaggctgctcatataattaatgccatgcaaaaaaggatccacctgcagactctgagggcactgtcagaagtacagaaaatgacgccaagagaaaggatgcggctgaggaagctccaggcggctgatgagaaagccaggaagctgaaaaagattgtggaagaaaaatatgaagaaaatagcaaacgaatgcaagaattgagatctcggaactttcagcagctgagtgttgatgtactccatgaaaaaacacatttaaaaggaatggaagaaaaggaggagcaacctgagggaagactttcttgttcaccccaggacgaggatgaagagaggtggcaaggcagggaagaggaatctgatgaaccaactttagagaacctgcctgagtctcagcctattccttccatggacctccacgaacttgaatcaattgtagaggatgccacatctgaccttggataccatgagatcccagaagacccacttgtggctgaagagtactacgctgatgcatttgattcctattgtgaagagagtgatgaggaggaagaagaaatagcgttagaaagaccagagaaagaaatcaggaatgagggatcccagcctgcttacagaacaaaccaacaggacagtgatatcgaagcgttggccaggtgtttggaaaatgtcctgggttgcacttctctagacacaaagaccatcaccaccatggctgaagacatgtccccaggaccaccaattttcaacagtgtgatggccaggaccaagatgaaacgcatgagggaatcagccatgcagaagctggggacagaagtatttgaagaggtctataattacctcaagagagcaaggcatcagaatgctagcgaagcagagatccgcgagtgtttggaaaaagtggtgcctcaagccagcgactgttttgaagtggaccagctcctgtactttgaagagcagttgctgatcacgatgggaaaagaacctactctccagaaccatctctaggcaactatcaaaaagaagcagaagttcaagtggacaaatttatgtgaaaattcatttaacatataagctgaactctattatggggaatggatacaaaagcagagctcccatcttgactttcaattcctcatcagaagtactggcttctttagagagtagtaagcatggctgcctatgcttggagtcataagtgttatttggactataccctgagataagcttatagatcaagtttggctcccttgaaaagcatttctctcatgtgcgccctcagggcttccagcaggattgagtcaccctgacgatgaccggggagaagccgtgtgctcttcattattttcagctggaggacagagctcagtgcctgactgcctagggtctcatggactgtaggcagcctgccagtgaaggtcactggactctagcctacaacatgctgagctacagcccagaagccagacatgcctgtcttagctgacctgtttttggtccacttttgcccttccatgactaataaggaagatatgtgtgtatttcatacacacacaaggacctggattaaaaatccaaaaagtgattctcttctatgatttatttcaaactcatccatagataattcaagatttgtattcaaaataaacatagttttcacagttacaaaataaa

SEQ ID NO: 159425 - DNA, 1841 bp, Homo sapiens
  Payload ID: 11197
  Gene Symbol: NEK11
  Gene Name: NIMA-related kinase 11
  Uniprot ID: Q8NG66
  ENST ID: ENST00000507910
  CDS Start-End: 371-1819
ggatgacctaaaagtggactgggatgggggtggcagggctgagtctgtgagggtgggcgggagggaacctagtcccagagtcttctgcagcctggaccagactacttaagcactgctgggtttagactgtcctttaaaataagagccgctagaagtgaacttctcattctgtccgtccctaattctgtccttctctaaaaggaaccttaatctcatctttaaaataaggagaattactgagtgacctgaaggacccttttcagctggaaagtctgaactgaccaacactggatgaatttgaccatttcttaggagactggaatgttaagtttctataaatgaatgaaccagttctctcttgtttggagcaatgctgaaattccaagaggcagctaagtgtgtgagtggatcaacagccatttccacttatccaaagaccttgattgcaagaagatacgtgcttcaacaaaaacttggcagtggaagttttggaactgtctatctggtttcagacaagaaagccaaacgaggagaggaattaaaggtacttaaggaaatatctgttggagaactaaatccaaatgaaactgtacaggccaatttggaagcccaactcctctccaagctggaccacccagccattgtcaagttccatgcaagttttgtggagcaagataatttctgcattatcacggagtactgtgagggccgagatctggacgataaaattcaggaatataaacaagctggaaaaatctttccagaaaatcaaataatagaatggtttatccagctgctgctgggagttgactacatgcatgagaggaggatacttcatcgagacttaaagtcaaagaatgtatttctgaaaaataatctccttaaaattggagattttggagtttctcgacttctaatgggatcctgtgacctggccacaactttaactggaactccccattatatgagtcctgaggctctgaaacaccaaggctatgacacaaagtcggacatctggtcactggcatgcattttgtatgagatgtgctgcatgaatcatgcattcgctggctccaatttcttatccattgttttaaaaattgttgaaggtgacacaccttctctccctgagagatatccaaaagaactaaatgccatcatggaaagcatgttgaacaagaatccttcattaagaccatctgctatcgaaattttaaaaatcccttaccttgatgagcagctacagaacctaatgtgtagatattcagaaatgactctggaagacaaaaatttggattgtcagaaggaggctgctcatataattaatgccatgcaaaaaaggatccacctgcagactctgagggcactgtcagaagtacagaaaatgacgccaagagaaaggatgcggctgaggaagctccaggcggctgatgagaaagccaggaagctgaaaaagattgtggaagaaaaatatgaagaaaatagcaaacgaatgcaagaattgagatctcggaactttcagcagctgagtgttgatgtactccatgaaaaaacacatttaaaaggaatggaagaaaaggaggagcaacctgagggaagactttcttgttcaccccaggacgaggatgaagagaggtggcaaggcagggaagaggaatctgatgaaccaactttagagaacctgcctgagtctcagcctattccttccatggacctccacgaacttgaatcaattgtagaggatgccacatctgaccttggataccatggagactgtaatctaatttcactagacgaatactggaaaaatgaaaaataaaggaatttctgaaataaggaaa

SEQ ID NO: 159426 - DNA, 659 bp, Homo sapiens
  Payload ID: 11197
  Gene Symbol: NEK11
  Gene Name: NIMA-related kinase 11
  ENST ID: ENST00000602792
  CDS Start-End: 1-659
aaaggtacttaaggaaatatctgttggagaactaaatccaaatgaaactgtacaggccaatttggaagcccaactcctctccaagctggaccacccagccattgtcaagttccatgcaagttttgtggagcaagataatttctgcattatcacggagtactgtgagggccgagatctggacgataaaattcaggaatataaacaagctggaaaaatctttccagaaaatcaaataatagaatggtttatccagctgctgctgggagttgactacatgcatgagaggaggatacttcatcgagacttaaagtcaaagaatgtatttctgaaaaataatctccttaaaattggagattttggagtttctcgacttctaatgggatcctgtgacctggccacaactttaactggaactccccattatatgagtcctgaggctctgaaacaccaaggctatgacacaaagtcggacatctggtcactggcatgcattttgtatgagatgtgctgcatgaatcatgcattcgctggctccaatttcttatccattgttttaaaaattgttgaaggtgacacaccttctctccctgagagatatccaaaagaactaaatgccatcatggaaaggtatagaaataaacatgttgtcacagaaataa

SEQ ID NO: 159427 - DNA, 1865 bp, Homo sapiens
  Payload ID: 11198
  Gene Symbol: NEK2
  Gene Name: NIMA-related kinase 2
  Uniprot ID: P51955
  ENST ID: ENST00000366998
  CDS Start-End: 79-1233
ggagttcctggtccctggagctccgcacttggcggcgcaacctgcgtgaggcagcgcgactctggcgactggccggccatgccttcccgggctgaggactatgaagtgttgtacaccattggcacaggctcctacggccgctgccagaagatccggaggaagagtgatggcaagatattagtttggaaagaacttgactatggctccatgacagaagctgagaaacagatgcttgtttctgaagtgaatttgcttcgtgaactgaaacatccaaacatcgttcgttactatgatcggattattgaccggaccaatacaacactgtacattgtaatggaatattgtgaaggaggggatctggctagtgtaattacaaagggaaccaaggaaaggcaatacttagatgaagagtttgttcttcgagtgatgactcagttgactctggccctgaaggaatgccacagacgaagtgatggtggtcataccgtattgcatcgggatctgaaaccagccaatgttttcctggatggcaagcaaaacgtcaagcttggagactttgggctagctagaatattaaaccatgacacgagttttgcaaaaacatttgttggcacaccttattacatgtctcctgaacaaatgaatcgcatgtcctacaatgagaaatcagatatctggtcattgggctgcttgctgtatgagttatgtgcattaatgcctccatttacagcttttagccagaaagaactcgctgggaaaatcagagaaggcaaattcaggcgaattccataccgttactctgatgaattgaatgaaattattacgaggatgttaaacttaaaggattaccatcgaccttctgttgaagaaattcttgagaaccctttaatagcagatttggttgcagacgagcaaagaagaaatcttgagagaagagggcgacaattaggagagccagaaaaatcgcaggattccagccctgtattgagtgagctgaaactgaaggaaattcagttacaggagcgagagcgagctctcaaagcaagagaagaaagattggagcagaaagaacaggagctttgtgttcgtgagagactagcagaggacaaactggctagagcagaaaatctgttgaagaactacagcttgctaaaggaacggaagttcctgtctctggcaagtaatccaggtatgagaatcaacttggtcaacagaagctggtgctacaaatgaagaaatgtgcaccagtgttgctcccaaagtggcttaggtagcccttttcatttacaaatctcaaattttaagatggatttcattgaatatatgcatttcaatggaaacaaaattctgttatagcaatgatttatttcctgggttcatagacctgaggcaatgagtcatagaatttcatgtttgattttctttaccttatcaaactacatgtttagtaattgatacttatttttattatcattatttatttttttattttttttgagatggagtctcactctgtagcccaggctggagtgcagtggcacaatctcggctcactgcaagctctgcctcccgggttcacgccattcttctgcctcagcctcccaagtagctgggactacagacacccgccaccaagcccggctaatttttgtatttttagtagagacggggtttcaccgtgttagccaggatggtctcgatttcctgacctcgtgatccgcctgcctcggcctcccaatgtgctgggattacaggcatgagacaccgtgcccagccgatacttatttttaaaaattagggcatttacaaaactattgtatgtttcagatttcagagagataaactgcatttcaagtaaaaataaa

SEQ ID NO: 159428 - DNA, 2131 bp, Homo sapiens
  Payload ID: 11198
  Gene Symbol: NEK2
  Gene Name: NIMA-related kinase 2
  Uniprot ID: P51955
  ENST ID: ENST00000366999
  CDS Start-End: 140-1477
cggggcccaaggcaggggtggcgggtcagtgctgctcgggggcttctccatccaggtccctggagttcctggtccctggagctccgcacttggcggcgcaacctgcgtgaggcagcgcgactctggcgactggccggccatgccttcccgggctgaggactatgaagtgttgtacaccattggcacaggctcctacggccgctgccagaagatccggaggaagagtgatggcaagatattagtttggaaagaacttgactatggctccatgacagaagctgagaaacagatgcttgtttctgaagtgaatttgcttcgtgaactgaaacatccaaacatcgttcgttactatgatcggattattgaccggaccaatacaacactgtacattgtaatggaatattgtgaaggaggggatctggctagtgtaattacaaagggaaccaaggaaaggcaatacttagatgaagagtttgttcttcgagtgatgactcagttgactctggccctgaaggaatgccacagacgaagtgatggtggtcataccgtattgcatcgggatctgaaaccagccaatgttttcctggatggcaagcaaaacgtcaagcttggagactttgggctagctagaatattaaaccatgacacgagttttgcaaaaacatttgttggcacaccttattacatgtctcctgaacaaatgaatcgcatgtcctacaatgagaaatcagatatctggtcattgggctgcttgctgtatgagttatgtgcattaatgcctccatttacagcttttagccagaaagaactcgctgggaaaatcagagaaggcaaattcaggcgaattccataccgttactctgatgaattgaatgaaattattacgaggatgttaaacttaaaggattaccatcgaccttctgttgaagaaattcttgagaaccctttaatagcagatttggttgcagacgagcaaagaagaaatcttgagagaagagggcgacaattaggagagccagaaaaatcgcaggattccagccctgtattgagtgagctgaaactgaaggaaattcagttacaggagcgagagcgagctctcaaagcaagagaagaaagattggagcagaaagaacaggagctttgtgttcgtgagagactagcagaggacaaactggctagagcagaaaatctgttgaagaactacagcttgctaaaggaacggaagttcctgtctctggcaagtaatccagaacttcttaatcttccatcctcagtaattaagaagaaagttcatttcagtggggaaagtaaagagaacatcatgaggagtgagaattctgagagtcagctcacatctaagtccaagtgcaaggacctgaagaaaaggcttcacgctgcccagctgcgggctcaagccctgtcagatattgagaaaaattaccaactgaaaagcagacagatcctgggcatgcgctagccaggtagagagacacagagctgtgtacaggatgtaatattaccaacctttaaagactgatattcaaatgctgtagtgttgaatacttggttccatgagccatgcctttctgtatagtacacatgatatttcggaattggttttactgttcttcagcaactattgtacaaaatgttcacatttaatttttctttcttcttttaagaacatattataaaaagaatactttcttggttgggcttttaatcctgtgtgtgattactagtaggaacatgagatgtgacattctaaatcttgggagaaaaaataatgttaggaaaaaaatatttatgcaggaagagtagcactcactgaatagttttaaatgactgagtggtatgcttacaattgtcatgtctagatttaaattttaagtctgagattttaaatgtttttgagcttagaaaacccagttagatgcaatttggtcattaataccatgacatcttgcttataaatattccattgctctgtagttcaaatctgttagctttgtgaaaattcatcactgtgatgtttgtattctttttttttttctgtttaacagaatatgagctgtctgtcatttacctacttctttcccactaaataaaagaattcttcagtttccctgta

SEQ ID NO: 159429 - DNA, 1318 bp, Homo sapiens
  Payload ID: 11198
  Gene Symbol: NEK2
  Gene Name: NIMA-related kinase 2
  ENST ID: ENST00000540251
  CDS Start-End: 152-1318
gcgacggttaaacggggcccaaggcaggggtggcgggtcagtgctgctcgggggcttctccatccaggtccctggagttcctggtccctggagctccgcacttggcggcgcaacctgcgtgaggcagcgcgactctggcgactggccggccatgccttcccgggctgaggactatgaagtgttgtacaccattggcacaggctcctacggccgctgccagaagatccggaggaagagtgatggcaagatattagtttggaaagaacttgactatggctccatgacagaagctgagaaacagatgcttgtttctgaagtgaatttgcttcgtgaactgaaacatccaaacatcgttcgttactatgatcggattattgaccggaccaatacaacactgtacattgtaatggaatattgtgaaggaggggatctggctagtgtaattacaaagggaaccaaggaaaggcaatacttagatgaagagtttgttcttcgagtgatgactcagttgactctggccctgaaggaatgccacagacgaagtgatggtggtcataccgtattgcatcgggatctgaaaccagccaatgttttcctggatggcaagcaaaacgtcaagcttggagactttgggctagctagaatattaaaccatgacacgagttttgcaaaaacatttgttggcacaccttattacatgtctcctgaacaaatgaatcgcatgtcctacaatgagaaatcagatatctggtcattgggctgcttgctgtatgagttatgtgcattaatgcctccatttacagcttttagccagaaagaactcgctgggaaaatcagagaaggcaaattcaggcgaattccataccgttactctgatgaattgaatgaaattattacgaggatgttaaacttaaaggattaccatcgaccttctgttgaagaaattcttgagaaccctttaatagcagatttggttgcagacgagcaaagaagaaatcttgagagaagagggcgacaattaggagagccagaaaaatcgcaggattccagccctgtattgagtgagctgaaactgaaggaaattcagttacaggagcgagagcgagctctcaaagcaagagaagaaagattggagcagaaagaacaggagctttgtgttcgtgagagactagcagaggacaaactggctagagcagaaaatctgttgaagaactacagcttgctaaaggaacggaagttcctgtctctggcaagtaatccagagtctcactttgttgcccaggctggaatgcagtggtgtgatcacagctcaatgtag

SEQ ID NO: 159430 - DNA, 727 bp, Homo sapiens
  Payload ID: 11199
  Gene Symbol: NEK3
  Gene Name: NIMA-related kinase 3
  ENST ID: ENST00000551355
  CDS Start-End: 99-239
ttgccaggccaaggagtggactagggtcgccggggaagcggtttgggagagcccatggtgactgcgtgagtggagcccagctgtgtggatgccccagcatggatgactacatggtcctgagaatgattggggagggctccttcggcagagctcttttggttcagcatgaaagcagtaatcagatgtttgccatgaaagaaataaggcttcccaagctgaaggacacttgtatattgtgatggaatactgtgatggaggggatctaatgcaaaagattaaacagcagaaaggaaagttatttcctgaagacatgatacttaattggtttacccaaatgtgccttggagtaaatcacattcacaagaaacgtgtgctacacagagatatcaagtccaagaatatcttcctcactcagaatggaaaagtgaaattgggagactttggatctgcccgtcttctctccaatccgatggcatttgcttgtacctatgtgggaactccttattatgtgcctccagaaatttgggaaaacctgccttataacaataaaagtgacatctggtccttgggttgcatcctgtatgaactctgtacccttaagcatccatttcaggcaaatagttggaaaaatcttatcctcaaagtatgtcaagggtgcatcagtccactgccgtctcattactcctatgaacttcagttcctagtcaagcagatgtttaaaaggaat

SEQ ID NO: 159431 - DNA, 569 bp, Homo sapiens
  Payload ID: 11199
  Gene Symbol: NEK3
  Gene Name: NIMA-related kinase 3
  ENST ID: ENST00000550841
  CDS Start-End: 396-569
gtccccgccctggcgggctgcctctagaacgaggagggcggcgcgtggtcgcggcgcggagccgagtgggagcgaggggtagacgcgccccggacgcgcggccgcgcccctcacttccgccccgcggtctggaccactcgccgcaaacccgcaagtccctcgccgccttggggtctgggcgcgcggtgccgtgggggtcagcagggcggagcggcttttccaggagaaagggccctcacgggtgagcggggcgactgggctcccccgcggtgcagttgccccgcgggcgccggccccggctcaacggattcttctcgctcgctgcccggaaagaaccatttgggagagcccatggtgactgcgtgagtggagcccagctgtgtggatgccccagcatggatgactacatggtcctgagaatgattggggagggctccttcggcagagctcttttggttcagcatgaaagcagtaatcagatgtttgccatgaaagaaataaggcttcccaagtctttctctaatacacagaattctaggaaggaggctgttcttttagccaaaatgaaa

SEQ ID NO: 159432 - DNA, 2396 bp, Homo sapiens
  Payload ID: 11199
  Gene Symbol: NEK3
  Gene Name: NIMA-related kinase 3
  Uniprot ID: P51956
  ENST ID: ENST00000610828
  CDS Start-End: 377-1897
cacatagctagtaagttctagctagcactgagtgctgtgcccgtgaaatttatctacataggctttcacttaacctgcagacagaactcagttagtcggggacaatttccctcaatgttaacagcactgttccaccgcaacgtggaacaacagctttaaaacgtgctcttcgtaggcccggctactccaagaacagtgcctcccgccagacccaggcggcttccttcacccgcaacccgagagacgacccgccgggcccgccccgcggaagccgccggttgccaggccaaggagtggactagggtcgccggggaagcggtttgggagagcccatggtgactgcgtgagtggagcccagctgtgtggatgccccagcatggatgactacatggtcctgagaatgattggggagggctccttcggcagagctcttttggttcagcatgaaagcagtaatcagatgtttgccatgaaagaaataaggcttcccaagtctttctctaatacacagaattctaggaaggaggctgttcttttagccaaaatgaaacaccctaatattgttgccttcaaagaatcatttgaagctgaaggacacttgtatattgtgatggaatactgtgatggaggggatctaatgcaaaagattaaacagcagaaaggaaagttatttcctgaagacatgatacttaattggtttacccaaatgtgccttggagtaaatcacattcacaagaaacgtgtgctacacagagatatcaagtccaagaatatcttcctcactcagaatggaaaagtgaaattgggagactttggatctgcccgtcttctctccaatccgatggcatttgcttgtacctatgtgggaactccttattatgtgcctccagaaatttgggaaaacctgccttataacaataaaagtgacatctggtccttgggttgcatcctgtatgaactctgtacccttaagcatccatttcaggcaaatagttggaaaaatcttatcctcaaagtatgtcaagggtgcatcagtccactgccgtctcattactcctatgaacttcagttcctagtcaagcagatgtttaaaaggaatccctcacatcgcccctcggctacaacgcttctctctcgaggcatcgtagctcggcttgtccagaagtgcttaccccccgagatcatcatggaatatggtgaggaagtattagaagaaataaaaaattcgaagcataacacaccaagaaaaaaaacaaaccccagcagaatcaggatagctttgggaaatgaagcaagcacagtgcaagaggaagaacaagatagaaagggtagccatactgatttggaaagcattaatgaaaatttagttgaaagtgcattgagaagagtaaacagagaagaaaaaggtaataagtcagtccatctgaggaaagccagttcaccaaatcttcatagacgacagtgggagaaaaatgtacccaatacagctcttacagctttggaaaatgcatccatactcacctccagtttaacagcagaggacgatagaggtggttctgtaataaagtacagcaaaaatactactcgtaagcagtggctcaaagagacccctgacactttgttgaacatccttaagaatgctgatctcagcttggcttttcaaacatacacaatatatagaccaggttcagaagggttcttgaaaggccccctgtctgaagaaacagaagcatcggacagtgttgatggaggtcacgattctgtcattttggatccagagcgacttgagcctgggctagatgaggaggacacggactttgaggaggaagatgacaaccccgactgggtgtcagagctgaagaagcgagctggatggcaaggcctgtgcgacagataatgcctgaggaaatgttcctgagtcacgctgaggagaggcttcactcaggagttcatgctgagatgatcatgagttcatgcgacgtatattttcctttggaaacagaatgaagcagaggaaactcttaatacttaaaatcgttcttgattagtatcgtgagtttgaaaagtctagaactcctgtaagtttttgaactcaagggagaaggtatagtggaatgagtgtgagcatcgggctttgcagtcccatagaacagaaatgggatgctagcgtgccactacctacttgtgtgattgtgggaaattacttaacctcttcaagccccaatttcctcaaccataaaatgaagataataatgcctacctcagagggatgctgaccacagacctttatagcagcccgtatgatattattcacattatgatatgtgtttattattatgtgactctttttacatttcctaaaggtttgagaattaaatatatttaattatgattta

SEQ ID NO: 159433 - DNA, 2072 bp, Homo sapiens
  Payload ID: 11199
  Gene Symbol: NEK3
  Gene Name: NIMA-related kinase 3
  ENST ID: ENST00000620675
  CDS Start-End: 76-1569
gggtcgccggggaagcggtttgggagagcccatggtgactgcgtgagtggagcccagctgtgtggatgccccagcatggatgactacatggtcctgagaatgattggggagggctccttcggcagagctcttttggttcagcatgaaagcagtaatcagatgtttgccatgaaagaaataaggcttcccaagtctttctctaatacacagaattctaggaaggaggctgttcttttagccaaaatgaaacaccctaatattgttgccttcaaagaatcatttgaagctgaaggacacttgtatattgtgatggaatactgtgatggaggggatctaatgcaaaagattaaacagcagaaaggaaagttatttcctgaagacatgatacttaattggtttacccaaatgtgccttggagtaaatcacattcacaagaaacgtgtgctacacagagatatcaagtccaagaatatcttcctcactcagaatggaaaagtgaaattgggagactttggatctgcccgtcttctctccaatccgatggcatttgcttgtacctatgtgggaactccttattatgtgcctccagaaatttgggaaaacctgccttataacaataaaagtgacatctggtccttgggttgcatcctgtatgaactctgtacccttaagcatccatttcaggcaaatagttggaaaaatcttatcctcaaagtatgtcaagggtgcatcagtccactgccgtctcattactcctatgaacttcagttcctagtcaagcagatgtttaaaaggaatccctcacatcgcccctcggctacaacgcttctctctcgaggcatcgtagctcggcttgtccagaagtgcttaccccccgagatcatcatggaatatggtgaggaagtattagaagaaataaaaaattcgaagcataacacaccaagaaaaaaaacaaaccccagcagaatcaggatagctttgggaaatgaagcaagcacagtgcaagaggaagaacaagatagaaagggtagccatactgatttggaaagcattaatgaaaatttagttgaaagtgcattgagaagagtaaacagagaagaaaaagccagttcaccaaatcttcatagacgacagtgggagaaaaatgtacccaatacagctcttacagctttggaaaatgcatccatactcacctccagtttaacagcagaggacgatagaggtggttctgtaataaagtacagcaaaaatactactcgtaagcagtggctcaaagagacccctgacactttgttgaacatccttaagaatgctgatctcagcttggcttttcaaacatacacaatatatagaccaggttcagaagggttcttgaaaggccccctgtctgaagaaacagaagcatcggacagtgttgatggaggtcacgattctgtcattttggatccagagcgacttgagcctgggctagatgaggaggacacggactttgaggaggaagatgacaaccccgactgggtgtcagagctgaagaagcgagctggatggcaaggcctgtgcgacagataatgcctgaggaaatgttcctgagtcacgctgaggagaggcttcactcaggagttcatgctgagatgatcatgagttcatgcgacgtatattttcctttggaaacagaatgaagcagaggaaactcttaatacttaaaatcgttcttgattagtatcgtgagtttgaaaagtctagaactcctgtaagtttttgaactcaagggagaaggtatagtggaatgagtgtgagcatcgggctttgcagtcccatagaacagaaatgggatgctagcgtgccactacctacttgtgtgattgtgggaaattacttaacctcttcaagccccaatttcctcaaccataaaatgaagataataatgcctacctcagagggatgctgaccacagacctttatagcagcccgtatgatattattcacattatgatatgtgtttattattatgtgactctttttacatttcctaaaggtttgagaattaaatatatttaattatgatttagtaa

SEQ ID NO: 159434 - DNA, 544 bp, Homo sapiens
  Payload ID: 11199
  Gene Symbol: NEK3
  Gene Name: NIMA-related kinase 3
  ENST ID: ENST00000618856
  CDS Start-End: 1-544
tggaatatggtgaggaagtattagaagaaataaaaaattcgaagcataacacaccaagaaaaaaaacaaaccccagcagaatcaggatagctttgggaaatgaagcaagcacagtgcaagaggaagaacaagatagaaagggtagccatactgatttggaaagcattaatgaaaatttagttgaaagtgcattgagaagagtaaacagagaagaaaaaggtaataagtcagtccatctgaggaaagccagttcaccaaatcttcatagacgacagtgggagaaaaatgtacccaatacagctcttacagctttggaaaatgcatccatactcacctccagtttaacagcagaggacgatagaggttcagaagggttcttgaaaggccccctgtctgaagaaacagaagcatcggacagtgttgatggaggtcacgattctgtcattttggatccagagcgacttgagcctgggctagatgaggaggacacggactttgaggaggaagatgacaaccccgactgggtgtcagagctgaagaagcg

SEQ ID NO: 159435 - DNA, 2345 bp, Homo sapiens
  Payload ID: 11199
  Gene Symbol: NEK3
  Gene Name: NIMA-related kinase 3
  Uniprot ID: P51956
  ENST ID: ENST00000611833
  CDS Start-End: 377-1846
cacatagctagtaagttctagctagcactgagtgctgtgcccgtgaaatttatctacataggctttcacttaacctgcagacagaactcagttagtcggggacaatttccctcaatgttaacagcactgttccaccgcaacgtggaacaacagctttaaaacgtgctcttcgtaggcccggctactccaagaacagtgcctcccgccagacccaggcggcttccttcacccgcaacccgagagacgacccgccgggcccgccccgcggaagccgccggttgccaggccaaggagtggactagggtcgccggggaagcggtttgggagagcccatggtgactgcgtgagtggagcccagctgtgtggatgccccagcatggatgactacatggtcctgagaatgattggggagggctccttcggcagagctcttttggttcagcatgaaagcagtaatcagatgtttgccatgaaagaaataaggcttcccaagtctttctctaatacacagaattctaggaaggaggctgttcttttagccaaaatgaaacaccctaatattgttgccttcaaagaatcatttgaagctgaaggacacttgtatattgtgatggaatactgtgatggaggggatctaatgcaaaagattaaacagcagaaaggaaagttatttcctgaagacatgatacttaattggtttacccaaatgtgccttggagtaaatcacattcacaagaaacgtgtgctacacagagatatcaagtccaagaatatcttcctcactcagaatggaaaagtgaaattgggagactttggatctgcccgtcttctctccaatccgatggcatttgcttgtacctatgtgggaactccttattatgtgcctccagaaatttgggaaaacctgccttataacaataaaagtgacatctggtccttgggttgcatcctgtatgaactctgtacccttaagcatccatttcaggcaaatagttggaaaaatcttatcctcaaagtatgtcaagggtgcatcagtccactgccgtctcattactcctatgaacttcagttcctagtcaagcagatgtttaaaaggaatccctcacatcgcccctcggctacaacgcttctctctcgaggcatcgtagctcggcttgtccagaagtgcttaccccccgagatcatcatggaatatggtgaggaagtattagaagaaataaaaaattcgaagcataacacaccaagaaaaaaacaagaggaagaacaagatagaaagggtagccatactgatttggaaagcattaatgaaaatttagttgaaagtgcattgagaagagtaaacagagaagaaaaaggtaataagtcagtccatctgaggaaagccagttcaccaaatcttcatagacgacagtgggagaaaaatgtacccaatacagctcttacagctttggaaaatgcatccatactcacctccagtttaacagcagaggacgatagaggtggttctgtaataaagtacagcaaaaatactactcgtaagcagtggctcaaagagacccctgacactttgttgaacatccttaagaatgctgatctcagcttggcttttcaaacatacacaatatatagaccaggttcagaagggttcttgaaaggccccctgtctgaagaaacagaagcatcggacagtgttgatggaggtcacgattctgtcattttggatccagagcgacttgagcctgggctagatgaggaggacacggactttgaggaggaagatgacaaccccgactgggtgtcagagctgaagaagcgagctggatggcaaggcctgtgcgacagataatgcctgaggaaatgttcctgagtcacgctgaggagaggcttcactcaggagttcatgctgagatgatcatgagttcatgcgacgtatattttcctttggaaacagaatgaagcagaggaaactcttaatacttaaaatcgttcttgattagtatcgtgagtttgaaaagtctagaactcctgtaagtttttgaactcaagggagaaggtatagtggaatgagtgtgagcatcgggctttgcagtcccatagaacagaaatgggatgctagcgtgccactacctacttgtgtgattgtgggaaattacttaacctcttcaagccccaatttcctcaaccataaaatgaagataataatgcctacctcagagggatgctgaccacagacctttatagcagcccgtatgatattattcacattatgatatgtgtttattattatgtgactctttttacatttcctaaaggtttgagaattaaatatatttaattatgattta

SEQ ID NO: 159436 - DNA, 2414 bp, Homo sapiens
  Payload ID: 11199
  Gene Symbol: NEK3
  Gene Name: NIMA-related kinase 3
  Uniprot ID: P51956
  ENST ID: ENST00000618534
  CDS Start-End: 396-1916
gtccccgccctggcgggctgcctctagaacgaggagggcggcgcgtggtcgcggcgcggagccgagtgggagcgaggggtagacgcgccccggacgcgcggccgcgcccctcacttccgccccgcggtctggaccactcgccgcaaacccgcaagtccctcgccgccttggggtctgggcgcgcggtgccgtgggggtcagcagggcggagcggcttttccaggagaaagggccctcacgggtgagcggggcgactgggctcccccgcggtgcagttgccccgcgggcgccggccccggctcaacggattcttctcgctcgctgcccggaaagaaccatttgggagagcccatggtgactgcgtgagtggagcccagctgtgtggatgccccagcatggatgactacatggtcctgagaatgattggggagggctccttcggcagagctcttttggttcagcatgaaagcagtaatcagatgtttgccatgaaagaaataaggcttcccaagtctttctctaatacacagaattctaggaaggaggctgttcttttagccaaaatgaaacaccctaatattgttgccttcaaagaatcatttgaagctgaaggacacttgtatattgtgatggaatactgtgatggaggggatctaatgcaaaagattaaacagcagaaaggaaagttatttcctgaagacatgatacttaattggtttacccaaatgtgccttggagtaaatcacattcacaagaaacgtgtgctacacagagatatcaagtccaagaatatcttcctcactcagaatggaaaagtgaaattgggagactttggatctgcccgtcttctctccaatccgatggcatttgcttgtacctatgtgggaactccttattatgtgcctccagaaatttgggaaaacctgccttataacaataaaagtgacatctggtccttgggttgcatcctgtatgaactctgtacccttaagcatccatttcaggcaaatagttggaaaaatcttatcctcaaagtatgtcaagggtgcatcagtccactgccgtctcattactcctatgaacttcagttcctagtcaagcagatgtttaaaaggaatccctcacatcgcccctcggctacaacgcttctctctcgaggcatcgtagctcggcttgtccagaagtgcttaccccccgagatcatcatggaatatggtgaggaagtattagaagaaataaaaaattcgaagcataacacaccaagaaaaaaaacaaaccccagcagaatcaggatagctttgggaaatgaagcaagcacagtgcaagaggaagaacaagatagaaagggtagccatactgatttggaaagcattaatgaaaatttagttgaaagtgcattgagaagagtaaacagagaagaaaaaggtaataagtcagtccatctgaggaaagccagttcaccaaatcttcatagacgacagtgggagaaaaatgtacccaatacagctcttacagctttggaaaatgcatccatactcacctccagtttaacagcagaggacgatagaggtggttctgtaataaagtacagcaaaaatactactcgtaagcagtggctcaaagagacccctgacactttgttgaacatccttaagaatgctgatctcagcttggcttttcaaacatacacaatatatagaccaggttcagaagggttcttgaaaggccccctgtctgaagaaacagaagcatcggacagtgttgatggaggtcacgattctgtcattttggatccagagcgacttgagcctgggctagatgaggaggacacggactttgaggaggaagatgacaaccccgactgggtgtcagagctgaagaagcgagctggatggcaaggcctgtgcgacagataatgcctgaggaaatgttcctgagtcacgctgaggagaggcttcactcaggagttcatgctgagatgatcatgagttcatgcgacgtatattttcctttggaaacagaatgaagcagaggaaactcttaatacttaaaatcgttcttgattagtatcgtgagtttgaaaagtctagaactcctgtaagtttttgaactcaagggagaaggtatagtggaatgagtgtgagcatcgggctttgcagtcccatagaacagaaatgggatgctagcgtgccactacctacttgtgtgattgtgggaaattacttaacctcttcaagccccaatttcctcaaccataaaatgaagataataatgcctacctcagagggatgctgaccacagacctttatagcagcccgtatgatattattcacattatgatatgtgtttattattatgtgactctttttacatttcctaaaggtttgagaattaaatatatttaattatgattt

SEQ ID NO: 159437 - DNA, 3256 bp, Homo sapiens
  Payload ID: 11199
  Gene Symbol: NEK3
  Gene Name: NIMA-related kinase 3
  ENST ID: ENST00000617054
  CDS Start-End: 1295-2191
attgtgcctttcctctctcagggagtgccaagaaaccatctggttcatgccagaaacttgggagtcaaccttgcccccttctctgcttgccccccataaatctgccaccacaaatcctgtcaactgttcttacatctttccttcccattttttctgaccccattgcctccactctattccatttcattattttcctgccttttctattgttggagcctcctaactggcctgtgtctctgagctggccttcctgcccctcctccactggtccatttaatctgcaatctgagtgaatgttttttctaatatgcaaatatgattatattgccttcttggttaaaatgcttcagcagcttgttacattcttctttcaatttcttgaactgaatgtaatttctttagctcttaaatatgcaatttcctcttccttgattactcttttcctcctctttgtctagccaagtttcattcatccttcaggcttcagcttaaatagcctacatttgttgaggtttatggttatctctgcatgggatgtccacgttggcagggactatgagagatttttcagattataacatctgactcagagttggtgctcagtgtctgcctgttgtatgtagtataggggaggaaaaacattttttctctgccctcttaggttcagtagctgggccctgcaaaataaactgatgaaagatagattaacaggaaaaaaggtttatgcataaatgtaaagaagtggttagaccagggggctcatatgccattttaacaaagagtgataaattatagagaagtaactagacaaaagtaggggaatgcttcttgggtaaattgtaggaaggtaaatatatggcggaagctaacataagataagggttattcagtaaagtttgttatgtggactcaagttggtgccttccccattggtaagagttgctctcctcttcctggtactggaaaggaagacacatttacaaatggatatttattacctgtacataggaaaatttatgccctgcatttatacaaaaaagggagggcaaagagcaaattggtttcagctcaaaacaattcttacatgaaagtggcatattttggggtagcatacactgatcctcttcaaaaggaataatttgcttttctcttatcatggttatgagagctactttgaattaatttttgctttttgaaagtacatttaattctcaaatgtttctgcttttgaatgcagtttgggagagcccatggtgactgcgtgagtggagcccagctgtgtggatgccccagcatggatgactacatggtcctgagaatgattggggagggctccttcggcagagctcttttggttcagcatgaaagcagtaatcagatgtttgccatgaaagaaataaggcttcccaagtctttctctaatacacagaattctaggaaggaggctgttcttttagccaaaatgaaacaccctaatattgttgccttcaaagaatcatttgaagctgaaggacacttgtatattgtgatggaatactgtgatggaggggatctaatgcaaaagattaaacagcagaaaggaaagttatttcctgaagacatgatacttaattggtttacccaaatgtgccttggagtaaatcacattcacaagaaacgtgtgctacacagagatatcaagtccaagaatatcttcctcactcagaatggaaaagtgaaattgggagactttggatctgcccgtcttctctccaatccgatggcatttgcttgtacctatgtgggaactccttattatgtgcctccagaaatttgggaaaacctgccttataacaataaaagtgacatctggtccttgggttgcatcctgtatgaactctgtacccttaagcatccatttcaggcaaatagttggaaaaatcttatcctcaaagtatgtcaagggtgcatcagtccactgccgtctcattactcctatgaacttcagttcctagtcaagcagatgtttaaaaggaatccctcacatcgcccctcggctacaacgcttctctctcgaggcatcgtagctcggcttgtccagaagtgcttaccccccgagatcatcatggaatatggtgaggaagtattagaagaaataaaaaattcgaagcataacacaccaagaaaaaaaacaagaggaagaacaagatagaaagggtagccatactgatttggaaagcattaatgaaaatttagttgaaagtgcattgagaagagtaaacagagaagaaaaaggtaataagtcagtccatctgaggaaagccagttcaccaaatcttcatagacgacagtgggagaaaaatgtacccaatacagctcttacagctttggaaaatgcatccatactcacctccagtttaacagcagaggacgatagaggtggttctgtaataaagtacagcaaaaatactactcgtaagcagtggctcaaagagacccctgacactttgttgaacatccttaagaatgctgatctcagcttggcttttcaaacatacacaatatatagaccaggttcagaagggttcttgaaaggccccctgtctgaagaaacagaagcatcggacagtgttgatggaggtcacgattctgtcattttggatccagagcgacttgagcctgggctagatgaggaggacacggactttgaggaggaagatgacaaccccgactgggtgtcagagctgaagaagcgagctggatggcaaggcctgtgcgacagataatgcctgaggaaatgttcctgagtcacgctgaggagaggcttcactcaggagttcatgctgagatgatcatgagttcatgcgacgtatattttcctttggaaacagaatgaagcagaggaaactcttaatacttaaaatcgttcttgattagtatcgtgagtttgaaaagtctagaactcctgtaagtttttgaactcaagggagaaggtatagtggaatgagtgtgagcatcgggctttgcagtcccatagaacagaaatgggatgctagcgtgccactacctacttgtgtgattgtgggaaattacttaacctcttcaagccccaatttcctcaaccataaaatgaagataataatgcctacctcagagggatgctgaccacagacctttatagcagcccgtatgatattattcacattatgatatgtgtttattattatgtgactctttttacatttcctaaaggtttgagaattaaatatatttaatt

SEQ ID NO: 159438 - DNA, 141 bp, Homo sapiens
  Payload ID: 11199
  Gene Symbol: NEK3
  Gene Name: NIMA-related kinase 3
  ENST ID: ENST00000629912
  CDS Start-End: 1-141
atggatgactacatggtcctgagaatgattggggagggctccttcggcagagctcttttggttcagcatgaaagcagtaatcagatgtttgccatgaaagaaataaggcttcccaagctgaaggacacttgtatattgtga

SEQ ID NO: 159439 - DNA, 6057 bp, Homo sapiens
  Payload ID: 11200
  Gene Symbol: NEK4
  Gene Name: NIMA-related kinase 4
  Uniprot ID: P51957
  ENST ID: ENST00000233027
  CDS Start-End: 204-2729
agcatgcgcagaactgctcccggcccggatcgctatggcagcggcgtcgtcgcgggccgggccccagcaatcccgcccgggcccggctgcctcaacagccgcccccactgccccctctcgggcatgaaccgagcttcttgttgccgcccgctgccctacccgccgctgccgccgcatcccgactctgggccagcgctgggaacatgcccctggccgcctactgctacctgcgggtcgtgggcaaggggagctatggagaggtgacgcttgtgaagcaccggcgggacggcaagcagtatgtcatcaaaaaactgaacctccgaaatgcctctagccgagagcggcgagctgctgaacaggaagcccagctcttgtctcagttgaagcatcccaacattgtcacctacaaggagtcatgggaaggaggagatggtctgctctacattgtcatgggcttctgtgaaggaggtgatttgtaccgaaagctcaaggagcagaaagggcagcttctgcctgagaatcaggtggtagagtggtttgtacagatcgccatggctttgcagtatttacatgaaaaacacatccttcatcgagatctgaaaactcaaaatgtcttcctaacaagaacaaacatcatcaaagtaggggacctaggaattgcccgagtgttagagaaccactgtgacatggctagcaccctcattggcacaccctactacatgagccctgaattgttctcaaacaaaccctacaactataagtctgatgtttgggctctaggatgctgtgtctatgaaatggccaccttgaagcatgctttcaatgcaaaagatatgaattctttagtttatcggattattgaaggaaagctgccaccaatgccaagagattacagcccagagctggcagaactgataagaacaatgctgagcaaaaggcctgaagaaaggccgtctgtgaggagcatcctgaggcagccttatataaagcggcaaatctccttctttttggaggccacaaagataaaaacctccaaaaataacattaaaaatggtgactctcaatccaagccttttgctacagtggtttctggagaggcagaatcaaatcatgaagtaatccacccccaaccactctcttctgagggctcccagacatatataatgggtgaaggcaaatgtttgtcccaggagaaacccagggcctctggtctcttgaagtcacctgccagtctgaaagcccatacctgcaaacaggacttgagcaataccacagaactagccacaatcagtagcgtaaatattgacatcttacctgcaaaagggagggattcagtgagtgatggctttgttcaggagaatcagccaagatatttggatgcctctaatgagttaggaggtatatgcagtatttctcaagtggaagaggagatgctgcaggacaacactaaatccagtgcccagcctgaaaacctgattcccatgtggtcctctgacattgtcactggggaaaagaatgaaccagtgaagcctctgcagcccctaatcaaagaacaaaagccaaaggaccagagtcttgccctgtcgcccaagctggagtgcagtggcacaatcttggctcacagcaacctccgcctcctgggttcaagtgattctccagcctcagcctcccgagtagctgggattacaggcgtgtgccaccacgcccaggatcaagttgctggtgaatgtattatagaaaaacagggcagaatccacccagatttacagccacacaactctgggtctgaaccttccctgtctcgacagcgacggcaaaagaggagagaacagactgagcacagaggggaaaagagacaggtccgcagagatctctttgctttccaagagtcgcctcctcgatttttgccttctcatcccattgttgggaaagtggatgtcacatcaacacaaaaagaggctgaaaaccaacgtagagtggtcactgggtctgtgagcagttcaaggagcagtgagatgtcatcatcaaaggatcgaccattatcagccagagagaggaggcgactaaagcagtcacaggaagaaatgtcctcttcaggcccttcagtgaggaaagcgtctctgagtgtagcagggccaggaaaaccccaggaagaagaccagcccttgcctgcccgacggctctcctctgactgcagcgtcactcaggaaaggaaacagattcattgtctgtctgaggatgagttaagttcttctacaagttcaactgataagtcagatggggattacggggaagggaaaggtcagacaaatgaaattaatgccttggtacaattgatgactcagaccctgaaactggattctaaagagagctgtgaagatgtcccggtagcaaacccagtgtcagaattcaaacttcatcggaaatatcgggacacactgatacttcatgggaaggttgcagaagaggcagaggaaatccattttaaagagctaccttcagctattatgccaggttctgaaaagatcaggagactagttgaagtcttgagaactgatgtaattcgtggcctgggagttcagcttttagagcaggtgtatgatcttttggaggaggaggatgaatttgatagagaggtacgtttgcgggagcacatgggtgaaaagtatacaacttacagtgtgaaagctcgccagttgaaattttttgaagaaaacatgaatttttgagcatttgtcctaatctgctgccagaattaaagacctatttttagaggattttggcttaaaaagcaagggcaaacagtcatttggaagccactcaccactgttttatatctcttttttatatctctttggcgtttccctacagaaaagaaattggacagaacagaataatatgaagcaggatcacaaaagaaaaaaaactttggctttcatattctctttgtgaggacaaatctgttgtttgtttgattactgtttactgagccttaatccaccaagtttatatttagaattttatttttttaaggtactaattaacttaaacacagagctataaaatgctggattgaaaattttatattgtaatgtagagataaaagcagtaggagaaacaaatgacataatatgtcgtcataattcctgctattgttaataaccttaaggagtagttgataaattataaaattttaaaaagtcaattcagttctagaaatagatttaaagaatatgaagttctatctagtacttgagcagctgtatttcttttctacacattgatggacttttaatattttattctcatttaatataaacctcatctagggtatatacaaattaaaactgagacacattggctttgtaaatcagtatgtttttacataatggttttgttagatttatttttccatcagtgaaaacatttcttaaacacaaatttcatttccatttaagcaatttgtaagcaaagtccaggtccatttagtttttggatatatttaatgtttgtctcctgaagtttgtcttcatgtactgtaagatattagttgtctttccatgttttaaatgtatgattatatagcacatattttattagttgtttaataagaggtaatacccatctaggaaagaaattttatgaagttaaatacaagtcttgaatagtacattttcacttctgtattcgagggactctaaaaataaatattgctccagaaatgttttcaggtgttttttttttgagacagagtttcactctgtcagtcaggctggagtgcagtggcatgatctcaactcactgcaacctccacttctggggctcaagtggtattcctgcctgagcctccctagtagctgagaccacaggcgtgtgccaccacacctggctagtttttgtattttttgtagagacagggttacaccacattgcccaggctgatctcagaactcctgggctcaagcaatccactcacctcagcctcccaaagtgccaggattacaggaatgagccactgtgcccagccctgttttcagtttctataactaaaaatatatctatctttgaaaattacacacacacacaaatactctaatgaaatgttccctttacagccacttaacaatttttttttttttttaagacacagtcttgctctgtcacccaggctgaagtgcagtggcccaatctcagatcactgcaagctccgcctcccaggttcactccattctcctacctcatcctctcgagtagctgggactacagttgcccgccaccatgcccggctaatttttttgtatttttttagtagagacagggtttcaccgtgttagccaggatggtctcaatctcctgacctcgtgatctgcccgcctcggcctcccaaagtgctgggattacaggcgtgagccaccgcgcccggcacacttaacagatttttatttagagtttactgtgtgccaggttctctgccaggagctggggatatagtggtgaataaaacaatacttcctgcccttttacagtgctcacagcctggtttctgataactcttattttcactttgaagggtttgctagaactcaacttgcaaaaccatcaagtcccaatgcccagttgggaacaaatctttggcaaacttggtatccttgagctattcacctttccgtgcatgttttggaaatccacatcgttctggagagtcatcagttttacttaatttttctaatgtattggtataaagtaggtattttattagaattaaaggaatctcacccatatcttttttttttttttttttttttgagacagggtcttgctctgtcacccagcctggagtgcagtgaggtgatcatagctcactgcagccttgacctcctgggcttaagtgatcctcccacctcagcccctcaagtagctaggaccacaggcatgcaccaccacacctggctaatttttaaaattttttgtggagaggaagtctgtgttgcccaggctggtctcaaactgcattcaagcagtcctcctgcatcggcctctgaaagtgctgggattataggcatgaaccaccacacctgacttcccccatactttcttattaattaccatactgtatatttttattttgtttaaacatcttttcttcccacttttatcgtttttacttgagtgcttaattcatcttcctaaattaatttaaaaactcatctttaagactgtgaattttcttccgaatatacctttggccacagttcagagactttgatgtgttactcttttggcattggttctaaaatgtcaatcattcttttttttttttttttgagatggagtcttcttgttgcccaggctggagtacagtggtgcgatcttggctcactgcagcctacgcctcctgggttcaagttcccctccctcagcctcccgagtagctgggattacaggcacacaccaccatgcctggctgattttcgttatttttagtagagatggagtttcaccatgttggccaggctggtcttgaactcctgacctcaggtgatctgcctgccttggcctccctaaatgctgggattacaggcttgaggcaccatgcctggcctaaagtgtcagtaattctgatttcggttttctcttttagaagttttgatttccacagacttacaaagctaaggaagttttatgtccttgctctggctacactgcagtgttactgaatatcacctgcacaacctttactgcttgcagttttttttttcctgttgctttgtacatgatccgttattcaaatggccttataggcattcaataaaggtgaaatgttaaatacaaaatcacttgtctattaaattttattcaaggttctatataagatctgataaatggaactttgtgatggaaatgttttatatggtagccactagtcacatatagctattgaacctttgaatcatggctagttttagagttttatattttaattttaattaaatagacgtgtctagtggcaccatattgtacaatgcagttctcattcaataaatcttaagtacttaa

SEQ ID NO: 159440 - DNA, 2576 bp, Homo sapiens
  Payload ID: 11200
  Gene Symbol: NEK4
  Gene Name: NIMA-related kinase 4
  Uniprot ID: P51957
  ENST ID: ENST00000383721
  CDS Start-End: 194-2539
gaactgctcccggcccggatcgctatggcagcggcgtcgtcgcgggccgggccccagcaatcccgcccgggcccggctgcctcaacagccgcccccactgccccctctcgggcatgaaccgagcttcttgttgccgcccgctgccctacccgccgctgccgccgcatcccgactctgggccagcgctgggaacatgcccctggccgcctactgctacctgcgggtcgtgggcaaggggagctatggagaggtgacgcttgtgaagcaccggcgggacggcaagcagtatgtcatcaaaaaactgaacctccgaaatgcctctagccgagagcggcgagctgctgaacaggaagcccagctcttgtctcagttgaagcatcccaacattgtcacctacaaggagtcatgggaaggaggagatggtctgctctacattgtcatgggcttctgtgaaggaggtgatttgtaccgaaagctcaaggagcagaaagggcagcttctgcctgagaatcaggtggtagagtggtttgtacagatcgccatggctttgcagtatttacatgaaaaacacatccttcatcgagatctgaaaactcaaaatgtcttcctaacaagaacaaacatcatcaaagtaggggacctaggaattgcccgagtgttagagaaccactgtgacatggctagcaccctcattggcacaccctactacatgagccctgaattgttctcaaacaaaccctacaactataagtctgatgtttgggctctaggatgctgtgtctatgaaatggccaccttgaagcatgctttcaatgcaaaagatatgaattctttagtttatcggattattgaaggaaagctgccaccaatgccaagagattacagcccagagctggcagaactgataagaacaatgctgagcaaaaggcctgaagaaaggccgtctgtgaggagcatcctgaggcagccttatataaagcggcaaatctccttctttttggaggccacaaagataaaaacctccaaaaataacattaaaaatggtgactctcaatccaagccttttgctacagtggtttctggagaggcagaatcaaatcatgaagtaatccacccccaaccactctcttctgagggctcccagacatatataatgggtgaaggcaaatgtttgtcccaggagaaacccagggcctctggtctcttgaagtcacctgccagtctgaaagcccatacctgcaaacaggacttgagcaataccacagaactagccacaatcagtagcgtaaatattgacatcttacctgcaaaagggagggattcagtgagtgatggctttgttcaggagaatcagccaagatatttggatgcctctaatgagttaggaggtatatgcagtatttctcaagtggaagaggagatgctgcaggacaacactaaatccagtgcccagcctgaaaacctgattcccatgtggtcctctgacattgtcactggggaaaagaatgaaccagtgaagcctctgcagcccctaatcaaagaacaaaagccaaaggaccaggatcaagttgctggtgaatgtattatagaaaaacagggcagaatccacccagatttacagccacacaactctgggtctgaaccttccctgtctcgacagcgacggcaaaagaggagagaacagactgagcacagaggggaaaagagacaggtccgcagagatctctttgctttccaagagtcgcctcctcgatttttgccttctcatcccattgttgggaaagtggatgtcacatcaacacaaaaagaggctgaaaaccaacgtagagtggtcactgggtctgtgagcagttcaaggagcagtgagatgtcatcatcaaaggatcgaccattatcagccagagagaggaggcgactaaagcagtcacaggaagaaatgtcctcttcaggcccttcagtgaggaaagcgtctctgagtgtagcagggccaggaaaaccccaggaagaagaccagcccttgcctgcccgacggctctcctctgactgcagcgtcactcaggaaaggaaacagattcattgtctgtctgaggatgagttaagttcttctacaagttcaactgataagtcagatggggattacggggaagggaaaggtcagacaaatgaaattaatgccttggtacaattgatgactcagaccctgaaactggattctaaagagagctgtgaagatgtcccggtagcaaacccagtgtcagaattcaaacttcatcggaaatatcgggacacactgatacttcatgggaaggttgcagaagaggcagaggaaatccattttaaagagctaccttcagctattatgccaggttctgaaaagatcaggagactagttgaagtcttgagaactgatgtaattcgtggcctgggagttcagcttttagagcaggtgtatgatcttttggaggaggaggatgaatttgatagagaggtgagtgtctcattaactgtatcaagatgcttatgttatagaattttttaaacaaccttttgaaatataaatcacacataacaattca

SEQ ID NO: 159441 - DNA, 582 bp, Homo sapiens
  Payload ID: 11200
  Gene Symbol: NEK4
  Gene Name: NIMA-related kinase 4
  ENST ID: ENST00000496822
  CDS Start-End: 201-314
atgcgcagaactgctcccggcccggatcgctatggcagcggcgtcgtcgcgggccgggccccagcaatcccgcccgggcccggctgcctcaacagccgcccccactgccccctctcgggcatgaaccgagcttcttgttgccgcccgctgccctacccgccgctgccgccgcatcccgactctgggccagcgctgggaacatgcccctggccgcctactgctacctgcgggtcgtgggcaaggggagctatggagaggtgacgcttgtgaagcaccggcgggacggcaagcagccgagagcggcgagctgctgaacaggaagcccagctcttgtctcagttgaagcatcccaacattgtcacctacaaggagtcatgggaaggaggagatggtctgctctacattgtcatgggcttctgtgaaggaggtgatttgtaccgaaagctcaaggagcagaaagggcagcttctgcctgagaatcaggtggtagagtggtttgtacagatcgccatggctttgcagtatttacatgaaaaacacatccttcatcgagatctgaaaactcaaaatgtcttcctaaca

SEQ ID NO: 159442 - DNA, 2276 bp, Homo sapiens
  Payload ID: 11200
  Gene Symbol: NEK4
  Gene Name: NIMA-related kinase 4
  ENST ID: ENST00000461689
  CDS Start-End: 111-2276
aacagccgcccccactgccccctctcgggcatgaaccgagcttcttgttgccgcccgctgccctacccgccgctgccgccgcatcccgactctgggccagcgctgggaacatgcccctggccgcctactgctacctgcgggtcgtgggcaaggggagctatggagaggtgacgcttgtgaagcaccggcgggacggcaagcagtatttacatgaaaaacacatccttcatcgagatctgaaaactcaaaatgtcttcctaacaagaacaaacatcatcaaagtaggggacctaggaattgcccgagtgttagagaaccactgtgacatggctagcaccctcattggcacaccctactacatgagccctgaattgttctcaaacaaaccctacaactataagtctgatgtttgggctctaggatgctgtgtctatgaaatggccaccttgaagcatgctttcaatgcaaaagatatgaattctttagtttatcggattattgaaggaaagctgccaccaatgccaagagattacagcccagagctggcagaactgataagaacaatgctgagcaaaaggcctgaagaaaggccgtctgtgaggagcatcctgaggcagccttatataaagcggcaaatctccttctttttggaggccacaaagataaaaacctccaaaaataacattaaaaatggtgactctcaatccaagccttttgctacagtggtttctggagaggcagaatcaaatcatgaagtaatccacccccaaccactctcttctgagggctcccagacatatataatgggtgaaggcaaatgtttgtcccaggagaaacccagggcctctggtctcttgaagtcacctgccagtctgaaagcccatacctgcaaacaggacttgagcaataccacagaactagccacaatcagtagcgtaaatattgacatcttacctgcaaaagggagggattcagtgagtgatggctttgttcaggagaatcagccaagatatttggatgcctctaatgagttaggaggtatatgcagtatttctcaagtggaagaggagatgctgcaggacaacactaaatccagtgcccagcctgaaaacctgattcccatgtggtcctctgacattgtcactggggaaaagaatgaaccagtgaagcctctgcagcccctaatcaaagaacaaaagccaaaggaccagagtcttgccctgtcgcccaagctggagtgcagtggcacaatcttggctcacagcaacctccgcctcctgggttcaagtgattctccagcctcagcctcccgagtagctgggattacaggcgtgtgccaccacgcccaggatcaagttgctggtgaatgtattatagaaaaacagggcagaatccacccagatttacagccacacaactctgggtctgaaccttccctgtctcgacagcgacggcaaaagaggagagaacagactgagcacagaggggaaaagagacaggtccgcagagatctctttgctttccaagagtcgcctcctcgatttttgccttctcatcccattgttgggaaagtggatgtcacatcaacacaaaaagaggctgaaaaccaacgtagagtggtcactgggtctgtgagcagttcaaggagcagtgagatgtcatcatcaaaggatcgaccattatcagccagagagaggaggcgactaaagcagtcacaggaagaaatgtcctcttcaggcccttcagtgaggaaagcgtctctgagtgtagcagggccaggaaaaccccaggaagaagaccagcccttgcctgcccgacggctctcctctgactgcagcgtcactcaggaaaggaaacagattcattgtctgtctgaggatgagttaagttcttctacaagttcaactgataagtcagatggggattacggggaagggaaaggtcagacaaatgaaattaatgccttggtacaattgatgactcagaccctgaaactggattctaaagagagctgtgaagatgtcccggtagcaaacccagtgtcagaattcaaacttcatcggaaatatcgggacacactgatacttcatgggaaggttgcagaagaggcagaggaaatccattttaaagagctaccttcagctattatgccaggttctgaaaagatcaggagactagttgaagtcttgagaactgatgtaattcgtggcctgggagttcagcttttagagcaggtgtatgatcttttggaggaggaggatgaatttgatagagag

SEQ ID NO: 159443 - DNA, 631 bp, Homo sapiens
  Payload ID: 11200
  Gene Symbol: NEK4
  Gene Name: NIMA-related kinase 4
  ENST ID: ENST00000487068
  CDS Start-End: 1-427
gctgcaggacaacactaaatccagtgcccagcctgaaaacctgattcccatgtggtcctctgacattgtcactggggaaaagaatgaaccagtgaagcctctgcagcccctaatcaaagaacaaaagccaaaggaccagagtcttgccctgtcgcccaagctggagtgcagtggcacaatcttggctcacagcaacctccgcctcctgggttcaagtgattctccagcctcagcctcccgagtagctgggattacaggcgtgtgccaccacgcccagatggagtctcactctgttgcccaggctggagtgcagtggtgcgatctcagcttactgcagcctccccctcccgggttcaagcaattcttctacctcagccttctgagtagctgggattacaggatcaagttgctggtgaatgtattatagaaaaacagggcagaatccacccagatttacagccacacaactctgggtctgaaccttccctgtctcgacagcgacggcaaaagaggagagaacagactgagcacagaggggaaaagagacaggtccgcagagatctctttgctttccaagagtcgcctcctcgatttttgccttctcatcccattgttgggaaagtggatgtca

SEQ ID NO: 159444 - DNA, 2452 bp, Homo sapiens
  Payload ID: 11200
  Gene Symbol: NEK4
  Gene Name: NIMA-related kinase 4
  Uniprot ID: P51957
  ENST ID: ENST00000535191
  CDS Start-End: 194-2452
gaactgctcccggcccggatcgctatggcagcggcgtcgtcgcgggccgggccccagcaatcccgcccgggcccggctgcctcaacagccgcccccactgccccctctcgggcatgaaccgagcttcttgttgccgcccgctgccctacccgccgctgccgccgcatcccgactctgggccagcgctgggaacatgcccctggccgcctactgctacctgcgggtcgtgggcaaggggagctatggagaggtgacgcttgtgaagcaccggcgggacggcaagcagtatttacatgaaaaacacatccttcatcgagatctgaaaactcaaaatgtcttcctaacaagaacaaacatcatcaaagtaggggacctaggaattgcccgagtgttagagaaccactgtgacatggctagcaccctcattggcacaccctactacatgagccctgaattgttctcaaacaaaccctacaactataagtctgatgtttgggctctaggatgctgtgtctatgaaatggccaccttgaagcatgctttcaatgcaaaagatatgaattctttagtttatcggattattgaaggaaagctgccaccaatgccaagagattacagcccagagctggcagaactgataagaacaatgctgagcaaaaggcctgaagaaaggccgtctgtgaggagcatcctgaggcagccttatataaagcggcaaatctccttctttttggaggccacaaagataaaaacctccaaaaataacattaaaaatggtgactctcaatccaagccttttgctacagtggtttctggagaggcagaatcaaatcatgaagtaatccacccccaaccactctcttctgagggctcccagacatatataatgggtgaaggcaaatgtttgtcccaggagaaacccagggcctctggtctcttgaagtcacctgccagtctgaaagcccatacctgcaaacaggacttgagcaataccacagaactagccacaatcagtagcgtaaatattgacatcttacctgcaaaagggagggattcagtgagtgatggctttgttcaggagaatcagccaagatatttggatgcctctaatgagttaggaggtatatgcagtatttctcaagtggaagaggagatgctgcaggacaacactaaatccagtgcccagcctgaaaacctgattcccatgtggtcctctgacattgtcactggggaaaagaatgaaccagtgaagcctctgcagcccctaatcaaagaacaaaagccaaaggaccagagtcttgccctgtcgcccaagctggagtgcagtggcacaatcttggctcacagcaacctccgcctcctgggttcaagtgattctccagcctcagcctcccgagtagctgggattacaggcgtgtgccaccacgcccaggatcaagttgctggtgaatgtattatagaaaaacagggcagaatccacccagatttacagccacacaactctgggtctgaaccttccctgtctcgacagcgacggcaaaagaggagagaacagactgagcacagaggggaaaagagacaggtccgcagagatctctttgctttccaagagtcgcctcctcgatttttgccttctcatcccattgttgggaaagtggatgtcacatcaacacaaaaagaggctgaaaaccaacgtagagtggtcactgggtctgtgagcagttcaaggagcagtgagatgtcatcatcaaaggatcgaccattatcagccagagagaggaggcgactaaagcagtcacaggaagaaatgtcctcttcaggcccttcagtgaggaaagcgtctctgagtgtagcagggccaggaaaaccccaggaagaagaccagcccttgcctgcccgacggctctcctctgactgcagcgtcactcaggaaaggaaacagattcattgtctgtctgaggatgagttaagttcttctacaagttcaactgataagtcagatggggattacggggaagggaaaggtcagacaaatgaaattaatgccttggtacaattgatgactcagaccctgaaactggattctaaagagagctgtgaagatgtcccggtagcaaacccagtgtcagaattcaaacttcatcggaaatatcgggacacactgatacttcatgggaaggttgcagaagaggcagaggaaatccattttaaagagctaccttcagctattatgccaggttctgaaaagatcaggagactagttgaagtcttgagaactgatgtaattcgtggcctgggagttcagcttttagagcaggtgtatgatcttttggaggaggaggatgaatttgatagagaggtacgtttgcgggagcacatgggtgaaaagtatacaacttacagtgtgaaagctcgccagttgaaattttttgaagaaaacatgaatttttga

SEQ ID NO: 159445 - DNA, 2918 bp, Homo sapiens
  Payload ID: 11201
  Gene Symbol: NEK5
  Gene Name: NIMA-related kinase 5
  Uniprot ID: Q6P3R8
  ENST ID: ENST00000355568
  CDS Start-End: 141-2267
cccggatccttccgggacgcttcgttggccccgcggagccggcggagcagttatctgtggccacaaagaaagttatttgtctctgtcttggcaaggctgggaggaaagttttagctaagaaactcagcccattggagaccatggataagtacgatgtgattaaggccatcgggcaaggtgccttcgggaaagcatacttagctaaagggaaatcagatagcaagcactgtgtcataaaagagatcaattttgaaaagatgcccatacaagaaaaagaagcttcaaagaaagaagtgattcttctggaaaagatgaaacatcccaacattgtagccttcttcaattcatttcaagagaatggcaggctgtttattgtaatggaatattgtgatggaggggatctcatgaaaaggatcaatagacaacggggtgtgttatttagtgaagatcagatcctcggttggtttgtacagatttctctaggactaaaacatattcatgacaggaagatattacacagggacataaaagctcagaacatttttcttagcaagaacggaatggtggcaaagcttggggactttggtatagcaagagtcctgaataattccatggaacttgctcgaacttgtattggaacaccttactacctgtccccagagatctgtcagaataaaccctacaacaataaaacggatatttggtctcttggctgtgtcttatatgagctctgcacacttaaacatccttttgagggtaacaacttacagcagctggttctgaagatttgtcaagcacattttgccccaatatctccggggttttctcgtgagctccattccttgatatctcagctctttcaagtatctcctcgagaccgaccatccataaattccattttgaaaaggccctttttagagaatcttattcccaaatatttgactcctgaggtcattcaggaagaattcagtcacatgcttatatgcagagcaggagcgccagcttctcgacatgctgggaaggtggtccagaagtgtaaaatacaaaaagtgagattccagggaaagtgcccaccaagatcaaggatatctgtgccaattaaaaggaatgctatattgcatagaaatgaatggagaccaccagctggagcccagaaggccagatctataaaaatgatagaaagacccaaaattgctgctgtctgtggacattatgattattattatgctcaacttgatatgctgaggaggagagcccacaaaccaagttatcaccctattcctcaagaaaatactggagttgaggattacggtcaggaaacgaggcatggtccatccccaagtcaatggcctgctgagtaccttcagagaaaatttgaagctcaacaatataagttgaaagtggagaagcaattgggtcttcgtccatcttctgccgagccaaattacaaccagagacaagagctaagaagtaatggagaagagcctagattccaggagctgccatttaggaaaaacgaaatgaaggaacaggaatattggaagcagttagaggaaatacgccaacagtaccacaatgacatgaaagaaattagaaagaagatggggagagaaccagaggagaactcaaaaataagtcataaaacctatttggtgaagaagagtaacctgcctgtccatcaagatgcatctgagggagaagcacctgtgcagatggaatttcgctcttgttgcccaggctggagtgcaatggcacgatcttggctcaccgcaacctccgcctcccaggacattgaaaaagacttgaaacaaatgaggcttcagaacacaaaggaaagtaaaaatccagaacagaaatataaagctaagaagggggtaaaatttgaaattaatttagacaaatgtatttctgatgaaaacatcctccaagaggaagaggcaatggatataccaaatgaaactttgacctttgaggatggcatgaagtttaaggaatatgaatgtgtaaaggagcatggagattatacagacaaagcatttgaaaaacttcactgcccagaagcagggttttccacgcagactgtagctgctgtgggaaacaggaggcagtgggatggaggagcgcctcagactctgctgcagatgatggcagtggccgacatcacctccacctgccccacggggcctgacagtgagtctgtgcttagcgtcagtcgtcaggaagggaagaccaaggacccgtacagcccagtgctcatcctgatgtgatagtctacttctcactatacaccctatagatcttgtatcagacactttcaaatatgttgttttgatatctccctatgcctaaagagacttgcctgctaattatcctggacaaatgaccactctagacatgcacatataaaggaggaaaaatccaggatgccaccttcctcagagtgagggaaaatgcgtgaggaaggacagctgacttgatttaccttccaaggccagctcaacaactttttttgcgatttcatagggtcatttttttttttttaatttttattttttattgatcattcttgggtgtttctcgcagagggggatttggcagggtcataggacaatagtggagggaaggtcagcagataaacaagtgaacaaaggtctctggtttttctaggcagaggaccctgtggccttccgcagtgtttgtgtccctgggtacttgagattagggagtggtgatgattcttaacgagcatgctgccttcaagcatctgtttaacaaagcacatcttgcactgcccttaatccattcatctctgagtggacacagcacatgtttcagagagcacagggttgggggtaaggtcaccgattagcaggatcccaaggcagaagaatttttcttagtacggaacaaaatgaaaa

SEQ ID NO: 159446 - DNA, 1864 bp, Homo sapiens
  Payload ID: 11201
  Gene Symbol: NEK5
  Gene Name: NIMA-related kinase 5
  ENST ID: ENST00000465811
  CDS Start-End: 1-888
atggataagtacgatgtgattaaggccatcgggcaaggtgccttcgggaaagcatacttagctaaagggaaatcagatagcaagcactgtgtcataaaagagatcaattttgaaaagatgcccatacaagaaaaagaagcttcaaagaaagaagtgattcttctggaaaagatgaaacatcccaacattgtagccttcttcaattcatttcaagagaatggcaggctgtttattgtaatggaatattgtgatggaggggatctcatgaaaaggatcaatagacaacggggtgtgttatttagtgaagatcagatcctcggttggtttgtacagatttctctaggactaaaacatattcatgacaggaagatattacacagggacataaaagctcagaacatttttcttagcaagaacggaatggtggcaaagcttggggactttggtatagcaagagtcctgaataattccatggaacttgctcgaacttgtattggaacaccttactacctgtccccagagatctgtcagaataaaccctacaacaataaaacggatatttggtctcttggctgtgtcttatatgagctctgcacacttaaacatccttttgagggtaacaacttacagcagctggttctgaagatttgtcaagcacattttgccccaatatctccggggttttctcgtgagctccattccttgatatctcagctctttcaagtatctcctcgagaccgaccatccataaattccattttgaaaaggccctttttagagaatcttattcccaaatatttgactcctgagaattcagtcacatgcttatatgcagagcaggagcgccagcttctcgacatgctgggaaggtggtccagagcctgctgagtaccttcagagaaaatttgaagctcaacaatataagttgaaagtggagaagcaattgggtcttcgtccatcttctgccgagccaaattacaaccagagacaagagctaagaagtaatggagaagagcctagattccaggagctgccatttaggaaaaacgaaatgaaggaacaggaatattggaagcagttagaggaaatacgccaacagtaccacaatgacatgaaagaaattagaaagaagatggggagagaaccagagaagggggtaaaatttgaaattaatttagacaaatgtatttctgatgaaaacatcctccaagaggaagaggcaatggatataccaaatgaaactttgacctttgaggatggcatgaagtttaaggaatatgaatgtgtaaaggagcatggagattatacagacaaagcatttgaaaaacttcactgcccagaagcagggttttccacgcagactgtagctgctgtgggaaacaggaggcagtgggatggaggagcgcctcagactctgctgcagatgatggcagtggccgacatcacctccacctgccccacggggcctgacaatggccaagttattgtgattgaaggcattccaggaaacaggaaacagtggcggcatgaagctccaggaactttaatgagtgttttggcagcagcacatctaacgagtagctcattttctgccgatgaagaatttgcaatgggaacattaaaacaatggctacccaaagaagaagatgaagggaaggtagaaatggtctctggcattgaagtagatgaggaacaactagaaccaagatctgatgatgatgatacaaattttgaagaatctgaagatgagttgagagatgaagtagtagaatacttagaaaaactcgctactttcaaaggggaagaaaaaacagaagaggcctccagtacctctaaggactctagaaagtcaagagaaagagag

SEQ ID NO: 159447 - DNA, 2127 bp, Homo sapiens
  Payload ID: 11201
  Gene Symbol: NEK5
  Gene Name: NIMA-related kinase 5
  Uniprot ID: Q6P3R8
  ENST ID: ENST00000617045
  CDS Start-End: 1-2127
atggataagtacgatgtgattaaggccatcgggcaaggtgccttcgggaaagcatacttagctaaagggaaatcagatagcaagcactgtgtcataaaagagatcaattttgaaaagatgcccatacaagaaaaagaagcttcaaagaaagaagtgattcttctggaaaagatgaaacatcccaacattgtagccttcttcaattcatttcaagagaatggcaggctgtttattgtaatggaatattgtgatggaggggatctcatgaaaaggatcaatagacaacggggtgtgttatttagtgaagatcagatcctcggttggtttgtacagatttctctaggactaaaacatattcatgacaggaagatattacacagggacataaaagctcagaacatttttcttagcaagaacggaatggtggcaaagcttggggactttggtatagcaagagtcctgaataattccatggaacttgctcgaacttgtattggaacaccttactacctgtccccagagatctgtcagaataaaccctacaacaataaaacggatatttggtctcttggctgtgtcttatatgagctctgcacacttaaacatccttttgagggtaacaacttacagcagctggttctgaagatttgtcaagcacattttgccccaatatctccggggttttctcgtgagctccattccttgatatctcagctctttcaagtatctcctcgagaccgaccatccataaattccattttgaaaaggccctttttagagaatcttattcccaaatatttgactcctgaggtcattcaggaagaattcagtcacatgcttatatgcagagcaggagcgccagcttctcgacatgctgggaaggtggtccagaagtgtaaaatacaaaaagtgagattccagggaaagtgcccaccaagatcaaggatatctgtgccaattaaaaggaatgctatattgcatagaaatgaatggagaccaccagctggagcccagaaggccagatctataaaaatgatagaaagacccaaaattgctgctgtctgtggacattatgattattattatgctcaacttgatatgctgaggaggagagcccacaaaccaagttatcaccctattcctcaagaaaatactggagttgaggattacggtcaggaaacgaggcatggtccatccccaagtcaatggcctgctgagtaccttcagagaaaatttgaagctcaacaatataagttgaaagtggagaagcaattgggtcttcgtccatcttctgccgagccaaattacaaccagagacaagagctaagaagtaatggagaagagcctagattccaggagctgccatttaggaaaaacgaaatgaaggaacaggaatattggaagcagttagaggaaatacgccaacagtaccacaatgacatgaaagaaattagaaagaagatggggagagaaccagaggagaactcaaaaataagtcataaaacctatttggtgaagaagagtaacctgcctgtccatcaagatgcatctgagggagaagcacctgtgcagatggaatttcgctcttgttgcccaggctggagtgcaatggcacgatcttggctcaccgcaacctccgcctcccaggacattgaaaaagacttgaaacaaatgaggcttcagaacacaaaggaaagtaaaaatccagaacagaaatataaagctaagaagggggtaaaatttgaaattaatttagacaaatgtatttctgatgaaaacatcctccaagaggaagaggcaatggatataccaaatgaaactttgacctttgaggatggcatgaagtttaaggaatatgaatgtgtaaaggagcatggagattatacagacaaagcatttgaaaaacttcactgcccagaagcagggttttccacgcagactgtagctgctgtgggaaacaggaggcagtgggatggaggagcgcctcagactctgctgcagatgatggcagtggccgacatcacctccacctgccccacggggcctgacagtgagtctgtgcttagcgtcagtcgtcaggaagggaagaccaaggacccgtacagcccagtgctcatcctgatgtga

SEQ ID NO: 159448 - DNA, 3447 bp, Homo sapiens
  Payload ID: 11202
  Gene Symbol: NEK6
  Gene Name: NIMA-related kinase 6
  Uniprot ID: Q9HC98
  ENST ID: ENST00000320246
  CDS Start-End: 146-1087
ccgagctgacgggcgtgcggccgctgcgccgcaaactcgtgtgggacgcaccgctccagccgcccgcgggccagcgcaccggtcccccagcggcagccgagcccgcccgcgcgccgttcgtgccctcgtgaggctggcatgcaggatggcaggacagcccggccacatgccccatggagggagttccaacaacctctgccacaccctggggcctgtgcatcctcctgacccacagaggcatcccaacacgctgtcttttcgctgctcgctggcggacttccagatcgaaaagaagataggccgaggacagttcagcgaggtgtacaaggccacctgcctgctggacaggaagacagtggctctgaagaaggtgcagatctttgagatgatggacgccaaggcgaggcaggactgtgtcaaggagatcggcctcttgaagcaactgaaccacccaaatatcatcaagtatttggactcgtttatcgaagacaacgagctgaacattgtgctggagttggctgacgcaggggacctctcgcagatgatcaagtactttaagaagcagaagcggctcatcccggagaggacagtatggaagtactttgtgcagctgtgcagcgccgtggagcacatgcattcacgccgggtgatgcaccgagacatcaagcctgccaacgtgttcatcacagccacgggcgtcgtgaagctcggtgaccttggtctgggccgcttcttcagctctgagaccaccgcagcccactccctagtggggacgccctactacatgtcaccggagaggatccatgagaacggctacaacttcaagtccgacatctggtccctgggctgtctgctgtacgagatggcagccctccagagccccttctatggagataagatgaatctcttctccctgtgccagaagatcgagcagtgtgactaccccccactccccggggagcactactccgagaagttacgagaactggtcagcatgtgcatctgccctgacccccaccagagacctgacatcggatacgtgcaccaggtggccaagcagatgcacatctggatgtccagcacctgagcgtggatgcaccgtgccttatcaaagccagcaccactttgccttacttgagtcgtcttctcttcgagtggccacctggtagcctagaacagctaagaccacagggttcagcaggttccccaaaaggctgcccagccttacagcagatgctgaaggcagagcagctgagggaggggcgctggccacatgtcactgatggtcagattccaaagtcctttctttatactgttgtggacaatctcagctgggtcaataagggcaggtggttcagcgagccacggcagccccctgtatctggattgtaatgtgaatctttagggtaattcctccagtgacctgtcaaggcttatgctaacaggagacttgcaggagaccgtgtgatttgtgtagtgagcctttgaaaatggttagtaccgggttcagtttagttcttagtatcttttcaatcaagctgtgtgcttaatttactctgttgtaaagggataaagtggaaatcatttttttccgtggagtggtgattctgctaacatttttatctacgttttataacttggtgagtgacgatgagagccctgcacctggccagagtgtcacaggcaaaaggcatcgggaagcaggagcatcttcttggcagccaggctgggccatcttctcctggacacctgctgtgtaccaggaacttcgtcacctccttgaatgctggcggttcatttcatgatcagtgttaagcattttcctccatgggaaggaagcatgggatatagaaaagcgaagggctgtcctttacaaattctggttctgcaacttcctagcgtgactttgggcttgggcaagtttcttagccgttctgagccttcatttcctcatctgtacaatgagattaatagtacctatcatctaccttcaggattgctgacagacagaatttgaaataaaatatgcaagttagctaatacaaaaagtagatgatccaaaaatggtagccactcacccttcacaaactgaagtccatggaccacggaagtcgagaattaatgtacacctgtatcatgtgtaggaaaccagaaatgtgttccttatttcttgttcccaaacaggattaactgtgaagactaatttataaatgtgaacctaagaaaactccacctctgaaggaaatcatttgaattttgtttttgtacgtaaagttaaccttccaattgtctgagctgtcgtcactgacttcatgacagtctggccctccagacaagagcagcgctggcatcgggcaggtgattcctgacacctgctgcctgcaggcattcactgaccaggcctttcctggaggaaacacccagggccgggcggctgctgtttccacacgtggactcggatctgctgtgacaccgtcagcccgacagtctctccatatgcagcctttcctctgtacttttctccatggttgaaataaaacagggtgactgggagttacttagaattcatgaagattttaaaatggctttggagattttgcttttaaaccagtagattcaaaacttaaacagcgtctgcagcacaatttcttgaggaaccttgaaaaacacaacttcccaggccccattcagtaatcccaggatttctttaagctccccaaataattttgaaactcatcatcagccgagtttctgccctcatgaggtaattccatcgttctccccagcctgcccctggcagctgtaacacaggagctggcctgagagcagattcaccctggaatgttctctccacagaacaatcaagtccctgtcgcctgcctagtgcttaccactgaagatttttctgattccagaccaactttttgccaacattctgcttccagctctctgagcccctgccgtgtctccccaacactgccagccccagcacgcaatcaacctactttgtgcatgccacccgctttccacactgtgagaacaatctgcccaactggaccctctggaggcgcacgatctcagccactcaccaggcctgagtgtttgtgaaatgatcatgtcctacttattacaaaaccgtaaccccaaaacattccttttatttctgtgaaaccggccaaagtgaggtccacccaccttcacacagctctggcggtgcacctgctcaccttctcttggttctcagaactgagctgggcttgagaacacagctttggctttgccatttttttcctacttggctgctgaggtggagggtgtgctgcacttatcaccccatttcaaaaccaaaccaaacctgaggccaccccaaacaaattcagccagcaaaaagggtaggtatcgatggtcacctgaagcctcaagggagtccactctgacttctgacag

SEQ ID NO: 159449 - DNA, 758 bp, Homo sapiens
  Payload ID: 11202
  Gene Symbol: NEK6
  Gene Name: NIMA-related kinase 6
  ENST ID: ENST00000373596
  CDS Start-End: 137-758
gatgaggctgggacactgttcgcaggaagagtccggtgttctggccccctgatgtcaccttcacgggcctgactcacagtcctaaatatctgacagcgagatcgcttttcgtgccctcgtgaggctggcatgcaggatggcaggacagcccggccacatgccccatggagggagttccaacaacctctgccacaccctggggcctgtgcatcctcctgacccacagaggcatcccaacacgctgtcttttcgctgctcgctggcggacttccagatcgaaaagaagataggccgaggacagttcagcgaggtgtacaaggccacctgcctgctggacaggaagacagtggctctgaagaaggtgcagatctttgagatgatggacgccaaggcgaggcaggactgtgtcaaggagatcggcctcttgaagcaactgaaccacccaaatatcatcaagtatttggactcgtttatcgaagacaacgagctgaacattgtgctggagttggctgacgcaggggacctctcgcagatgatcaagtactttaagaagcagaagcggctcatcccggagaggacagtatggaagtactttgtgcagctgtgcagcgccgtggagcacatgcattcacgccgggtgatgcaccgagacatcaagcctgccaacgtgttcatcacagccacgggcgtcgtgaagctcggtgaccttggtctgggccgcttcttcagctctgagaccaccgcagcccactccctag

SEQ ID NO: 159450 - DNA, 3619 bp, Homo sapiens
  Payload ID: 11202
  Gene Symbol: NEK6
  Gene Name: NIMA-related kinase 6
  Uniprot ID: Q9HC98
  ENST ID: ENST00000373600
  CDS Start-End: 216-1259
ggcggaaccgagctgacgggcgtgcggccgctgcgccgcaaactcgtgtgggacgcaccgctccagccgcccgcgggccagcgcaccggtcccccagcggcagccgagcccgcccgcgcgccggagaagaagacacatgaattagagacagcacgggggagcaggctgtggagctgggagtgacggggtgagtccaggaaggctgcctggaggagatgcccaggagagaagtttgctgggaggcagctcatttccggcaggaggagcagagcctgccaaggcctcgagttcgtgccctcgtgaggctggcatgcaggatggcaggacagcccggccacatgccccatggagggagttccaacaacctctgccacaccctggggcctgtgcatcctcctgacccacagaggcatcccaacacgctgtcttttcgctgctcgctggcggacttccagatcgaaaagaagataggccgaggacagttcagcgaggtgtacaaggccacctgcctgctggacaggaagacagtggctctgaagaaggtgcagatctttgagatgatggacgccaaggcgaggcaggactgtgtcaaggagatcggcctcttgaagcaactgaaccacccaaatatcatcaagtatttggactcgtttatcgaagacaacgagctgaacattgtgctggagttggctgacgcaggggacctctcgcagatgatcaagtactttaagaagcagaagcggctcatcccggagaggacagtatggaagtactttgtgcagctgtgcagcgccgtggagcacatgcattcacgccgggtgatgcaccgagacatcaagcctgccaacgtgttcatcacagccacgggcgtcgtgaagctcggtgaccttggtctgggccgcttcttcagctctgagaccaccgcagcccactccctagtggggacgccctactacatgtcaccggagaggatccatgagaacggctacaacttcaagtccgacatctggtccctgggctgtctgctgtacgagatggcagccctccagagccccttctatggagataagatgaatctcttctccctgtgccagaagatcgagcagtgtgactaccccccactccccggggagcactactccgagaagttacgagaactggtcagcatgtgcatctgccctgacccccaccagagacctgacatcggatacgtgcaccaggtggccaagcagatgcacatctggatgtccagcacctgagcgtggatgcaccgtgccttatcaaagccagcaccactttgccttacttgagtcgtcttctcttcgagtggccacctggtagcctagaacagctaagaccacagggttcagcaggttccccaaaaggctgcccagccttacagcagatgctgaaggcagagcagctgagggaggggcgctggccacatgtcactgatggtcagattccaaagtcctttctttatactgttgtggacaatctcagctgggtcaataagggcaggtggttcagcgagccacggcagccccctgtatctggattgtaatgtgaatctttagggtaattcctccagtgacctgtcaaggcttatgctaacaggagacttgcaggagaccgtgtgatttgtgtagtgagcctttgaaaatggttagtaccgggttcagtttagttcttagtatcttttcaatcaagctgtgtgcttaatttactctgttgtaaagggataaagtggaaatcatttttttccgtggagtggtgattctgctaacatttttatctacgttttataacttggtgagtgacgatgagagccctgcacctggccagagtgtcacaggcaaaaggcatcgggaagcaggagcatcttcttggcagccaggctgggccatcttctcctggacacctgctgtgtaccaggaacttcgtcacctccttgaatgctggcggttcatttcatgatcagtgttaagcattttcctccatgggaaggaagcatgggatatagaaaagcgaagggctgtcctttacaaattctggttctgcaacttcctagcgtgactttgggcttgggcaagtttcttagccgttctgagccttcatttcctcatctgtacaatgagattaatagtacctatcatctaccttcaggattgctgacagacagaatttgaaataaaatatgcaagttagctaatacaaaaagtagatgatccaaaaatggtagccactcacccttcacaaactgaagtccatggaccacggaagtcgagaattaatgtacacctgtatcatgtgtaggaaaccagaaatgtgttccttatttcttgttcccaaacaggattaactgtgaagactaatttataaatgtgaacctaagaaaactccacctctgaaggaaatcatttgaattttgtttttgtacgtaaagttaaccttccaattgtctgagctgtcgtcactgacttcatgacagtctggccctccagacaagagcagcgctggcatcgggcaggtgattcctgacacctgctgcctgcaggcattcactgaccaggcctttcctggaggaaacacccagggccgggcggctgctgtttccacacgtggactcggatctgctgtgacaccgtcagcccgacagtctctccatatgcagcctttcctctgtacttttctccatggttgaaataaaacagggtgactgggagttacttagaattcatgaagattttaaaatggctttggagattttgcttttaaaccagtagattcaaaacttaaacagcgtctgcagcacaatttcttgaggaaccttgaaaaacacaacttcccaggccccattcagtaatcccaggatttctttaagctccccaaataattttgaaactcatcatcagccgagtttctgccctcatgaggtaattccatcgttctccccagcctgcccctggcagctgtaacacaggagctggcctgagagcagattcaccctggaatgttctctccacagaacaatcaagtccctgtcgcctgcctagtgcttaccactgaagatttttctgattccagaccaactttttgccaacattctgcttccagctctctgagcccctgccgtgtctccccaacactgccagccccagcacgcaatcaacctactttgtgcatgccacccgctttccacactgtgagaacaatctgcccaactggaccctctggaggcgcacgatctcagccactcaccaggcctgagtgtttgtgaaatgatcatgtcctacttattacaaaaccgtaaccccaaaacattccttttatttctgtgaaaccggccaaagtgaggtccacccaccttcacacagctctggcggtgcacctgctcaccttctcttggttctcagaactgagctgggcttgagaacacagctttggctttgccatttttttcctacttggctgctgaggtggagggtgtgctgcacttatcaccccatttcaaaaccaaaccaaacctgaggccaccccaaacaaattcagccagcaaaaagggtaggtatcgatggtcacctgaagcctcaagggagtccactctgacttctgacag

SEQ ID NO: 159451 - DNA, 3447 bp, Homo sapiens
  Payload ID: 11202
  Gene Symbol: NEK6
  Gene Name: NIMA-related kinase 6
  Uniprot ID: Q9HC98
  ENST ID: ENST00000373603
  CDS Start-End: 146-1087
gcaatgctaggcgatggggaatccgaagacgcacaggagtccaagggttggctgactgcagaccctcatcataagtctagagccggagaagatggggagacgccggcctgcgccctttcgtgccctcgtgaggctggcatgcaggatggcaggacagcccggccacatgccccatggagggagttccaacaacctctgccacaccctggggcctgtgcatcctcctgacccacagaggcatcccaacacgctgtcttttcgctgctcgctggcggacttccagatcgaaaagaagataggccgaggacagttcagcgaggtgtacaaggccacctgcctgctggacaggaagacagtggctctgaagaaggtgcagatctttgagatgatggacgccaaggcgaggcaggactgtgtcaaggagatcggcctcttgaagcaactgaaccacccaaatatcatcaagtatttggactcgtttatcgaagacaacgagctgaacattgtgctggagttggctgacgcaggggacctctcgcagatgatcaagtactttaagaagcagaagcggctcatcccggagaggacagtatggaagtactttgtgcagctgtgcagcgccgtggagcacatgcattcacgccgggtgatgcaccgagacatcaagcctgccaacgtgttcatcacagccacgggcgtcgtgaagctcggtgaccttggtctgggccgcttcttcagctctgagaccaccgcagcccactccctagtggggacgccctactacatgtcaccggagaggatccatgagaacggctacaacttcaagtccgacatctggtccctgggctgtctgctgtacgagatggcagccctccagagccccttctatggagataagatgaatctcttctccctgtgccagaagatcgagcagtgtgactaccccccactccccggggagcactactccgagaagttacgagaactggtcagcatgtgcatctgccctgacccccaccagagacctgacatcggatacgtgcaccaggtggccaagcagatgcacatctggatgtccagcacctgagcgtggatgcaccgtgccttatcaaagccagcaccactttgccttacttgagtcgtcttctcttcgagtggccacctggtagcctagaacagctaagaccacagggttcagcaggttccccaaaaggctgcccagccttacagcagatgctgaaggcagagcagctgagggaggggcgctggccacatgtcactgatggtcagattccaaagtcctttctttatactgttgtggacaatctcagctgggtcaataagggcaggtggttcagcgagccacggcagccccctgtatctggattgtaatgtgaatctttagggtaattcctccagtgacctgtcaaggcttatgctaacaggagacttgcaggagaccgtgtgatttgtgtagtgagcctttgaaaatggttagtaccgggttcagtttagttcttagtatcttttcaatcaagctgtgtgcttaatttactctgttgtaaagggataaagtggaaatcatttttttccgtggagtggtgattctgctaacatttttatctacgttttataacttggtgagtgacgatgagagccctgcacctggccagagtgtcacaggcaaaaggcatcgggaagcaggagcatcttcttggcagccaggctgggccatcttctcctggacacctgctgtgtaccaggaacttcgtcacctccttgaatgctggcggttcatttcatgatcagtgttaagcattttcctccatgggaaggaagcatgggatatagaaaagcgaagggctgtcctttacaaattctggttctgcaacttcctagcgtgactttgggcttgggcaagtttcttagccgttctgagccttcatttcctcatctgtacaatgagattaatagtacctatcatctaccttcaggattgctgacagacagaatttgaaataaaatatgcaagttagctaatacaaaaagtagatgatccaaaaatggtagccactcacccttcacaaactgaagtccatggaccacggaagtcgagaattaatgtacacctgtatcatgtgtaggaaaccagaaatgtgttccttatttcttgttcccaaacaggattaactgtgaagactaatttataaatgtgaacctaagaaaactccacctctgaaggaaatcatttgaattttgtttttgtacgtaaagttaaccttccaattgtctgagctgtcgtcactgacttcatgacagtctggccctccagacaagagcagcgctggcatcgggcaggtgattcctgacacctgctgcctgcaggcattcactgaccaggcctttcctggaggaaacacccagggccgggcggctgctgtttccacacgtggactcggatctgctgtgacaccgtcagcccgacagtctctccatatgcagcctttcctctgtacttttctccatggttgaaataaaacagggtgactgggagttacttagaattcatgaagattttaaaatggctttggagattttgcttttaaaccagtagattcaaaacttaaacagcgtctgcagcacaatttcttgaggaaccttgaaaaacacaacttcccaggccccattcagtaatcccaggatttctttaagctccccaaataattttgaaactcatcatcagccgagtttctgccctcatgaggtaattccatcgttctccccagcctgcccctggcagctgtaacacaggagctggcctgagagcagattcaccctggaatgttctctccacagaacaatcaagtccctgtcgcctgcctagtgcttaccactgaagatttttctgattccagaccaactttttgccaacattctgcttccagctctctgagcccctgccgtgtctccccaacactgccagccccagcacgcaatcaacctactttgtgcatgccacccgctttccacactgtgagaacaatctgcccaactggaccctctggaggcgcacgatctcagccactcaccaggcctgagtgtttgtgaaatgatcatgtcctacttattacaaaaccgtaaccccaaaacattccttttatttctgtgaaaccggccaaagtgaggtccacccaccttcacacagctctggcggtgcacctgctcaccttctcttggttctcagaactgagctgggcttgagaacacagctttggctttgccatttttttcctacttggctgctgaggtggagggtgtgctgcacttatcaccccatttcaaaaccaaaccaaacctgaggccaccccaaacaaattcagccagcaaaaagggtaggtatcgatggtcacctgaagcctcaagggagtccactctgacttctgacag

SEQ ID NO: 159452 - DNA, 2535 bp, Homo sapiens
  Payload ID: 11202
  Gene Symbol: NEK6
  Gene Name: NIMA-related kinase 6
  Uniprot ID: Q9HC98
  ENST ID: ENST00000394199
  CDS Start-End: 1-1044
atgcccaggagagaagtttgctgggaggcagctcatttccggcaggaggagcagagcctgccaaggcctcgagttcgtgccctcgtgaggctggcatgcaggatggcaggacagcccggccacatgccccatggagggagttccaacaacctctgccacaccctggggcctgtgcatcctcctgacccacagaggcatcccaacacgctgtcttttcgctgctcgctggcggacttccagatcgaaaagaagataggccgaggacagttcagcgaggtgtacaaggccacctgcctgctggacaggaagacagtggctctgaagaaggtgcagatctttgagatgatggacgccaaggcgaggcaggactgtgtcaaggagatcggcctcttgaagcaactgaaccacccaaatatcatcaagtatttggactcgtttatcgaagacaacgagctgaacattgtgctggagttggctgacgcaggggacctctcgcagatgatcaagtactttaagaagcagaagcggctcatcccggagaggacagtatggaagtactttgtgcagctgtgcagcgccgtggagcacatgcattcacgccgggtgatgcaccgagacatcaagcctgccaacgtgttcatcacagccacgggcgtcgtgaagctcggtgaccttggtctgggccgcttcttcagctctgagaccaccgcagcccactccctagtggggacgccctactacatgtcaccggagaggatccatgagaacggctacaacttcaagtccgacatctggtccctgggctgtctgctgtacgagatggcagccctccagagccccttctatggagataagatgaatctcttctccctgtgccagaagatcgagcagtgtgactaccccccactccccggggagcactactccgagaagttacgagaactggtcagcatgtgcatctgccctgacccccaccagagacctgacatcggatacgtgcaccaggtggccaagcagatgcacatctggatgtccagcacctgagcgtggatgcaccgtgccttatcaaagccagcaccactttgccttacttgagtcgtcttctcttcgagtggccacctggtagcctagaacagctaagaccacagggttcagcaggttccccaaaaggctgcccagccttacagcagatgctgaaggcagagcagctgagggaggggcgctggccacatgtcactgatggtcagattccaaagtcctttctttatactgttgtggacaatctcagctgggtcaataagggcaggtggttcagcgagccacggcagccccctgtatctggattgtaatgtgaatctttagggtaattcctccagtgacctgtcaaggcttatgctaacaggagacttgcaggagaccgtgtgatttgtgtagtgagcctttgaaaatggttagtaccgggttcagtttagttcttagtatcttttcaatcaagctgtgtgcttaatttactctgttgtaaagggataaagtggaaatcatttttttccgtggagtggtgattctgctaacatttttatctacgttttataacttggtgagtgacgatgagagccctgcacctggccagagtgtcacaggcaaaaggcatcgggaagcaggagcatcttcttggcagccaggctgggccatcttctcctggacacctgctgtgtaccaggaacttcgtcacctccttgaatgctggcggttcatttcatgatcagtgttaagcattttcctccatgggaaggaagcatgggatatagaaaagcgaagggctgtcctttacaaattctggttctgcaacttcctagcgtgactttgggcttgggcaagtttcttagccgttctgagccttcatttcctcatctgtacaatgagattaatagtacctatcatctaccttcaggattgctgacagacagaatttgaaataaaatatgcaagttagctaatacaaaaagtagatgatccaaaaatggtagccactcacccttcacaaactgaagtccatggaccacggaagtcgagaattaatgtacacctgtatcatgtgtaggaaaccagaaatgtgttccttatttcttgttcccaaacaggattaactgtgaagactaatttataaatgtgaacctaagaaaactccacctctgaaggaaatcatttgaattttgtttttgtacgtaaagttaaccttccaattgtctgagctgtcgtcactgacttcatgacagtctggccctccagacaagagcagcgctggcatcgggcaggtgattcctgacacctgctgcctgcaggcattcactgaccaggcctttcctggaggaaacacccagggccgggcggctgctgtttccacacgtggactcggatctgctgtgacaccgtcagcccgacagtctctccatatgcagcctttcctctgtacttttctccatggttgaaataaaacagggtgactgggagttacttagaattcatgaagatttt

SEQ ID NO: 159453 - DNA, 790 bp, Homo sapiens
  Payload ID: 11202
  Gene Symbol: NEK6
  Gene Name: NIMA-related kinase 6
  ENST ID: ENST00000444973
  CDS Start-End: 132-790
ggcggccgggcgggcgggggcggcgtgtccgcgtgtcccggggtgtgcgcgtccccggcgggtgtgcgtgtgcaccccggagcgtctggtggcgttgttgggttcgtgccctcgtgaggctggcatgcaggatggcaggacagcccggccacatgccccatggagggagttccaacaacctctgccacaccctggggcctgtgcatcctcctgacccacagaggcatcccaacacgctgtcttttcgctgctcgctggcggacttccagatcgaaaagaagataggccgaggacagttcagcgaggtgtacaaggccacctgcctgctggacaggaagacagtggctctgaagaaggtgcagatctttgagatgatggacgccaaggcgaggcaggactgtgtcaaggagatcggcctcttgaagcaactgaaccacccaaatatcatcaagtatttggactcgtttatcgaagacaacgagctgaacattgtgctggagttggctgacgcaggggacctctcgcagatgatcaagtactttaagaagcagaagcggctcatcccggagaggacagtatggaagtactttgtgcagctgtgcagcgccgtggagcacatgcattcacgccgggtgatgcaccgagacatcaagcctgccaacgtgttcatcacagccacgggcgtcgtgaagctcggtgaccttggtctgggccgcttcttcagctctgagaccaccgcagcccactccctagtggggacgccctactacatgtcaccggagaggatcca

SEQ ID NO: 159454 - DNA, 726 bp, Homo sapiens
  Payload ID: 11202
  Gene Symbol: NEK6
  Gene Name: NIMA-related kinase 6
  ENST ID: ENST00000423785
  CDS Start-End: 144-726
attgccacagagacaagccagccaagaagtgccaccctggacgaaggtcgggagaagaagacacatgaattagagacagcacgggggagcaggctgtggagctgggagtgacggggtgagtccaggaaggctgcctggaggagatgcccaggagagaagtttgctgggaggcagctcatttccggcaggaggagcagagcctgccaaggcctcgagttcgtgccctcgtgaggctggcatgcaggatggcaggacagcccggccacatgccccatggagggagttccaacaacctctgccacaccctggggcctgtgcatcctcctgacccacagaggcatcccaacacgctgtcttttcgctgctcgctggcggacttccagatcgaaaagaagataggccgaggacagttcagcgaggtgtacaaggccacctgcctgctggacaggaagacagtggctctgaagaaggtgcagatctttgagatgatggacgccaaggcgaggcaggactgtgtcaaggagatcggcctcttgaagcaactgaaccacccaaatatcatcaagtatttggactcgtttatcgaagacaacgagctgaacattgtgctggagttggctgacgcaggggacctctcgcagatgatcaagtactttaagaagcagaagcggctcatcccggagaggacagtatggaagtactttgtgcagctgtgcagcgccgtgg

SEQ ID NO: 159455 - DNA, 806 bp, Homo sapiens
  Payload ID: 11202
  Gene Symbol: NEK6
  Gene Name: NIMA-related kinase 6
  ENST ID: ENST00000425237
  CDS Start-End: 141-806
gatgaggctgggacactgttcgcaggaagagtccggtgttctggccccctgatgtcaccttcacgggcctgactcacagtcctaaatatctgacagcgagatcgcttgtagttcgtgccctcgtgaggctggcatgcaggatggcaggacagcccggccacatgccccatggagggagttccaacaacctctgccacaccctggggcctgtgcatcctcctgacccacagaggcatcccaacacgctgtcttttcgctgctcgctggcggacttccagatcgaaaagaagataggccgaggacagttcagcgaggtgtacaaggccacctgcctgctggacaggaagacagtggctctgaagaaggtgcagatctttgagatgatggacgccaaggcgaggcaggactgtgtcaaggagatcggcctcttgaagcaactgaaccacccaaatatcatcaagtatttggactcgtttatcgaagacaacgagctgaacattgtgctggagttggctgacgcaggggacctctcgcagatgatcaagtactttaagaagcagaagcggctcatcccggagaggacagtatggaagtactttgtgcagctgtgcagcgccgtggagcacatgcattcacgccgggtgatgcaccgagacatcaagcctgccaacgtgttcatcacagccacgggcgtcgtgaagctcggtgaccttggtctgggccgcttcttcagctctgagaccaccgcagcccactccctagtggggacgccctactacatgtcaccggagaggatccatgagaac

SEQ ID NO: 159456 - DNA, 716 bp, Homo sapiens
  Payload ID: 11202
  Gene Symbol: NEK6
  Gene Name: NIMA-related kinase 6
  ENST ID: ENST00000447379
  CDS Start-End: 203-716
tattttgagagagcaggtttaccccagaacagtctgtggaaggtgtggggcagggaggagagctgggccgccctgaggacacagagggagaagggtgctgggagccagcctgcaagttctggggagcctcagggtgcctttgagggcacaacttgggaggccaagctcagcggttcgtgccctcgtgaggctggcatgcaggatggcaggacagcccggccacatgccccatggagggagttccaacaacctctgccacaccctggggcctgtgcatcctcctgacccacagaggcatcccaacacgctgtcttttcgctgctcgctggcggacttccagatcgaaaagaagataggccgaggacagttcagcgaggtgtacaaggccacctgcctgctggacaggaagacagtggctctgaagaaggtgcagatctttgagatgatggacgccaaggcgaggcaggactgtgtcaaggagatcggcctcttgaagcaactgaaccacccaaatatcatcaagtatttggactcgtttatcgaagacaacgagctgaacattgtgctggagttggctgacgcaggggacctctcgcagatgatcaagtactttaagaagcagaagcggctcatcccggagaggacagtatggaagtactttgtgcagctgtgcagcgccgtggagcacatgcattcacgccgggtgatgcaccgag

SEQ ID NO: 159457 - DNA, 732 bp, Homo sapiens
  Payload ID: 11202
  Gene Symbol: NEK6
  Gene Name: NIMA-related kinase 6
  ENST ID: ENST00000454453
  CDS Start-End: 131-732
gcggccgggcgggcgggggcggcgtgtccgcgtgtcccggggtgtgcgcgtccccggcgggtgtgcgtgtgcaccccggagcgtctggtggcgttgttgggttcgtgccctcgtgaggctggcatgcaggatggcaggacagcccggccacatgccccatggagggagttccaacaacctctgccacaccctggggcctgtgcatcctcctgacccacagcaactgaaccacccaaatatcatcaagtatttggactcgtttatcgaagacaacgagctgaacattgtgctggagttggctgacgcaggggacctctcgcagatgatcaagtactttaagaagcagaagcggctcatcccggagaggacagtatggaagtactttgtgcagctgtgcagcgccgtggagcacatgcattcacgccgggtgatgcaccgagacatcaagcctgccaacgtgttcatcacagccacgggcgtcgtgaagctcggtgaccttggtctgggccgcttcttcagctctgagaccaccgcagcccactccctagtggggacgccctactacatgtcaccggagaggatccatgagaacggctacaacttcaagtccgacatctggtccctgggctgtctgctgtacgagatggcagccctccagagccccttctatggagataagatgaatctcttctccctgtgccagaagatcgagcagtgtgactaccccccact

SEQ ID NO: 159458 - DNA, 799 bp, Homo sapiens
  Payload ID: 11202
  Gene Symbol: NEK6
  Gene Name: NIMA-related kinase 6
  ENST ID: ENST00000422297
  CDS Start-End: 140-799
ccagcccagagaggcgacccagctccctggaggcccaggcacctcatgtctgccctcaacccagagtggagcagaccttccctggagcttctcaggagccacttcaaaagttcgtgccctcgtgaggctggcatgcaggatggcaggacagcccggccacatgccccatggagggagttccaacaacctctgccacaccctggggcctgtgcatcctcctgacccacagaggcatcccaacacgctgtcttttcgctgctcgctggcggacttccagatcgaaaagaagataggccgaggacagttcagcgaggtgtacaaggccacctgcctgctggacaggaagacagtggctctgaagaaggtgcagatctttgagatgatggacgccaaggcgaggcaggactgtgtcaaggagatcggcctcttgaagcaactgaaccacccaaatatcatcaagtatttggactcgtttatcgaagacaacgagctgaacattgtgctggagttggctgacgcaggggacctctcgcagatgatcaagtactttaagaagcagaagcggctcatcccggagaggacagtatggaagtactttgtgcagctgtgcagcgccgtggagcacatgcattcacgccgggtgatgcaccgagacatcaagcctgccaacgtgttcatcacagccacgggcgtcgtgaagctcggtgaccttggtctgggccgcttcttcagctctgagaccaccgcagcccactccctagtggggacgccctactacatgtcaccggagaggatccat

SEQ ID NO: 159459 - DNA, 2582 bp, Homo sapiens
  Payload ID: 11202
  Gene Symbol: NEK6
  Gene Name: NIMA-related kinase 6
  Uniprot ID: Q9HC98
  ENST ID: ENST00000539416
  CDS Start-End: 75-1091
ttttgtctgccccttcctgcctgtgggaaggagagaaaattaggggaggccacgggcttgaaagctttccctgcatggaggccactggatgggattctagatgctcgcctgggacccaggttcgtgccctcgtgaggctggcatgcaggatggcaggacagcccggccacatgccccatggagggagttccaacaacctctgccacaccctggggcctgtgcatcctcctgacccacagaggcatcccaacacgctgtcttttcgctgctcgctggcggacttccagatcgaaaagaagataggccgaggacagttcagcgaggtgtacaaggccacctgcctgctggacaggaagacagtggctctgaagaaggtgcagatctttgagatgatggacgccaaggcgaggcaggactgtgtcaaggagatcggcctcttgaagcaactgaaccacccaaatatcatcaagtatttggactcgtttatcgaagacaacgagctgaacattgtgctggagttggctgacgcaggggacctctcgcagatgatcaagtactttaagaagcagaagcggctcatcccggagaggacagtatggaagtactttgtgcagctgtgcagcgccgtggagcacatgcattcacgccgggtgatgcaccgagacatcaagcctgccaacgtgttcatcacagccacgggcgtcgtgaagctcggtgaccttggtctgggccgcttcttcagctctgagaccaccgcagcccactccctagtggggacgccctactacatgtcaccggagaggatccatgagaacggctacaacttcaagtccgacatctggtccctgggctgtctgctgtacgagatggcagccctccagagccccttctatggagataagatgaatctcttctccctgtgccagaagatcgagcagtgtgactaccccccactccccggggagcactactccgagaagttacgagaactggtcagcatgtgcatctgccctgacccccaccagagacctgacatcggatacgtgcaccaggtggccaagcagatgcacatctggatgtccagcacctgagcgtggatgcaccgtgccttatcaaagccagcaccactttgccttacttgagtcgtcttctcttcgagtggccacctggtagcctagaacagctaagaccacagggttcagcaggttccccaaaaggctgcccagccttacagcagatgctgaaggcagagcagctgagggaggggcgctggccacatgtcactgatggtcagattccaaagtcctttctttatactgttgtggacaatctcagctgggtcaataagggcaggtggttcagcgagccacggcagccccctgtatctggattgtaatgtgaatctttagggtaattcctccagtgacctgtcaaggcttatgctaacaggagacttgcaggagaccgtgtgatttgtgtagtgagcctttgaaaatggttagtaccgggttcagtttagttcttagtatcttttcaatcaagctgtgtgcttaatttactctgttgtaaagggataaagtggaaatcatttttttccgtggagtggtgattctgctaacatttttatctacgttttataacttggtgagtgacgatgagagccctgcacctggccagagtgtcacaggcaaaaggcatcgggaagcaggagcatcttcttggcagccaggctgggccatcttctcctggacacctgctgtgtaccaggaacttcgtcacctccttgaatgctggcggttcatttcatgatcagtgttaagcattttcctccatgggaaggaagcatgggatatagaaaagcgaagggctgtcctttacaaattctggttctgcaacttcctagcgtgactttgggcttgggcaagtttcttagccgttctgagccttcatttcctcatctgtacaatgagattaatagtacctatcatctaccttcaggattgctgacagacagaatttgaaataaaatatgcaagttagctaatacaaaaagtagatgatccaaaaatggtagccactcacccttcacaaactgaagtccatggaccacggaagtcgagaattaatgtacacctgtatcatgtgtaggaaaccagaaatgtgttccttatttcttgttcccaaacaggattaactgtgaagactaatttataaatgtgaacctaagaaaactccacctctgaaggaaatcatttgaattttgtttttgtacgtaaagttaaccttccaattgtctgagctgtcgtcactgacttcatgacagtctggccctccagacaagagcagcgctggcatcgggcaggtgattcctgacacctgctgcctgcaggcattcactgaccaggcctttcctggaggaaacacccagggccgggcggctgctgtttccacacgtggactcggatctgctgtgacaccgtcagcccgacagtctctccatatgcagcctttcctctgtacttttctccatggttgaaataaaacagggtgactgggagttacttagaattcatgaagatttt

SEQ ID NO: 159460 - DNA, 2580 bp, Homo sapiens
  Payload ID: 11202
  Gene Symbol: NEK6
  Gene Name: NIMA-related kinase 6
  Uniprot ID: Q9HC98
  ENST ID: ENST00000546191
  CDS Start-End: 148-1089
cacccaccccagcccagagaggcgacccagctccctggaggcccaggcacctcatgtctgccctcaacccagagtggagcagaccttccctggagcttctcaggagccacttcaaaagttcgtgccctcgtgaggctggcatgcaggatggcaggacagcccggccacatgccccatggagggagttccaacaacctctgccacaccctggggcctgtgcatcctcctgacccacagaggcatcccaacacgctgtcttttcgctgctcgctggcggacttccagatcgaaaagaagataggccgaggacagttcagcgaggtgtacaaggccacctgcctgctggacaggaagacagtggctctgaagaaggtgcagatctttgagatgatggacgccaaggcgaggcaggactgtgtcaaggagatcggcctcttgaagcaactgaaccacccaaatatcatcaagtatttggactcgtttatcgaagacaacgagctgaacattgtgctggagttggctgacgcaggggacctctcgcagatgatcaagtactttaagaagcagaagcggctcatcccggagaggacagtatggaagtactttgtgcagctgtgcagcgccgtggagcacatgcattcacgccgggtgatgcaccgagacatcaagcctgccaacgtgttcatcacagccacgggcgtcgtgaagctcggtgaccttggtctgggccgcttcttcagctctgagaccaccgcagcccactccctagtggggacgccctactacatgtcaccggagaggatccatgagaacggctacaacttcaagtccgacatctggtccctgggctgtctgctgtacgagatggcagccctccagagccccttctatggagataagatgaatctcttctccctgtgccagaagatcgagcagtgtgactaccccccactccccggggagcactactccgagaagttacgagaactggtcagcatgtgcatctgccctgacccccaccagagacctgacatcggatacgtgcaccaggtggccaagcagatgcacatctggatgtccagcacctgagcgtggatgcaccgtgccttatcaaagccagcaccactttgccttacttgagtcgtcttctcttcgagtggccacctggtagcctagaacagctaagaccacagggttcagcaggttccccaaaaggctgcccagccttacagcagatgctgaaggcagagcagctgagggaggggcgctggccacatgtcactgatggtcagattccaaagtcctttctttatactgttgtggacaatctcagctgggtcaataagggcaggtggttcagcgagccacggcagccccctgtatctggattgtaatgtgaatctttagggtaattcctccagtgacctgtcaaggcttatgctaacaggagacttgcaggagaccgtgtgatttgtgtagtgagcctttgaaaatggttagtaccgggttcagtttagttcttagtatcttttcaatcaagctgtgtgcttaatttactctgttgtaaagggataaagtggaaatcatttttttccgtggagtggtgattctgctaacatttttatctacgttttataacttggtgagtgacgatgagagccctgcacctggccagagtgtcacaggcaaaaggcatcgggaagcaggagcatcttcttggcagccaggctgggccatcttctcctggacacctgctgtgtaccaggaacttcgtcacctccttgaatgctggcggttcatttcatgatcagtgttaagcattttcctccatgggaaggaagcatgggatatagaaaagcgaagggctgtcctttacaaattctggttctgcaacttcctagcgtgactttgggcttgggcaagtttcttagccgttctgagccttcatttcctcatctgtacaatgagattaatagtacctatcatctaccttcaggattgctgacagacagaatttgaaataaaatatgcaagttagctaatacaaaaagtagatgatccaaaaatggtagccactcacccttcacaaactgaagtccatggaccacggaagtcgagaattaatgtacacctgtatcatgtgtaggaaaccagaaatgtgttccttatttcttgttcccaaacaggattaactgtgaagactaatttataaatgtgaacctaagaaaactccacctctgaaggaaatcatttgaattttgtttttgtacgtaaagttaaccttccaattgtctgagctgtcgtcactgacttcatgacagtctggccctccagacaagagcagcgctggcatcgggcaggtgattcctgacacctgctgcctgcaggcattcactgaccaggcctttcctggaggaaacacccagggccgggcggctgctgtttccacacgtggactcggatctgctgtgacaccgtcagcccgacagtctctccatatgcagcctttcctctgtacttttctccatggttgaaataaaacagggtgactgggagttacttagaattcatgaagatttt

SEQ ID NO: 159461 - DNA, 2578 bp, Homo sapiens
  Payload ID: 11202
  Gene Symbol: NEK6
  Gene Name: NIMA-related kinase 6
  Uniprot ID: Q9HC98
  ENST ID: ENST00000540326
  CDS Start-End: 92-1087
gcaatgctaggcgatggggaatccgaagacgcacaggagtccaagggttggctgactgcagaccctcatcataagtctagagccggagaagatggggagacgccggcctgcgccctttcgtgccctcgtgaggctggcatgcaggatggcaggacagcccggccacatgccccatggagggagttccaacaacctctgccacaccctggggcctgtgcatcctcctgacccacagaggcatcccaacacgctgtcttttcgctgctcgctggcggacttccagatcgaaaagaagataggccgaggacagttcagcgaggtgtacaaggccacctgcctgctggacaggaagacagtggctctgaagaaggtgcagatctttgagatgatggacgccaaggcgaggcaggactgtgtcaaggagatcggcctcttgaagcaactgaaccacccaaatatcatcaagtatttggactcgtttatcgaagacaacgagctgaacattgtgctggagttggctgacgcaggggacctctcgcagatgatcaagtactttaagaagcagaagcggctcatcccggagaggacagtatggaagtactttgtgcagctgtgcagcgccgtggagcacatgcattcacgccgggtgatgcaccgagacatcaagcctgccaacgtgttcatcacagccacgggcgtcgtgaagctcggtgaccttggtctgggccgcttcttcagctctgagaccaccgcagcccactccctagtggggacgccctactacatgtcaccggagaggatccatgagaacggctacaacttcaagtccgacatctggtccctgggctgtctgctgtacgagatggcagccctccagagccccttctatggagataagatgaatctcttctccctgtgccagaagatcgagcagtgtgactaccccccactccccggggagcactactccgagaagttacgagaactggtcagcatgtgcatctgccctgacccccaccagagacctgacatcggatacgtgcaccaggtggccaagcagatgcacatctggatgtccagcacctgagcgtggatgcaccgtgccttatcaaagccagcaccactttgccttacttgagtcgtcttctcttcgagtggccacctggtagcctagaacagctaagaccacagggttcagcaggttccccaaaaggctgcccagccttacagcagatgctgaaggcagagcagctgagggaggggcgctggccacatgtcactgatggtcagattccaaagtcctttctttatactgttgtggacaatctcagctgggtcaataagggcaggtggttcagcgagccacggcagccccctgtatctggattgtaatgtgaatctttagggtaattcctccagtgacctgtcaaggcttatgctaacaggagacttgcaggagaccgtgtgatttgtgtagtgagcctttgaaaatggttagtaccgggttcagtttagttcttagtatcttttcaatcaagctgtgtgcttaatttactctgttgtaaagggataaagtggaaatcatttttttccgtggagtggtgattctgctaacatttttatctacgttttataacttggtgagtgacgatgagagccctgcacctggccagagtgtcacaggcaaaaggcatcgggaagcaggagcatcttcttggcagccaggctgggccatcttctcctggacacctgctgtgtaccaggaacttcgtcacctccttgaatgctggcggttcatttcatgatcagtgttaagcattttcctccatgggaaggaagcatgggatatagaaaagcgaagggctgtcctttacaaattctggttctgcaacttcctagcgtgactttgggcttgggcaagtttcttagccgttctgagccttcatttcctcatctgtacaatgagattaatagtacctatcatctaccttcaggattgctgacagacagaatttgaaataaaatatgcaagttagctaatacaaaaagtagatgatccaaaaatggtagccactcacccttcacaaactgaagtccatggaccacggaagtcgagaattaatgtacacctgtatcatgtgtaggaaaccagaaatgtgttccttatttcttgttcccaaacaggattaactgtgaagactaatttataaatgtgaacctaagaaaactccacctctgaaggaaatcatttgaattttgtttttgtacgtaaagttaaccttccaattgtctgagctgtcgtcactgacttcatgacagtctggccctccagacaagagcagcgctggcatcgggcaggtgattcctgacacctgctgcctgcaggcattcactgaccaggcctttcctggaggaaacacccagggccgggcggctgctgtttccacacgtggactcggatctgctgtgacaccgtcagcccgacagtctctccatatgcagcctttcctctgtacttttctccatggttgaaataaaacagggtgactgggagttacttagaattcatgaagatttt

SEQ ID NO: 159462 - DNA, 2573 bp, Homo sapiens
  Payload ID: 11202
  Gene Symbol: NEK6
  Gene Name: NIMA-related kinase 6
  Uniprot ID: Q9HC98
  ENST ID: ENST00000545174
  CDS Start-End: 141-1082
gagcgtgtcggcggccgggcgggcgggggcggcgtgtccgcgtgtcccggggtgtgcgcgtccccggcgggtgtgcgtgtgcaccccggagcgtctggtggcgttgttgggttcgtgccctcgtgaggctggcatgcaggatggcaggacagcccggccacatgccccatggagggagttccaacaacctctgccacaccctggggcctgtgcatcctcctgacccacagaggcatcccaacacgctgtcttttcgctgctcgctggcggacttccagatcgaaaagaagataggccgaggacagttcagcgaggtgtacaaggccacctgcctgctggacaggaagacagtggctctgaagaaggtgcagatctttgagatgatggacgccaaggcgaggcaggactgtgtcaaggagatcggcctcttgaagcaactgaaccacccaaatatcatcaagtatttggactcgtttatcgaagacaacgagctgaacattgtgctggagttggctgacgcaggggacctctcgcagatgatcaagtactttaagaagcagaagcggctcatcccggagaggacagtatggaagtactttgtgcagctgtgcagcgccgtggagcacatgcattcacgccgggtgatgcaccgagacatcaagcctgccaacgtgttcatcacagccacgggcgtcgtgaagctcggtgaccttggtctgggccgcttcttcagctctgagaccaccgcagcccactccctagtggggacgccctactacatgtcaccggagaggatccatgagaacggctacaacttcaagtccgacatctggtccctgggctgtctgctgtacgagatggcagccctccagagccccttctatggagataagatgaatctcttctccctgtgccagaagatcgagcagtgtgactaccccccactccccggggagcactactccgagaagttacgagaactggtcagcatgtgcatctgccctgacccccaccagagacctgacatcggatacgtgcaccaggtggccaagcagatgcacatctggatgtccagcacctgagcgtggatgcaccgtgccttatcaaagccagcaccactttgccttacttgagtcgtcttctcttcgagtggccacctggtagcctagaacagctaagaccacagggttcagcaggttccccaaaaggctgcccagccttacagcagatgctgaaggcagagcagctgagggaggggcgctggccacatgtcactgatggtcagattccaaagtcctttctttatactgttgtggacaatctcagctgggtcaataagggcaggtggttcagcgagccacggcagccccctgtatctggattgtaatgtgaatctttagggtaattcctccagtgacctgtcaaggcttatgctaacaggagacttgcaggagaccgtgtgatttgtgtagtgagcctttgaaaatggttagtaccgggttcagtttagttcttagtatcttttcaatcaagctgtgtgcttaatttactctgttgtaaagggataaagtggaaatcatttttttccgtggagtggtgattctgctaacatttttatctacgttttataacttggtgagtgacgatgagagccctgcacctggccagagtgtcacaggcaaaaggcatcgggaagcaggagcatcttcttggcagccaggctgggccatcttctcctggacacctgctgtgtaccaggaacttcgtcacctccttgaatgctggcggttcatttcatgatcagtgttaagcattttcctccatgggaaggaagcatgggatatagaaaagcgaagggctgtcctttacaaattctggttctgcaacttcctagcgtgactttgggcttgggcaagtttcttagccgttctgagccttcatttcctcatctgtacaatgagattaatagtacctatcatctaccttcaggattgctgacagacagaatttgaaataaaatatgcaagttagctaatacaaaaagtagatgatccaaaaatggtagccactcacccttcacaaactgaagtccatggaccacggaagtcgagaattaatgtacacctgtatcatgtgtaggaaaccagaaatgtgttccttatttcttgttcccaaacaggattaactgtgaagactaatttataaatgtgaacctaagaaaactccacctctgaaggaaatcatttgaattttgtttttgtacgtaaagttaaccttccaattgtctgagctgtcgtcactgacttcatgacagtctggccctccagacaagagcagcgctggcatcgggcaggtgattcctgacacctgctgcctgcaggcattcactgaccaggcctttcctggaggaaacacccagggccgggcggctgctgtttccacacgtggactcggatctgctgtgacaccgtcagcccgacagtctctccatatgcagcctttcctctgtacttttctccatggttgaaataaaacagggtgactgggagttacttagaattcatgaagatttt

SEQ ID NO: 159463 - DNA, 586 bp, Homo sapiens
  Payload ID: 11203
  Gene Symbol: NEK7
  Gene Name: NIMA-related kinase 7
  Uniprot ID: Q8TDX7
  ENST ID: ENST00000367383
  CDS Start-End: 185-544
ccgccggggcggcgcggcgggaggtggccgacaggctccgggcctcgcagcctcagcccccggcccagcgcgctttccgacggcggcgccgcgccgagccacccgcccgcccaaggtctctcgcgggcgggagaacggaaaactcccaacttcctgagttctaaagttcctgttgcttcagacaatggatgagcaatcacaaggaatgcaagggccacctgttcctcagttccaaccacagaaggccttacgaccggatatgggctataatacattagccaactttcgaatagaaaagaaaattggtcgcggacaatttagtgaagtttatagagcagcctgtctcttggatggagtaccagtagctttaaaaaaagtgcaggtttgcctgttacctgtatgggaaagaagagtgtgtgcgctaaatgcatgttacttcttggaaatcataaagggatctgagagcctacagtatatggcaacattaaccaatctttttgaaaatttacctgtatcccatcatggttcatttgcaaaaaaataagatggtaccttaactaataaaacaattttgaaattctctgta

SEQ ID NO: 159464 - DNA, 4149 bp, Homo sapiens
  Payload ID: 11203
  Gene Symbol: NEK7
  Gene Name: NIMA-related kinase 7
  Uniprot ID: Q8TDX7
  ENST ID: ENST00000367385
  CDS Start-End: 343-1251
gccccgcccctctcctcggggatgccgggatgtttacactcctgacagcggcggcagcaggaggaggatcgggagtcgcgggaggatgggccgccgctaggctcgcactccggacgcgcctcgcagtgcgcagggtgggtgccccgcgcctgcagcgtccgccggggcggcgcggcgggaggtggccgacaggctccgggcctcgcagcctcagcccccggcccagcgcgctttccgacggcggcgccgcgccgagccacccgcccgcccaaggtctctcgcgggcgggagaacggaaaactcccaacttcctgagttctaaagttcctgttgcttcagacaatggatgagcaatcacaaggaatgcaagggccacctgttcctcagttccaaccacagaaggccttacgaccggatatgggctataatacattagccaactttcgaatagaaaagaaaattggtcgcggacaatttagtgaagtttatagagcagcctgtctcttggatggagtaccagtagctttaaaaaaagtgcagatatttgatttaatggatgccaaagcacgtgctgattgcatcaaagaaatagatcttcttaagcaactcaaccatccaaatgtaataaaatattatgcatcattcattgaagataatgaactaaacatagttttggaactagcagatgctggcgacctatccagaatgatcaagcattttaagaagcaaaagaggctaattcctgaaagaactgtttggaagtattttgttcagctttgcagtgcattggaacacatgcattctcgaagagtcatgcatagagatataaaaccagctaatgtgttcattacagccactggggtggtaaaacttggagatcttgggcttggccggtttttcagctcaaaaaccacagctgcacattctttagttggtacgccttattacatgtctccagagagaatacatgaaaatggatacaacttcaaatctgacatctggtctcttggctgtctactatatgagatggctgcattacaaagtcctttctatggtgacaaaatgaatttatactcactgtgtaagaagatagaacagtgtgactacccacctcttccttcagatcactattcagaagaactccgacagttagttaatatgtgcatcaacccagatccagagaagcgaccagacgtcacctatgtttatgacgtagcaaagaggatgcatgcatgcactgcaagcagctaaacatgcaagatcatgaagagtgtaaccaaagtaattgaaagtattttgtgcaagtcatacctccccatttatgtctggtgttaagattaatatttcagagctagtgtgctttgaatccttaaccagttttcatataagcttcattttgtaccagtcacctaaatcacctccttgcaacccccaaatgactttggaataactgaattgcatgttaggagagaaaatgaaacatgatggttttgaatggctaaaggtttatagaatttcttacagttttctgctgataaattgtgtttagatagactgtcagtgccaaatattgaaggtgcagcttggcacacatcagaatagactcatacctgagaaaaagtatctgaacatgtgacttgtttcttttttagtaatttatggacattgagatgaacacaattgtgaacttttgtgaagattttatttttaaacgtttgaagtactagttttagttcttagcagagtagttttcaaatatgattcttatgataaatgtagacacaaactatttgagaaacatttagaactcttagcttatacattcaaaatgtaactattaaatgtgaagatttggggacaaaatgtgagtcagacactgaagagttttttgttttgttttaatatttttgatattctctttgcattgaaatggtataaatgaatccatttaaaaagtggttaaggatttgtttagctggtgtgataataatttttaaagttgcacattgcccaaggctttttttgtgtgtttttattgttgtttgtacatttgaaaaatattctttgaataaccttgcagtactatatttcaatttctttataaatttaagtgcattttaactcataattgtacactataatataagcctaagtttttattcataagttttattgaagttctgatcggtccccttcagaaatttttttatattattcttcaagttactttcttatttatattgtatgtgcattttatccattaatgtttcatactttctgagagtataatacccttttaaaagatatttggtataccaatacttttcctggattgaaaactttttttaaactttttaaaatttgggccactctgtatgcatatgtttggtcttgttaaagaggaagaaaggatgtgtgttatactgtacctgtgaatgttgatacagttacaatttatttgacaaggttgtaattctagaatatgcttaataaaatgaaaactggccatgactacagccagaactgttatgagattaacatttctattgagaagcttttgagtaaagtactgtatttgttcatgaagatgactgagatggtaacacttcgtgtagcttaaggaaatgggcagaatttcgtaaatgctgttgtgcagatgtgttttccctgaatgctttcgtattagtggcgaccagtttctcacagaattgtgaagcctgaaggccaagaggaagtcactgttaaaggactctgtgccatcttacaaccttggatgaattatcctgccaacgtgaaaacctcatgttcaaagaacacttccctttagccgatgtaactgctggttttgtttttcatatgtgtttttcttacactcatttgaatgctttcaagcatttgtaaacttaaaaaatgtataaagggcaaaaagtctgaacccttgttttctgaaatctaatcagttatgtatggtttctgaagggtaattttattttggaataggtaaaggaaacctgttttgtttgtttttcctgagggctagatgcattttttttctcacactcttaatgacttttaacatttatactgagcatccatagatatattcctagaagtatgagaagaattattcttattgaccattaatgtcatgttcattttaatgtaatataattgagatgaaatgttctctggttggaacagatactctcttttttttcttgcaatctttaagaatacatagatctaaaattcattagcttgacccctcaaagtaacttttaagtaaagattaaagcttttcttctcagtgaatatatctgctagaaggaaatagctgggaagaatttaatgatcagggaaattcattatttctatatgtggaaactttttgcttcgaatattgtatctttttaaatctaaatgttcatatttttcctgaagaaaccactgtgtaaaaatcaaattttaattttgaatggaataatttcaaagaactatgaagatgatttgaagctctaatttatatagtcacctataaaatgttctttatatgtgttcataagtaaattttatattgattaagttaaacttttgaattgatttgaggagcagtaaaatgaaagctatatctattctaaaccttatttagacattggtaccagttacccaggtgaaaatatggagtaactttgttttgtatggtaaggtttaggaatggtggatgaagggtatctctatataaataaagtgctcaacaatgtgcaatgattgtaaatttagtaagatattacagccatttcatgaatgctttaccattcaacatagtatctattacaaaacacctttcttgtatccatatacttcaggtgttgctgttaacatttactatgatatttattttaaccaaaatgttactcacattaaatgtttattctttaaaatgaatgtattatgtttttaacccacaaatgcatacttaccctgtgcctcatatttcaatagtactgtaatatggacatcttttgtgaaatacttttattttgttatgctttaaatatacatacaaaaagatttctgttattagctttgaaaattgtataatatcctaatataaacaaaaatataaaaataaaaatgaatacagtaaaa

SEQ ID NO: 159465 - DNA, 587 bp, Homo sapiens
  Payload ID: 11203
  Gene Symbol: NEK7
  Gene Name: NIMA-related kinase 7
  ENST ID: ENST00000391974
  CDS Start-End: 341-587
cagtcaataattttcctttggatgggagtagtgttgctacttaaatatgattgatcctctttttttgttatttatgagctgtagttgtaatcaatgaaatgtcttattaatattctcagaatatttaaatggtacatgtaactagaaggaatattgagtttttgaataaccttgaagattgaaaagacactttatttcaggaaaaggaaactattaataagcttggacgaatatgcttcaactctagaattctgaaaaaaatcagaaaactaaaaacttctgaagctctatttgaaatctctcttcaaattgagttctaaagttcctgttgcttcagacaatggatgagcaatcacaaggaatgcaagggccacctgttcctcagttccaaccacagaaggccttacgaccggatatgggctataatacattagccaactttcgaatagaaaagaaaattggtcgcggacaatttagtgaagtttatagagcagcctgtctcttggatggagtaccagtagctttaaaaaaagtgcagatatttgatttaatggatgccaaagcacgtgctgattgcatcaaagaaa

SEQ ID NO: 159466 - DNA, 519 bp, Homo sapiens
  Payload ID: 11203
  Gene Symbol: NEK7
  Gene Name: NIMA-related kinase 7
  ENST ID: ENST00000442588
  CDS Start-End: 424-519
gtttacactcctgacagcggcggcagcaggaggaggatcgggagtcgcgggaggatgggccgccgctaggctcgcactccggacgcgcctcgcagtgcgcagggtgggtgccccgcgcctgcagcgtccgccggggcggcgcggcgggaggtggccgacaggctccgggcctcgcagcctcagcccccggcccagcgcgctttccgacggcggcgccgcgccgagccacccgcccgcccaaggtctctcgcgggcgggagaacggaaaactcccaacttcctggaaaaggaaactattaataagcttggacgaatatgcttcaactctagaattctgaaaaaaatcagaaaactaaaaacttctgaagctctatttgaaatctctcttcaaattgagttctaaagttcctgttgcttcagacaatggatgagcaatcacaaggaatgcaagggccacctgttcctcagttccaaccacagaaggccttacgaccggatatgggctataatacattagcc

SEQ ID NO: 159467 - DNA, 565 bp, Homo sapiens
  Payload ID: 11203
  Gene Symbol: NEK7
  Gene Name: NIMA-related kinase 7
  ENST ID: ENST00000544035
  CDS Start-End: 380-565
gaattcataaacaactgtcctcatagtgggcttaattttctgatgaaaatatggcatttatatgctttcagcatacaatttaagatttcattttaagtccattctaattcagtgaatagtcaggggaaggtaatgtctgcttttccaaagaattgaaaggttcattacatttctcaatttgtcacaatttttattaaaatcctattacttgtttcttctttatcacttgatgaattgacgaaaatacaaattcagtaggcaaatatgatatccagtatttttgataatcttattagagtagtaagcaataaaataatgagtgacaggaacatcgccgagaccacaaagaagagttctaaagttcctgttgcttcagacaatggatgagcaatcacaaggaatgcaagggccacctgttcctcagttccaaccacagaaggccttacgaccggatatgggctataatacattagccaactttcgaatagaaaagaaaattggtcgcggacaatttagtgaagtttatagagcagcctgtctcttggatggagtaccagtagcttta

SEQ ID NO: 159468 - DNA, 1036 bp, Homo sapiens
  Payload ID: 11203
  Gene Symbol: NEK7
  Gene Name: NIMA-related kinase 7
  Uniprot ID: Q8TDX7
  ENST ID: ENST00000538004
  CDS Start-End: 128-1036
acactcctgacagcggcggcagcaggaggaggatcgggagtcgcgggaggatgggccgccgctaggctcgcactccggacgcgcctcgcagtgcgcaggagttctaaagttcctgttgcttcagacaatggatgagcaatcacaaggaatgcaagggccacctgttcctcagttccaaccacagaaggccttacgaccggatatgggctataatacattagccaactttcgaatagaaaagaaaattggtcgcggacaatttagtgaagtttatagagcagcctgtctcttggatggagtaccagtagctttaaaaaaagtgcagatatttgatttaatggatgccaaagcacgtgctgattgcatcaaagaaatagatcttcttaagcaactcaaccatccaaatgtaataaaatattatgcatcattcattgaagataatgaactaaacatagttttggaactagcagatgctggcgacctatccagaatgatcaagcattttaagaagcaaaagaggctaattcctgaaagaactgtttggaagtattttgttcagctttgcagtgcattggaacacatgcattctcgaagagtcatgcatagagatataaaaccagctaatgtgttcattacagccactggggtggtaaaacttggagatcttgggcttggccggtttttcagctcaaaaaccacagctgcacattctttagttggtacgccttattacatgtctccagagagaatacatgaaaatggatacaacttcaaatctgacatctggtctcttggctgtctactatatgagatggctgcattacaaagtcctttctatggtgacaaaatgaatttatactcactgtgtaagaagatagaacagtgtgactacccacctcttccttcagatcactattcagaagaactccgacagttagttaatatgtgcatcaacccagatccagagaagcgaccagacgtcacctatgtttatgacgtagcaaagaggatgcatgcatgcactgcaagcagctaa

SEQ ID NO: 159469 - DNA, 3581 bp, Homo sapiens
  Payload ID: 11204
  Gene Symbol: NEK8
  Gene Name: NIMA-related kinase 8
  Uniprot ID: Q86SG6
  ENST ID: ENST00000268766
  CDS Start-End: 35-2113
cgtgggggacggaagtgaaactctaagaaatgagatggagaagtacgagcggatccgagtggtggggagaggtgccttcgggattgtgcacctgtgcctgcgaaaggctgaccagaagctggtgatcatcaagcagattccagtggaacagatgaccaaggaagagcggcaggcagcccagaatgagtgccaggtcctcaagctgctcaaccaccccaatgtcattgagtactacgagaacttcctggaagacaaagcccttatgatcgccatggaatatgcaccaggcggcactctggctgagttcatccaaaagcgctgtaattccctgctggaggaggagaccatcctgcacttcttcgtgcagatcctgcttgcactgcatcatgtgcacacccacctcatcctgcaccgagacctcaagacccagaacatcctgcttgacaaacaccgcatggtcgtcaagatcggtgatttcggcatctccaagatccttagcagcaagagcaaggcctacacggtggtgggtaccccatgctatatctcccctgagctgtgtgagggcaagccctacaaccagaagagtgacatctgggccctgggctgtgtcctctacgagctggccagcctcaagagggctttcgaggctgcgaacttgccagcactggtgctgaagatcatgagtggcacctttgcacctatctctgaccggtacagccctgagcttcgccagctggtcctgagtctactcagcctggagcctgcccagcggccaccactcagccacatcatggcacagcccctctgcatccgtgccctcctcaacctccacaccgacgtgggcagtgtccgcatgcggagggcagagaagtccgtggcccccagcaacacagggagcaggaccaccagtgtccgctgcagaggtatcccccggggacctgtgaggccagccatcccaccaccactgtcgtcagtgtatgcctggggtggtgggctgggcacccccctgcggctgccaatgctcaacacagaggtggtccaggtggcagctgggcgcacgcagaaagccggcgtcacgcgctctgggcgtctcatcctgtgggaggccccacccctaggtgcaggcggaggcagtctccttcctggggcagtggagcagccacagccccagttcatctcgcgtttcctggagggccagtcgggtgtgaccatcaagcacgtggcctgtggggacttcttcactgcctgcctgactgacagaggcatcatcatgacattcggcagcggcagcaatgggtgcctaggccatggcagcctcactgacatcagccagcccaccattgtggaggctttgctgggctatgaaatggtgcaggtggcctgtggggcctctcacgtgctggccctgtccactgagcgagaactatttgcctggggccgtggagacagcggcagactggggctaggcaccagggagtcccacagctgcccccagcaggtgcccatgcccccaggacaggaagctcagcgagttgtatgtggtatcgattcctccatgatcctcactgtgcctggccaagccctagcctgtgggagcaacaggttcaacaagctgggcctggaccacctctccctgggggaggagcctgtcccccaccagcaagtggaggaggccctgagcttcacactactaggctctgcacccctggaccaggagcctctgctgagtatagacctgggcactgctcactcagctgctgtgactgcctcgggtgattgctacacttttggcagcaatcagcacggacagttgggcaccaatactcgccgaggcagtcgggcaccctgtaaggtccaaggccttgagggcatcaagatggcaatggtagcctgtggggatgccttcactgtagctattggggcagagagcgaagtgtactcttggggcaaaggggcgcgaggtcgattgggaaggagggatgaggatgccggactccctcggccagtgcagttggatgagacacacccttacacggtgacttccgtgtcctgttgccatggaaacaccctcctggctgttcgatcggtcacagatgagccggtccccccctgaggcacccggattcacctctggaccaccctgatattgcttctcctctgaatgctctgaaaagtgcaggtgcccaaggcatgacttgcagctgtctcctggattgtgtcatcatggggtatcagggctggcaaaacccctgctctgcttttggccttggatatggaaacctcaaccactttgttctcctaccacctctttgcccttcctaccccttcctcccttcagtcagtgtccccagggtccagcctggctagagttagaaggcagacctagcctttggaagcagggtggcctccagagccttgccataaaaaggctgaaggcagccgggcgcagtggctcacgcctgtaatcccagcactttgggaggctgaggcgggcggatcacgaggtcaggagatcgagaccatcctggctaacgtggtgaaaccccatctctactaaaaatacaaaaaaattagctgggcgtggtggcacgcgcctgtagtcccagctgctcaggaggctgaggcaggagaatggcgtaaacccctccagcctgggcgacagaaccagactccgtctcaaaaaaaaaaaaaaaacaaaaaaggctgaaggcagctgtagctccacacagaccctaccctttcccctagcccagttagaaaataagtctgggccggcggcggtggctcacacctgcataggcagtgctttggccaggaggatcccttgatcccttgtggccaggagttgggagaccagcctggggaccatagcgagaccgctgtctccaccaaaaaaaaaaaaaaagaagaaaataaggctgggtgcggtggctcacgcctgtaattccagcactttgggaggccaaggcgggcggatcacttgaggtcagtagactgaggccagcctggccaacatggtgaaaccccgtctctactaaaaatacaaaaattaaccaggcatggtgacgggcgcctgtaatcccagctactctggaggctaaggcaagagaatcccttgaacccgggaggtgaagtttgcagtgagccgagatcgcaccactgcactccagcctggatgacagagcaagtctccctctcaaaaaaaaaaaaaaaaaaaaaaaaaaaaaagtatttggtgcttaccgggactctatctccatactttggagcagggcaagccagggcctgcctggactggccattaggcctgcctagcttctgcatagcccggggctgggcggtccccgggagtgctgccacctcccctacactttcatcctgaggcaggatttgctagacgtcggcttgcctctcttccccagcaggagggcaggagtcactaagtgctgcagaaaagatccgcgctggagattgcccgtcccccccatgcctttccccagaaacagttgagagaatgggtagctggtgggaccagaccggtttcccagaggacaggaaggccaataaaaatatcagctgcc

SEQ ID NO: 159470 - DNA, 2055 bp, Homo sapiens
  Payload ID: 11204
  Gene Symbol: NEK8
  Gene Name: NIMA-related kinase 8
  ENST ID: ENST00000543014
  CDS Start-End: 11-1393
aagaaatgagatggagaagtacgagcggatccgagtggtggggagaggtgccttcgggattgtgcacctgtgcctgcgaaaggctgaccagaagctggtgatcatcaagcagattccagtggaacagatgaccaaggaagagcggcaggcagcccagaatgagtgccaggtcctcaagctgctcaaccaccccaatgtcattgagtactacgagaacttcctggaagacaaagcccttatgatcgccatggaatatgcaccaggcggcactctggctgagttcatccaaaagcgctgtaattccctgctggaggaggagaccatcctgcacttcttcgtgcagatcctgcttgcactgcatcatgtgcacacccacctcatcctgcaccgagacctcaagacccagaacatcctgcttgacaaacaccgcatggtcgtcaagatcggtgatttcggcatctccaagatccttagcagcaagagcaaggcctacacggtggtgggtaccccatgctatatctcccctgagctgtgtgagggcaagccctacaaccagaagagtgacatctgggccctgggctgtgtcctctacgagctggccagcctcaagagggctttcgaggctgcgaacttgccagcactggtgctgaagatcatgagtggcacctttgcacctatctctgaccggtacagccctgagcttcgccagctggtcctgagtctactcagcctggagcctgcccagcggccaccactcagccacatcatggcacagcccctctgcatccgtgccctcctcaacctccacaccgacgtgggcagtgtccgcatgcggaggcctgtgcagggacagcgagcggtcctgggcggcagggtgtgggcacccagtgggagcacaggaggtctgaggcagagggaaacctggggcaagtcctcccttcctgcatgtaggaatgtcaggagggtctttgtccttaggcccccatctgtcctgcagggcagagaagtccgtggcccccagcaacacagggagcaggaccaccagtgtccgctgcagaggtatcccccggggacctgtgaggccagccatcccaccaccactgtcgtcagtgtatgcctggggtggtgggctgggcacccccctgcggctgccaatgctcaacacagaggtggtccaggtggcagctgggcgcacgcagaaagccggcgtcacgcgctctgggcgtctcatcctgtgggaggccccacccctaggtgcaggcggaggcagtctccttcctggggcagtggagcagccacagccccagttcatctcgcgtttcctggagggccagtcgggtgtgaccatcaagcacgtggcctgtggggacttcttcactgcctgcctgactgacagaggcatcatcatgacattcggcagcggcagcaatgggtgcctaggccatggcagcctcactgacatcagccagcccaccattgtggaggctttgctgggctatgaaatggtgcagttggatgagacacacccttacacggtgacttccgtgtcctgttgccatggaaacaccctcctggctgttcgatcggtcacagatgagccggtccccccctgaggcacccggattcacctctggaccaccctgatattgcttctcctctgaatgctctgaaaagtgcaggtgcccaaggcatgacttgcagctgtctcctggattgtgtcatcatggggtatcagggctggcaaaacccctgctctgcttttggccttggatatggaaacctcaaccactttgttctcctaccacctctttgcccttcctaccccttcctcccttcagtcagtgtccccagggtccagcctggctagagttagaaggcagacctagcctttggaagcagggtggcctccagagccttgccataaaaaggctgaaggcagccgggcgcagtggctcacgcctgtaatcccagcactttgggaggctgaggcgggcggatcacgaggtcaggagatcgagaccatcctggctaacgtggtgaaaccccatctctact

SEQ ID NO: 159471 - DNA, 782 bp, Homo sapiens
  Payload ID: 11204
  Gene Symbol: NEK8
  Gene Name: NIMA-related kinase 8
  ENST ID: ENST00000592510
  CDS Start-End: 1-782
tgagggcaagccctacaaccagaagagtgacatctgggccctgggctgtgtcctctacgagctggccagcctcaagagggctttcgaggctgcgaacttgccagcactggtgctgaagatcatgagtggcacctttgcacctatctctgaccggtacagccctgagcttcgccagctggtcctgagtctactcagcctggagcctgcccagcggccaccactcagccacatcatggcacagcccctctgcatccgtgccctcctcaacctccacaccgacgtgggcagtgtccgcatgcggaggcctgtgcagggacagcgagcggtcctgggcggcagggtgtgggcacccagtgggagcacaggaggcccccatctgtcctgcagggcagagaagtccgtggcccccagcaacacagggagcaggaccaccagtgtccgctgcagaggtatcccccggggacctgtgaggccagccatcccaccaccactgtcgtcagtgtatgcctggggtggtgggctgggcacccccctgcggctgccaatgctcaacacagaggtggtccaggtggcagctgggcgcacgcagaaagccggcgtcacgcgctctgggcgtctcatcctgtgggaggccccacccctaggtgcaggcggaggcagtctccttcctggggcagtggagcagccacagccccagttcatctcgcgtttcctggagggccagtcgggtgtgaccatcaagcacgtggcctgtggggacttcttcactgcctgcctgactg

SEQ ID NO: 159472 - DNA, 647 bp, Homo sapiens
  Payload ID: 11204
  Gene Symbol: NEK8
  Gene Name: NIMA-related kinase 8
  ENST ID: ENST00000579060
  CDS Start-End: 147-647
acaatggagtgagcgaaggagacgagcaggttgtgccagcgccaggtgcgcagggggtcggcgcgcacgtgcacgggattgtgcacctgtgcctgcgaaaggctgaccagaagctggtgatcatcaagcagattccagtggaacagatgaccaaggaagagcggcaggcagcccagaatgagtgccaggtcctcaagctgctcaaccaccccaatgtcattgagtactacgagaacttcctggaagacaaagcccttatgatcgccatggaatatgcaccaggcggcactctggctgagttcatccaaaagcgctgtaattccctgctggaggaggagaccatcctgcacttcttcgtgcagatcctgcttgcactgcatcatgtgcacacccacctcatcctgcaccgagacctcaagacccagaacatcctgcttgacaaacaccgcatggtcgtcaagatcggtgatttcggcatctccaagatccttagcagcaagagcaaggcctacacggtggtgggtaccccatgctatatctcccctgagctgtgtgagggcaagccctacaaccagaagagtgacatctgggccctgggctgtgtcctctacgagctggccagcctcaagagggctttcgaggctgcg

SEQ ID NO: 159473 - DNA, 643 bp, Homo sapiens
  Payload ID: 11204
  Gene Symbol: NEK8
  Gene Name: NIMA-related kinase 8
  ENST ID: ENST00000579671
  CDS Start-End: 147-643
cactcaccacagcagtgcccagatccccgacacaatggagtgagcgaaggagacgagcaggttgtgccagcgccaggattgtgcacctgtgcctgcgaaaggctgaccagaagctggtgatcatcaagcagattccagtggaacagatgaccaaggaagagcggcaggcagcccagaatgagtgccaggtcctcaagctgctcaaccaccccaatgtcattgagtactacgagaacttcctggaagacaaagcccttatgatcgccatggaatatgcaccaggcggcactctggctgagttcatccaaaagcgctgtaattccctgctggaggaggagaccatcctgcacttcttcgtgcagatcctgcttgcactgcatcatgtgcacacccacctcatcctgcaccgagacctcaagacccagaacatcctgcttgacaaacaccgcatggtcgtcaagatcggtgatttcggcatctccaagatccttagcagcaagagcaaggcctacacggtggtgggtaccccatgctatatctcccctgagctgtgtgagggcaagccctacaaccagaagagtgacatctgggccctgggctgtgtcctctacgagctggccagcctcaagagggctttcgaggc

SEQ ID NO: 159474 - DNA, 8310 bp, Homo sapiens
  Payload ID: 11205
  Gene Symbol: NEK9
  Gene Name: NIMA-related kinase 9
  Uniprot ID: Q8TD19
  ENST ID: ENST00000238616
  CDS Start-End: 160-3099
gagaactgtttccgggtcggggggcaggagccaccatcgagcttcgcggggttgctgggctgacggatccgcgggccggcatctgaagcgagcgggacgcagcgcggccagggcctccgggcatacgcaggctggtccccaaggcccgcggccgccgccatgtcggtgctgggcgagtacgagcgacactgcgattccatcaactcggactttgggagcgagtccgggggttgcggggactcgagtccggggcctagcgccagtcaggggccgcgagccggcggcggcgcggcggagcaggaggaactgcactacatccccatccgcgtcctgggccgcggcgccttcggggaagccacgctgtaccgccgcaccgaggatgactcactggttgtgtggaaggaagtcgatttgacccggctgtctgagaaggaacgtcgtgatgccttgaatgagattgttattctggcactgctgcagcacgacaacattattgcctactacaatcacttcatggacaataccacgctgctgattgagctggaatattgtaatggagggaacctgtatgacaaaatccttcgtcagaaggacaagttgtttgaggaagagatggtggtgtggtacctatttcagattgtttcagcagtgagctgcatccataaagctggaatccttcatagagatataaagacattaaatatttttctgaccaaggcaaacctgataaaacttggagattatggcctagcaaagaaacttaattctgagtattccatggctgagacgcttgtgggaaccccatattacatgtctccagagctctgtcaaggagtaaagtacaatttcaagtctgatatctgggcagttggctgcgtcatttttgaactgcttaccttaaagaggacgtttgatgctacaaacccacttaacctgtgtgtgaagatcgtgcaaggaattcgggccatggaagttgactctagccagtactctttggaattgatccaaatggttcattcgtgccttgaccaggatcctgagcagagacctactgcagatgaacttctagatcgccctcttctcaggaaacgcaggagagagatggaggaaaaagtcactctgcttaatgcacctacaaagagaccaaggtcaagcactgtgactgaagcacccattgctgtagtaacatcacgaaccagtgaagtctatgtttggggtggtggaaaatccaccccccagaaactggatgttatcaagagtggctgtagtgcccggcaggtctgtgcagggaatacccactttgctgtggtcacagtggagaaggaactgtacacttgggtgaacatgcaaggaggcactaaactccatggtcagctgggccatggagacaaagcctcctatcgacagccaaagcatgtggaaaagttgcaaggcaaagctatccgtcaggtgtcatgtggtgatgatttcactgtctgtgtgactgatgagggtcagctctatgccttcggatcagattattatggctgcatgggggtggacaaagttgctggccctgaagtgctagaacccatgcagctgaacttcttcctcagcaatccagtggagcaggtctcctgtggagataatcatgtggtggttctgacacgaaacaaggaagtctattcttggggctgtggcgaatatggacgactgggtttggattcagaagaggattattatacaccacaaaaggtggatgttcccaaggccttgattattgttgcagttcaatgtggctgtgatgggacatttctgttgacccagtcaggcaaagtgctggcctgtggactcaatgaattcaataagctgggtctgaatcagtgcatgtcgggaattatcaaccatgaagcataccatgaagttccctacacaacgtcctttaccttggccaaacagttgtccttttataagatccgtaccattgccccaggcaagactcacacagctgctattgatgagcgaggccggctgctgacctttggctgcaacaagtgtgggcagctgggcgttgggaactacaagaagcgtctgggaatcaacctgttggggggaccccttggtgggaagcaagtgatcagggtctcctgcggtgatgagtttaccattgctgccactgatgataatcacatttttgcctggggcaatggtggtaatggccgcctggcaatgacccccacagagagaccacatggctctgatatctgtacctcatggcctcggcctatttttggatctctgcatcatgtcccggacctgtcttgccgtggatggcataccattctcatcgttgagaaagtattgaattctaagaccatccgttccaatagcagtggcttatccattggaactgtgtttcagagctctagcccgggaggaggcggcgggggcggcggtggtgaagaagaggacagtcagcaggaatctgaaactcctgacccaagtggaggcttccgaggaacaatggaagcagaccgaggaatggaaggtttaatcagtcccacagaggccatggggaacagtaatggggccagcagctcctgtcctggctggcttcgaaaggagctggaaaatgcagaatttatccccatgcctgacagcccatctcctctcagtgcagcgttttcagaatctgagaaagataccctgccctatgaagagctgcaaggactcaaagtggcctctgaagctcctttggaacacaaaccccaagtagaagcctcgtcacctcggctgaatcctgcagtaacctgtgctgggaagggaacaccactgactcctcctgcgtgtgcgtgcagctctctgcaggtggaggttgagagattgcagggtctggtgttaaagtgtctggctgaacaacagaagctacagcaagaaaacctccagatttttacccaactgcagaagttgaacaagaaattagaaggagggcagcaggtggggatgcattccaaaggaactcagacagcaaaggaagagatggaaatggatccaaagcctgacttagattcagattcctggtgcctcctgggaacagactcctgtagacccagcctctagtctcctgagcctgtagagcccccaggagactgggacccaaagaacttcacagcacacttaccgaatgcagagagcagctttcctggctttgttcacttgcagaaaaggagcgcaaggcagaggctctgaagcactttccttgtacatttggagagtggcattgccttttagataggatctaggagtgattttattgttttggagaatggaagggcccccatggccctggctttgtcatcagtgactgccatagcaacagcagctctgtacctcatctgttgatcccacctttgaagaggagacacagtgctcaccttaattgcgctggtagcagcttatatcccatgtatcattttcaccattgattggaagctgccttgggaattcagtaccaggcattacccctctgggtgggagagggagaagtgtaaagttggagtgggctggaatcaggtgtggcccgcccagtgtcctctgcagagtggtgaagtagtctggccctcttgggagccctgagtccaggaaaatatgtctgatggagtcaatctagggcttgtttcgaaaaagttcagttactctgtgcagctaaatgctttaggaggaaaggtaggcttaggttgcttttcctctgagggttgattgaaatttcttcagtgaggaatagagaaagggcaggaccctcctcatcacacagctggtgtttcaggctgtgaccaatgcagggtgggatttcctaactgtggatgaggggatgaggtgtctctgagggatgaggtgtctcagagaattgagtccatggggcagtcagaatagccttaagagaaaatcatgaaggagaagaggtcctcctttagctgcctctacttggtatcttagagagggcttagagggctctcagtcttctgcccatgaaaagacttctttgagcctctgccttcatggctcttagggttctgatcttgatatcagcagccccaaccactttctttctgaatgtctagtcagtatttttccccttttggtgttttatgaagccatgtggtaacgaatgaatctgtatcatttttcctacctgagtggcccaaagccagcaccaaaccctgggagtccctgaagcctaacagaacaggtagaacttgcaaaaggaatttggctgagagctcacttctaatcctgtactcactgtgtctttgtagatagaaacaagctagctttaccaaagagaaatagtgtcatagaagaacaaaacttcatatagaaagttctaggcaagtatttgatggtttccttaaggatgtgagctttgtatttccacctagccttgtaaaatgttcctgtggtattttgtgtcacacatcctacctttgatgagtctcacatcccaccttcctataaacagctaaattaattttgtttcatcttccccagaccaaaatgtttgataatcttatcaacattgtgggaggtcttgtgcaatggaaattttgccatttctccaaaactggtggcataaaggctgatgcttggggagaaccccattgctcgggacaggcaactctgttcaatgggatcttctttggtttgatgttcccattgttttctcagttctgggaagcctagtacattagtactaatgtaatcactgaaaccttttcttgaaataagggaagcagccaaactttgattaaagttgcaagttctggggacttgcgggggttgtcataaactgtaacagtgggttttggttcagcatgtaaatgcaactttgattttcttgaggaccgattgacctgtcatgtccctgtatcctcatgctcatcatctcagcaggcctgagaggctgggtcagtttgggtgttcatcatgaggattgcttctgccatggagctgatggacatgggcaggttgctgagaaggtggggtgaaagtgagtgccgggggtgggtgagtgccctggtcttgttcataggggagcctttccctagcagtggaacgctgtggtcattttctctagcatattcccttgggaagtctagatttgctattaatctggctgagaatctaagttctgtgccttagagacagtttgcactttcccatattgtgcctgggacagccatatgattttttttcccaccaaacaagtatgcaaacagaaaccagttcaaagggggatggagtaaaagatgaggcagtagaaatgcctttgaatggttttctgtagctaattctctttaaattttgtcctgctttttttctttatgcagtgctaggtgttttaagttttctagtagtattgcttttgagttacagtataacctgagttactcctctgctctaacattgttgcagaagaactagtttattgttagccaggttgcttgaaaggttgagagtggagtggtttggcatttctgttttaaataaacatttaagctcttaatcagtactgtgcttcagtaagcctgtgcatggaccttagtctctggggataaaacatccagattctaagcctccgtgaatctttgattctgtgagtctttatataaataatgttcttggaacagaaacaatgcaagggacatctgcacagaaatattctttgcttctctccagtttcttattcttgccagcagaatcattgctgctgctacagcttttttcccaaaaatgtctaaaagtgccgaaagtgcagagggagggaaaaaatgagccactaaaagaaggatgatcctttcttgtacctacctcctcagtctcagtgggggcctttccaagtgataatgccagtttatggtttgtaaaacttttccttcaaagagattgaactgaatttggtctccctggcatagcacagccaagttacaacttctcttggctgagcatttcactgaagtttaaagcaaaagtacactaaaaaatttcatttcacttgccatatgttcacaaacattcataatagaacaattcaggggcaagaatacattttaaataaattcattcacatgaaatccctaaacctccaaaaaagtattcatgatggtcagggcagagtgggctataatcaggactataaaacatgttcctaactgctgcaaagccaaaaatcatttattgtttcaatgattaactgtggaaataaacacgctgatcattaaacctcacagaatgatgaacattagggagaaaaactccactatgtcacatctctgttaccacctgtgtagctgtggagagtgataaattgataatgaaagcaaacattggccagaaggtgctgtgctgcattacatacattgctgttaagaaatactgtctcgggccagacgcagtggctcacgcctgtaatcccagcactttgggaggccgaggcgggcggatcacgaggtcaggagatcgagaccatcctggctaacacagtgaaatcccgtctctactaaaaatacaaaaaaattagctgggtgttgtggcaggtgcctgtagtcccagctactctggaggctgaggcaggagaatggcgtgaacccaggaggcggagtttgcagtgagctgagattgcgccacggtactccagcctgggcgacagagtgagactccatctcaaaaataaaaaaaaaaatactgtcttggcaggacaggcgcggtggctcacgcctgtaatcccagcactttgggaggccgaggtgggcaggtcaggagttcaagaccatcctggctaacacagtgaaaccccatctctactaaaaatacaaaaaatcagccgggcgtggtggtgggcgcctgtagtcccagctactcgggaggctggggcagaagaatggcgtgaacccgggaggcggagcttgcagtgggccaagatcactccactgcactccagcctgggtgacaagagcgagactccgtctcaaaaaaaaaaaaaaagaaatactgtctcggcacatctgcatacatttttaatgaaatgagtttccacatgaggagtttccccgtgaaatttctcctatggtgtaaccttatgaactttataatgtttacttgcactaaacatttcttggataaagttgtataaaatacagacattaagaagcagcatgcatttactgtcatcgtctgagctatccaggaagaaattcagatttttttaaaaaaaggttcttatctcttcccagagaccagatcaagataaatttaaaagatgaaagatatttcttttttttttttctttttttttttttgagatggattcttactaggtcaccaggctggagtgcagtggcgcgatctcagctcactgcaacctctgcctcctgggttcaagcaattctcctgcctcagcctcccgagtagttgggactacaggtgtgcgccaccacgcccagctaatttttgtatttttagtagagacggggtttcaccatgttggccaggatggtctcgatctcttgactttgtgatccgcccacctcggcctcccaaagtgctgggattacaggcatgagccaccatgctcggccttgaaagatatttctaatataaccaaggcctaaacatgtagagattaaagggaacacttaaggcattgactattgttttatttctttagcaaaatgagagcaaacaactgcttcctttttagaaagcactccccacatataacaacaatttgttctctctggagggcccggatctatgaccttactaacatccagcgatcccaaatccaagtgcctgtggtaccaggcagataaggtaaagaagtgaagcaggccaagtgagactgcagtggtctggtgctaccattcccatctggaggagcatctgattctaaaccccacccaatttgtgccatgcgggttgctggcccagtgtttccagaacttccagtttttcaagagatgttccatatcccagtttttaaatgtcagatcatattatgaatgctaggccagcgaaataaaacatctgtggagcaaagcaatccacatgttgccattttgtgaccttggccacagcttactcttgccatctattgcaatgtactggtttacattcccacttaaagtgtacatttcattgaacttgcctagggaatgtacctattaggttaaatatccattatctctgtgtgaggtttccttaaggggctaaccataaagctttattatgtgatacctcctttcctttggaacaattaaaaagagtgcaaagaaa

SEQ ID NO: 159475 - DNA, 657 bp, Homo sapiens
  Payload ID: 11205
  Gene Symbol: NEK9
  Gene Name: NIMA-related kinase 9
  ENST ID: ENST00000557673
  CDS Start-End: 272-657
gcttcgcggggttgctgggctgacggatccgcgggccggcatctgaagcgagcgggacgcagcgcggccagggcctccgggcatacgcaggctggtccccaaggcccgcggccgccgccatgtcggtgctgggcgagatgactcactggttgtgtggaaggaagtcgatttgacccggctgtctgagaaggaacgtcgtgatgccttgaatgagattgttattctggcactgctgcagcacgacaacattattgcctactacaatcacttcatggacaataccacgctgctgattgagctggaatattgtaatggagggaacctgtatgacaaaatccttcgtcagaaggacaagttgtttgaggaagagatggtggtgtggtacctatttcagattgtttcagcagtgagctgcatccataaagctggaatccttcatagagatataaagacattaaatatttttctgaccaaggcaaacctgataaaacttggagattatggcctagcaaagaaacttaattctgagtattccatggctgagacgcttgtgggaaccccatattacatgtctccagagctctgtcaaggagtaaagtacaatttcaagtctgatatctgggcagttggctgcgtcatttttgaactgcttacctt

SEQ ID NO: 159476 - DNA, 578 bp, Homo sapiens
  Payload ID: 11205
  Gene Symbol: NEK9
  Gene Name: NIMA-related kinase 9
  ENST ID: ENST00000554258
  CDS Start-End: 13-327
gcggccgccgccatgtcggtgctgggcgagtacgagcgacactgcgattccatcaactcggactttgggagcgagtccgggggttgcggggactcgagtccggggcctagcgccagtcaggggccgcgagccggcggcggcgcggcggagcaggaggaactgcactacatccccatccgcgtcctgggccgcggcgccttcggggaagccacgctgtaccgccgcaccgaggagggaacctgtatgacaaaatccttcgtcagaaggacaagttgtttgaggaagagatggtggtgtggtacctatttcagattgtttcagcagtgagctgcatccataaagctggaatccttcatagagatataaagacattaaatatttttctgaccaaggcaaacctgataaaacttggagattatggcctagcaaagaaacttaattctgagtattccatggctgagacgcttgtgggaaccccatattacatgtctccagagctctgtcaaggagtaaagtacaatttcaagtctgatatctgggcagttggctgcgtcatttttgaactgcttaccttaaag

SEQ ID NO: 159477 - DNA, 577 bp, Homo sapiens
  Payload ID: 11205
  Gene Symbol: NEK9
  Gene Name: NIMA-related kinase 9
  ENST ID: ENST00000553823
  CDS Start-End: 359-577
actggacgacctctgggcctccaagttgtatgagtccggaccggggaggcagagaagggtcaatagacccgagaggccgtaccgtcagtgatgcccttgttcccgtgggagcccttcggttccacgcggttcccaccacgcgcccgccaaccctagcccgaggcctcactttgcaggccttccccgaaagcgggaagccttggccgctagactagccaagagggatgactcactggttgtgtggaaggaagtcgatttgacccggctgtctgagaaggaacgtcgtgatgccttgaatgagattgttattctggcactgctgcagcacgacaacattattgcctactacaatcacttcatggacaataccacgctgctgattgagctggaatattgtaatggagggaacctgtatgacaaaatccttcgtcagaaggacaagttgtttgaggaagagatggtggtgtggtacctatttcagattgtttcagcagtgagctgcatccataaagctggaatccttcatagagatataaagacattaaatatttttctgaccaaggcaaacctgataaaa

SEQ ID NO: 159478 - DNA, 786 bp, Homo sapiens
  Payload ID: 11205
  Gene Symbol: NEK9
  Gene Name: NIMA-related kinase 9
  ENST ID: ENST00000553945
  CDS Start-End: 487-603
gagccaccatcgagcttcgcggggttgctgggctgacggatccgcgggccggcatctgaagcgagcgggacgcagcgcggccagggcctccgggcatacgcaggctggtccccaaggcccgcggccgccgccatgtcggtgctgggcgagtacgagcgacactgcgattccatcaactcggactttgggagcgagtccgggggttgcggggactcgagtccggggcctagcgccagtcaggggccgcgagccggcggcggcgcggcggagcaggaggaactgcactacatccccatccgcgtcctgggccgcggcgccttcggggaagccacgctgtaccgccgcaccgaggatgactcactggttgtgtggaaggaagtcgatttgacccggctgtctgagaaggaacgtcgtgatgccttgaatgagattgttattctggcactgctgcagcacgacaacattattgcctactacaatcacttcatggacaataccacgctgctgattgagctggaatattgtaatggagggaacctgtatgacaaaatccttcgtcagaaggacaagttgtttgaggaagagactccttccaggctctgatattcatgagaaaggaaacctctaacaaggaagctgtctatagctgcttcctaaacgttttacctccacatcatgattctctgtgggctttctttcctggttctattactgcgtactgatggtggtgtggtacctatttcagattgtttcagcagtgagctgcatccataaagctggaatcct

SEQ ID NO: 159479 - DNA, 1734 bp, Homo sapiens
  Payload ID: 11206
  Gene Symbol: NOB1
  Gene Name: NIN1/RPN12 binding protein 1 homolog
  Uniprot ID: Q9ULX3
  ENST ID: ENST00000268802
  CDS Start-End: 31-1269
gcatgcgcgctcccctctcacgcagccaacatggctccagtggagcacgttgtggcggatgctggggctttcctgcggcatgcggctctgcaggacatcgggaagaacatttacaccatccgggaggtggtcactgagattcgggacaaggccacacgcaggcggctcgctgtcctgccctacgagctgcggttcaaggagcccttaccggaatacgtgcggctggtgactgagttttcaaagaaaacaggagactaccccagcctctctgccacggacatccaagtgcttgcactcacataccagttggaagcagagtttgttggggtgtctcacctaaaacaagaaccacagaaggttaaggtgagctcatcgattcagcacccagaaacacctctgcacatttctggtttccatctgccctacaagcctaaacccccacaagaaacagaaaaaggacactcagcttgtgagcctgagaacctggaatttagttccttcatgttctggagaaaccctttgcccaacatcgatcatgaactgcaggagctgctgattgacagaggtgaggacgttccaagtgaggaggaggaggaggaagaaaacgggtttgaagacagaaaagatgacagcgatgacgacgggggtggctggataacccccagtaacatcaagcagatccagcaggagctggagcagtgtgacgtccccgaggacgtgcgggttggctgcctgaccacagacttcgccatgcagaatgttctgctgcagatggggctgcacgtgctggcggtgaacggcatgctgattcgtgaggcccggagctacatcttgcgctgccatggctgtttcaagacaacgtctgacatgagccgagtgttctgctcacactgtgggaacaagaccctgaagaaagtgtccgtgaccgtcagcgacgacggcaccctgcacatgcacttctcccgcaaccccaaggtgctgaacccccgcggcctccggtactcgcttcccactcccaaagggggcaaatacgccatcaacccccatctcaccgaggatcagcgcttccctcagctgcgactctcccaaaaggccaggcagaaaaccaacgtgttcgcccctgactacatcgccggggtgtcaccctttgtcgagaatgacatctccagccgctcagctaccctgcaggtccgggacagcaccttgggagctgggcggagacgcttaaatcccaacgcttccagaaagaagtttgtgaagaaaaggtgaagagcgagttcccgcaggcaaattggatgggcgtctggccgccgtggagttccggtgacccatttccccagccgtgtcgtctccaggaccacccgatggaaataacaggcgggcttcacggtgcggctctgtccgcccatgccccgctgggtctgcagggaactggactgtcccatggcctgtgagcaccggagcgcctggctgcctgccaaggaagtgcaattgcataaaaacagaaagaacaacgccctggagccaatcttcaagaaaggaatttccaaaggataatatttttctaataaatgcggctgcaacctcctgtgcatttaattaaataggccaaatttttgctgcttaggtcatctcaaggctgatacttgagctgtgtgcccagagatcatgcatttagatttatatttttgccagaaaatacaaggttataataaaactaagaactaccatttc

SEQ ID NO: 159480 - DNA, 812 bp, Homo sapiens
  Payload ID: 11206
  Gene Symbol: NOB1
  Gene Name: NIN1/RPN12 binding protein 1 homolog
  ENST ID: ENST00000564620
  CDS Start-End: 5-205
caacatggctccagtggagcacgttgtggcggatgctggggctttcctgcggcatgcggctctgcaggacatcgggaagaacatttacaccatccgggaggtggtcactgagattcgggacaaggccacacgcaggcggctcgctgtcctgccctacgagctgcggttcaaggagcccttaccggaatacgtgcggctgggttaaggtgagctcatcgattcagcacccagaaacacctctgcacatttctggtttccatctgccctacaagcctaaacccccacaagaaacagaaaaaggacactcagcttgtgagcctgagaacctggaatttagttccttcatgttctggagaaaccctttgcccaacatcgatcatgaactgcaggagctgctgattgacagaggtgaggacgttccaagtgaggaggaggaggaggaagaaaacgggtttgaagacagaaaagatgacagcgatgacgacgggggtggctggataacccccagtaacatcaagcagatccagcaggagctggagcagtgtgacgtccccgaggacgtgcgggttggctgcctgaccacagacttcgccatgcagaatgttctgctgcagatggggctgcacgtgctggcggtgaacggcatgctgattcgtgaggcccggagctacatcttgcgctgccatggctgtttcaagacaacgtctgacatgagccgagtgttctgctcacactgtgggaacaagaccctgaagaaagtgtccgtgaccgtcagcgacgacggcaccctgcacatgcacttctcccgcaac

SEQ ID NO: 159481 - DNA, 845 bp, Homo sapiens
  Payload ID: 11206
  Gene Symbol: NOB1
  Gene Name: NIN1/RPN12 binding protein 1 homolog
  ENST ID: ENST00000569871
  CDS Start-End: 15-215
ctcacgcagccaacatggctccagtggagcacgttgtggcggatgctggggctttcctgcggcatgcggctctgcaggacatcgggaagaacatttacaccatccgggaggtggtcactgagattcgggacaaggccacacgcaggcggctcgctgtcctgccctacgagctgcggttcaaggagcccttaccggaatacgtgcggctgggttaaggtgagctcatcgattcagcacccagaaacacctctgcacatttctggtttccatctgccctacaagcctaaacccccacaagaaacagaaaaaggacactcagcttgtgagcctgagaacctggaatttagttccttcatgttctggagaaaccctttgcccaacatcgatcatgaactgcaggagctgctgattgacagaggtgaggacgttccaagtgaggaggaggaggaggaagaaaacgggtttgaagacagaaaagatgacagcgatgacgacgggggtggctggataacccccagtaacatcaagcagatccagcaggagctggagcagtgtgacgtccccgaggacgtgcggaatgttctgctgcagatggggctgcacgtgctggcggtgaacggcatgctgattcgtgaggcccggagctacatcttgcgctgccatggctgtttcaagacaacgtctgacatgagccgagtgttctgctcacactgtgggaacaagaccctgaagaaagtgtccgtgaccgtcagcgacgacggcaccctgcacatgcacttctcccgcaaccccaaggtgctgaacccccgcggcctccggtactcgcttcccactcccaaaggggg

SEQ ID NO: 159482 - DNA, 10293 bp, Homo sapiens
  Payload ID: 11207
  Gene Symbol: NIN
  Gene Name: ninein (GSK3B interacting protein)
  Uniprot ID: Q8N4C6
  ENST ID: ENST00000245441
  CDS Start-End: 192-6593
ccgagccgggagccgagcgcgctgggcgcggccgtcccgctgccgccgccaagcccggagtgcgccagcggccatggttcccgcggcggcgccgggcgcctgagccccgggacgcaagcgctggaggcgggctgccggctgtgcgggcgctccggagagaccgacagaaggtgagcactgtgggctatgggatggatgaggtggagcaggaccagcatgaggcccgactcaaggagctgtttgacagttttgacacgacgggcacagggtccctggggcaggaggaactcaccgacctttgccacatgttgagcttggaggaggtggccccagtgctgcagcagacattacttcaggacaacctcttgggcagggtacattttgaccaatttaaagaagcattaatactcatcttgtccagaactctgtcaaatgaagaacactttcaagaaccagactgctcactagaagctcagcccaaatatgttagaggtgggaagcgttacggacgaaggtccttgcccgagttccaagagtccgtggaggagtttcctgaagtgacggtgattgagccactggatgaagaagcgcggccttcacacatcccagccggtgactgcagtgagcactggaagacgcaacgcagtgaggagtatgaagcggaaggccagttaaggttttggaacccagatgacttgaatgcttcacagagtggatcttcccctccccaagactggatagaagagaaactgcaagaagtttgtgaagatttggggatcacccgtgatggtcacctgaaccggaagaagctggtctccatctgtgagcagtatggtttacagaatgtggatggagagatgctcgaggaagtattccataatcttgatcctgacggtacaatgagtgtagaagattttttctatggtttgtttaaaaatggaaaatctcttacaccatcagcatctactccatatagacaactaaaaaggcacctttccatgcagtctttcgatgagagtggacgacgtaccacaacctcatcagcaatgacaagtaccattggctttcgggtcttctcctgcctggatgatgggatgggccatgcatctgtggagagaatactggacacctggcaggaagagggcattgagaacagccaggagatcctgaaggccttggatttcagcctcgatggaaacatcaatttgacagaattaacactggcccttgaaaatgaacttttggttaccaagaacagcattcaccaggcggctctggccagctttaaggctgaaatccggcatttgttggaacgagttgatcaggtggtcagagaaaaagagaagctacggtcagatctggacaaggccgagaagctcaagtctttaatggcctcggaggtggatgatcaccatgcggccatagagcggcggaatgagtacaacctcaggaaactggatgaagagtacaaggagcgaatagcagccttaaaaaatgaactccgaaaagagagagagcagatcctgcagcaggcaggcaagcagcgtttagaacttgaacaggaaattgaaaaggcaaaaacagaagagaactatatccgggaccgccttgccctctctttaaaggaaaacagtcgtctggaaaatgagcttctagaaaatgcagagaagttggcagaatatgagaatctgacaaacaaacttcagagaaatttggaaaatgtgttagcagaaaagtttggtgacctcgatcctagcagtgctgagttcttcctgcaagaagagagactgacacagatgagaaatgaatatgagcggcagtgcagggtactacaagaccaagtagatgaactccagtctgagctggaagaatatcgtgcacaaggcagagtgctcaggcttccgttgaagaactcaccgtcagaagaagttgaggctaacagcggtggcattgagcccgaacacgggctcggttctgaagaatgcaatccattgaatatgagcattgaggcagagctggtcattgaacagatgaaagaacaacatcacagggacatatgttgcctcagactggagctcgaagataaagtgcgccattatgaaaagcagctggacgaaaccgtggtcagctgcaagaaggcacaggagaacatgaagcaaaggcatgagaacgaaacgcacaccttagaaaaacaaataagtgaccttaaaaatgaaattgctgaacttcaggggcaagcagcagtgctcaaggaggcacatcatgaggccacttgcaggcatgaggaggagaaaaaacaactgcaagtgaagcttgaggaggaaaagactcacctgcaggagaagctgaggctgcaacatgagatggagctcaaggctagactgacacaggctcaagcaagctttgagcgggagagggaaggccttcagagtagcgcctggacagaagagaaggtgagaggcttgactcaggaactagagcagtttcaccaggagcagctgacaagcctggtggagaaacacactcttgagaaagaggagttaagaaaagagctcttggaaaagcaccaaagggagcttcaggagggaagggaaaaaatggaaacagagtgtaatagaagaacctctcaaatagaagcccagtttcagtctgattgtcagaaagtcactgagaggtgtgaaagcgctctgcaaagcctggaggggcgctaccgccaagagctgaaggacctccaggaacagcagcgtgaggagaaatcccagtgggaatttgagaaggacgagctcacccaggagtgtgcggaagcccaggagctgctgaaagagactcttaagagagagaaaacaacttctctggtcctgacccaggagagagagatgctggagaaaacatacaaagaacatttgaacagcatggtcgtcgagagacagcagctactccaagacctggaagacctaagaaatgtatctgaaacccagcaaagcctgctgtctgaccagatacttgagctgaagagcagtcacaaaagggaactgagggagcgtgaggaggtcctgtgccaggcaggggcttcggagcagctggccagccagcggctggaaagactagaaatggaacatgaccaggaaaggcaggaaatgatgtccaagcttctagccatggagaacattcacaaagcgacctgtgagacagcagatcgagaaagagccgagatgagcacagaaatctccagacttcagagtaaaataaaggaaatgcagcaggcaacatctcctctctcaatgcttcagagtggttgccaggtgataggagaggaggaggtggaaggagatggagccctgtccctgcttcagcaaggggagcagctgttggaagaaaatggggacgtcctcttaagcctgcagagagctcatgaacaggcagtgaaggaaaatgtgaaaatggctactgaaatttctagattgcaacagaggctacaaaagttagagccagggttagtaatgtcttcttgtttggatgagccagctactgagttttttggaaatactgcggaacaaacagagcagtttttacagcaaaaccgaacgaagcaagtagaaggtgtgaccaggcggcatgtcctaagtgacctggaagatgatgaggtccgggacctgggaagtacagggacgagctctgttcagagacaggaagtcaaaatagaggagtctgaagcttcagtagagggtttttctgagcttgaaaacagtgaagagaccaggactgaatcctgggagctgaagaatcagattagtcagcttcaggaacagctaatgatgttatgtgcggactgtgatcgagcttctgaaaagaaacaggacctactttttgatgtttctgtgctaaaaaagaaactgaagatgcttgagagaatccctgaggcttctcccaaatataagctgttgtatgaagatgtgagccgagaaaatgactgccttcaggaagagctgagaatgatggagacacgctacgatgaggcactagaaaataacaaagaactcactgcagaggttttcaggttgcaggatgagctgaagaaaatggaggaagtcactgaaacattcctcagcctggaaaagagttacgatgaggtcaaaatagaaaatgaggggctgaatgttctggttttgagacttcaaggcaagattgagaagcttcaggaaagcgtggtccagcggtgtgactgctgcttatgggaagccagtttagagaacctggaaatcgaacctgatggaaatatactccagctcaatcagacactggaagagtgtgtgcccagggttaggagtgtacatcatgtcatagaggaatgtaagcaagaaaaccagtaccttgaggggaacacacagctcttggaaaaagtaaaagcacatgaaattgcctggttacatggaacaattcagacacatcaagaaaggccaagagtacagaatcaagttatactggaggaaaacactactctcctaggctttcaagacaaacattttcagcatcaggccaccatagcagagttagaactggagaaaacaaagttacaggagctgactaggaagttgaaggagagagtcactattttagttaagcaaaaagatgtactttctcacggagaaaaggaggaagagctgaaggcaatgatgcatgacttgcagatcacgtgcagtgagatgcagcaaaaagttgaacttctgagatatgaatctgaaaagcttcaacaggaaaattctattttgagaaatgaaattactactttaaatgaagaagatagcatttctaacctgaaattagggacattaaatggatctcaggaagaaatgtggcaaaaaacggaaactgtaaaacaagaaaatgctgcagttcagaagatggttgaaaatttaaagaaacagatttcagaattaaaaatcaaaaaccaacaattggatttggaaaatacagaacttagccaaaagaactctcaaaaccaggaaaaactgcaagaacttaatcaacgtctaacagaaatgctatgccagaaggaaaaagagccaggaaacagtgcattggaggaacgggaacaagagaagtttaatctgaaagaagaactggaacgttgtaaagtgcagtcctccactttagtgtcttctctggaggcggagctctctgaagttaaaatacagacccatattgtgcaacaggaaaaccaccttctcaaagatgaactggagaaaatgaaacagctgcacagatgtcccgatctctctgacttccagcaaaaaatctctagtgttctaagctacaacgaaaaactgctgaaagaaaaggaagctctgagtgaggaattaaatagctgtgtcgataagttggcaaaatcaagtcttttagagcatagaattgcgacgatgaagcaggaacagaaatcctgggaacatcagagtgcgagcttaaagtcacagctggtggcttctcaggaaaaggttcagaatttagaagacaccgtgcagaatgtaaacctgcaaatgtcccggatgaaatctgacctacgagtgactcagcaggaaaaggaggctttaaaacaagaagtgatgtctttacataagcaacttcagaatgctggtggcaagagctgggccccagagatagctactcatccatcagggctccataaccagcagaaaaggctgtcctgggacaagttggatcatctgatgaatgaggaacagcagctgctttggcaagagaatgagaggctccagaccatggtacagaacaccaaagccgaactcacgcactcccgggagaaggtccgtcagttggaatccaatcttcttcccaagcaccaaaaacatctaaacccatcaggtaccatgaatcccacagagcaagaaaaattgagcttaaagagagagtgtgatcagtttcagaaagaacaatctcctgctaacaggaaggtcagtcagatgaattcccttgaacaagaattagaaacaattcatttggaaaatgaaggcctgaaaaagaaacaagtaaaactggatgagcagctcatggagatgcagcacctgaggtccactgcgacgcctagcccgtcccctcatgcttgggatttgcagctgctccagcagcaagcctgtccgatggtgcccagggagcagtttctgcagcttcaacgccagctgctgcaggcagaaaggataaaccagcacctgcaggaggaacttgaaaacaggacctccgaaaccaacacaccacagggaaaccaggaacaactggtaactgtcatggaggaacgaatgatagaagttgaacagaaactgaaactagtgaaaaggcttcttcaagagaaagtgaatcagctcaaagaacaactctgcaagaacactaaggcagacgcaatggtgaaggacttgtatgttgaaaatgcccagttgttgaaagctctggaagtgactgaacagcgacagaaaacagcagagaagaaaaattacctcctggaggagaagattgccagcctcagtaatatagttaggaatctgacaccagcgccattgacttctacacctcctttgaggtcatagccaaaccaaagggtacactcatatttgtgcactttactgaaatagatgaacatttcagtaggttctcaacttaaaattaagcctaacctaaaactgccagcaacacaactggagtttccatttatcataattagtttttctaaatagacccttatgggagtttgaaaataaatactcacatatttcactacttaaattattcccaagatttgaatttattttaaaattttaatagccaccaagaatgtggacatatgaaaattcaagaacctaaaaaataccagttttgaatgagtttttgtggttttggttttttttttaattattacaaatctatgtgtaaaatctagatatttgaagtttgagatctgatgagaatggttgttataaactttattttaaaaccaaatttaggtgttcttacatatttaaatactggaaagtcattataatagttttggttctttgaattggtagacaattagtagagtataattggttaggaggcagggcttattaagtggttattaaccgctgacatcagacaaacccaaatctgtagaattctaaccttctaacacctgtgacagtattaccactcttcttgtattatagatttagaactgatttactcaattgcactcttaactaatgttaaaagcttacttgctttaaacagccttttcttctttctcttaaaagtttcatttggggagctggtcttctaagaaacggataaagccacataattaaagcagttgaactatagggaaagcactgaacaaaccactttggagtaaatagctactcttagaaaagagggataagcagaccatgtaggttttctgtctctcaaatcttagagttcataaatttacttgaggttgcctcaagaactcagggaacaatactgtaaactgtcttcctgaactactgtagggcctctctaagaatttgaaatgtataaaccatgtgacctcatttatttgtcttatatatttacagccatactagaatttttatttctacgtttttagtaaatttaatattctgggggaaaaaaggccttgattttagggttaaaaacctgacttatagaagagtttatttaatataggtcaaaattttctgtgtttcttattccttctatacctcaaatctgattctaagaatttcttactgtgataatcattggcatgccacctgaggtcaaggagtgccaaataggactttccactcatgctcaagatcaaaactttatagaacagtcaacattttagattcggtaaccttttttttcttccaattataatctctgctagccacttccgccagcagttggtggaagacttactaggtgcagggcactttccaagttcatcacaacaacctgcttgttttcatgagacaataatccgaaaagttcgctttgatatattcctggagggccaagcccatctatttacaaaaggtgaacagcaaaatcaagcactgctttatgggcaggaacacaagagaaagcaaactgcccaagaagtcatcatgtcagaaactcaatctcaacaaaataatttccatcagggaacttcagggtttcttgggggcttatgagtctcaccggtcaacccaggaggcctcactacaagagccttgacaaggcactgttttttgtgggactgggagttcacactgatgaagcaaacctttgaatttttgcacagctcttgtcagaaagccctgagttccccctggataaagagttaattttaatccttccctataattatacttcaaaatatttgacatctgctattatgccttctttagatctttcttctgtggtgcagacatttctagtaagtgtttgactacttgtatggcattagctttcacagaaaattgtttcacttaaaactgtggattggcctaggctaaggacaaaaataaactaagtacctgtagtgtatttatgtgatatgtgtcaagttactcaaagttattgctgttggaactgaacaataatatttcccagatagctggccttagcatgtgatcacggttgttgtatttttaatttttgtcttttacagtatgagaggtgtaggttaatttgtttatttcctataaatttgtatttatgtgtatataaaatgtacaatgaatgtaaatatgactttctggaaagtttagactacatttagaatctctattcaaaatcaaaatgctgctcaaatgaatttaaccaacatctaggtgcttaatttctcattttatcccacttatgagattgggaaaaagatcaatatgagaaataccatacagataccttaaatgtatgcatttgtgcaacaatttttgagaaggtgagtggcaatttataatttagttggcaatttataatagaacttatagcttttaaaagaccttttaaagacattaaatgtaaacttaaaaatgtttagatcttgtttcaaactttacaatagcattcttcaaaatattaagttatatattttataggcatttagttgcttattaaaagcactgattttcaaactttttgatttaagaacaattatttaagatcgtctcagaagatgggatcttcgtttcaagaaaagggaatcaagtttgcctttgagataatacgttacactaagaaaaggaaaatgtggatagtaaaacccacctctctcatcctattgtactctcttctgctttttagaagcctgcacttaagcttagatttgtgaagggagagtagaaggggagaagtagaaccacagtgttttatttatttttctaaaactcttactaaatccagattttttaaactgttttaaatgtgaattcttcccagaaatttcaatgcattgcatatttagccttcggcatatttttcatgaatagatcatgaagtcataggcttccaaggcataggaagagatcttgcaggtctagtattttaataatgcactattacccagggcagatattatgagaaactgtttcttctctaagggtttatggcagactttgcttttttaacatgtgagaaatgaattttttattttgtgatttatgtgatttcttttgctgagtgaaggaaaggagaaattgttgctattgtcagcatcttaaaggtatttccagtcaaggcaaggctaagtgctttgtgatagtattaagcaagtcatgttttgaatggattacctgtagtgactcattggaatgatataattatacaagtaatgccaaaaaccaagtcaaagcctaattaaccaaagcactcatttaaaaatcatcatgtttggacctatctggacctctcagcactgtaaaatagttttggttttgtggcatatgaatagctgtttaacaaatcaaagttagctttttgcttctcagcttttttgggcaatacaagttaagttcttaatggggagacattatcatggcatgacttaagggaacattggtttgtgaaggaaaaacagattatctaaagccatctctatgtttctgttcagataaagattaatgagttctgtgtttatatcagctttgtatatttcatcttagccattctatcctagaaagattttaatgtgagcttaagatgtaaataaataattttgcaaacatgccttttgttttctatataccctgaccttttaataaagtttcagtgtatttatca

SEQ ID NO: 159483 - DNA, 4364 bp, Homo sapiens
  Payload ID: 11207
  Gene Symbol: NIN
  Gene Name: ninein (GSK3B interacting protein)
  Uniprot ID: Q8N4C6
  ENST ID: ENST00000324330
  CDS Start-End: 192-4325
ccgagccgggagccgagcgcgctgggcgcggccgtcccgctgccgccgccaagcccggagtgcgccagcggccatggttcccgcggcggcgccgggcgcctgagccccgggacgcaagcgctggaggcgggctgccggctgtgcgggcgctccggagagaccgacagaaggtgagcactgtgggctatgggatggatgaggtggagcaggaccagcatgaggcccgactcaaggagctgtttgacagttttgacacgacgggcacagggtccctggggcaggaggaactcaccgacctttgccacatgttgagcttggaggaggtggccccagtgctgcagcagacattacttcaggacaacctcttgggcagggtacattttgaccaatttaaagaagcattaatactcatcttgtccagaactctgtcaaatgaagaacactttcaagaaccagactgctcactagaagctcagcccaaatatgttagaggtgggaagcgttacggacgaaggtccttgcccgagttccaagagtccgtggaggagtttcctgaagtgacggtgattgagccactggatgaagaagcgcggccttcacacatcccagccggtgactgcagtgagcactggaagacgcaacgcagtgaggagtatgaagcggaaggccagttaaggttttggaacccagatgacttgaatgcttcacagagtggatcttcccctccccaagactggatagaagagaaactgcaagaagtttgtgaagatttggggatcacccgtgatggtcacctgaaccggaagaagctggtctccatctgtgagcagtatggtttacagaatgtggatggagagatgctcgaggaagtattccataatcttgatcctgacggtacaatgagtgtagaagattttttctatggtttgtttaaaaatggaaaatctcttacaccatcagcatctactccatatagacaactaaaaaggcacctttccatgcagtctttcgatgagagtggacgacgtaccacaacctcatcagcaatgacaagtaccattggctttcgggtcttctcctgcctggatgatgggatgggccatgcatctgtggagagaatactggacacctggcaggaagagggcattgagaacagccaggagatcctgaaggccttggatttcagcctcgatggaaacatcaatttgacagaattaacactggcccttgaaaatgaacttttggttaccaagaacagcattcaccaggcggctctggccagctttaaggctgaaatccggcatttgttggaacgagttgatcaggtggtcagagaaaaagagaagctacggtcagatctggacaaggccgagaagctcaagtctttaatggcctcggaggtggatgatcaccatgcggccatagagcggcggaatgagtacaacctcaggaaactggatgaagagtacaaggagcgaatagcagccttaaaaaatgaactccgaaaagagagagagcagatcctgcagcaggcaggcaagcagcgtttagaacttgaacaggaaattgaaaaggcaaaaacagaagagaactatatccgggaccgccttgccctctctttaaaggaaaacagtcgtctggaaaatgagcttctagaaaatgcagagaagttggcagaatatgagaatctgacaaacaaacttcagagaaatttggaaaatgtgttagcagaaaagtttggtgacctcgatcctagcagtgctgagttcttcctgcaagaagagagactgacacagatgagaaatgaatatgagcggcagtgcagggtactacaagaccaagtagatgaactccagtctgagctggaagaatatcgtgcacaaggcagagtgctcaggcttccgttgaagaactcaccgtcagaagaagttgaggctaacagcggtggcattgagcccgaacacgggctcggttctgaagaatgcaatccattgaatatgagcattgaggcagagctggtcattgaacagatgaaagaacaacatcacagggacatatgttgcctcagactggagctcgaagataaagtgcgccattatgaaaagcagctggacgaaaccgtggtcagctgcaagaaggcacaggagaacatgaagcaaaggcatgagaacgaaacgcacaccttagaaaaacaaataagtgaccttaaaaatgaaattgctgaacttcaggggcaagcagcagtgctcaaggaggcacatcatgaggccacttgcaggcatgaggaggagaaaaaacaactgcaagtgaagcttgaggaggaaaagactcacctgcaggagaagctgaggctgcaacatgagatggagctcaaggctagactgacacaggctcaagcaagctttgagcgggagagggaaggccttcagagtagcgcctggacagaagagaaggtgagaggcttgactcaggaactagagcagtttcaccaggagcagctgacaagcctggtggagaaacacactcttgagaaagaggagttaagaaaagagctcttggaaaagcaccaaagggagcttcaggagggaagatatgaatctgaaaagcttcaacaggaaaattctattttgagaaatgaaattactactttaaatgaagaagatagcatttctaacctgaaattagggacattaaatggatctcaggaagaaatgtggcaaaaaacggaaactgtaaaacaagaaaatgctgcagttcagaagatggttgaaaatttaaagaaacagatttcagaattaaaaatcaaaaaccaacaattggatttggaaaatacagaacttagccaaaagaactctcaaaaccaggaaaaactgcaagaacttaatcaacgtctaacagaaatgctatgccagaaggaaaaagagccaggaaacagtgcattggaggaacgggaacaagagaagtttaatctgaaagaagaactggaacgttgtaaagtgcagtcctccactttagtgtcttctctggaggcggagctctctgaagttaaaatacagacccatattgtgcaacaggaaaaccaccttctcaaagatgaactggagaaaatgaaacagctgcacagatgtcccgatctctctgacttccagcaaaaaatctctagtgttctaagctacaacgaaaaactgctgaaagaaaaggaagctctgagtgaggaattaaatagctgtgtcgataagttggcaaaatcaagtcttttagagcatagaattgcgacgatgaagcaggaacagaaatcctgggaacatcagagtgcgagcttaaagtcacagctggtggcttctcaggaaaaggttcagaatttagaagacaccgtgcagaatgtaaacctgcaaatgtcccggatgaaatctgacctacgagtgactcagcaggaaaaggaggctttaaaacaagaagtgatgtctttacataagcaacttcagaatgctggtggcaagagctgggccccagagatagctactcatccatcagggctccataaccagcagaaaaggctgtcctgggacaagttggatcatctgatgaatgaggaacagcagctgctttggcaagagaatgagaggctccagaccatggtacagaacaccaaagccgaactcacgcactcccgggagaaggtccgtcagttggaatccaatcttcttcccaagcaccaaaaacatctaaacccatcaggtaccatgaatcccacagagcaagaaaaattgagcttaaagagagagtgtgatcagtttcagaaagaacaatctcctgctaacaggaaggtcagtcagatgaattcccttgaacaagaattagaaacaattcatttggaaaatgaaggcctgaaaaagaaacaagtaaaactggatgagcagctcatggagatgcagcacctgaggtccactgcgacgcctagcccgtcccctcatgcttgggatttgcagctgctccagcagcaagcctgtccgatggtgcccagggagcagtttctgcagcttcaacgccagctgctgcaggcagaaaggataaaccagcacctgcaggaggaacttgaaaacaggacctccgaaaccaacacaccacagggaaaccaggaacaactggtaactgtcatggaggaacgaatgatagaagttgaacagaaactgaaactagtgaaaaggcttcttcaagagaaagtgaatcagctcaaagaacaagtgagcctacccggtcatctctgttcacccacctcacattccagctttaactccagttttacatccctttattgccattaactcgttaacttatgttgtctaataaaggcaaattctatt

SEQ ID NO: 159484 - DNA, 6496 bp, Homo sapiens
  Payload ID: 11207
  Gene Symbol: NIN
  Gene Name: ninein (GSK3B interacting protein)
  Uniprot ID: Q8N4C6
  ENST ID: ENST00000382041
  CDS Start-End: 192-6464
ccgagccgggagccgagcgcgctgggcgcggccgtcccgctgccgccgccaagcccggagtgcgccagcggccatggttcccgcggcggcgccgggcgcctgagccccgggacgcaagcgctggaggcgggctgccggctgtgcgggcgctccggagagaccgacagaaggtgagcactgtgggctatgggatggatgaggtggagcaggaccagcatgaggcccgactcaaggagctgtttgacagttttgacacgacgggcacagggtccctggggcaggaggaactcaccgacctttgccacatgttgagcttggaggaggtggccccagtgctgcagcagacattacttcaggacaacctcttgggcagggtacattttgaccaatttaaagaagcattaatactcatcttgtccagaactctgtcaaatgaagaacactttcaagaaccagactgctcactagaagctcagcccaaatatgttagaggtgggaagcgttacggacgaaggtccttgcccgagttccaagagtccgtggaggagtttcctgaagtgacggtgattgagccactggatgaagaagcgcggccttcacacatcccagccggtgactgcagtgagcactggaagacgcaacgcagtgaggagtatgaagcggaaggccagttaaggttttggaacccagatgacttgaatgcttcacagagtggatcttcccctccccaagactggatagaagagaaactgcaagaagtttgtgaagatttggggatcacccgtgatggtcacctgaaccggaagaagctggtctccatctgtgagcagtatggtttacagaatgtggatggagagatgctcgaggaagtattccataatcttgatcctgacggtacaatgagtgtagaagattttttctatggtttgtttaaaaatggaaaatctcttacaccatcagcatctactccatatagacaactaaaaaggcacctttccatgcagtctttcgatgagagtggacgacgtaccacaacctcatcagcaatgacaagtaccattggctttcgggtcttctcctgcctggatgatgggatgggccatgcatctgtggagagaatactggacacctggcaggaagagggcattgagaacagccaggagatcctgaaggccttggatttcagcctcgatggaaacatcaatttgacagaattaacactggcccttgaaaatgaacttttggttaccaagaacagcattcaccaggcggctctggccagctttaaggctgaaatccggcatttgttggaacgagttgatcaggtggtcagagaaaaagagaagctacggtcagatctggacaaggccgagaagctcaagtctttaatggcctcggaggtggatgatcaccatgcggccatagagcggcggaatgagtacaacctcaggaaactggatgaagagtacaaggagcgaatagcagccttaaaaaatgaactccgaaaagagagagagcagatcctgcagcaggcaggcaagcagcgtttagaacttgaacaggaaattgaaaaggcaaaaacagaagagaactatatccgggaccgccttgccctctctttaaaggaaaacagtcgtctggaaaatgagcttctagaaaatgcagagaagttggcagaatatgagaatctgacaaacaaacttcagagaaatttggaaaatgtgttagcagaaaagtttggtgacctcgatcctagcagtgctgagttcttcctgcaagaagagagactgacacagatgagaaatgaatatgagcggcagtgcagggtactacaagaccaagtagatgaactccagtctgagctggaagaatatcgtgcacaaggcagagtgctcaggcttccgttgaagaactcaccgtcagaagaagttgaggctaacagcggtggcattgagcccgaacacgggctcggttctgaagaatgcaatccattgaatatgagcattgaggcagagctggtcattgaacagatgaaagaacaacatcacagggacatatgttgcctcagactggagctcgaagataaagtgcgccattatgaaaagcagctggacgaaaccgtggtcagctgcaagaaggcacaggagaacatgaagcaaaggcatgagaacgaaacgcacaccttagaaaaacaaataagtgaccttaaaaatgaaattgctgaacttcaggggcaagcagcagtgctcaaggaggcacatcatgaggccacttgcaggcatgaggaggagaaaaaacaactgcaagtgaagcttgaggaggaaaagactcacctgcaggagaagctgaggctgcaacatgagatggagctcaaggctagactgacacaggctcaagcaagctttgagcgggagagggaaggccttcagagtagcgcctggacagaagagaaggtgagaggcttgactcaggaactagagcagtttcaccaggagcagctgacaagcctggtggagaaacacactcttgagaaagaggagttaagaaaagagctcttggaaaagcaccaaagggagcttcaggagggaagggaaaaaatggaaacagagtgtaatagaagaacctctcaaatagaagcccagtttcagtctgattgtcagaaagtcactgagaggtgtgaaagcgctctgcaaagcctggaggggcgctaccgccaagagctgaaggacctccaggaacagcagcgtgaggagaaatcccagtgggaatttgagaaggacgagctcacccaggagtgtgcggaagcccaggagctgctgaaagagactcttaagagagagaaaacaacttctctggtcctgacccaggagagagagatgctggagaaaacatacaaagaacatttgaacagcatggtcgtcgagagacagcagctactccaagacctggaagacctaagaaatgtatctgaaacccagcaaagcctgctgtctgaccagatacttgagctgaagagcagtcacaaaagggaactgagggagcgtgaggaggtcctgtgccaggcaggggcttcggagcagctggccagccagcggctggaaagactagaaatggaacatgaccaggaaaggcaggaaatgatgtccaagcttctagccatggagaacattcacaaagcgacctgtgagacagcagatcgagaaagagccgagatgagcacagaaatctccagacttcagagtaaaataaaggaaatgcagcaggcaacatctcctctctcaatgcttcagagtggttgccaggtgataggagaggaggaggtggaaggagatggagccctgtccctgcttcagcaaggggagcagctgttggaagaaaatggggacgtcctcttaagcctgcagagagctcatgaacaggcagtgaaggaaaatgtgaaaatggctactgaaatttctagattgcaacagaggctacaaaagttagagccagggttagtaatgtcttcttgtttggatgagccagctactgagttttttggaaatactgcggaacaaacagagcagtttttacagcaaaaccgaacgaagcaagtagaaggtgtgaccaggcggcatgtcctaagtgacctggaagatgatgaggtccgggacctgggaagtacagggacgagctctgttcagagacaggaagtcaaaatagaggagtctgaagcttcagtagagggtttttctgagcttgaaaacagtgaagagaccaggactgaatcctgggagctgaagaatcagattagtcagcttcaggaacagctaatgatgttatgtgcggactgtgatcgagcttctgaaaagaaacaggacctactttttgatgtttctgtgctaaaaaagaaactgaagatgcttgagagaatccctgaggcttctcccaaatataagctgttgtatgaagatgtgagccgagaaaatgactgccttcaggaagagctgagaatgatggagacacgctacgatgaggcactagaaaataacaaagaactcactgcagaggttttcaggttgcaggatgagctgaagaaaatggaggaagtcactgaaacattcctcagcctggaaaagagttacgatgaggtcaaaatagaaaatgaggggctgaatgttctggttttgagacttcaaggcaagattgagaagcttcaggaaagcgtggtccagcggtgtgactgctgcttatgggaagccagtttagagaacctggaaatcgaacctgatggaaatatactccagctcaatcagacactggaagagtgtgtgcccagggttaggagtgtacatcatgtcatagaggaatgtaagcaagaaaaccagtaccttgaggggaacacacagctcttggaaaaagtaaaagcacatgaaattgcctggttacatggaacaattcagacacatcaagaaaggccaagagtacagaatcaagttatactggaggaaaacactactctcctaggctttcaagacaaacattttcagcatcaggccaccatagcagagttagaactggagaaaacaaagttacaggagctgactaggaagttgaaggagagagtcactattttagttaagcaaaaagatgtactttctcacggagaaaaggaggaagagctgaaggcaatgatgcatgacttgcagatcacgtgcagtgagatgcagcaaaaagttgaacttctgagatatgaatctgaaaagcttcaacaggaaaattctattttgagaaatgaaattactactttaaatgaagaagatagcatttctaacctgaaattagggacattaaatggatctcaggaagaaatgtggcaaaaaacggaaactgtaaaacaagaaaatgctgcagttcagaagatggttgaaaatttaaagaaacagatttcagaattaaaaatcaaaaaccaacaattggatttggaaaatacagaacttagccaaaagaactctcaaaaccaggaaaaactgcaagaacttaatcaacgtctaacagaaatgctatgccagaaggaaaaagagccaggaaacagtgcattggaggaacgggaacaagagaagtttaatctgaaagaagaactggaacgttgtaaagtgcagtcctccactttagtgtcttctctggaggcggagctctctgaagttaaaatacagacccatattgtgcaacaggaaaaccaccttctcaaagatgaactggagaaaatgaaacagctgcacagatgtcccgatctctctgacttccagcaaaaaatctctagtgttctaagctacaacgaaaaactgctgaaagaaaaggaagctctgagtgaggaattaaatagctgtgtcgataagttggcaaaatcaagtcttttagagcatagaattgcgacgatgaagcaggaacagaaatcctgggaacatcagagtgcgagcttaaagtcacagctggtggcttctcaggaaaaggttcagaatttagaagacaccgtgcagaatgtaaacctgcaaatgtcccggatgaaatctgacctacgagtgactcagcaggaaaaggaggctttaaaacaagaagtgatgtctttacataagcaacttcagaatgctggtggcaagagctgggccccagagatagctactcatccatcagggctccataaccagcagaaaaggctgtcctgggacaagttggatcatctgatgaatgaggaacagcagctgctttggcaagagaatgagaggctccagaccatggtacagaacaccaaagccgaactcacgcactcccgggagaaggtccgtcagttggaatccaatcttcttcccaagcaccaaaaacatctaaacccatcaggtaccatgaatcccacagagcaagaaaaattgagcttaaagagagagtgtgatcagtttcagaaagaacaatctcctgctaacaggaaggtcagtcagatgaattcccttgaacaagaattagaaacaattcatttggaaaatgaaggcctgaaaaagaaacaagtaaaactggatgagcagctcatggagatgcagcacctgaggtccactgcgacgcctagcccgtcccctcatgcttgggatttgcagctgctccagcagcaagcctgtccgatggtgcccagggagcagtttctgcagcttcaacgccagctgctgcaggcagaaaggataaaccagcacctgcaggaggaacttgaaaacaggacctccgaaaccaacacaccacagggaaaccaggaacaactggtaactgtcatggaggaacgaatgatagaagttgaacagaaactgaaactagtgaaaaggcttcttcaagagaaagtgaatcagctcaaagaacaagtgagcctacccggtcatctctgttcacccacctcacattccagctttaactccagttttacatccctttattgccattaactcgttaacttatgttgtctaataaaggcaaa

SEQ ID NO: 159485 - DNA, 4216 bp, Homo sapiens
  Payload ID: 11207
  Gene Symbol: NIN
  Gene Name: ninein (GSK3B interacting protein)
  Uniprot ID: Q8N4C6
  ENST ID: ENST00000382043
  CDS Start-End: 38-4171
gagagaccgacagaaggtgagcactgtgggctatgggatggatgaggtggagcaggaccagcatgaggcccgactcaaggagctgtttgacagttttgacacgacgggcacagggtccctggggcaggaggaactcaccgacctttgccacatgttgagcttggaggaggtggccccagtgctgcagcagacattacttcaggacaacctcttgggcagggtacattttgaccaatttaaagaagcattaatactcatcttgtccagaactctgtcaaatgaagaacactttcaagaaccagactgctcactagaagctcagcccaaatatgttagaggtgggaagcgttacggacgaaggtccttgcccgagttccaagagtccgtggaggagtttcctgaagtgacggtgattgagccactggatgaagaagcgcggccttcacacatcccagccggtgactgcagtgagcactggaagacgcaacgcagtgaggagtatgaagcggaaggccagttaaggttttggaacccagatgacttgaatgcttcacagagtggatcttcccctccccaagactggatagaagagaaactgcaagaagtttgtgaagatttggggatcacccgtgatggtcacctgaaccggaagaagctggtctccatctgtgagcagtatggtttacagaatgtggatggagagatgctcgaggaagtattccataatcttgatcctgacggtacaatgagtgtagaagattttttctatggtttgtttaaaaatggaaaatctcttacaccatcagcatctactccatatagacaactaaaaaggcacctttccatgcagtctttcgatgagagtggacgacgtaccacaacctcatcagcaatgacaagtaccattggctttcgggtcttctcctgcctggatgatgggatgggccatgcatctgtggagagaatactggacacctggcaggaagagggcattgagaacagccaggagatcctgaaggccttggatttcagcctcgatggaaacatcaatttgacagaattaacactggcccttgaaaatgaacttttggttaccaagaacagcattcaccaggcggctctggccagctttaaggctgaaatccggcatttgttggaacgagttgatcaggtggtcagagaaaaagagaagctacggtcagatctggacaaggccgagaagctcaagtctttaatggcctcggaggtggatgatcaccatgcggccatagagcggcggaatgagtacaacctcaggaaactggatgaagagtacaaggagcgaatagcagccttaaaaaatgaactccgaaaagagagagagcagatcctgcagcaggcaggcaagcagcgtttagaacttgaacaggaaattgaaaaggcaaaaacagaagagaactatatccgggaccgccttgccctctctttaaaggaaaacagtcgtctggaaaatgagcttctagaaaatgcagagaagttggcagaatatgagaatctgacaaacaaacttcagagaaatttggaaaatgtgttagcagaaaagtttggtgacctcgatcctagcagtgctgagttcttcctgcaagaagagagactgacacagatgagaaatgaatatgagcggcagtgcagggtactacaagaccaagtagatgaactccagtctgagctggaagaatatcgtgcacaaggcagagtgctcaggcttccgttgaagaactcaccgtcagaagaagttgaggctaacagcggtggcattgagcccgaacacgggctcggttctgaagaatgcaatccattgaatatgagcattgaggcagagctggtcattgaacagatgaaagaacaacatcacagggacatatgttgcctcagactggagctcgaagataaagtgcgccattatgaaaagcagctggacgaaaccgtggtcagctgcaagaaggcacaggagaacatgaagcaaaggcatgagaacgaaacgcacaccttagaaaaacaaataagtgaccttaaaaatgaaattgctgaacttcaggggcaagcagcagtgctcaaggaggcacatcatgaggccacttgcaggcatgaggaggagaaaaaacaactgcaagtgaagcttgaggaggaaaagactcacctgcaggagaagctgaggctgcaacatgagatggagctcaaggctagactgacacaggctcaagcaagctttgagcgggagagggaaggccttcagagtagcgcctggacagaagagaaggtgagaggcttgactcaggaactagagcagtttcaccaggagcagctgacaagcctggtggagaaacacactcttgagaaagaggagttaagaaaagagctcttggaaaagcaccaaagggagcttcaggagggaagatatgaatctgaaaagcttcaacaggaaaattctattttgagaaatgaaattactactttaaatgaagaagatagcatttctaacctgaaattagggacattaaatggatctcaggaagaaatgtggcaaaaaacggaaactgtaaaacaagaaaatgctgcagttcagaagatggttgaaaatttaaagaaacagatttcagaattaaaaatcaaaaaccaacaattggatttggaaaatacagaacttagccaaaagaactctcaaaaccaggaaaaactgcaagaacttaatcaacgtctaacagaaatgctatgccagaaggaaaaagagccaggaaacagtgcattggaggaacgggaacaagagaagtttaatctgaaagaagaactggaacgttgtaaagtgcagtcctccactttagtgtcttctctggaggcggagctctctgaagttaaaatacagacccatattgtgcaacaggaaaaccaccttctcaaagatgaactggagaaaatgaaacagctgcacagatgtcccgatctctctgacttccagcaaaaaatctctagtgttctaagctacaacgaaaaactgctgaaagaaaaggaagctctgagtgaggaattaaatagctgtgtcgataagttggcaaaatcaagtcttttagagcatagaattgcgacgatgaagcaggaacagaaatcctgggaacatcagagtgcgagcttaaagtcacagctggtggcttctcaggaaaaggttcagaatttagaagacaccgtgcagaatgtaaacctgcaaatgtcccggatgaaatctgacctacgagtgactcagcaggaaaaggaggctttaaaacaagaagtgatgtctttacataagcaacttcagaatgctggtggcaagagctgggccccagagatagctactcatccatcagggctccataaccagcagaaaaggctgtcctgggacaagttggatcatctgatgaatgaggaacagcagctgctttggcaagagaatgagaggctccagaccatggtacagaacaccaaagccgaactcacgcactcccgggagaaggtccgtcagttggaatccaatcttcttcccaagcaccaaaaacatctaaacccatcaggtaccatgaatcccacagagcaagaaaaattgagcttaaagagagagtgtgatcagtttcagaaagaacaatctcctgctaacaggaaggtcagtcagatgaattcccttgaacaagaattagaaacaattcatttggaaaatgaaggcctgaaaaagaaacaagtaaaactggatgagcagctcatggagatgcagcacctgaggtccactgcgacgcctagcccgtcccctcatgcttgggatttgcagctgctccagcagcaagcctgtccgatggtgcccagggagcagtttctgcagcttcaacgccagctgctgcaggcagaaaggataaaccagcacctgcaggaggaacttgaaaacaggacctccgaaaccaacacaccacagggaaaccaggaacaactggtaactgtcatggaggaacgaatgatagaagttgaacagaaactgaaactagtgaaaaggcttcttcaagagaaagtgaatcagctcaaagaacaagtgagcctacccggtcatctctgttcacccacctcacattccagctttaactccagttttacatccctttattgccattaactcgttaacttatgttgtctaataaaggcaaattctattataaat

SEQ ID NO: 159486 - DNA, 4788 bp, Homo sapiens
  Payload ID: 11207
  Gene Symbol: NIN
  Gene Name: ninein (GSK3B interacting protein)
  ENST ID: ENST00000389869
  CDS Start-End: 1-4744
tgtgttagcagaaaagtttggtgacctcgatcctagcagtgctgagttcttcctgcaagaagagagactgacacagatgagaaatgaatatgagcggcagtgcagggtactacaagaccaagtagatgaactccagtctgagctggaagaatatcgtgcacaaggcagagtgctcaggcttccgttgaagaactcaccgtcagaagaagttgaggctaacagcggtggcattgagcccgaacacgggctcggttctgaagaatgcaatccattgaatatgagcattgaggcagagctggtcattgaacagatgaaagaacaacatcacagggacatatgttgcctcagactggagctcgaagataaagtgcgccattatgaaaagcagctggacgaaaccgtggtcagctgcaagaaggcacaggagaacatgaagcaaaggcatgagaacgaaacgcacaccttagaaaaacaaataagtgaccttaaaaatgaaattgctgaacttcaggggcaagcagcagtgctcaaggaggcacatcatgaggccacttgcaggcatgaggaggagaaaaaacaactgcaagtgaagcttgaggaggaaaagactcacctgcaggagaagctgaggctgcaacatgagatggagctcaaggctagactgacacaggctcaagcaagctttgagcgggagagggaaggccttcagagtagcgcctggacagaagagaaggtgagaggcttgactcaggaactagagcagtttcaccaggagcagctgacaagcctggtggagaaacacactcttgagaaagaggagttaagaaaagagctcttggaaaagcaccaaagggagcttcaggagggaagggaaaaaatggaaacagagtgtaatagaagaacctctcaaatagaagcccagtttcagtctgattgtcagaaagtcactgagaggtgtgaaagcgctctgcaaagcctggaggggcgctaccgccaagagctgaaggacctccaggaacagcagcgtgaggagaaatcccagtgggaatttgagaaggacgagctcacccaggagtgtgcggaagcccaggagctgctgaaagagactcttaagagagagaaaacaacttctctggtcctgacccaggagagagagatgctggagaaaacatacaaagaacatttgaacagcatggtcgtcgagagacagcagctactccaagacctggaagacctaagaaatgtatctgaaacccagcaaagcctgctgtctgaccagatacttgagctgaagagcagtcacaaaagggaactgagggagcgtgaggaggtcctgtgccaggcaggggcttcggagcagctggccagccagcggctggaaagactagaaatggaacatgaccaggaaaggcaggaaatgatgtccaagcttctagccatggagaacattcacaaagcgacctgtgagacagcagatcgagaaagagccgagatgagcacagaaatctccagacttcagagtaaaataaaggaaatgcagcaggcaacatctcctctctcaatgcttcagagtggttgccaggtgataggagaggaggaggtggaaggagatggagccctgtccctgcttcagcaaggggagcagctgttggaagaaaatggggacgtcctcttaagcctgcagagagctcatgaacaggcagtgaaggaaaatgtgaaaatggctactgaaatttctagattgcaacagaggctacaaaagttagagccagggttagtaatgtcttcttgtttggatgagccagctactgagttttttggaaatactgcggaacaaacagagcagtttttacagcaaaaccgaacgaagcaagtagaaggtgtgaccaggcggcatgtcctaagtgacctggaagatgatgaggtccgggacctgggaagtacagggacgagctctgttcagagacaggaagtcaaaatagaggagtctgaagcttcagtagagggtttttctgagcttgaaaacagtgaagagaccaggactgaatcctgggagctgaagaatcagattagtcagcttcaggaacagctaatgatgttatgtgcggactgtgatcgagcttctgaaaagaaacaggacctactttttgatgtttctgtgctaaaaaagaaactgaagatgcttgagagaatccctgaggcttctcccaaatataagctgttgtatgaagatgtgagccgagaaaatgactgccttcaggaagagctgagaatgatggagacacgctacgatgaggcactagaaaataacaaagaactcactgcagaggttttcaggttgcaggatgagctgaagaaaatggaggaagtcactgaaacattcctcagcctggaaaagagttacgatgaggtcaaaatagaaaatgaggggctgaatgttctggttttgagacttcaaggcaagattgagaagcttcaggaaagcgtggtccagcggtgtgactgctgcttatgggaagccagtttagagaacctggaaatcgaacctgatggaaatatactccagctcaatcagacactggaagagtgtgtgcccagggttaggagtgtacatcatgtcatagaggaatgtaagcaagaaaaccagtaccttgaggggaacacacagctcttggaaaaagtaaaagcacatgaaattgcctggttacatggaacaattcagacacatcaagaaaggccaagagtacagaatcaagttatactggaggaaaacactactctcctaggctttcaagacaaacattttcagcatcaggccaccatagcagagttagaactggagaaaacaaagttacaggagctgactaggaagttgaaggagagagtcactattttagttaagcaaaaagatgtactttctcacggagaaaaggaggaagagctgaaggcaatgatgcatgacttgcagatcacgtgcagtgagatgcagcaaaaagttgaacttctgagatatgaatctgaaaagcttcaacaggaaaattctattttgagaaatgaaattactactttaaatgaagaagatagcatttctaacctgaaattagggacattaaatggatctcaggaagaaatgtggcaaaaaacggaaactgtaaaacaagaaaatgctgcagttcagaagatggttgaaaatttaaagaaacagatttcagaattaaaaatcaaaaaccaacaattggatttggaaaatacagaacttagccaaaagaactctcaaaaccaggaaaaactgcaagaacttaatcaacgtctaacagaaatgctatgccagaaggaaaaagagccaggaaacagtgcattggaggaacgggaacaagagaagtttaatctgaaagaagaactggaacgttgtaaagtgcagtcctccactttagtgtcttctctggaggcggagctctctgaagttaaaatacagacccatattgtgcaacaggaaaaccaccttctcaaagatgaactggagaaaatgaaacagctgcacagatgtcccgatctctctgacttccagcaaaaaatctctagtgttctaagctacaacgaaaaactgctgaaagaaaaggaagctctgagtgaggaattaaatagctgtgtcgataagttggcaaaatcaagtcttttagagcatagaattgcgacgatgaagcaggaacagaaatcctgggaacatcagagtgcgagcttaaagtcacagctggtggcttctcaggaaaaggttcagaatttagaagacaccgtgcagaatgtaaacctgcaaatgtcccggatgaaatctgacctacgagtgactcagcaggaaaaggaggctttaaaacaagaagtgatgtctttacataagcaacttcagaatgctggtggcaagagctgggccccagagatagctactcatccatcagggctccataaccagcagaaaaggctgtcctgggacaagttggatcatctgatgaatgaggaacagcagctgctttggcaagagaatgagaggctccagaccatggtacagaacaccaaagccgaactcacgcactcccgggagaaggtccgtcagttggaatccaatcttcttcccaagcaccaaaaacatctaaacccatcaggtaccatgaatcccacagagcaagaaaaattgagcttaaagagagagtgtgatcagtttcagaaagaacaatctcctgctaacaggaaggtcagtcagatgaattcccttgaacaagaattagaaacaattcatttggaaaatgaaggcctgaaaaagaaacaagtaaaactggatgagcagctcatggagatgcagcacctgaggtccactgcgacgcctagcccgtcccctcatgcttgggatttgcagctgctccagcagcaagcctgtccgatggtgcccagggagcagtttctgcagcttcaacgccagctgctgcaggcagaaaggataaaccagcacctgcaggaggaacttgaaaacaggacctccgaaaccaacacaccacagggaaaccaggaacaactggtaactgtcatggaggaacgaatgatagaagttgaacagaaactgaaactagtgaaaaggcttcttcaagagaaagtgaatcagctcaaagaacaagtgagcctacccggtcatctctgttcacccacctcacattccagctttaactccagttttacatccctttattgccattaactcgttaacttatgttgtctaataaaggcaaattctattataaa

SEQ ID NO: 159487 - DNA, 1418 bp, Homo sapiens
  Payload ID: 11207
  Gene Symbol: NIN
  Gene Name: ninein (GSK3B interacting protein)
  ENST ID: ENST00000453401
  CDS Start-End: 229-1418
ccgagccgggagccgagcgcgctgggcgcggccgtcccgctgccgccgccaagcccggagtgcgccagcggccatggttcccgcggcggcgccgggcgcctgagccccgggacgcaagcgctggaggcgggctgccggctgtgcgggcgctccggagagaccgacagaagttttgacacgacgggcacagggtccctggggcaggaggaactcaccgacctttgccacatgttgagcttggaggaggtggccccagtgctgcagcagacattacttcaggacaacctcttgggcagggtacattttgaccaatttaaagaagcattaatactcatcttgtccagaactctgtcaaatgaagaacactttcaagaaccagactgctcactagaagctcagcccaaatatgttagaggtgggaagcgttacggacgaaggtccttgcccgagttccaagagtccgtggaggagtttcctgaagtgacggtgattgagccactggatgaagaagcgcggccttcacacatcccagccggtgactgcagtgagcactggaagacgcaacgcagtgaggagtatgaagcggaaggccagttaaggttttggaacccagatgacttgaatgcttcacagagtggatcttcccctccccaagactggatagaagagaaactgcaagaagtttgtgaagatttggggatcacccgtgatggtcacctgaaccggaagaagctggtctccatctgtgagcagtatggtttacagaatgtggatggagagatgctcgaggaagtattccataatcttgatcctgacggtacaatgagtgtagaagattttttctatggtttgtttaaaaatggaaaatctcttacaccatcagcatctactccatatagacaactaaaaaggcacctttccatgcagtctttcgatgagagtggacgacgtaccacaacctcatcagcaatgacaagtaccattggctttcgggtcttctcctgcctggatgatgggatgggccatgcatctgtggagagaatactggacacctggcaggaagagggcattgagaacagccaggagatcctgaaggccttggatttcagcctcgatggaaacatcaatttgacagaattaacactggcccttgaaaatgaacttttggttaccaagaacagcattcaccaggcggctctggccagctttaaggctgaaatccggcatttgttggaacgagttgatcaggtggtcagagaaaaagagaagctacggtcagatctggacaaggccgagaagctcaagtctttaatggcctcggaggtggatgatcaccatgcggccatagagcggcggaatgagtacaacctcaggaaactggatgaagagtacaaggagcgaatagcagccttaaaaaa

SEQ ID NO: 159488 - DNA, 6785 bp, Homo sapiens
  Payload ID: 11207
  Gene Symbol: NIN
  Gene Name: ninein (GSK3B interacting protein)
  ENST ID: ENST00000453196
  CDS Start-End: 192-6332
ccgagccgggagccgagcgcgctgggcgcggccgtcccgctgccgccgccaagcccggagtgcgccagcggccatggttcccgcggcggcgccgggcgcctgagccccgggacgcaagcgctggaggcgggctgccggctgtgcgggcgctccggagagaccgacagaaggtgagcactgtgggctatgggatggatgaggtggagcaggaccagcatgaggcccgactcaaggagctgtttgacagttttgacacgacgggcacagggtccctggggcaggaggaactcaccgacctttgccacatgttgagcttggaggaggtggccccagtgctgcagcagacattacttcaggacaacctcttgggcagggtacattttgaccaatttaaagaagcattaatactcatcttgtccagaactctgtcaaatgaagaacactttcaagaaccagactgctcactagaagctcagcccaaatatgttagaggtgggaagcgttacggacgaaggtccttgcccgagttccaagagtccgtggaggagtttcctgaagtgacggtgattgagccactggatgaagaagcgcggccttcacacatcccagccggtgactgcagtgagcactggaagacgcaacgcagtgaggagtatgaagcggaaggccagttaaggttttggaacccagatgacttgaatgcttcacagagtggatcttcccctccccaagactggatagaagagaaactgcaagaagtttgtgaagatttggggatcacccgtgatggtcacctgaaccggaagaagctggtctccatctgtgagcagtatggtttacagaatgtggatggagagatgctcgaggaagtattccataatcttgatcctgacggtacaatgagtgtagaagattttttctatggtttgtttaaaaatggaaaatctcttacaccatcagcatctactccatatagacaactaaaaaggcacctttccatgcagtctttcgatgagagtggacgacgtaccacaacctcatcagcaatgacaagtaccattggctttcgggtcttctcctgcctggatgatgggatgggccatgcatctgtggagagaatactggacacctggcaggaagagggcattgagaacagccaggagatcctgaaggccttggatttcagcctcgatggaaacatcaatttgacagaattaacactggcccttgaaaatgaacttttggttaccaagaacagcattcaccaggcggctctggccagctttaaggctgaaatccggcatttgttggaacgagttgatcaggtggtcagagaaaaagagaagctacggtcagatctggacaaggccgagaagctcaagtctttaatggcctcggaggtggatgatcaccatgcggccatagagcggcggaatgagtacaacctcaggaaactggatgaagagtacaaggagcgaatagcagccttaaaaaatgaactccgaaaagagagagagcagatcctgcagcaggcaggcaagcagcgtttagaacttgaacaggaaattgaaaaggcaaaaacagaagagaactatatccgggaccgccttgccctctctttaaaggaaaacagtcgtctggaaaatgagcttctagaaaatgcagagaagttggcagaatatgagaatctgacaaacaaacttcagagaaatttggaaaatgtgttagcagaaaagtttggtgacctcgatcctagcagtgctgagttcttcctgcaagaagagagactgacacagatgagaaatgaatatgagcggcagtgcagggtactacaagaccaagtagatgaactccagtctgagctggaagaatatcgtgcacaaggcagagtgctcaggcttccgttgaagaactcaccgtcagaagaagttgaggctaacagcggtggcattgagcccgaacacgggctcggttctgaagaatgcaatccattgaatatgagcattgaggcagagctggtcattgaacagatgaaagaacaacatcacagggacatatgttgcctcagactggagctcgaagataaagtgcgccattatgaaaagcagctggacgaaaccgtggtcagctgcaagaaggcacaggagaacatgaagcaaaggcatgagaacgaaacgcacaccttagaaaaacaaataagtgaccttaaaaatgaaattgctgaacttcaggggcaagcagcagtgctcaaggaggcacatcatgaggccacttgcaggcatgaggaggagaaaaaacaactgcaagtgaagcttgaggaggaaaagactcacctgcaggagaagctgaggctgcaacatgagatggagctcaaggctagactgacacaggctcaagcaagctttgagcgggagagggaaggccttcagagtagcgcctggacagaagagaaggtgagaggcttgactcaggaactagagcagtttcaccaggagcagctgacaagcctggtggagaaacacactcttgagaaagaggagttaagaaaagagctcttggaaaagcaccaaagggagcttcaggagggaagggaaaaaatggaaacagagtgtaatagaagaacctctcaaatagaagcccagtttcagtctgattgtcagaaagtcactgagaggtgtgaaagcgctctgcaaagcctggaggggcgctaccgccaagagctgaaggacctccaggaacagcagcgtgaggagaaatcccagtgggaatttgagaaggacgagctcacccaggagtgtgcggaagcccaggagctgctgaaagagactcttaagagagagaaaacaacttctctggtcctgacccaggagagagagatgctggagaaaacatacaaagaacatttgaacagcatggtcgtcgagagacagcagctactccaagacctggaagacctaagaaatgtatctgaaacccagcaaagcctgctgtctgaccagatacttgagctgaagagcagtcacaaaagggaactgagggagcgtgaggaggtcctgtgccaggcaggggcttcggagcagctggccagccagcggctggaaagactagaaatggaacatgaccaggaaaggcaggaaatgatgtccaagcttctagccatggagaacattcacaaagcgacctgtgagacagcagatcgagaaagagccgagatgagcacagaaatctccagacttcagagtaaaataaaggaaatgcagcaggcaacatctcctctctcaatgcttcagagtggttgccaggtgataggagaggaggaggtggaaggagatggagccctgtccctgcttcagcaaggggagcagctgttggaagaaaatggggacgtcctcttaagcctgcagagagctcatgaacaggcagtgaaggaaaatgtgaaaatggctactgaaatttctagattgcaacagaggctacaaaagttagagccagggttagtaatgtcttcttgtttggatgagccagctactgagttttttggaaatactgcggaacaaacagagcagtttttacagcaaaaccgaacgaagcaagtagaaggtgtgaccaggcggcatgtcctaagtgacctggaagatgatgaggtccgggacctgggaagtacagggacgagctctgttcagagacaggaagtcaaaatagaggagtctgaagcttcagtagagggtttttctgagcttgaaaacagtgaagagaccaggactgaatcctgggagctgaagaatcagattagtcagcttcaggaacagctaatgatgttatgtgcggactgtgatcgagcttctgaaaagaaacaggacctactttttgatgtttctgtgctaaaaaagaaactgaagatgcttgagagaatccctgaggcttctcccaaatataagctgttgtatgaagatgtgagccgagaaaatgactgccttcaggaagagctgagaatgatggagacacgctacgatgaggcactagaaaataacaaagaactcactgcagaggttttcaggttgcaggatgagctgaagaaaatggaggaagtcactgaaacattcctcagcctggaaaagagttacgatgaggtcaaaatagaaaatgaggggctgaatgttctggttttgagacttcaaggcaagattgagaagcttcaggaaagcgtggtccagcggtgtgactgctgcttatgggaagccagtttagagaacctggaaatcgaacctgatggaaatatactccagctcaatcagacactggaagagtgtgtgcccagggttaggagtgtacatcatgtcatagaggaatgtaagcaagaaaaccagtaccttgaggggaacacacagctcttggaaaaagtaaaagcacatgaaattgcctggttacatggaacaattcagacacatcaagaaaggccaagagtacagaatcaagttatactggaggaaaacactactctcctaggctttcaagacaaacattttcagcatcaggccaccatagcagagttagaactggagaaaacaaagttacaggagctgactaggaagttgaaggagagagtcactattttagttaagcaaaaagatgtactttctcacggagaaaaggaggaagagctgaaggcaatgatgcatgacttgcagatcacgtgcagtgagatgcagcaaaaagttgaacttctgagatatgaatctgaaaagcttcaacaggaaaattctattttgagaaatgaaattactactttaaatgaagaagatagcatttctaacctgaaattagggacattaaatggatctcaggaagaaatgtggcaaaaaacggaaactgtaaaacaagaaaatgctgcagttcagaagatggttgaaaatttaaagaaacagatttcagaattaaaaatcaaaaaccaacaattggatttggaaaatacagaacttagccaaaagaactctcaaaaccaggaaaaactgcaagaacttaatcaacgtctaacagaaatgctatgccagaaggaaaaagagccaggaaacagtgcattggaggaacgggaacaagagaagtttaatctgaaagaagaactggaacgttgtaaagtgcagtcctccactttagtgtcttctctggaggcggagctctctgaagttaaaatacagacccatattgtgcaacaggaaaaccaccttctcaaagatgaactggagaaaatgaaacagctgcacagatgtcccgatctctctgacttccagcaaaaaatctctagtgttctaagctacaacgaaaaactgctgaaagaaaaggaagctctgagtgaggaattaaatagctgtgtcgataagttggcaaaatcaagtcttttagagcatagaattgcgacgatgaagcaggaacagaaatcctgggaacatcagagtgcgagcttaaagtcacagctggtggcttctcaggaaaaggttcagaatttagaagacaccgtgcagaatgtaaacctgcaaatgtcccggatgaaatctgacctacgagtgactcagcaggaaaaggaggctttaaaacaagaagtgatgtctttacataagcaacttcagaatgctggtggcaagagctgggccccagagatagctactcatccatcagggctccataaccagcagaaaaggctgtcctgggacaagttggatcatctgatgaatgaggaacagcagctgctttggcaagagaatgagaggctccagaccatggtacagaacaccaaagccgaactcacgcactcccgggagaaggtccgtcagttggaatccaatcttcttcccaagcaccaaaaacatctaaacccatcaggtaccatgaatcccacagagcaagaaaaattgagcttaaagagagagtgtgatcagtttcagaaagaacaatctcctgctaacaggaaggtcagtcagatgaattcccttgaacaagaattagaaacaattcatttggaaaatgaaggcctgaaaaagaaacaagtaaaactggatgagcagctcatggagatgcagcacctgaggtccactgcgacgcctagcccgtcccctcatgcttgggatttgcagctgctccagcagcaagcctgtccgatggtgcccagggagcagtttctgcagcttcaacgccagctgctgcaggcagaaaggataaaccagcacctgcaggaggaacttgaaaacaggacctccgaaaccaacacaccacaggccttgctaccggagcagcgagcagtgcacgcagattcctacagaaggattgggcacctgtgaaaactgggctgctattgatggcatttcttaccatggcagacagatgcacacacccacccatgcacacacaccacacacagagacataagctaagatatgttggaattaagtgctcttttaaattattttattatttttactgttaaacctttgcagtattatgtctcttatttatttatgtagaaatgacagatcttgtgaatcaaattcacaaacatcagcttgttacaaatcattttatttataccctttaaagagtgtggatttaagattcttgaaaggatgtagtctatatattttctcattccatatgttgtaactatttttaaccaaaggtactacttttatatatggaatttgaagaaaaccaggggtatttatactgttttgtataagatgtacaaatctttttgacaggaaatttttgatgaaacaataaaataaattttaagt

SEQ ID NO: 159489 - DNA, 655 bp, Homo sapiens
  Payload ID: 11207
  Gene Symbol: NIN
  Gene Name: ninein (GSK3B interacting protein)
  ENST ID: ENST00000485005
  CDS Start-End: 1-423
cagctgctttggcaagagaatgagaggctccagaccatggtacagaacaccaaagccgaactcacgcactcccgggagaaggtccgtcagttggaatccaatcttcttcccaagcaccaaaaacatctaaacccatcaggtaccatgaatcccacagagcaagaaaaattgagcttaaagagagagtgtgatcagtttcagaaagaacaatctcctgctaacaggaaggtcagtcagatgaattcccttgaacaagaattagaaacaattcatttggaaaatgaaggcctgaaaaagaaacaagtaaaactggatgagcagctcatggagaactcagtggttggaagtagcagagaagggtgcagttctctgcctgagatagtgtgtgaagatgcagcacctgaggtccactgcgacgcctagcccgtcccctcatgcttgggatttgcagctgctccagcagcaagcctgtccgatggtgcccagggagcagtttctgcagcttcaacgccagctgctgcaggcagaaaggataaaccagcacctgcaggaggaacttgaaaacaggacctccgaaaccaacacaccacaggccttgctaccggagcagcgagcagtgcacgcagattcctacagaaggattgggcacctgtga

SEQ ID NO: 159490 - DNA, 569 bp, Homo sapiens
  Payload ID: 11207
  Gene Symbol: NIN
  Gene Name: ninein (GSK3B interacting protein)
  ENST ID: ENST00000496749
  CDS Start-End: 267-569
atgcgcgctgcagcccgcggcccccgagagccgcgcttttgtaagagctggccccttacatatggaaatgacgctcacgcgggtccccattcgcgtccttttgaaggacgcccgcccggaaccgctgcgccggctgcgaagtattgtcccgtttctccagccctaacaaagcgtcctccttcgctttgcagagcgctggaggcgggctgccggctgtgcgggcgctccggagagaccgacagaaggtgagcactgtgggctatgggatggatgaggtggagcaggaccagcatgaggcccgactcaaggagctgtttgacagttttgacacgacgggcacagggtccctggggcaggaggaactcaccgacctttgccacatgttgagcttggaggaggtggccccagtgctgcagcagacattacttcaggacaacctcttgggcagggtacattttgaccaatttaaagaagcattaatactcatcttgtccagaactctgtcaaatgaagaacactttcaagaaccagactgctcactagaagctcagcccaaatatgttagaggt

SEQ ID NO: 159491 - DNA, 10225 bp, Homo sapiens
  Payload ID: 11207
  Gene Symbol: NIN
  Gene Name: ninein (GSK3B interacting protein)
  ENST ID: ENST00000476352
  CDS Start-End: 117-6086
ggttcccgcggcggcgccgggcgcctgagccccgggacgcaagcgctggaggcgggctgccggctgtgcgggcgctccggagagaccgacagaaggtgagcactgtgggctatgggatggatgaggtggagcaggaccagcatgaggcccgactcaaggagctgtttgacagttttgacacgacgggcacagggtccctggggcaggaggaactcaccgacctttgccacatgttgagcttggaggaggtggccccagtgctgcagcagacattacttcaggacaacctcttgggcagggtacattttgaccaatttaaagaagcattaatactcatcttgtccagaactctgtcaaatgaagaacactttcaagaaccagactgctcactagaagctcagcccaaatatgttagaggtgggaagcgttacggacgaaggtccttgcccgagttccaagagtccgtggaggagtttcctgaagtgacggtgattgagccactggatgaagaagcgcggccttcacacatcccagccggtgactgcagtgagcactggaagacgcaacgcagtgaggagtatgaagcggaaggccagttaaggttttggaacccagatgacttgaatgcttcacagagtggatcttcccctccccaagactggatagaagagaaactgcaagaagtttgtgaagatttggggatcacccgtgatggtcacctgaaccggaagaagctggtctccatctgtgagcagtatggtttacagaatgtggatggagagatgctcgaggaagtattccataatcttgatcctgacggtacaatgagtgtagaagattttttctatggtttgtttaaaaatggaaaatctcttacaccatcagcatctactccatatagacaactaaaaaggcacctttccatgcagtctttcgatgagagtggacgacgtaccacaacctcatcagcaatgacaagtaccattggctttcgggtcttctcctgcctggatgatgggatgggccatgcatctgtggagagaatactggacacctggcaggaagagggcattgagaacagccaggagatcctgaaggccttggatttcagcctcgatggaaacatcaatttgacagaattaacactggcccttgaaaatgaacttttggttaccaagaacagcattcaccaggcggctctggccagctttaaggctgaaatccggcatttgttggaacgagttgatcaggtggtcagagaaaaagagaagctacggtcagatctggacaaggccgagaagctcaagtctttaatggcctcggaggtggatgatcaccatgcggccatagagcggcggaatgagtacaacctcaggaaactggatgaagagtacaaggagcgaatagcagccttaaaaaatgaactccgaaaagagagagagcagatcctgcagcaggcaggcaagcagcgtttagaacttgaacaggaaattgaaaaggcaaaaacagaagagaactatatccgggaccgccttgccctctctttaaaggaaaacagtcgtctggaaaatgagcttctagaaaatgcagagaagttggcagaatatgagaatctgacaaacaaacttcagagaaatttggaaaatgtgttagcagaaaagtttggtgacctcgatcctagcagtgctgagttcttcctgcaagaagagagactgacacagatgagaaatgaatatgagcggcagtgcagggtactacaagaccaagtagatgaactccagtctgagctggaagaatatcgtgcacaaggcagagtgctcaggcttccgttgaagaactcaccgtcagaagaagttgaggctaacagcggtggcattgagcccgaacacgggctcggttctgaagaatgcaatccattgaatatgagcattgaggcagagctggtcattgaacagatgaaagaacaacatcacagggacatatgttgcctcagactggagctcgaagataaagtgcgccattatgaaaagcagctggacgaaaccgtggtcagctgcaagaaggcacaggagaacatgaagcaaaggcatgagaacgaaacgcacaccttagaaaaacaaataagtgaccttaaaaatgaaattgctgaacttcaggggcaagcagcagtgctcaaggaggcacatcatgaggccacttgcaggcatgaggaggagaaaaaacaactgcaagtgaagcttgaggaggaaaagactcacctgcaggagaagctgaggctgcaacatgagatggagctcaaggctagactgacacaggctcaagcaagctttgagcgggagagggaaggccttcagagtagcgcctggacagaagagaaggtgagaggcttgactcaggaactagagcagtttcaccaggagcagctgacaagcctggtggagaaacacactcttgagaaagaggagttaagaaaagagctcttggaaaagcaccaaagggagcttcaggagggaagggaaaaaatggaaacagagtgtaatagaagaacctctcaaatagaagcccagtttcagtctgattgtcagaaagtcactgagaggtgtgaaagcgctctgcaaagcctggaggggcgctaccgccaagagctgaaggacctccaggaacagcagcgtgaggagaaatcccagtgggaatttgagaaggacgagctcacccaggagtgtgcggaagcccaggagctgctgaaagagactcttaagagagagaaaacaacttctctggtcctgacccaggagagagagatgctggagaaaacatacaaagaacatttgaacagcatggtcgtcgagagacagcagctactccaagacctggaagacctaagaaatgtatctgaaacccagcaaagcctgctgtctgaccagatacttgagctgaagagcagtcacaaaagggaactgagggagcgtgaggaggtcctgtgccaggcaggggcttcggagcagctggccagccagcggctggaaagactagaaatggaacatgaccaggaaaggcaggaaatgatgtccaagcttctagccatggagaacattcacaaagcgacctgtgagacagcagatcgagaaagagccgagatgagcacagaaatctccagacttcagagtaaaataaaggaaatgcagcaggcaacatctcctctctcaatgcttcagagtggttgccaggtgataggagaggaggaggtggaaggagatggagccctgtccctgcttcagcaaggggagcagctgttggaagaaaatggggacgtcctcttaagcctgcagagagctcatgaacaggcagtgaaggaaaatgtgaaaatggctactgaaatttctagattgcaacagaggctacaaaagttagagccagggttagtaatgtcttcttgtttggatgagccagctactgagttttttggaaatactgcggaacaaacagagcagtttttacagcaaaaccgaacgaagcaagtagaaggtgtgaccaggcggcatgtcctaagtgacctggaagatgatgaggtccgggacctgggaagtacagggacgagctctgttcagagacaggaagtcaaaatagaggagtctgaagcttcagtagagggtttttctgagcttgaaaacagtgaagagaccaggactgaatcctgggagctgaagaatcagattagtcagcttcaggaacagctaatgatgttatgtgcggactgtgatcgagcttctgaaaagaaacaggacctactttttgatgtttctgtgctaaaaaagaaactgaagatgcttgagagaatccctgaggcttctcccaaatataagctgttgtatgaagatgtgagccgagaaaatgactgccttcaggaagagctgagaatgatggagacacgctacgatgaggcactagaaaataacaaagaactcactgcagaggttttcaggttgcaggatgagctgaagaaaatggaggaagtcactgaaacattcctcagcctggaaaagagttacgatgaggtcaaaatagaaaatgaggggctgaatgttctggttttgagacttcaaggcaagattgagaagcttcaggaaagcgtggtccagcggtgtgactgctgcttatgggaagccagtttagagaacctggaaatcgaacctgatggaaatatactccagctcaatcagacactggaagagtgtgtgcccagggttaggagtgtacatcatgtcatagaggaatgtaagcaagaaaaccagtaccttgaggggaacacacagctcttggaaaaagtaaaagcacatgaaattgcctggttacatggaacaattcagacacatcaagaaaggccaagagtacagaatcaagttatactggaggaaaacactactctcctaggctttcaagacaaacattttcagcatcaggccaccatagcagagttagaactggagaaaacaaagttacaggagctgactaggaagttgaaggagagagtcactattttagttaagcaaaaagatgtactttctcacggagaaaaggaggaagagctgaaggcaatgatgcatgacttgcagatcacgtgcagtgagatgcagcaaaaagttgaacttctgagatatgaatctgaaaagcttcaacaggaaaattctattttgagaaatgaaattactactttaaatgaagaagatagcatttctaacctgaaattagggacattaaatggatctcaggaagaaatgtggcaaaaaacggaaactgtaaaacaagaaaatgctgcagttcagaagatggttgaaaatttaaagaaacagatttcagaattaaaaatcaaaaaccaacaattggatttggaaaatacagaacttagccaaaagaactctcaaaaccaggaaaaactgcaagaacttaatcaacgtctaacagaaatgctatgccagaaggaaaaagagccaggaaacagtgcattggaggaacgggaacaagagaagtttaatctgaaagaagaactggaacgttgtaaagtgcagtcctccactttagtgtcttctctggaggcggagctctctgaagttaaaatacagacccatattgtgcaacaggaaaaccaccttctcaaagatgaactggagaaaatgaaacagctgcacagatgtcccgatctctctgacttccagcaaaaaatctctagtgttctaagctacaacgaaaaactgctgaaagaaaaggaagctctgagtgaggaattaaatagctgtgtcgataagttggcaaaatcaagtcttttagagcatagaattgcgacgatgaagcaggaacagaaatcctgggaacatcagagtgcgagcttaaagtcacagctggtggcttctcaggaaaaggttcagaatttagaagacaccgtgcagaatgtaaacctgcaaatgtcccggatgaaatctgacctacgagtgactcagcaggaaaaggaggctttaaaacaagaagtgatgtctttacataagcaacttcagaatgctggtggcaagagctgggccccagagatagctactcatccatcagggctccataaccagcagaaaaggctgtcctgggacaagttggatcatctgatgaatgaggaacagcagctgctttggcaagagaatgagaggctccagaccatggtacagaacaccaaagccgaactcacgcactcccgggagaaggtccgtcagttggaatccaatcttcttcccaagcaccaaaaacatctaaacccatcaggtaccatgaatcccacagagcaagaaaaattgagcttaaagagagagtgtgatcagtttcagaaagaacaatctcctgctaacaggaaggtcagtcagatgaattcccttgaacaagaattagaaacaattcatttggaaaatgaaggcctgaaaaagaaacaagtaaaactggatgagcagctcatggagaactcagtggttggaagtagcagagaagggtgcagttctctgcctgagatagtgtgtgaagatgcagcacctgaggtccactgcgacgcctagcccgtcccctcatgcttgggatttgcagctgctccagcagcaagcctgtccgatggtgcccagggagcagtttctgcagcttcaacgccagctgctgcaggcagaaaggataaaccagcacctgcaggaggaacttgaaaacaggacctccgaaaccaacacaccacagggaaaccaggaacaactggtaactgtcatggaggaacgaatgatagaagttgaacagaaactgaaactagtgaaaaggcttcttcaagagaaagtgaatcagctcaaagaacaactctgcaagaacactaaggcagacgcaatggtgaaggacttgtatgttgaaaatgcccagttgttgaaagctctggaagtgactgaacagcgacagaaaacagcagagaagaaaaattacctcctggaggagaagattgccagcctcagtaatatagttaggaatctgacaccagcgccattgacttctacacctcctttgaggtcatagccaaaccaaagggtacactcatatttgtgcactttactgaaatagatgaacatttcagtaggttctcaacttaaaattaagcctaacctaaaactgccagcaacacaactggagtttccatttatcataattagtttttctaaatagacccttatgggagtttgaaaataaatactcacatatttcactacttaaattattcccaagatttgaatttattttaaaattttaatagccaccaagaatgtggacatatgaaaattcaagaacctaaaaaataccagttttgaatgagtttttgtggttttggttttttttttaattattacaaatctatgtgtaaaatctagatatttgaagtttgagatctgatgagaatggttgttataaactttattttaaaaccaaatttaggtgttcttacatatttaaatactggaaagtcattataatagttttggttctttgaattggtagacaattagtagagtataattggttaggaggcagggcttattaagtggttattaaccgctgacatcagacaaacccaaatctgtagaattctaaccttctaacacctgtgacagtattaccactcttcttgtattatagatttagaactgatttactcaattgcactcttaactaatgttaaaagcttacttgctttaaacagccttttcttctttctcttaaaagtttcatttggggagctggtcttctaagaaacggataaagccacataattaaagcagttgaactatagggaaagcactgaacaaaccactttggagtaaatagctactcttagaaaagagggataagcagaccatgtaggttttctgtctctcaaatcttagagttcataaatttacttgaggttgcctcaagaactcagggaacaatactgtaaactgtcttcctgaactactgtagggcctctctaagaatttgaaatgtataaaccatgtgacctcatttatttgtcttatatatttacagccatactagaatttttatttctacgtttttagtaaatttaatattctgggggaaaaaaggccttgattttagggttaaaaacctgacttatagaagagtttatttaatataggtcaaaattttctgtgtttcttattccttctatacctcaaatctgattctaagaatttcttactgtgataatcattggcatgccacctgaggtcaaggagtgccaaataggactttccactcatgctcaagatcaaaactttatagaacagtcaacattttagattcggtaaccttttttttcttccaattataatctctgctagccacttccgccagcagttggtggaagacttactaggtgcagggcactttccaagttcatcacaacaacctgcttgttttcatgagacaataatccgaaaagttcgctttgatatattcctggagggccaagcccatctatttacaaaaggtgaacagcaaaatcaagcactgctttatgggcaggaacacaagagaaagcaaactgcccaagaagtcatcatgtcagaaactcaatctcaacaaaataatttccatcagggaacttcagggtttcttgggggcttatgagtctcaccggtcaacccaggaggcctcactacaagagccttgacaaggcactgttttttgtgggactgggagttcacactgatgaagcaaacctttgaatttttgcacagctcttgtcagaaagccctgagttccccctggataaagagttaattttaatccttccctataattatacttcaaaatatttgacatctgctattatgccttctttagatctttcttctgtggtgcagacatttctagtaagtgtttgactacttgtatggcattagctttcacagaaaattgtttcacttaaaactgtggattggcctaggctaaggacaaaaataaactaagtacctgtagtgtatttatgtgatatgtgtcaagttactcaaagttattgctgttggaactgaacaataatatttcccagatagctggccttagcatgtgatcacggttgttgtatttttaatttttgtcttttacagtatgagaggtgtaggttaatttgtttatttcctataaatttgtatttatgtgtatataaaatgtacaatgaatgtaaatatgactttctggaaagtttagactacatttagaatctctattcaaaatcaaaatgctgctcaaatgaatttaaccaacatctaggtgcttaatttctcattttatcccacttatgagattgggaaaaagatcaatatgagaaataccatacagataccttaaatgtatgcatttgtgcaacaatttttgagaaggtgagtggcaatttataatttagttggcaatttataatagaacttatagcttttaaaagaccttttaaagacattaaatgtaaacttaaaaatgtttagatcttgtttcaaactttacaatagcattcttcaaaatattaagttatatattttataggcatttagttgcttattaaaagcactgattttcaaactttttgatttaagaacaattatttaagatcgtctcagaagatgggatcttcgtttcaagaaaagggaatcaagtttgcctttgagataatacgttacactaagaaaaggaaaatgtggatagtaaaacccacctctctcatcctattgtactctcttctgctttttagaagcctgcacttaagcttagatttgtgaagggagagtagaaggggagaagtagaaccacagtgttttatttatttttctaaaactcttactaaatccagattttttaaactgttttaaatgtgaattcttcccagaaatttcaatgcattgcatatttagccttcggcatatttttcatgaatagatcatgaagtcataggcttccaaggcataggaagagatcttgcaggtctagtattttaataatgcactattacccagggcagatattatgagaaactgtttcttctctaagggtttatggcagactttgcttttttaacatgtgagaaatgaattttttattttgtgatttatgtgatttcttttgctgagtgaaggaaaggagaaattgttgctattgtcagcatcttaaaggtatttccagtcaaggcaaggctaagtgctttgtgatagtattaagcaagtcatgttttgaatggattacctgtagtgactcattggaatgatataattatacaagtaatgccaaaaaccaagtcaaagcctaattaaccaaagcactcatttaaaaatcatcatgtttggacctatctggacctctcagcactgtaaaatagttttggttttgtggcatatgaatagctgtttaacaaatcaaagttagctttttgcttctcagcttttttgggcaatacaagttaagttcttaatggggagacattatcatggcatgacttaagggaacattggtttgtgaaggaaaaacagattatctaaagccatctctatgtttctgttcagataaagattaatgagttctgtgtttatatcagctttgtatatttcatcttagccattctatcctagaaagattttaatgtgagcttaagatgtaaataaataattttgcaaacatg

SEQ ID NO: 159492 - DNA, 5068 bp, Homo sapiens
  Payload ID: 11207
  Gene Symbol: NIN
  Gene Name: ninein (GSK3B interacting protein)
  ENST ID: ENST00000530853
  CDS Start-End: 1-4612
tgtgttagcagaaaagtttggtgacctcgatcctagcagtgctgagttcttcctgcaagaagagagactgacacagatgagaaatgaatatgagcggcagtgcagggtactacaagaccaagtagatgaactccagtctgagctggaagaatatcgtgcacaaggcagagtgctcaggcttccgttgaagaactcaccgtcagaagaagttgaggctaacagcggtggcattgagcccgaacacgggctcggttctgaagaatgcaatccattgaatatgagcattgaggcagagctggtcattgaacagatgaaagaacaacatcacagggacatatgttgcctcagactggagctcgaagataaagtgcgccattatgaaaagcagctggacgaaaccgtggtcagctgcaagaaggcacaggagaacatgaagcaaaggcatgagaacgaaacgcacaccttagaaaaacaaataagtgaccttaaaaatgaaattgctgaacttcaggggcaagcagcagtgctcaaggaggcacatcatgaggccacttgcaggcatgaggaggagaaaaaacaactgcaagtgaagcttgaggaggaaaagactcacctgcaggagaagctgaggctgcaacatgagatggagctcaaggctagactgacacaggctcaagcaagctttgagcgggagagggaaggccttcagagtagcgcctggacagaagagaaggtgagaggcttgactcaggaactagagcagtttcaccaggagcagctgacaagcctggtggagaaacacactcttgagaaagaggagttaagaaaagagctcttggaaaagcaccaaagggagcttcaggagggaagggaaaaaatggaaacagagtgtaatagaagaacctctcaaatagaagcccagtttcagtctgattgtcagaaagtcactgagaggtgtgaaagcgctctgcaaagcctggaggggcgctaccgccaagagctgaaggacctccaggaacagcagcgtgaggagaaatcccagtgggaatttgagaaggacgagctcacccaggagtgtgcggaagcccaggagctgctgaaagagactcttaagagagagaaaacaacttctctggtcctgacccaggagagagagatgctggagaaaacatacaaagaacatttgaacagcatggtcgtcgagagacagcagctactccaagacctggaagacctaagaaatgtatctgaaacccagcaaagcctgctgtctgaccagatacttgagctgaagagcagtcacaaaagggaactgagggagcgtgaggaggtcctgtgccaggcaggggcttcggagcagctggccagccagcggctggaaagactagaaatggaacatgaccaggaaaggcaggaaatgatgtccaagcttctagccatggagaacattcacaaagcgacctgtgagacagcagatcgagaaagagccgagatgagcacagaaatctccagacttcagagtaaaataaaggaaatgcagcaggcaacatctcctctctcaatgcttcagagtggttgccaggtgataggagaggaggaggtggaaggagatggagccctgtccctgcttcagcaaggggagcagctgttggaagaaaatggggacgtcctcttaagcctgcagagagctcatgaacaggcagtgaaggaaaatgtgaaaatggctactgaaatttctagattgcaacagaggctacaaaagttagagccagggttagtaatgtcttcttgtttggatgagccagctactgagttttttggaaatactgcggaacaaacagagcagtttttacagcaaaaccgaacgaagcaagtagaaggtgtgaccaggcggcatgtcctaagtgacctggaagatgatgaggtccgggacctgggaagtacagggacgagctctgttcagagacaggaagtcaaaatagaggagtctgaagcttcagtagagggtttttctgagcttgaaaacagtgaagagaccaggactgaatcctgggagctgaagaatcagattagtcagcttcaggaacagctaatgatgttatgtgcggactgtgatcgagcttctgaaaagaaacaggacctactttttgatgtttctgtgctaaaaaagaaactgaagatgcttgagagaatccctgaggcttctcccaaatataagctgttgtatgaagatgtgagccgagaaaatgactgccttcaggaagagctgagaatgatggagacacgctacgatgaggcactagaaaataacaaagaactcactgcagaggttttcaggttgcaggatgagctgaagaaaatggaggaagtcactgaaacattcctcagcctggaaaagagttacgatgaggtcaaaatagaaaatgaggggctgaatgttctggttttgagacttcaaggcaagattgagaagcttcaggaaagcgtggtccagcggtgtgactgctgcttatgggaagccagtttagagaacctggaaatcgaacctgatggaaatatactccagctcaatcagacactggaagagtgtgtgcccagggttaggagtgtacatcatgtcatagaggaatgtaagcaagaaaaccagtaccttgaggggaacacacagctcttggaaaaagtaaaagcacatgaaattgcctggttacatggaacaattcagacacatcaagaaaggccaagagtacagaatcaagttatactggaggaaaacactactctcctaggctttcaagacaaacattttcagcatcaggccaccatagcagagttagaactggagaaaacaaagttacaggagctgactaggaagttgaaggagagagtcactattttagttaagcaaaaagatgtactttctcacggagaaaaggaggaagagctgaaggcaatgatgcatgacttgcagatcacgtgcagtgagatgcagcaaaaagttgaacttctgagatatgaatctgaaaagcttcaacaggaaaattctattttgagaaatgaaattactactttaaatgaagaagatagcatttctaacctgaaattagggacattaaatggatctcaggaagaaatgtggcaaaaaacggaaactgtaaaacaagaaaatgctgcagttcagaagatggttgaaaatttaaagaaacagatttcagaattaaaaatcaaaaaccaacaattggatttggaaaatacagaacttagccaaaagaactctcaaaaccaggaaaaactgcaagaacttaatcaacgtctaacagaaatgctatgccagaaggaaaaagagccaggaaacagtgcattggaggaacgggaacaagagaagtttaatctgaaagaagaactggaacgttgtaaagtgcagtcctccactttagtgtcttctctggaggcggagctctctgaagttaaaatacagacccatattgtgcaacaggaaaaccaccttctcaaagatgaactggagaaaatgaaacagctgcacagatgtcccgatctctctgacttccagcaaaaaatctctagtgttctaagctacaacgaaaaactgctgaaagaaaaggaagctctgagtgaggaattaaatagctgtgtcgataagttggcaaaatcaagtcttttagagcatagaattgcgacgatgaagcaggaacagaaatcctgggaacatcagagtgcgagcttaaagtcacagctggtggcttctcaggaaaaggttcagaatttagaagacaccgtgcagaatgtaaacctgcaaatgtcccggatgaaatctgacctacgagtgactcagcaggaaaaggaggctttaaaacaagaagtgatgtctttacataagcaacttcagaatgctggtggcaagagctgggccccagagatagctactcatccatcagggctccataaccagcagaaaaggctgtcctgggacaagttggatcatctgatgaatgaggaacagcagctgctttggcaagagaatgagaggctccagaccatggtacagaacaccaaagccgaactcacgcactcccgggagaaggtccgtcagttggaatccaatcttcttcccaagcaccaaaaacatctaaacccatcaggtaccatgaatcccacagagcaagaaaaattgagcttaaagagagagtgtgatcagtttcagaaagaacaatctcctgctaacaggaaggtcagtcagatgaattcccttgaacaagaattagaaacaattcatttggaaaatgaaggcctgaaaaagaaacaagtaaaactggatgagcagctcatggagatgcagcacctgaggtccactgcgacgcctagcccgtcccctcatgcttgggatttgcagctgctccagcagcaagcctgtccgatggtgcccagggagcagtttctgcagcttcaacgccagctgctgcaggcagaaaggataaaccagcacctgcaggaggaacttgaaaacaggacctccgaaaccaacacaccacaggccttgctaccggagcagcgagcagtgcacgcagattcctacagaaggattgggcacctgtgaaaactgggctgctattgatggcatttcttaccatggcagacagatgcacacacccacccatgcacacacaccacacacagagacataagctaagatatgttggaattaagtgctcttttaaattattttattatttttactgttaaacctttgcagtattatgtctcttatttatttatgtagaaatgacagatcttgtgaatcaaattcacaaacatcagcttgttacaaatcattttatttataccctttaaagagtgtggatttaagattcttgaaaggatgtagtctatatattttctcattccatatgttgtaactatttttaaccaaaggtactacttttatatatggaatttgaagaaaaccaggggtatttatactgttttgtataagatgtacaaatctttttgacaggaaatttttgatgaaacaataaaataaattttaagtata

SEQ ID NO: 159493 - DNA, 8368 bp, Homo sapiens
  Payload ID: 11207
  Gene Symbol: NIN
  Gene Name: ninein (GSK3B interacting protein)
  Uniprot ID: Q8N4C6
  ENST ID: ENST00000530997
  CDS Start-End: 1-6402
atggatgaggtggagcaggaccagcatgaggcccgactcaaggagctgtttgacagttttgacacgacgggcacagggtccctggggcaggaggaactcaccgacctttgccacatgttgagcttggaggaggtggccccagtgctgcagcagacattacttcaggacaacctcttgggcagggtacattttgaccaatttaaagaagcattaatactcatcttgtccagaactctgtcaaatgaagaacactttcaagaaccagactgctcactagaagctcagcccaaatatgttagaggtgggaagcgttacggacgaaggtccttgcccgagttccaagagtccgtggaggagtttcctgaagtgacggtgattgagccactggatgaagaagcgcggccttcacacatcccagccggtgactgcagtgagcactggaagacgcaacgcagtgaggagtatgaagcggaaggccagttaaggttttggaacccagatgacttgaatgcttcacagagtggatcttcccctccccaagactggatagaagagaaactgcaagaagtttgtgaagatttggggatcacccgtgatggtcacctgaaccggaagaagctggtctccatctgtgagcagtatggtttacagaatgtggatggagagatgctcgaggaagtattccataatcttgatcctgacggtacaatgagtgtagaagattttttctatggtttgtttaaaaatggaaaatctcttacaccatcagcatctactccatatagacaactaaaaaggcacctttccatgcagtctttcgatgagagtggacgacgtaccacaacctcatcagcaatgacaagtaccattggctttcgggtcttctcctgcctggatgatgggatgggccatgcatctgtggagagaatactggacacctggcaggaagagggcattgagaacagccaggagatcctgaaggccttggatttcagcctcgatggaaacatcaatttgacagaattaacactggcccttgaaaatgaacttttggttaccaagaacagcattcaccaggcggctctggccagctttaaggctgaaatccggcatttgttggaacgagttgatcaggtggtcagagaaaaagagaagctacggtcagatctggacaaggccgagaagctcaagtctttaatggcctcggaggtggatgatcaccatgcggccatagagcggcggaatgagtacaacctcaggaaactggatgaagagtacaaggagcgaatagcagccttaaaaaatgaactccgaaaagagagagagcagatcctgcagcaggcaggcaagcagcgtttagaacttgaacaggaaattgaaaaggcaaaaacagaagagaactatatccgggaccgccttgccctctctttaaaggaaaacagtcgtctggaaaatgagcttctagaaaatgcagagaagttggcagaatatgagaatctgacaaacaaacttcagagaaatttggaaaatgtgttagcagaaaagtttggtgacctcgatcctagcagtgctgagttcttcctgcaagaagagagactgacacagatgagaaatgaatatgagcggcagtgcagggtactacaagaccaagtagatgaactccagtctgagctggaagaatatcgtgcacaaggcagagtgctcaggcttccgttgaagaactcaccgtcagaagaagttgaggctaacagcggtggcattgagcccgaacacgggctcggttctgaagaatgcaatccattgaatatgagcattgaggcagagctggtcattgaacagatgaaagaacaacatcacagggacatatgttgcctcagactggagctcgaagataaagtgcgccattatgaaaagcagctggacgaaaccgtggtcagctgcaagaaggcacaggagaacatgaagcaaaggcatgagaacgaaacgcacaccttagaaaaacaaataagtgaccttaaaaatgaaattgctgaacttcaggggcaagcagcagtgctcaaggaggcacatcatgaggccacttgcaggcatgaggaggagaaaaaacaactgcaagtgaagcttgaggaggaaaagactcacctgcaggagaagctgaggctgcaacatgagatggagctcaaggctagactgacacaggctcaagcaagctttgagcgggagagggaaggccttcagagtagcgcctggacagaagagaaggtgagaggcttgactcaggaactagagcagtttcaccaggagcagctgacaagcctggtggagaaacacactcttgagaaagaggagttaagaaaagagctcttggaaaagcaccaaagggagcttcaggagggaagggaaaaaatggaaacagagtgtaatagaagaacctctcaaatagaagcccagtttcagtctgattgtcagaaagtcactgagaggtgtgaaagcgctctgcaaagcctggaggggcgctaccgccaagagctgaaggacctccaggaacagcagcgtgaggagaaatcccagtgggaatttgagaaggacgagctcacccaggagtgtgcggaagcccaggagctgctgaaagagactcttaagagagagaaaacaacttctctggtcctgacccaggagagagagatgctggagaaaacatacaaagaacatttgaacagcatggtcgtcgagagacagcagctactccaagacctggaagacctaagaaatgtatctgaaacccagcaaagcctgctgtctgaccagatacttgagctgaagagcagtcacaaaagggaactgagggagcgtgaggaggtcctgtgccaggcaggggcttcggagcagctggccagccagcggctggaaagactagaaatggaacatgaccaggaaaggcaggaaatgatgtccaagcttctagccatggagaacattcacaaagcgacctgtgagacagcagatcgagaaagagccgagatgagcacagaaatctccagacttcagagtaaaataaaggaaatgcagcaggcaacatctcctctctcaatgcttcagagtggttgccaggtgataggagaggaggaggtggaaggagatggagccctgtccctgcttcagcaaggggagcagctgttggaagaaaatggggacgtcctcttaagcctgcagagagctcatgaacaggcagtgaaggaaaatgtgaaaatggctactgaaatttctagattgcaacagaggctacaaaagttagagccagggttagtaatgtcttcttgtttggatgagccagctactgagttttttggaaatactgcggaacaaacagagcagtttttacagcaaaaccgaacgaagcaagtagaaggtgtgaccaggcggcatgtcctaagtgacctggaagatgatgaggtccgggacctgggaagtacagggacgagctctgttcagagacaggaagtcaaaatagaggagtctgaagcttcagtagagggtttttctgagcttgaaaacagtgaagagaccaggactgaatcctgggagctgaagaatcagattagtcagcttcaggaacagctaatgatgttatgtgcggactgtgatcgagcttctgaaaagaaacaggacctactttttgatgtttctgtgctaaaaaagaaactgaagatgcttgagagaatccctgaggcttctcccaaatataagctgttgtatgaagatgtgagccgagaaaatgactgccttcaggaagagctgagaatgatggagacacgctacgatgaggcactagaaaataacaaagaactcactgcagaggttttcaggttgcaggatgagctgaagaaaatggaggaagtcactgaaacattcctcagcctggaaaagagttacgatgaggtcaaaatagaaaatgaggggctgaatgttctggttttgagacttcaaggcaagattgagaagcttcaggaaagcgtggtccagcggtgtgactgctgcttatgggaagccagtttagagaacctggaaatcgaacctgatggaaatatactccagctcaatcagacactggaagagtgtgtgcccagggttaggagtgtacatcatgtcatagaggaatgtaagcaagaaaaccagtaccttgaggggaacacacagctcttggaaaaagtaaaagcacatgaaattgcctggttacatggaacaattcagacacatcaagaaaggccaagagtacagaatcaagttatactggaggaaaacactactctcctaggctttcaagacaaacattttcagcatcaggccaccatagcagagttagaactggagaaaacaaagttacaggagctgactaggaagttgaaggagagagtcactattttagttaagcaaaaagatgtactttctcacggagaaaaggaggaagagctgaaggcaatgatgcatgacttgcagatcacgtgcagtgagatgcagcaaaaagttgaacttctgagatatgaatctgaaaagcttcaacaggaaaattctattttgagaaatgaaattactactttaaatgaagaagatagcatttctaacctgaaattagggacattaaatggatctcaggaagaaatgtggcaaaaaacggaaactgtaaaacaagaaaatgctgcagttcagaagatggttgaaaatttaaagaaacagatttcagaattaaaaatcaaaaaccaacaattggatttggaaaatacagaacttagccaaaagaactctcaaaaccaggaaaaactgcaagaacttaatcaacgtctaacagaaatgctatgccagaaggaaaaagagccaggaaacagtgcattggaggaacgggaacaagagaagtttaatctgaaagaagaactggaacgttgtaaagtgcagtcctccactttagtgtcttctctggaggcggagctctctgaagttaaaatacagacccatattgtgcaacaggaaaaccaccttctcaaagatgaactggagaaaatgaaacagctgcacagatgtcccgatctctctgacttccagcaaaaaatctctagtgttctaagctacaacgaaaaactgctgaaagaaaaggaagctctgagtgaggaattaaatagctgtgtcgataagttggcaaaatcaagtcttttagagcatagaattgcgacgatgaagcaggaacagaaatcctgggaacatcagagtgcgagcttaaagtcacagctggtggcttctcaggaaaaggttcagaatttagaagacaccgtgcagaatgtaaacctgcaaatgtcccggatgaaatctgacctacgagtgactcagcaggaaaaggaggctttaaaacaagaagtgatgtctttacataagcaacttcagaatgctggtggcaagagctgggccccagagatagctactcatccatcagggctccataaccagcagaaaaggctgtcctgggacaagttggatcatctgatgaatgaggaacagcagctgctttggcaagagaatgagaggctccagaccatggtacagaacaccaaagccgaactcacgcactcccgggagaaggtccgtcagttggaatccaatcttcttcccaagcaccaaaaacatctaaacccatcaggtaccatgaatcccacagagcaagaaaaattgagcttaaagagagagtgtgatcagtttcagaaagaacaatctcctgctaacaggaaggtcagtcagatgaattcccttgaacaagaattagaaacaattcatttggaaaatgaaggcctgaaaaagaaacaagtaaaactggatgagcagctcatggagatgcagcacctgaggtccactgcgacgcctagcccgtcccctcatgcttgggatttgcagctgctccagcagcaagcctgtccgatggtgcccagggagcagtttctgcagcttcaacgccagctgctgcaggcagaaaggataaaccagcacctgcaggaggaacttgaaaacaggacctccgaaaccaacacaccacagggaaaccaggaacaactggtaactgtcatggaggaacgaatgatagaagttgaacagaaactgaaactagtgaaaaggcttcttcaagagaaagtgaatcagctcaaagaacaactctgcaagaacactaaggcagacgcaatggtgaaggacttgtatgttgaaaatgcccagttgttgaaagctctggaagtgactgaacagcgacagaaaacagcagagaagaaaaattacctcctggaggagaagattgccagcctcagtaatatagttaggaatctgacaccagcgccattgacttctacacctcctttgaggtcatagccaaaccaaagggtacactcatatttgtgcactttactgaaatagatgaacatttcagtaggttctcaacttaaaattaagcctaacctaaaactgccagcaacacaactggagtttccatttatcataattagtttttctaaatagacccttatgggagtttgaaaataaatactcacatatttcactacttaaattattcccaagatttgaatttattttaaaattttaatagccaccaagaatgtggacatatgaaaattcaagaacctaaaaaataccagttttgaatgagtttttgtggttttggttttttttttaattattacaaatctatgtgtaaaatctagatatttgaagtttgagatctgatgagaatggttgttataaactttattttaaaaccaaatttaggtgttcttacatatttaaatactggaaagtcattataatagttttggttctttgaattggtagacaattagtagagtataattggttaggaggcagggcttattaagtggttattaaccgctgacatcagacaaacccaaatctgtagaattctaaccttctaacacctgtgacagtattaccactcttcttgtattatagatttagaactgatttactcaattgcactcttaactaatgttaaaagcttacttgctttaaacagccttttcttctttctcttaaaagtttcatttggggagctggtcttctaagaaacggataaagccacataattaaagcagttgaactatagggaaagcactgaacaaaccactttggagtaaatagctactcttagaaaagagggataagcagaccatgtaggttttctgtctctcaaatcttagagttcataaatttacttgaggttgcctcaagaactcagggaacaatactgtaaactgtcttcctgaactactgtagggcctctctaagaatttgaaatgtataaaccatgtgacctcatttatttgtcttatatatttacagccatactagaatttttatttctacgtttttagtaaatttaatattctgggggaaaaaaggccttgattttagggttaaaaacctgacttatagaagagtttatttaatataggtcaaaattttctgtgtttcttattccttctatacctcaaatctgattctaagaatttcttactgtgataatcattggcatgccacctgaggtcaaggagtgccaaataggactttccactcatgctcaagatcaaaactttatagaacagtcaacattttagattcggtaaccttttttttcttccaattataatctctgctagccacttccgccagcagttggtggaagacttactaggtgcagggcactttccaagttcatcacaacaacctgcttgttttcatgagacaataatccgaaaagttcgctttgatatattcctggagggccaagcccatctatttacaaaaggtgaacagcaaaatcaagcactgctttatgggcaggaacacaagagaaagcaaactgcccaagaagtcatcatgtcagaaactcaatctcaacaaaataatttccatcagggaacttcagggtttcttgggggcttatgagtctcaccggtcaacccaggaggcctcactacaagagccttgacaaggcactgttttttgtgggactgggagttcacactgatgaagcaaacctttgaatttttgcacagctcttgtcagaaagccctgagttccccctggataaagagttaattttaatccttccctataattatacttcaaaatatttgacatctgctattatgccttctttagatctttcttctgtggtgcagacatttctagtaagtgtttgactacttgtatggcattagctttcacagaaaattgtttcacttaaaactgtggattggcctaggctaaggacaaaaataaactaagtacctgtagtgta

SEQ ID NO: 159494 - DNA, 605 bp, Homo sapiens
  Payload ID: 11207
  Gene Symbol: NIN
  Gene Name: ninein (GSK3B interacting protein)
  ENST ID: ENST00000486950
  CDS Start-End: 1-350
ccgacctttgccacatgttgagcttggaggaggtggccccagtgctgcagcagacattacttcaggacaacctcttgggcagggtacattttgaccaatttaaagaagcattaatactcatcttgtccagaactctgtcaaatgaagaacactttcaagaaccagactgctcactagaagctcagcccaaatatgttagaggtgggaagcgttacggacgaaggtccttgcccgagttccaagagtccgtggaggagtttcctgaagtgacggtgattgagccactggatgaagaagcgcggccttcacacatcccagccggtgactgcagtgagcttttggagagctgacatttctgtgcatgcgtcatgtacacatttagagttcagtgtgataaagcagctcgaacacttggtttttgcctcaagatactgagcctggggtgctttccagtgcccagcagttgccatggttctttctgctggattccttgcacccaggcctgtctcgttctccagcatgtggagagtcgccagcctccctcatcccccatcttttcattttgcatattgccataatctaccaataaaggaggttcagtaaca

SEQ ID NO: 159495 - DNA, 4969 bp, Homo sapiens
  Payload ID: 11208
  Gene Symbol: NINL
  Gene Name: ninein-like
  Uniprot ID: Q9Y2I6
  ENST ID: ENST00000278886
  CDS Start-End: 75-4223
gcggtacgggggtggtgccgcgctcctggccccgcgcgggcggacggcggaggcgcctcccagcctgctatgggatggatgaagaagagaaccactatgtctcgcagctcagggaagtctacagcagctgcgacaccacggggactggctttctggaccgccaggagctgacccagctctgccttaagcttcacctggagcagcagctgcccgtcctcctgcagacgcttctcggaaacgaccatttcgccagggttaactttgaggaatttaaggaaggttttgtggctgtgttgtcttcaaatgctggtgttcgcccctcagatgaagacagtagttctttggaatcagctgcctccagtgccatccctccaaagtatgtgaatggttctaagtggtatggccgtcggagccggcctgagctatgtgacgctgccacagaagccagacgcgtgccggagcagcaaacccaggccagcctgaaaagtcacctctggcgctcagcgtctctggagagcgtggagagtcccaagtcagatgaagaggccgagagcactaaagaagctcagaatgaattatttgaagcacaaggacagctgcagacctgggattctgaggactttgggagcccccagaagtcctgcagcccctcctttgacaccccagagagccagatccggggcgtgtgggaagagctgggggtgggcagcagcggacacctgagcgagcaggagctggctgtggtctgccagagcgtcgggctccagggactcgagaaagaggaactcgaagacctgtttaacaaactggatcaagacggagacggcaaagtgagtcttgaggaattccagcttggcctcttcagtcatgagcccgcgctacttctagagtcttccactcgggttaaaccgagcaaggcttggtctcattaccaggtcccagaggagagcggctgccacaccaccacaacctcatccctcgtgtccctgtgctccagcctgcgcctcttctccagcattgacgatggttctggcttcgcttttcctgatcaggtcctggccatgtggacccaggaggggattcagaatggcagggagatcttgcagagcctggacttcagcgtggacgagaaggtgaaccttctggagctgacctgggcccttgacaacgagctcatgacagtggacagtgccgtccagcaggcagccctggcctgctaccaccaggagctgagctaccagcaagggcaggtggagcagctggcaagggagcgtgacaaggcaaggcaggacctggagagggccgagaagaggaacctggagtttgtgaaagagatggacgactgccactccaccctggagcagctcacggagaagaaaatcaagcatctggagcaggggtaccgggaaaggctgagcctcctgcggtctgaggtggaggcggagcgagagctgttctgggagcaggcccacaggcagagggccgcgctggagtgggacgtggggcgcctgcaggctgaggaggctggcctccgcgagaagctgaccctggccctgaaggaaaacagtcgcctacagaaggagattgtggaagtggtggaaaagctttcggattcggagaggctggccctgaagctgcagaaggacctggagtttgtgctgaaggacaagctggagccacagagtgcagagctcctggcccaggaggagcggttcgcagcagtcctgaaggaatacgagctcaagtgccgggacctgcaggaccgcaacgatgagctgcaagctgagctggaaggcctgtgggcgcggctgcccaagaaccggcacagcccctcatggagcccggatgggcgcagacggcagctccctggactcggcccagcaggcatttcattcctgggtaattctgctccagtgagtatagaaacggagctgatgatggagcaggtaaaggagcattaccaagacctcaggacccagctggagaccaaggtaaattactacgaaagggaaattgcggcactgaaaaggaactttgagaaggagaggaaggacatggagcaggctcgcaggcgcgaggtcagcgtgctggagggtcagaaggccgacctggaggagctccacgagaagtctcaggaggtcatctggggcctgcaggagcagctgcaggacacagcccgcggccccgagcctgagcagatgggcctggcaccctgctgcacccaggcactgtgtggcctggccctgcggcatcacagccacctgcagcagatcaggagagaggctgaggcggagctgagtggagagctgtcggggctgggagccctgcccgctcgcagagacctgaccttggagctggaggagccgccgcagggacccctgccacgcgggagccagaggtcggagcagctggagctggagagggcactgaagctgcagccctgtgcgagcgagaagcgcgcccagatgtgcgtatcgttggccctcgaggaggaggagttggagcttgcccgcgggaagcgagtggacgggccctccctggaagcagagatgcaggccctgccgaaagatgggctggtggcaggaagtggccaggagggcacacgtggcctcctaccactgcgtccgggctgtggggagcggccactggcctggctggccccaggtgatggcagagagtctgaggaggcggcaggagccgggcctcgccgcaggcaagcccaggacacagaagctacgcagagcccggcccccgcccctgccccggcatcccacggcccctcagagaggtggtcacgcatgcagccctgtggagtggatggggatattgtcccaaaggagccagagcctttcggcgcgagcgcagcggggctggagcagcctggagcccgggagctgcctctgctgggaacagagagagacgcctcgcaaacccagccacggatgtgggagccacccctgaggccggccgcttcgtgcaggggacaggctgagaggctacaggccattcaggaagagcgagcacgaagctggagcaggggcacccaggagcaggcctcggagcagcaggcccgggccgagggcgccctggagcctgggtgtcacaagcacagtgtggaggttgccaggagagggtccttgccatcccacctccagctcgcagacccgcagggttcctggcaggagcagcttgctgccccagaagagggggagaccaaaatagcgctggagagagagaaggatgacatggaaaccaaacttctacatctggaagacgtcgtccgggctctggagaaacatgtagatttgagagagaacgacagactggagttccatagactttctgaagaaaacactttgttgaaaaacgatctgggaagggttcggcaagagcttgaagctgcagaaagtactcacgatgcacagaggaaggaaattgaggttttaaagaaagacaaggaaaaggcctgctctgagatggaggtgctcaacagacagaatcagaactacaaggatcaattatcccagctcaatgtcagggttcttcaactgggacaggaggcttctacccaccaggcccaaaacgaggagcatcgtgtgaccattcagatgttaacacagagcctggaggaggtggttcgcagtgggcagcagcagagtgaccaaatccaaaaacttagagttgaacttgaatgcctgaatcaggaacatcagagcctgcagctgccatggtcagagctgacccagacccttgaggaaagtcaagaccaggtgcagggagctcacctgaggctgaggcaggcccaggcccagcacttgcaggaggtccggctggtgccccaggaccgtgtggccgagctgcatcgcctgctcagccttcagggagagcaggccaggaggcgcctggatgcacagcgggaagaacatgagaaacagctgaaagccacagaagagcgggtggaagaggcggagatgattctgaagaatatggaaatgctcctccaagagaaagtggataagctgaaggagcagtttgaaaagaacacgaagtccgacctgctgctgaaggagctgtacgtggagaacgcccacctggtgagagcacttcaggccaccgaggagaagcagcgaggcgccgagaaacaaagccgcctcttggaagaaaaagttcgcgctctcaacaaactcgtcagtaggattgcccccgcagccctctctgtgtaaagacagattattttctaggattcattcgaaagcacatcttttaaattaagccactgtgctgccttagattccgtgggtcatgagccatgagtcctgggacatctgaggattgggattctttgttcaccccgcagatagttaatgaatggtctgccctgggcaagatggaggtgggggctgggggaatatgcatgttgcagaagccggcgtttttattagcggtcctgagtaatttcccttggcaaaattcccagttttgccactctctggagccagatcctgggagctgtcagcaaggagcaggtaagtgagcagttatggacagcactttccatgtggtgcttccgaccctggctgtcagagtgaaatgtaaagtcagggctctgtacagttttgccatttcactgttctgctttaagcttagcttattagaactcttggtggagggtgcgtacacacattccagaaaaggcttcactcgctgggaacgtcaacccagcgagaaaggaggggaagccccttctccggggaccttatctgtggactcaggaatgatggtgtttattgcaaatgcacaatctttttcccattgaaatgtcatcacactggaaattgtactatatgtaaaaaaaaaaaaaagtatagttttatatttgaaatgtatgcaaattatggccatatggctgattggaatgtactactgtaatataaaaagtcactgtatttgcaataaattcttttctatt

SEQ ID NO: 159496 - DNA, 439 bp, Homo sapiens
  Payload ID: 11208
  Gene Symbol: NINL
  Gene Name: ninein-like
  ENST ID: ENST00000336104
  CDS Start-End: 1-439
cacagcccgcggccccgagcctgagcagatgggcctggcaccctgctgcacccaggcactgtgtggcctggccctgcggcatcacagccacctgcagcagatcagactggagttccatagactttctgaagaaaacactttgttgaaaaacgatctgggaagggttcggcaagagcttgaagctgcagaaagtactcacgatgcacagaggaaggaaattgaggttttaaagaaagacaaggaaaaggcctgctctgagatggaggtgctcaacagacagaatcagaactacaaggatcaattatcccagctcaatgtcagggttcttcaactgggacaggaggcttctacccaccaggcccaaaacgaggagcatcgtgtgaccattcagatgttaacacagagcctggaggaggtggttcgcagtgggcagcagcag

SEQ ID NO: 159497 - DNA, 3801 bp, Homo sapiens
  Payload ID: 11208
  Gene Symbol: NINL
  Gene Name: ninein-like
  Uniprot ID: Q9Y2I6
  ENST ID: ENST00000422516
  CDS Start-End: 75-3176
gcggtacgggggtggtgccgcgctcctggccccgcgcgggcggacggcggaggcgcctcccagcctgctatgggatggatgaagaagagaaccactatgtctcgcagctcagggaagtctacagcagctgcgacaccacggggactggctttctggaccgccaggagctgacccagctctgccttaagcttcacctggagcagcagctgcccgtcctcctgcagacgcttctcggaaacgaccatttcgccagggttaactttgaggaatttaaggaaggttttgtggctgtgttgtcttcaaatgctggtgttcgcccctcagatgaagacagtagttctttggaatcagctgcctccagtgccatccctccaaagtatgtgaatggttctaagtggtatggccgtcggagccggcctgagctatgtgacgctgccacagaagccagacgcgtgccggagcagcaaacccaggccagcctgaaaagtcacctctggcgctcagcgtctctggagagcgtggagagtcccaagtcagatgaagaggccgagagcactaaagaagctcagaatgaattatttgaagcacaaggacagctgcagacctgggattctgaggactttgggagcccccagaagtcctgcagcccctcctttgacaccccagagagccagatccggggcgtgtgggaagagctgggggtgggcagcagcggacacctgagcgagcaggagctggctgtggtctgccagagcgtcgggctccagggactcgagaaagaggaactcgaagacctgtttaacaaactggatcaagacggagacggcaaagtgagtcttgaggaattccagcttggcctcttcagtcatgagcccgcgctacttctagagtcttccactcgggttaaaccgagcaaggcttggtctcattaccaggtcccagaggagagcggctgccacaccaccacaacctcatccctcgtgtccctgtgctccagcctgcgcctcttctccagcattgacgatggttctggcttcgcttttcctgatcaggtcctggccatgtggacccaggaggggattcagaatggcagggagatcttgcagagcctggacttcagcgtggacgagaaggtgaaccttctggagctgacctgggcccttgacaacgagctcatgacagtggacagtgccgtccagcaggcagccctggcctgctaccaccaggagctgagctaccagcaagggcaggtggagcagctggcaagggagcgtgacaaggcaaggcaggacctggagagggccgagaagaggaacctggagtttgtgaaagagatggacgactgccactccaccctggagcagctcacggagaagaaaatcaagcatctggagcaggggtaccgggaaaggctgagcctcctgcggtctgaggtggaggcggagcgagagctgttctgggagcaggcccacaggcagagggccgcgctggagtgggacgtggggcgcctgcaggctgaggaggctggcctccgcgagaagctgaccctggccctgaaggaaaacagtcgcctacagaaggagattgtggaagtggtggaaaagctttcggattcggagaggctggccctgaagctgcagaaggacctggagtttgtgctgaaggacaagctggagccacagagtgcagagctcctggcccaggaggagcggttcgcagcagtcctgaaggaatacgagctcaagtgccgggacctgcaggaccgcaacgatgagctgcaagctgagctggaaggcctgtgggcgcggctgcccaagaaccggcacagcccctcatggagcccggatgggcgcagacggcagctccctggactcggcccagcaggcatttcattcctgggtaattctgctccagtgagtatagaaacggagctgatgatggagcaggtaaaggagcattaccaagacctcaggacccagctggagaccaaggtaaattactacgaaagggaaattgcggcactgaaaaggaactttgagaaggagaggaaggacatggagcaggctcgcaggcgcgaggtcagcgtgctggagggtcagaaggccgacctggaggagctccacgagaagtctcaggaggtcatctggggcctgcaggagcagctgcaggacacagcccgcggccccgagcctgagcagatgggcctggcaccctgctgcacccaggcactgtgtggcctggccctgcggcatcacagccacctgcagcagatcagactggagttccatagactttctgaagaaaacactttgttgaaaaacgatctgggaagggttcggcaagagcttgaagctgcagaaagtactcacgatgcacagaggaaggaaattgaggttttaaagaaagacaaggaaaaggcctgctctgagatggaggtgctcaacagacagaatcagaactacaaggatcaattatcccagctcaatgtcagggttcttcaactgggacaggaggcttctacccaccaggcccaaaacgaggagcatcgtgtgaccattcagatgttaacacagagcctggaggaggtggttcgcagtgggcagcagcagagtgaccaaatccaaaaacttagagttgaacttgaatgcctgaatcaggaacatcagagcctgcagctgccatggtcagagctgacccagacccttgaggaaagtcaagaccaggtgcagggagctcacctgaggctgaggcaggcccaggcccagcacttgcaggaggtccggctggtgccccaggaccgtgtggccgagctgcatcgcctgctcagccttcagggagagcaggccaggaggcgcctggatgcacagcgggaagaacatgagaaacagctgaaagccacagaagagcgggtggaagaggcggagatgattctgaagaatatggaaatgctcctccaagagaaagtggataagctgaaggagcagtttgaaaagaacacgaagtccgacctgctgctgaaggagctgtacgtggagaacgcccacctggtgagagcacttcaggccaccgaggagaagcagcgaggcgccgagaaacaaagccgcctcttggaagaaaaagttcgcgctctcaacaaactcgtcagtaggattgcccccgcagccctctctgtgtaaagacagattattttctaggattcattcgaaagcacatcttttaaattaagccactgtgctgccttagattccgtgggtcatgagccatgagtcctgggacatctgaggattgggattctttgttcaccccgcagatagttaatgaatggtctgccctgggcaagatggaggtgggggctgggggaatatgcatgttgcagaagccggcgtttttattagcggtcctgagtaatttcccttggcaaaattcccagttttgccactctctggagccagatcctgggagctgtcagcaaggagcaggtaagtgagcagttatggacagcactttccatgtggtgcttccgaccctggctgtcagagtgaaatgtaaagtcagggctctgtacagttttgccatttcactgttctgctttaagcttagcttattagaactcttggtggagggtgcgtacacacattccagaaaaggcttcactcgctgggaacgtcaacccagcgagaaaggaggggaagccccttctccggggaccttatctgtggactcaggaatgatggtgtttattgcaaatgcacaatctttttcccattgaaatgtcatcacactggaaattgtactatatgt

SEQ ID NO: 159498 - DNA, 1281 bp, Homo sapiens
  Payload ID: 11209
  Gene Symbol: NINJ1
  Gene Name: ninjurin 1
  Uniprot ID: Q92982
  ENST ID: ENST00000375446
  CDS Start-End: 72-530
cgcagctggagcctgcggctgaggctcgggcgcgctcaggcccggatcctggcggcctgggcggccgcaccatggactcgggaaccgaggagtacgagctcaacggcggcctgcctccgggcacacccggctccccggacgcctcgccggcccgctggggctggaggcacgggcccatcaacgtgaaccattacgccagcaagaagagcgcagccgagagcatgctggacatcgcgctgctgatggccaacgcgtcccagctgaaggccgtcgtggaacagggccccagcttcgccttctatgtgcccctggtggtcctcatctccatctcccttgtgctgcagatcggcgtgggggtgctgctcatcttccttgtcaagtacgaccttaacaacccggccaagcacgccaagctggacttcctcaacaacctggccacgggcctggtgttcatcatcgtggtagtcaacatcttcatcacggccttcggggtccagaagcccttgatggacatggcaccccagcagtaggacacccaggaccctggatgttgcctgccctgcaactcagctgcccgaccccaggagtcgccatacctgtgaggtgtccacctccctgcacatggcactacccagactgccagagcccaggctggcctcatctgcaccatgtccccggaccagcccttgctctgactgcggccaagcaccacgcaggaggccactcttgtctctcagcagctgttcccaggaggcagctccctcctggcacatgggggctggccacaatagcccagagggtcagaactggacagctgcagagacctgtgcccagagaagggtctcgacccactcaaggacacacagcaggtccgtggatgggctggatgagtgaccagggccagcctctgtctcaggacattccagaaggacaaggagatgtctctccctctcccaaagcaccagcgtccctgcctcccgtgggccctgtccgggttgccctggtgaccccagcctctgtccacttcctaacccagggaccctgcacagccagaactgcctttggccctacggatggccactggctctggtcttaagtgcctgggcttggtggccatcaagagggagccagtcaggcctgtgagggccgtagaccttgtatataccctgcaccagcagtgaccgggcagagcccaaccccctccacgggggtcccagcacccacttttctaatcatgaatgaacaataaagcccacgctctttgtcaggctccacatgcca

SEQ ID NO: 159499 - DNA, 1252 bp, Homo sapiens
  Payload ID: 11210
  Gene Symbol: NINJ2
  Gene Name: ninjurin 2
  Uniprot ID: Q9NZG7
  ENST ID: ENST00000305108
  CDS Start-End: 282-848
aatttgcttgataaacatgcaggatttctttgccagtcataaagctactagctcaaagcaggctgggtgacctcagatggctccgctgggactggaaggtcactggagccactggtgaaaatgatgctgtcactaccaactcaaaaggtcacctatcagtgtgccatgtgccacctcctggagcacacacatgtgcacacacatacactcacacgtgtgtgcaggtgcacacctcccccagaggctgcagccaagacgggcatcccacatcagagggatgaatggcaggtctgtcccgccagctgtgtgctctctcccacccgaagaaagcagcagagactcagacggcggagcctggaggagcccacgcagtctgttcccggcacccggtgcgtgtgaagggacttgagggcagcgagatggaatcagcaagagaaaacatcgaccttcaacctggaagctccgaccccaggagccagcccatcaacctgaaccattacgccaccaagaagagcgtggcggagagcatgctggacgtggccctgttcatgtccaacgccatgcggctgaaggcggtgctggagcagggaccatcctctcactactacaccaccctggtcaccctcatcagcctctctctgctcctgcaggtggtcatcggtgtcctgctcgtggtcattgcacggctgaacctgaatgaggtagaaaagcagtggcgactcaaccagctcaacaacgcagccaccatcttggtcttcttcactgtggtcatcaatgttttcattacagccttcggggcacataaaacagggttcctggctgccagggcctcaaggaatcctctctgaatgcagcctgggacccaggttctgggcctggaacttctgcctccttcctccgtgatctgccaggctcgtgggcactttccacagcccaggagagcttctgaaaggacagtatagctgcccttgctccctacccacagcacctgagttaaaaagtgatttttatgttattggtctaagggacttccatcttggtctgaagtcctgagctcagacgcaggtactgccagccataccttcctggtagcatctgctggacctaagtaaggcatgtctgtctaaggccaagtctgcccggcttaaggatgctggttctgactctaccccactgcttccttctgctccaggcctcaattttcccttcttgtaaaatggaatctatatctataaaggtttcttcaaatcca

SEQ ID NO: 159500 - DNA, 793 bp, Homo sapiens
  Payload ID: 11210
  Gene Symbol: NINJ2
  Gene Name: ninjurin 2
  ENST ID: ENST00000397265
  CDS Start-End: 62-469
ccagtaattgcttggtggggcaagaggcttcagttccaagtcagcaaatgggatctgagtcatgatgtatatgcctggaagctccgaccccaggagccagcccatcaacctgaaccattacgccaccaagaagagcgtggcggagagcatgctggacgtggccctgttcatgtccaacgccatgcggctgaaggcggtgctggagcagggaccatcctctcactactacaccaccctggtcaccctcatcagcctctctctgctcctgcaggtggtcatcggtgtcctgctcgtggtcattgcacggctgaacctgaatgaggtagaaaagcagtggcgactcaaccagctcaacaacgcagccaccatcttggtcttcttcactgtggtcatcaatgttttcattacagccttcggggcacataaaacagggttcctggctgccagggcctcaaggaatcctctctgaatgcagcctgggacccaggttctgggcctggaacttctgcctccttcctccgtgatctgccaggctcgtgggcactttccacagcccaggagagcttctgaaaggacagtatagctgcccttgctccctacccacagcacctgagttaaaaagtgatttttatgttattggtctaagggacttccatcttggtctgaagtcctgagctcagacgcaggtactgccagccataccttcctggtagcatctgctggacctaagtaaggcatgtctgtctaaggccaagtctgcccggcttaaggatgctggttctgactctacccc

SEQ ID NO: 159501 - DNA, 945 bp, Homo sapiens
  Payload ID: 11210
  Gene Symbol: NINJ2
  Gene Name: ninjurin 2
  ENST ID: ENST00000433832
  CDS Start-End: 202-474
gttgcaaagcagccgctcggtggccgtacaacgcttcatctctccgagcctcggtttcctcatctccagccctaaaatgacgacacgccccacaggtcttgggaggattaagtgaggggacatgagcctggaagctccgaccccaggagccagcccatcaacctgaaccattacgccaccaagaagagcgtggcggagagcatgctggacgtggccctgttcatgtccaacgccatgcggctgaaggcggtgctggagcagggaccatcctctcactactacaccaccctggtcaccctcatcagcctctctctgctcctgcaggtggtcatcggtgtcctgctcgtggtcattggtgaggagcccagcctgcagtcagaccttctgcctcggcacccgtggctggcagaaaggccccacgtgtcccctgggccaccctgcattggcacaggcagctttgcaaccacacgctgacctgcagtgagccctccgctaacagaggcccaaagaccaacttccaccccgcgagggcaggcgccctgtcctgtctcctggtatcccatggagcagaccctccgcagtacctgctgaatgactgcgccagcacctcgctaactgctaactcactcactcgctcaccgcttctccatgagcactcgtccccacgcttacaggacccagcttaagttcccaaatcctggtgggatgaagcacactagggtgccccattgtactggttggcgagggcagaggcatctcagcccgatgacgaccacctcccttgatttctgccacatgggtttctgaagggcccctctctccaaactctggtgggtgttgtgggggcagctccgtgctgtggccccgtctctgaccctttccccccactccacttccctgcagcacggctgaacctgaatgaggtagaaaagcagtggcgactca

SEQ ID NO: 159502 - DNA, 670 bp, Homo sapiens
  Payload ID: 11210
  Gene Symbol: NINJ2
  Gene Name: ninjurin 2
  ENST ID: ENST00000542920
  CDS Start-End: 231-551
gctaagaacaaaacgttggctttggcttcgttgcaaagcagccgctcggtggccgtacaacgcttcatctctccgagcctcggtttcctcatctccagccctaaaatgacgacacgccccacaggtcttgggaggattaagtgaggggacatgagcctggaagctccgaccccaggagccagcccatcaacctgaaccattacgccaccaagaagagcgtggcggagagcatgctggacgtggccctgttcatgtccaacgccatgcggctgaaggcggtgctggagcagggaccatcctctcactactacaccaccctggtcaccctcatcagcctctctctgctcctgcaggtggtcatcggtgtcctgctcgtggtcattgcacggctgaacctgaatgaggtagaaaagcagtggcgactcaaccagctcaacaacgcagccaccatcttggtcttcttcactgtggtcatcaatgttttcattacagccttcggggcacataaaacagggttcctggctgccagggcctcaaggaatcctctctgaatgcagcctgggacccaggttctgggcctggaacttctgcctccttcctccgtgatctgccaggctcgtgggcactttccacagcccaggagagcttctgaaaggacagtatagctgcc

SEQ ID NO: 159503 - DNA, 2402 bp, Homo sapiens
  Payload ID: 11211
  Gene Symbol: NIP7
  Gene Name: NIP7, nucleolar pre-rRNA processing protein
  Uniprot ID: Q9Y221
  ENST ID: ENST00000254940
  CDS Start-End: 401-943
gcgccactgggcctcggggaagcggtcccggaacagcgacgccaggagcccttcatcctccacctcgccgagagccgctgctgtggccgtggctaccgatgggatagtcgccgcggtcgccatcttcccagcaacaacgtcacttcccttccggaccacaaggggcgctgactccgaacttaggacaggaagaaacaggcacatttccggtctctatgctttctcatccggccggcttgctttcccctgcggtcgtccagactattgggcgctagcgagacgaactattggtacggggctagagaggaaggctttgggattgccggggagcagcgagcgaccgacttccgtttccagttaccaaggcacgaggatccggtgttccaacccagggggaaaaatgcggcctttgactgaagaggagacccgtgtcatgtttgagaagatagcgaaatacattggggagaatcttcaactgctggtggaccggcccgatggcacctactgtttccgtctgcacaacgaccgggtgtactatgtgagtgagaagattatgaagctggccgccaatatttccggggacaagctggtgtcgctggggacctgctttggaaaattcactaaaacccacaagtttcggttgcacgtcacagctctggattaccttgcaccttatgccaagtataaagtttggataaagcctggtgcagagcagtccttcctgtatgggaaccatgtgttgaaatctggtctgggtcgaatcactgaaaatacttctcagtaccagggcgtggtggtgtactccatggcagacatccctttgggttttggggtggcagccaaatctacacaagactgcagaaaagtagaccccatggcgattgtggtatttcatcaagcagacattggggaatatgtgcggcatgaagagacgttgacttaaaacgaagccattccaaggacagacggctgtatggaaaggccgagctttgtttcctgtgtttgtgtggactccaccatcatgttgaattttgtcaacactctggcctcttcagggacttcttatttactgtactctctatcactgacaaatgcaggctggattcttattatatacagagatggctcaaaaatggggtttcagatctttgtgacgaaatagaatactgtttcatatttgaatcagagggcttcttgttctgagaaataggttcaaaatcattggaaccaggaacaagaatagcttattgttatctgtgataacactgttttctaaacacaaggattttcttttttattaatatgcaacatagacattgccataacagaataataaaccacatgtggggttttaaaaatgaaatttggctaataggagcaattcagctatttttctatacagtaattggtgtgtggtatagaagaaaaacgggttcaaaccccacttctgccacctaccagctatatggccttgaatgagtcattcagctttaataaggttcattttcttctgtttaaaaagacacaaaacttgaaaatcagctttggccatctacctgagaattagaaagtctgatttttggaattagaaatcatgattgtaggctgggcacagtggctcgcgcctgtaatcccagcactttgggaggccaaggcggacggatcacttgaggttaggagtttgagaccagcctggccaacatggtgaaaccccatctctactaaaaaaaaaaaaaaaattaggtgtggtgacacatggctgtggtcctagttacttgggaggctgaggcaggagaatggcttgaactggggaagcagagcttgcagtgagccaagatggtgccattgcactccagcctgggcgtgacagagtgagactccatctgattgtaaagcatctagtacagtgtacagtgccttggaaatgataggtatggaataaatggtaattatttttatattatatatattatgtattcctgttattaagtgtagagttttatgagtataatttgattttattaccttcttttttacaagctgttttctcagtatttttcttggatgggatgacgctaggctggaaagtttttttcatcactatgattttataaaacaattttttctatgaacctttacttacttgactggattggactaaaagcactgatcagaggccacgacataaaaattcagtccctttgtccttccccgtgcctcccaaagttactttaagatccttagaatatttctttaaatattttatagacaaaaaatttaaagactatctgtattgcaaaattaaactatttctttaatgaatatattgcttattttaagttccaaaggtgaagtctttaagaataaaacattaccaactcctgcttttatatgtaagcaaa

SEQ ID NO: 159504 - DNA, 1887 bp, Homo sapiens
  Payload ID: 11211
  Gene Symbol: NIP7
  Gene Name: NIP7, nucleolar pre-rRNA processing protein
  Uniprot ID: Q9Y221
  ENST ID: ENST00000254941
  CDS Start-End: 34-435
acgaggatccggtgttccaacccagggggaaaaatgcggcctttgactgaagaggagacccgtgtcatgtttgagaagatagcgaaatacattggggagaatcttcaactgctggtggaccggcccgatggcacctactgtttccgtctgcacaacgaccgggtgtactatgtgagtgagaagattatgaagctggccgccaatatttccggggacaagctggtgtcgctggggacctgctttggaaaattcactaaaacccacaagtttcggttgcacgtcacagctctggattaccttgcaccttatgccaagggttttggggtggcagccaaatctacacaagactgcagaaaagtagaccccatggcgattgtggtatttcatcaagcagacattggggaatatgtgcggcatgaagagacgttgacttaaaacgaagccattccaaggacagacggctgtatggaaaggccgagctttgtttcctgtgtttgtgtggactccaccatcatgttgaattttgtcaacactctggcctcttcagggacttcttatttactgtactctctatcactgacaaatgcaggctggattcttattatatacagagatggctcaaaaatggggtttcagatctttgtgacgaaatagaatactgtttcatatttgaatcagagggcttcttgttctgagaaataggttcaaaatcattggaaccaggaacaagaatagcttattgttatctgtgataacactgttttctaaacacaaggattttcttttttattaatatgcaacatagacattgccataacagaataataaaccacatgtggggttttaaaaatgaaatttggctaataggagcaattcagctatttttctatacagtaattggtgtgtggtatagaagaaaaacgggttcaaaccccacttctgccacctaccagctatatggccttgaatgagtcattcagctttaataaggttcattttcttctgtttaaaaagacacaaaacttgaaaatcagctttggccatctacctgagaattagaaagtctgatttttggaattagaaatcatgattgtaggctgggcacagtggctcgcgcctgtaatcccagcactttgggaggccaaggcggacggatcacttgaggttaggagtttgagaccagcctggccaacatggtgaaaccccatctctactaaaaaaaaaaaaaaaattaggtgtggtgacacatggctgtggtcctagttacttgggaggctgaggcaggagaatggcttgaactggggaagcagagcttgcagtgagccaagatggtgccattgcactccagcctgggcgtgacagagtgagactccatctgattgtaaagcatctagtacagtgtacagtgccttggaaatgataggtatggaataaatggtaattatttttatattatatatattatgtattcctgttattaagtgtagagttttatgagtataatttgattttattaccttcttttttacaagctgttttctcagtatttttcttggatgggatgacgctaggctggaaagtttttttcatcactatgattttataaaacaattttttctatgaacctttacttacttgactggattggactaaaagcactgatcagaggccacgacataaaaattcagtccctttgtccttccccgtgcctcccaaagttactttaagatccttagaatatttctttaaatattttatagacaaaaaatttaaagactatctgtattgcaaaattaaactatttctttaatgaatatattgcttattttaagttccaaaggtgaagtctttaagaataaaacattaccaactcctgcttttatatgt

SEQ ID NO: 159505 - DNA, 1099 bp, Homo sapiens
  Payload ID: 11211
  Gene Symbol: NIP7
  Gene Name: NIP7, nucleolar pre-rRNA processing protein
  ENST ID: ENST00000569637
  CDS Start-End: 263-595
gtcacttcccttccggaccacaaggggcgctgactccgaacttaggacaggaagaaacaggcacatttccggtctctatgctttctcatccggccggcttgctttcccctgcggtcgtccagactattgggcgctagcgagacgaactattggtacggggctagagaggaaggctttgggattgccggggagcagcgagcgaccgacttccgtttccagttaccaaggcacgaggatccggtgttccaacccagggggaaaaatgcggcctttgactgaagaggagacccgtgtcatgtttgagaagatagcgaaatacattggggagaatcttcaactgctggtggaccggcccgatggcacctactgtttccgtctgcacaacgaccgggtgtactatgtgagtgagaagattatgaagctggccgccaatatttccggggacaagctggtgtcgctggggacctgctttggaaaattcactaaaacccacaagtttcggttgcacgtcacagctctggattaccttgcaccttatgccaaggtttgtggggcggtttccaattctgccacgggcgatgaagtcaaggattaggcagattgtccggcagcttctctcccacagagtccctgacagtgtgcttggaggagtttcagcacatggagatgtgtagaggtcttgcagcttgagcatggtcagggctatgggataggaatgctatgtggctgcgtagggttagttttctccagcgaagtagaagagcctagggagacccagctagagatcagaaagcaaataagtggcagcaatgaagacaccggggtccagaaaaagagctgttaacctggccatggaggatgatccttgtagagttgagaaaataactttttctatttttttctttttctttcttgctctgttttttcttttcatttctctttctctttcttcctgacacagtttcactctgtcgcccaggctagagtgcagtggtgcgatctcactgcagcctccactttccagtttccagtgattcttgtgcctcagtagctgggattacaggcatgtgccaccacacctggctgatttttttgtgtg

SEQ ID NO: 159506 - DNA, 760 bp, Homo sapiens
  Payload ID: 11211
  Gene Symbol: NIP7
  Gene Name: NIP7, nucleolar pre-rRNA processing protein
  ENST ID: ENST00000562523
  CDS Start-End: 1-213
acccacaagtttcggttgcacgtcacagctctggattaccttgcaccttatgccaagtataaagtttggataaagcctggtgcagagcagtccttcctgtatgggaaccatgtgttgaaatctggtctgggtcgaatcactgaaaatacttctcagtaccagggcgtggtggtgtactccatggcagacatccctttgtgtctcttcttttgaatcccagggttttggggtggcagccaaatctacacaagactgcagaaaagtagaccccatggcgattgtggtatttcatcaagcagacattggggaatatgtgcggcatgaagagacgttgacttaaaacgaagccattccaaggacagacggctgtatggaaaggccgagctttgtttcctgtgtttgtgtggactccaccatcatgttgaattttgtcaacactctggcctcttcagggacttcttatttactgtactctctatcactgacaaatgcaggctggattcttattatatacagagatggctcaaaaatggggtttcagatctttgtgacgaaatagaatactgtttcatatttgaatcagagggcttcttgttctgagaaataggttcaaaatcattggaaccaggaacaagaatagcttattgttatctgtgataacactgttttctaaacacaaggattttcttttttattaatatgcaacatagacattgccataacagaataataaaccacatgtggggttttaaaaatgaaa

SEQ ID NO: 159507 - DNA, 646 bp, Homo sapiens
  Payload ID: 11211
  Gene Symbol: NIP7
  Gene Name: NIP7, nucleolar pre-rRNA processing protein
  ENST ID: ENST00000567202
  CDS Start-End: 1-239
ctaaaacccacaagtttcggttgcacgtcacagctctggattaccttgcaccttatgccaagtataaagtttggataaagcctggtgcagagcagtccttcctgtatgggaaccatgtgttgaaatctggtctgggtcgaatcactgaaaatacttctcagtaccagggcgtggtggtgtactccatggcagacatccctttgacattggggaatatgtgcggcatgaagagacgttgacttaaaacgaagccattccaaggacagacggctgtatggaaaggccgagctttgtttcctgtgtttgtgtggactccaccatcatgttgaattttgtcaacactctggcctcttcagggacttcttatttactgtactctctatcactgacaaatgcaggctggattcttattatatacagagatggctcaaaaatggggtttcagatctttgtgacgaaatagaatactgtttcatatttgaatcagagggcttcttgttctgagaaataggttcaaaatcattggaaccaggaacaagaatagcttattgttatctgtgataacactgttttctaaacacaaggattttcttttttattaatatgcaacatagacattgccataacagaataataaaccacatgt

SEQ ID NO: 159508 - DNA, 5300 bp, Homo sapiens
  Payload ID: 11212
  Gene Symbol: NIPAL1
  Gene Name: NIPA-like domain containing 1
  Uniprot ID: Q6NVV3
  ENST ID: ENST00000295461
  CDS Start-End: 67-1299
gggtgcgtgtggagaggcccaggtgaggagcaagcgcccgcgttccggaagcccgctcccggggccatgggggcacaggtgaggctgccgcccggagagccctgccgagaaggatatgtgctgtctctggtctgtccaaactcctcccaggcttggtgtgagatcacaaatgtgtcacagctgctggcttctcctgtgctctacacggacctgaattacagcataaacaacttgagcatttcagcaaatgtagaaaacaaatacagtctttatgtgggcttggtactggcagtaagctcaagtatttttattggctccagcttcatactgaaaaagaagggcctcttgcaactggccagcaagggctttactagagctggacaaggtggacattcttacctgaaggaatggctctggtgggtaggattgctgtcaatgggagcaggagaggctgcaaattttgctgcttatgcttttgcacctgccaccttggtcacccctctgggtgctttgagtgttctcataagtgcaatattatcttcctactttttaaacgagcacttgaacattcatgggaaaataggctgcatattaagtatattggggtcaactgtgatggttatccatgccccacaagaagaggaagtcacatctttgcatgaaatggaaatgaaattgagagacccagggtttatttcctttgctgtgatcataactgtgatctccttggtgctgattttgattgtggctcccaagaaaggacagaccaatatattggtttatatttcaatctgttccttgattggagcgttttcagtttcttctgtgaaaggcctgggaattgccattaaggagctgatagaatggaagccagtttacaaacatccgctggtctttgttttgctggctgtacttgtgctttcagtaactacacagattaactatctcaacaaggcactggacacctttaatacctctcttgtgacacccatttattatgtattcttcacatccatggtagtgacttgctctgccatcttattccaagagtggtatggcatgacagctggagatatcattgggaccctgagtggattcttcactattatcattggcatcttccttctacatgcttttaaaaatactgacattacttggagtgagcttacatccactgctaagaaagaagccgtctctctgaatgtcaatgaaaacaattatgttttactagagaacttggagtgttcagccccaggatacaatgatgacgttaccttgtttagtagaactgatgactgaagtctctagaaacactgagttttaaccaatatgagacacacgaagaggaaaatgaatgcttgcttcttggaagaactgctaggaaagttagcatttttgcagttctaactaatttagatgtgaggccaagtaaaaatgccatttttttggccattgaatttgaaaatcaaattgattatcctccagaatctctacaaactttgaaatactctctaaggatcaaagaagtcaaagagctatgtgtgtctcagaataatctccttcttctggtcacagtatctttgtctctgccaggtggctcttcatttctttggtagctatttttagacttacagtcattcaccaatatacagttagcagtgttctgatagacacagtatcagtcatattctccgttgagtcataatttcaaactcaacaagatttcagaaaggtataatcatgtaatttctcatattaaaactgagaagagaggccaggcatggtggttcacacctgtaatcctagcagtttgggaggccaaggcggacagatcacttgagctcaggagttcgagaccaccttgggccacaaggcgagaccctgtctctacaaaaaatacaaaaattagccaggcgtggtggcacatgcctgtagttccagccacccgggagcctgaggtgggaggattgcttgagtctgcgaggttggggctgccgtgagcccagattgcgccattgtgctccagcctgggtgacaaagcaaggccctgtctcaaaaaagaagaagagaaagggccaggggcttttgctttaaaaaactttttttaaaacagaagtgaaaccacgggtgctttgttcttccttctgcacctccttcttaaactagatagctaattagttattttaagaaaaaagaaatttaaaaaaaagcctgctttatttgttagtgggctagaatacacaagacatacccacccatgaagagtttatgaattgtaacttattgacattatcataggaatttactaccagttaaagagggagaacggaggaagagaaaaatacttcagataaaggaaaaagttttcttctcacaaaaacacagacacgtgattgttttcacaggttccattaattaactcaggtctggaagacataggacaaaatggagtttctgaagaagtccaggtgaattcagctttggagtcacttatgttcattttttttccttttcttttactattatcctaaaggttatttttcttgttgatatagagatttttgtaaaagattgctacattatttcaggattatatcctacatttcgattgctctcaaatgttttatccctaaagagtgagttttccacagactgtttggaagcaactagaaaaatctttgtgaaaaatctgaacaaattatcataatggctctcttgaaattttgcactttcacccttattaaggaaattataattagttactaacctttaaaaatagatatattctaataggatagaaagttaacttcctggcaaacaaaatactaagatctcaggggctactgcaggaaaatacctttttcgcacattaaaatgtttataaaattttcccctctcatttcaaatgcatggcaggaataacatttttggtggtctttaatgtgatggacagatttactgtcacttattgattttatggaaaataaattggctatcttatttttataacaatcttatttttctcaaaacaaaaatcctaaccaaaaagttgtcattaaaaaaaaaaaaattcaggtagactgaatgtttttctgctctaaccttaaatgttattaggtttggtttttgtttctaagctacttcaagactacctgaggtaataatggtaaactttattattcagaattcgattaaactaacttcagcatttccacagttctattaaacaatgactgatgttcacaatgacaacctacctgagatggctgcaaggccctaatgttccattatacattatagtcttttcagcatagtttagtgttgagtgcaattctaatgcattctacgtttttgaaaatcgataatccatggaaggtccatgggttgatacctcaggtcaaaaatgtgtttactctgttgattgctgtttcactttacttgtatatcagatatataagctatgaacacaagtttgtagtaaaagtatcttctgtctgggcaatggctcacacctgtaattccaacactttggggggctcaggtgggaggatttctagtccccaggagtttgagaccagcctgggcaataaactagaccccatgtctctaaaaaatgtaaaaaacatcaagaggctgagtcaggaggatcatttgagcttaggagttcaaggctgcagtaagttatgattgtgccactgcattccagcctgggtgacaagagtgagaccctgacccaaaaaagtatcttctgataaagtggcatttgaaaattgcagaaattttaatattttttcttttaatattaagaactttattgatctctctaggacaccttggtgaggaaattaatggcacttttcttgacatccaacctgggactctggtgattctgtgttctggcgaatttaagtttcagacatttctttgtgtcaccttttacaaggtgtttgcccttggtacgttatgaccaggtcaaaggttcccaaacacaaggctcattgtgtaccctggacaggaaattgaactgatgttgacatgtatgcatgcccaggaggaagactgggaaagatttaatgagttgaagtatgctgagaaacaatgaaatatttgaaaactgtctacataaaagttactgatgcacatgcattaaaaaaaaaaatgttgttgcaaatctaacactaaaaaatttttgactgggtgcagtggctcacacctgtaatcccagcactttgggaggctgaggcgggtagatcacaaggacaggagttcaagaccagcctggccaacatggtgaaaccccgtctctactaaaaatacaaaaattagccaggcatggttgcgggtgcctataatcccaactaccccggaggctgaggcagggaattgcttgaagcaaggaggggcaggttgcagtgagccaagattgtgccaccacactccagcctgggtaacagcaagactccgtctcaaaaaaaaaaaaaattcccaaataggaagatattttctaaggaagaataaaatgctggacccctatattcagactattagtcttaactggtagtttatgtatatattttaatactttgtcatcatgtacatatcttaagatttattatgtgaatatctgcatgtgtgttattaaggattacaaagttgtgctcacacaggacaaatggaaagattttcctacttctgtaaagataagtttcattatacttttgtcttacaattttattcttaggtcaatggttatttattataagttcagattgcacaattttcataagaccctttggatttagcacatgaaattaacacatattttaaagtattaaatacatggaaagcatctggcattatgcctgataataggcacttagtaaaatgtacttttctttgaatcaacatttgaattcttacagtcttgtcactagagacttaaaaggaccattgagtgcctatttttatacattcatcttttctcaatttgtcacattatctcattttaaataatgcaagtgaaagtgaattcatcatactatctcaacaccaatacaaaattattccaataaaaatatttttcttaataaaaccagaaaaactgaactaaatgctatttagccccgccaacaaagctttgtggaaaaatatatgaatatatgaaatgttctcaaatattttgaataaactgttcatgaagccttatattttgcaagtgtttttactgttgattttagaaagtttataaatcttaaatgtttgtatatttttcatttgcaataaaatgttatttaattatg

SEQ ID NO: 159509 - DNA, 488 bp, Homo sapiens
  Payload ID: 11212
  Gene Symbol: NIPAL1
  Gene Name: NIPA-like domain containing 1
  ENST ID: ENST00000511123
  CDS Start-End: 1-279
gtgtcacagctgctggcttctcctgtgctctacacggacctgaattacagcataaacaacttgagcatttcagcaaatgtagaaaacaaatacagtctttatgtgggcttggtactggcagtaagctcaagtatttttattggctccagcttcatactgaaaaagaagggcctcttgcaactggccagcaagggctttactagagctggacaaggtggacattcttacctgaaggaatggctctggtgggtaggattgctgtcaagttccattaattaactcaggtctggaagacataggacaaaatggagtttctgaagaagtccaggacaccttggtgaggaaattaatggcacttttcttgacatccaacctgggactctggtgattctgtgttctggcgaatttaagtttcagacatttctttgtgtcaccttttacaaggtgtttgcccttggtacgttatgaccaggtcaaaggttcccaaa

SEQ ID NO: 159510 - DNA, 884 bp, Homo sapiens
  Payload ID: 11212
  Gene Symbol: NIPAL1
  Gene Name: NIPA-like domain containing 1
  ENST ID: ENST00000511852
  CDS Start-End: 31-426
cccgcgttccggaagcccgctcccggggccatgggggcacaggtgaggctgccgcccggagagccctgccgagaaggatatgtgctgtctctggtctgtccaaactcctcccaggcttggtgtgagatcacaaatgtgtcacagctgctggcttctcctgtgctctacacggacctgaattacagcataaacaacttgagcatttcagcaaatgtagaaaacaaatacagtctttatgtgggcttggtactggcagtaagctcaagtatttttattggctccagcttcatactgaaaaagaagggcctcttgcaactggccagcaagggctttactagagctggacaaggtggacattcttacctgaaggaatggctctggtgggtaggattgctgtcaatgcaatattatcttcctactttttaaacgagcacttgaacattcatgggaaaataggctgcatattaagtatattggggtcaactgtgatggttatccatgccccacaagaagaggaagtcacatctttgcatgaaatggaaatgaaattgagagacccagggtttatttcctttgctgtgatcataactgtgatctccttggtgctgattttgattgtggctcccaagaaaggacagaccaatatattggtttatatttcaatctgttccttgattggagcgttttcagtttcttctgtgaaaggcctgggaattgccattaaggagctgatagaatggaagccagtttacaaacatccgctggtctttgttttgctggctgtacttgtgctttcagtaactacacagattaactatctcaacaaggcactggacacctttaatacctctcttgtgacacccatttattatgtattcttcaca

SEQ ID NO: 159511 - DNA, 4581 bp, Homo sapiens
  Payload ID: 11213
  Gene Symbol: NIPAL2
  Gene Name: NIPA-like domain containing 2
  Uniprot ID: Q9H841
  ENST ID: ENST00000341166
  CDS Start-End: 257-1363
agctggacggccccgggaggccgcagaccgccgggctccccgaggacacctcgcaccggaggaggagaggaggcagcgcccggccaggctgggagcacctacggccgcgcgggggcgggagccaggtggcctcggcgcgcccgcctcgcccgggcaccgagcaggaagtggctgcggcgcggcctcctcgcggtgcaacagggcggggaggcggccgcagcccgagccggagcccgagcgccgggagcgagacctcatggcagcggtggcgcccgcgggccccggggactccgcctcggccgccctggacgagctgtcactgaatttcacgtacggggcaccaggcgccggcaacggctccctctcgggcgactggtaccgcaggaaccagattcacctttttggagttttgctggctattttaggaaacttggtgatcagtatttctctaaatattcagaaatattctcaccttcagctggcacaacaagagcacccaaggccatacttcaagagtgtgctgtggtggggtggtgtcctgctgatggccgtgggagagacggggaactttgcagcctatggatttgctcccattactctgatcgctccgttaggctgtgtgtctgttacaggtagtgccattatttctgttacatttctgaaagacaatttgagagcctcagacttactcggtacgacactggcatttgcaggaacatatttactggtgaactttgctccaaatataactcaggcaatctcagcaagaacagtacagtattaccttgtcggatggcagttcctgatctatgtgattttagaaatattaattttctgcattctcctgtatttctataaaagaaaaggaatgaagcatatggtgattctgctaaccctggtggcaattctagcctcattgactgttatttcagtaaaggccgtctcaggcatgatcactttttctgtgatggataaaatgcaactaacttaccccattttctatatcatgtttatcatcatgatagcatcttgtgttttccaagtcaagttcctgaatcaagccacgaaactctacaatacgacaacagtggtgccagttaatcatattttctttacaatcagtgccatcattgcaggtatcatattttatcaggaattccttggtgctccttttctcactgtatttatatatctttttgggtgttttctgtcattccttggtgtatttttggtcacaagaaatcgagaaaaggaacatctgcaacagtcttatattgattttggaaatattcctgacacaaccccagagagaaaggcttggagggaaacaaatgttggacaaaatacaaccagattcacatagcttatcctatggaactttgcctgatggaagtgactcaacaaagagccaaagtggagagaagaaagaggtctaaatgctgagaaggatggctgttggcctgttattcgataccacctttttaaaaaattgcacatgttcaatttgtgtcagcagctcttttataagctaacatgtgctagcattcatttcagtcctttcccccacctcagcgtctatggacaatcggggacttcctaagctctgacagtctaatatttccatggaatgtgatttggagtgttccccacaccctggacctctccctagtgattatctagccagctacaccttactcagagcccggctgctctagcaggaatgttgcacagaaacatacatttgcggtttggccacaggtcgcataggtggcttctcccacgggtagtgtcagttgcttcactttaaaaagtcacttcagccccacaacctcactcccaaaagaaaggtttgagagcgctcattttttttctaagacaccttttataagcctccctataaaaatctcacctttcaagtactaagttagaattgcaagtcatcttttctgaaaactaatgctatcaaagtcctcctttgaaaattaagggtctctttaaaattagaatttataaatggcattcagtgatagtgtacaccaaaattaaaagaccttgactggtgggctttttacgtgtaaggaagaggaagtttaagaagtaggactctgcttgtttcagtagcccatgtactaaaataggaacaatgcagagattagcacagcccctgcacaaggctgacacataaattcatgaagcgttagagacaaaaagtaggactaatgtttgtttattttttaataaaaatctagaatggtgatgttttcttcagctgtatgattctatcatacttgaaactgaagaaaaatttaatatcctatgtcttttttatagatcttataatttatcaagtggatttatatgtcttattctccatataagtctaaaaaatcacatttaaattcttagtgatagtttcactacacatcatttcttcccaaagtcattacctcaagctttgtaaattcttctagataaaaggagagttgtgattagagaactgaatttcagccatttaaacctgtagacatagaaaacaacccagtggtcaaacctgagcttcaagaggaagcccaagtcctcctgtttcctgaatggcttttccactccaattcatcacatatctgctaagacacatttgcaggtagaatccataataatatctgttatttatgatctacctaatatttaaaggagaagaaaagaagtagccttcgttgcagccaacatccaacaataagtcccacccttaatgacatttcaaagccttcagatcacttctgacatgtctgtccaatatcattccaatcaatagtcttgcatttaaataggttgtttaactcggtggtattgagactgtaaccttaatggctcaggtcttttagctttgttctttgtcataatctgcactcctggccagactgaccaaacctggctgcaaaggaaagagatttgaattgatcaccaatgtatgaaaaatacagaacccatgtctggctcctaaactcctggtaataattcccgccatcgtagcaagtgtcccatgcattcagataaagcagtcataatttatggtgtattttaccgaattggtccagcatattggtcctacaaggctcagccaagaaatgtatctggtgccttaaactacagatttctggtgactcttaaaactggtttacaaagattgagaaaacaattagattgaagagttttgcttcaagtagacctgcattcatagctagagtgcatgagattttcagcactgtagaatttcacacaggcacaagcataacaccagtactttagcagccgccaacagttgcatctattaaacgttttgagaaatgacattgacttatgcacatttaagcaatcaacaatgttttagaagtccaggtaacatataaaatatattcagacctagttttactttccatattgttgctccaaagtaaggtaaataggagttttagttgtactggcctgtaagattttttaaattacacagtgcatgacaacaactaaagccaactcagtccttctcttggcattgtgagttgaggacctttagccaactgttagctcatctgactatctgtctagaccaagggtcggcaaagttttcagtaaagacccacagagtacatattttggagtttgtgttgtctgtaccaacagacagacatggtgtctgtcccaactacccaactctgccattgtagcactaaagcagccatagacaagatgtaaacagaagagcatggctgtgttccagtaaaactttatttacaggccaggcatggtggctcatgcctgtaatcccagcactctgggaggctgaggctgacagatcatctgaggttaggagtttgggaccagcctggtcaacatagtgaaaccccatctctactaaaagtacaaaaattagccaggcatgacggtgggtgcctggagtcccagctacctgggaggctgaggcaggagaatcacttgaacccgggaggtggaggttgcagtgagccgagatcatgccattgcactccagcctgggcgacagagtaagactgtctcaaaaacaaacaaacaaacaaacaaacaaaaacaagtggccagtctgtgagctatagttcccaacacctggtctagactcttctgcccttgctctgcagcttctttcctgttgattgggcattcagggaaggagtttaaaaagtgacactcatggctcatgacaaatgagatactttgggagtgtggaaacatggcttgatatttgccttcagatatttttgcttatataagttctaaatggaagtgataagttcattcttagggtccaagttgaaaggcagtggttcttttgtgaacaccactaactacattcgaaaagcctctccaattccacattccaagtctataacagctttggaaatgagtaacaatgacctctcatgtagtagattaaagcagaggcctttgccatatgattgttttttggcttaaatgtttgcttgccctgtaactgtaatactttggttaccagaatcacttgaaaacaaatacaataaaaaaatttctcaa

SEQ ID NO: 159512 - DNA, 4496 bp, Homo sapiens
  Payload ID: 11213
  Gene Symbol: NIPAL2
  Gene Name: NIPA-like domain containing 2
  Uniprot ID: Q9H841
  ENST ID: ENST00000430223
  CDS Start-End: 200-1351
ggaggaggagaggaggcagcgcccggccaggctgggagcacctacggccgcgcgggggcgggagccaggtggcctcggcgcgcccgcctcgcccgggcaccgagcaggaagtggctgcggcgcggcctcctcgcggtgcaacagggcggggaggcggccgcagcccgagccggagcccgagcgccgggagcgagacctcatggcagcggtggcgcccgcgggccccggggactccgcctcggccgccctggacgagctgtcactgaatttcacgtacggggcaccaggcgccggcaacggctccctctcgggcgactggtaccgcaggaaccagattcacctttttggagttttgctggctattttaggaaacttggtgatcagtatttctctaaatattcagaaatattctcaccttcagctggcacaacaagagcacccaaggccatacttcaagagtgtgctgtggtggggtggtgtcctgctgatggccgtgggagagacggggaactttgcagcctatggatttgctcccattactctgatcgctccgttaggctgtgtgtctgttacaggtagtgccattatttctgttacatttctgaaagacaatttgagagcctcagacttactcggtacgacactggcatttgcaggaacatatttactggtgaactttgctccaaatataactcaggcaatctcagcaagaacagtacagtattaccttgtcggatggcagttcctgatctatgtgattttagaaatattaattttctgcattctcctgtatttctataaaagaaaaggaatgaagcatatggtgattctgctaaccctggtggcaattctagcctcattgactgttatttcagtaaaggccgtctcaggcatgatcactttttctgtgatggataaaatgcaactaacttaccccattttctatatcatgtttatcatcatgatagcatcttgtgttttccaagtcaagttcctgaatcaagccacgaaactctacaatacgacaacagtggtgccagttaatcatattttctttacaatcagtgccatcattgcaggtatcatattttatcaggaattccttggtgctccttttctcactgtatttatatatctttttgggtgttttctgtcattccttggtgtatttttggtcacaagaaatcgagaaaaggaacatctgcaacagtcttatattgattttggaaatattcctgggaaacaaatgttggacaaaatacaaccagattcacatagcttatcctatggaactttgcctgatggaagtgactcaacaaagagccaaagtggagagaagaaagaggtctaaatgctgagaaggatggctgttggcctgttattcgataccacctttttaaaaaattgcacatgttcaatttgtgtcagcagctcttttataagctaacatgtgctagcattcatttcagtcctttcccccacctcagcgtctatggacaatcggggacttcctaagctctgacagtctaatatttccatggaatgtgatttggagtgttccccacaccctggacctctccctagtgattatctagccagctacaccttactcagagcccggctgctctagcaggaatgttgcacagaaacatacatttgcggtttggccacaggtcgcataggtggcttctcccacgggtagtgtcagttgcttcactttaaaaagtcacttcagccccacaacctcactcccaaaagaaaggtttgagagcgctcattttttttctaagacaccttttataagcctccctataaaaatctcacctttcaagtactaagttagaattgcaagtcatcttttctgaaaactaatgctatcaaagtcctcctttgaaaattaagggtctctttaaaattagaatttataaatggcattcagtgatagtgtacaccaaaattaaaagaccttgactggtgggctttttacgtgtaaggaagaggaagtttaagaagtaggactctgcttgtttcagtagcccatgtactaaaataggaacaatgcagagattagcacagcccctgcacaaggctgacacataaattcatgaagcgttagagacaaaaagtaggactaatgtttgtttattttttaataaaaatctagaatggtgatgttttcttcagctgtatgattctatcatacttgaaactgaagaaaaatttaatatcctatgtcttttttatagatcttataatttatcaagtggatttatatgtcttattctccatataagtctaaaaaatcacatttaaattcttagtgatagtttcactacacatcatttcttcccaaagtcattacctcaagctttgtaaattcttctagataaaaggagagttgtgattagagaactgaatttcagccatttaaacctgtagacatagaaaacaacccagtggtcaaacctgagcttcaagaggaagcccaagtcctcctgtttcctgaatggcttttccactccaattcatcacatatctgctaagacacatttgcaggtagaatccataataatatctgttatttatgatctacctaatatttaaaggagaagaaaagaagtagccttcgttgcagccaacatccaacaataagtcccacccttaatgacatttcaaagccttcagatcacttctgacatgtctgtccaatatcattccaatcaatagtcttgcatttaaataggttgtttaactcggtggtattgagactgtaaccttaatggctcaggtcttttagctttgttctttgtcataatctgcactcctggccagactgaccaaacctggctgcaaaggaaagagatttgaattgatcaccaatgtatgaaaaatacagaacccatgtctggctcctaaactcctggtaataattcccgccatcgtagcaagtgtcccatgcattcagataaagcagtcataatttatggtgtattttaccgaattggtccagcatattggtcctacaaggctcagccaagaaatgtatctggtgccttaaactacagatttctggtgactcttaaaactggtttacaaagattgagaaaacaattagattgaagagttttgcttcaagtagacctgcattcatagctagagtgcatgagattttcagcactgtagaatttcacacaggcacaagcataacaccagtactttagcagccgccaacagttgcatctattaaacgttttgagaaatgacattgacttatgcacatttaagcaatcaacaatgttttagaagtccaggtaacatataaaatatattcagacctagttttactttccatattgttgctccaaagtaaggtaaataggagttttagttgtactggcctgtaagattttttaaattacacagtgcatgacaacaactaaagccaactcagtccttctcttggcattgtgagttgaggacctttagccaactgttagctcatctgactatctgtctagaccaagggtcggcaaagttttcagtaaagacccacagagtacatattttggagtttgtgttgtctgtaccaacagacagacatggtgtctgtcccaactacccaactctgccattgtagcactaaagcagccatagacaagatgtaaacagaagagcatggctgtgttccagtaaaactttatttacaggccaggcatggtggctcatgcctgtaatcccagcactctgggaggctgaggctgacagatcatctgaggttaggagtttgggaccagcctggtcaacatagtgaaaccccatctctactaaaagtacaaaaattagccaggcatgacggtgggtgcctggagtcccagctacctgggaggctgaggcaggagaatcacttgaacccgggaggtggaggttgcagtgagccgagatcatgccattgcactccagcctgggcgacagagtaagactgtctcaaaaacaaacaaacaaacaaacaaacaaaaacaagtggccagtctgtgagctatagttcccaacacctggtctagactcttctgcccttgctctgcagcttctttcctgttgattgggcattcagggaaggagtttaaaaagtgacactcatggctcatgacaaatgagatactttgggagtgtggaaacatggcttgatatttgccttcagatatttttgcttatataagttctaaatggaagtgataagttcattcttagggtccaagttgaaaggcagtggttcttttgtgaacaccactaactacattcgaaaagcctctccaattccacattccaagtctataacagctttggaaatgagtaacaatgacctctcatgtagtagattaaagcagaggcctttgccatatgattgttttttggcttaaatgtttgcttgccctgtaactgtaatactttggttaccagaatcacttgaaaacaaatacaataaaaaaatttctcaa

SEQ ID NO: 159513 - DNA, 5481 bp, Homo sapiens
  Payload ID: 11214
  Gene Symbol: NIPAL3
  Gene Name: NIPA-like domain containing 3
  Uniprot ID: Q6P499
  ENST ID: ENST00000003912
  CDS Start-End: 716-1690
aattgggaagggatgaaggaggctgtgcctccgggttgcacgaagagtccgagtcatttctcagaaggttttgataggtgggccttagaggagacgccgccgagcaccgcaagaactggaaaacacacccctctctgtctgcctgggagagccacggaaattggcacttctctgagtgaagctgaggagaaggctgtaaatctgccaaaacagccttgaagtattcttttgtcatgaggaagtgacggctgctggagggaggtgaacaccacaaggagagatggcatctggcctgggccccgcctagcagcagctccacctcctaggccaggccctgtgggatgcgccactagaccaccatggacggatcccacagcgcagccctgaagctgcagcagctgcctcccacaagtagctccagcgccgtaagcgaggcctccttctcctacaagctgccctgaggagtaagtaccgttaataactccattttacagttgaggaaacaaatgcccaaagatatgtccgagtcacagtgtcatgaaggacagaggctggattcaaggaaaacctgattggcgccctcttggcgatcttcgggcacctcgtggtcagcattgcacttaacctccagaagtactgccacatccgcctggcaggctccaaggatccccgggcctatttcaagaccaagacatggtggctgggcctgttcctgatgcttctgggcgagctgggtgtgttcgcctcctacgccttcgcgccgctgtcactcatcgtgcccctcagcgcagtttctgtgatagctagtgccatcataggaatcatattcatcaaggaaaagtggaaaccgaaagactttctgaggcgctacgtcttgtcctttgttggctgcggtttggctgtcgtgggtacctacctgctggtgacattcgcacccaacagtcacgagaagatgacaggcgagaatgtcaccaggcacctcgtgagctggcctttccttttgtacatgctggtggagatcattctgttctgcttgctgctctacttctacaaggagaagaacgccaacaacattgtcgtgattcttctcttggtggcgttacttggctccatgacagtggtgacagtcaaggccgtggctgggatgcttgtcttgtccattcaagggaacctgcagcttgactaccccatcttctacgtgatgttcgtgtgcatggtggcaaccgccgtctatcaggctgcgtttttgagtcaagcctcacagatgtacgactcctctttgattgccagtgtgggctacattctgtccacaaccattgctatcacagcaggtgcaatattttacctggacttcatcggggaggacgtgctgcacatctgcatgtttgcactggggtgcctcattgcattcttgggcgtcttcttaatcacgcgtaacaggaagaagcccattccatttgagccctatatttccatggatgccatgccaggtatgcagaacatgcacgataaagggatgactgtccagcctgaacttaaagcttctttttcctatggggctctggaaaacaatgacaacatttctgagatctacgctcctgccaccctgccagtcatgcaagaagagcacggctccagaagtgcctctggggtcccctaccgagtcctagagcacaccaagaaggaatgagactcgcctccctctatttataactgtcccctccaggctgacagtggttcaaccctgaatcctaaaacttgcctttcaagtctcattttgtttctaactgagaactctatggatgatgatctcaaaaagcctttgtctctgggaaaggatgcgttatcttggtcttggaaatttcaaatgatgagggttgggggatggaagcattattccaggtggacgggatagaatccagcctctgcctggattagcccagggggatttggaaagcctttctaccatccttgaggatggtaactgagcttcctctgacagtgaccaaaggatgctgtatccttcagagctaaggcaagacagagagtctgctgttaattctcaaatccagcgaaaggctggacatctctaaatctcgtcttcctccacctcatgtgcatgcctgatctcaccctgacactcctgatgccgcatctgtgatagcactcgtgttgccttcacatggcaggctgggccaaccctgggtggaaggttctgacatttgtgttttcagaaatgtacatctgccttccagtcatctgtgcccttctagggaagatgtgcttgatatgttcaaattggatctactctgaaaacgaaacttggttttggtcctgtgaggactacttgtttgtccacctcctccaccaaaggaattaggaagttaagagaaggggaagaatatggaggataggagagggtgatgatgctttagcccattaaggaagaaaagttccccttactcttacaaaaggtgattgcaccacttaaaaaaggataggtagaaaatctggccattttatgtgttatttttttcctgcataccagtgccccctggaaagatggggatgctcatttcagagacagcctcttcacctgtcctccgtctctccattacagagccacaagccaagcttgagttactggttaatttccttgaagtcaatagagactctctgggtcctcatccccatgcatatatgtctgggagaagcaagcattctccaaaacagggctgttgctttcttcctggccgcatatgtgactgtcttcccctagactgatggtatacttttgagaggggcggataaaggtttgcaaactttaatgggcataaggatcccctagaagcatatgtaaaatgcagattcctgcaccccaactgcagacactgttaagtgggactggagtggggcccacgggtctgcattcttaactggtaccaccagtgattctgatgcgatgcttcaatcccgagatttcacatctggaaagcctaagaatttacaaagatgttctgctaaaacccccagggccccatgcagtcttgctagaaaatttcctccctagggttcctttggaaggttaaatactccccataggatctgtggcatttctccatccaatgaatactacttagagctacactcaccacttccctagacagcctttaataggcatgataacagtgttaatagaccagtgtgatagatcacttatctttatggattgtgcttaatactgatttagtatcttgactccaaaaactgacatctgttgtctgtgataaccacttctgtattgcgtcttaaccacttctgtattgtgtggtcttaactgcctaaggcggcaatgggcagtgggcccctttcccttaggatgggtatcaattcaacaatatttataaggcatttactgtgtgctaagcatttggaagacccaggctacaaaataagacatagttcctgccctccaggccagcagagggaggcacaaatacccaggaatctctgatgggtgtgaagtgcggtcgtgggccacagaaaatgaccgtcatggagaccctgctaaaggtcggaccctgagcccaaaggggtattcagaagtggagatgattttggccccactcatagatgggtggcaaatctaagatttgtataaagcatataaaatagggtgatcacccccgaggcagaggggccagcatttgcaaaggcacagagctaagaggagctgggcaaagaaaggaaagccagggaaggtggtgggagatgagtctcaaagctaagtagtggaagctgggcacagtggctcatgcctgcaatcccagcactttgggaggccaaggctggaggatcacttgagcccaggagttttatatcagcctgggcaacatagcaagacctcatctctgctaaaaattaaaaataaataaattagctgggtgtggtggtgcatgcctgtgatcctagctactcaggaggctgaggtgggaggatcgctagagcccagagagccaaggctacagtgagccatgatcatgctactgcactccagcctgggtgacaatgagaccatggctcaaaaaaaaaaaaaaaaaaaagataagcagtggaggccgaatcatggagggtcttgaatacctggctaaggagtttaaagtgtatccaagaggacgtgggagccactgatggttcatgaggaagagaagggcaggaccagcactgattgaaaaggagggcttgttcagtgtggaggaagaatcagaagggggaataagttaccttctccgagcctgcaagaacaaaaaacaaaaagcagaaattaaaatcaggtttcactgctatttatatatttctcctttcccaaatgatttttctaaagctgggagtggaggcaggagggagaaacagaaggtgagcagggaggctatttagatgtgtcaaacccgggtgatcattaataatttgggcatatatatgctcccaaacttactctgcccccttccttcccttttttttttttttttttggtatgggccttttaggcttgggccagccagctttcttgagatgagtgaataaaagcgtattgtaatttcatgtctgcttcagatcatggggacagtgccacccaggaactgctgctgaggcctgggaagctcccttgccttcgggtttggagcagtggcatcatcccaccaacctgagccatgaaagggctgagcagaaagttaaatggtagtttcctgactggaagccacacgtaggtcacttgagtagtcaggaagcacagtgggtgtggagccatcatctgtcttgggctggttcctcccaatctttgtccagtggtataaatggactgtctgctgatggccatacgcagcactggctgttaagatggggaaggggtacatcaggattccactcatagccctggttcgttattgttactcatggctctgacgtccccaagccctcttgaatgttgcaagcaatgttaaatatcacacctcggtctccttttgagcagcccaggtacctaaagcaaggtcaccaaacttgggtttaaacttcagttgccatcacagcagggttcaggttatgcagtttttgcagtgtggagttgaacgctgggtaaagaagggagagctgactctccattgcttttctagtggaaaccagccagtttgacggcacggtgcggatacaggactccatcaggctagtgttggggaaccagcccggcagccttccatgtgaattccaaagctgtttcaacactggctgataggcagacaaaaggttacttgtgtgtttctctgagaagcggtgtaaatgaagtcaccttagaatatattctgtgcggatgcttatattttgttaacttcacgacttatggcatgtcttatttaaaaaaaaaaaagtactaggtgcaaataacattatgaagtggtatttaattaaaaatccatgcagtga

SEQ ID NO: 159514 - DNA, 1676 bp, Homo sapiens
  Payload ID: 11214
  Gene Symbol: NIPAL3
  Gene Name: NIPA-like domain containing 3
  ENST ID: ENST00000339255
  CDS Start-End: 349-1455
gatgaaggaggctgtgcctccgggttgcacgaagagtccgagtcatttctcagaaggttttgataggtgggccttagaggagacgccgccgagcaccgcaagaactggaaaacacacccctctctgtctgcctgggagagccacggaaattggcacttctctgagtgaagctgaggagaaggctgtaaatctgccaaaacagccttgaagtattcttttgtcatgaggaagtgacggctgctggagggaggtgaacaccacaaggagagatggcatctggcctgggccccgcctagcagcagctccacctcctaggccaggccctgtgggatgcgccactagaccaccatggacggatcccacagcgcagccctgaagctgcagcagctgcctcccacaagtagctccagcgccgtaagcgaggcctccttctcctacaaggaaaacctgattggcgccctcttggcgatcttcgggcacctcgtggtcagcattgcacttaacctccagaagtactgccacatccgcctggcaggctccaaggatccccgggcctatttcaagaccaagacatggtggctgggcctgttcctgatgcttctgggcgagctgggtgtgttcgcctcctacgccttcgcgccgctgtcactcatcgtgcccctcagcgcagtttctgtgatagctagtgccatcataggaatcatattcatcaaggaaaagtggaaaccgaaagactttctgaggcgctacgtcttgtcctttgttggctgcggtttggctgtcgtgggtacctacctgctggtgacattcgcacccaacagtcacgagaagatgacaggcgagaatgtcaccaggcacctcgtgagctggcctttccttttgtacatgctggtggagatcattctgttctgcttgctgctctacttctacaaggagaagaacgccaacaacattgtcgtgattcttctcttggtggcgttacttggctccatgacagtggtgacagtcaaggccgtggctgggatgcttgtcttgtccattcaagggaacctgcagcttgactaccccatcttctacgtgatgttcgtgtgcatggtggcaaccgccgtctatcaggctgcgtttttgagtcaagcctcacagatgtacgactcctctttgattgccagtgtgggctacattctgtccacaaccattgctatcacagcaggtgcaatattttacctggacttcatcggggaggacgtgctgcacatctgcatgtttgcactggggtgcctcattgcattcttgggcgtcttcttaatcacgcgtaacaggaagaagcccattccatttgagccctatatttccatggatgccatgccagattcatatcttcacaacagacaactgctgttcaagaggtattcaaattccagaaatttaccacatcacaatttggagagcctttgagtaattcaagcacctgaaagacttcttaaaaatgagatcgagaaacagcccctgacctccaggaactagcctggcactctcagccaggccttggccctttcctgtggaacagaaacaatttcacagaacatcagcagcagacaaggccactctgcagctgtgatggatcaggacacaagcaggtggaatgggaagaaaagggtttttttcctaaaattaaa

SEQ ID NO: 159515 - DNA, 1757 bp, Homo sapiens
  Payload ID: 11214
  Gene Symbol: NIPAL3
  Gene Name: NIPA-like domain containing 3
  Uniprot ID: Q6P499
  ENST ID: ENST00000358028
  CDS Start-End: 350-1030
ggatgaaggaggctgtgcctccgggttgcacgaagagtccgagtcatttctcagaaggttttgataggtgggccttagaggagacgccgccgagcaccgcaagaactggaaaacacacccctctctgtctgcctgggagagccacggaaattggcacttctctgagtgaagctgaggagaaggctgtaaatctgccaaaacagccttgaagtattcttttgtcatgaggaagtgacggctgctggagggaggtgaacaccacaaggagagatggcatctggcctgggccccgcctagcagcagctccacctcctaggccaggccctgtgggatgcgccactagaccaccatggacggatcccacagcgcagccctgaagctgcagcagctgcctcccacaagtagctccagcgccgtaagcgaggcctccttctcctacaaggaaaacctgattggcgccctcttggcgatcttcgggcacctcgtggtcagcattgcacttaacctccagaagtactgccacatccgcctggcaggctccaaggatccccgggcctatttcaagaccaagacatggtggctgggcctgttcctgatgcttctgggcgagctgggtgtgttcgcctcctacgccttcgcgccgctgtcactcatcgtgcccctcagcgcagtttctgtgatagctagtgccatcataggaatcatattcatcaaggaaaagtggaaaccgaaagactttctgaggcgctacgtcttgtcctttgttggctgcggtttggctgtcgtgggtacctacctgctggtgacattcgcacccaacagtcacgagaagatgacaggcgagaatgtcaccaggcacctcgtgagctggcctttccttttgtacatgctggtggagatcattctgttctgcttgctgctctacttctacaaggagaagaacgccaacaacattgtcgtgattcttctcttggtggcgttacttgtcttgctctgtcacccaggctggagtgcagtggtacaatcttagctctctgcagccttgacctcctggcctcaagtgatccccctgcctcggcctcccaaagtgccaggattacaggcatgaggccctgtacctggctagaactgcatataattttatagctaaatagagctgtggggaatccatccttcctgaggagaagcagacagaggcggaggagcaggctggtgtcagggctggtgaagcctgctaccgcgctgctcttgagtggcctcaggctaatgaccctccctccttaagccacgctgtccacttctctaaagggggggcctatgagaacatccaagtcacggaagggagtgggggttaaatgagatgtgcacaggtggctaatatgtgcatttttcttccaaccttcctactgtgtgccctaccaccgccacaagccatcaaccaaatagatacctgtcaccgaagacagggtttccttaattttttaacagctctgttgagatataatttacataccataaagttcacctgtttaaagtatacaattcagtggtttttagtatttcatagagttgtgaaaccatcatcctaatctaattttagaacattttgtcacccccaaaagaaaccctgtgcccattagcagtcactccctgttccccttttcccagcctcaggcaaccactaagctatcttctgtccctgtagatttgcctttttgaacaccttcataaataaagtcgtatgctttgtggcctga

SEQ ID NO: 159516 - DNA, 1711 bp, Homo sapiens
  Payload ID: 11214
  Gene Symbol: NIPAL3
  Gene Name: NIPA-like domain containing 3
  Uniprot ID: Q6P499
  ENST ID: ENST00000374399
  CDS Start-End: 369-1589
gcagctctgaattgggaagggatgaaggaggctgtgcctccgggttgcacgaagagtccgagtcatttctcagaaggttttgataggtgggccttagaggagacgccgccgagcaccgcaagaactggaaaacacacccctctctgtctgcctgggagagccacggaaattggcacttctctgagtgaagctgaggagaaggctgtaaatctgccaaaacagccttgaagtattcttttgtcatgaggaagtgacggctgctggagggaggtgaacaccacaaggagagatggcatctggcctgggccccgcctagcagcagctccacctcctaggccaggccctgtgggatgcgccactagaccaccatggacggatcccacagcgcagccctgaagctgcagcagctgcctcccacaagtagctccagcgccgtaagcgaggcctccttctcctacaaggaaaacctgattggcgccctcttggcgatcttcgggcacctcgtggtcagcattgcacttaacctccagaagtactgccacatccgcctggcaggctccaaggatccccgggcctatttcaagaccaagacatggtggctgggcctgttcctgatgcttctgggcgagctgggtgtgttcgcctcctacgccttcgcgccgctgtcactcatcgtgcccctcagcgcagtttctgtgatagctagtgccatcataggaatcatattcatcaaggaaaagtggaaaccgaaagactttctgaggcgctacgtcttgtcctttgttggctgcggtttggctgtcgtgggtacctacctgctggtgacattcgcacccaacagtcacgagaagatgacaggcgagaatgtcaccaggcacctcgtgagctggcctttccttttgtacatgctggtggagatcattctgttctgcttgctgctctacttctacaaggagaagaacgccaacaacattgtcgtgattcttctcttggtggcgttacttggctccatgacagtggtgacagtcaaggccgtggctgggatgcttgtcttgtccattcaagggaacctgcagcttgactaccccatcttctacgtgatgttcgtgtgcatggtggcaaccgccgtctatcaggctgcgtttttgagtcaagcctcacagatgtacgactcctctttgattgccagtgtgggctacattctgtccacaaccattgctatcacagcaggtgcaatattttacctggacttcatcggggaggacgtgctgcacatctgcatgtttgcactggggtgcctcattgcattcttgggcgtcttcttaatcacgcgtaacaggaagaagcccattccatttgagccctatatttccatggatgccatgccaggtatgcagaacatgcacgataaagggatgactgtccagcctgaacttaaagcttctttttcctatggggctctggaaaacaatgacaacatttctgagatctacgctcctgccaccctgccagtcatgcaagaagagcacggctccagaagtgcctctggggtcccctaccgagtcctagagcacaccaagaaggaatgagactcgcctccctctatttataactgtcccctccaggctgacagtggttcaaccctgaatcctaaaacttgcctttcaagtctcattttgtttctaactgagaactctatggatgatgatct

SEQ ID NO: 159517 - DNA, 2714 bp, Homo sapiens
  Payload ID: 11214
  Gene Symbol: NIPAL3
  Gene Name: NIPA-like domain containing 3
  ENST ID: ENST00000432012
  CDS Start-End: 1-403
cgtggctgggatgcttgtcttgtccattcaagggaacctgcagcttgactaccccatcttctacgtgatgttcgtgtgcatggtggcaaccgccgtctatcaggctgccttctccaagacagattcttcacctgctaatgagaacaacagtccctacctaagagaatcacatgaagctcttatgagaatgtctctagggaaatgcccggtttttgagtcaagcctcacagatgtacgactcctctttgattgccagtgtgggctacattctgtccacaaccattgctatcacagcaggtgcaatattttacctggacttcatcggggaggacgtgctgcacatctgcatgtttgcactggggtgcctcattgcattcttgggcgtcttcttaatcacgcgtaacaggaagaagcccattccatttgagccctatatttccatggatgccatgccaggtaaggttaaagccccgtgggtctagctgaacatccatatagaatgactgctacttcctgtttaaaaagagacaaccaactgctgtgctgtgcctttatcgtgtgactgttctctcactgtcttttttcttttctttttaattttgtgcaaaagggtaggcaatggctgaggcacctcggttggttttgagcacatcttgccagttctgtgtctatttggggatcttttaaataaaattctgattcatactcaatataattaggatctgcagccccaggcttcatgcctgcaaatggaaaaatccattcatctagttggaatgaaatgatcagaaaggggaaggagaatgagtggaatgaaattaaaatattataatctcactccctggatgccacaagggagtgcatcattctggaaagcctaatttcctagcgagctaaggattcataccgagaaacacaaatttaaatgtctgtaagccctgacagtaacataagcatgtgaatcagcccaatactgcccagcagggagtggtgggacctgcggaggactggagagtgcctgtctagcctaaaggaattcggattagaaaagttaagacattggaccaacctcagatttgctgacctaaactctgtaggttgctggtgaccattagctttcacacttaactcaacattttaattttatttatacaagatggaactctctctaaaacataatctcctgtccttcattaacacaatctcatgaacaaaatataaacacactgatggtctagaggactgcttactcgagaggttttcatgctgtaacgctgtgatgcaggtgtgttctcagggttgactggtgtgcccctacattaaatggccccagggtttatgtgtctactttttatattagttcctcctctctcgttattaagctgttgtctgtccttcttgctgtagccagcctgcctgagtatagcaactcaatgtcaatgtgctccttcaacccagcttgttcagattacaaataaaatcaaaatgaaggagctctgagttgggggcctaagatttctcctaggagttaagtgcatgagctttggtgcatgaactttttaaacgtctaatctggctgctcagattccttttttgctaacttccttgtttctcggctgtgttccggatagatgagggcgctggatagctgaattccagataggtgaggtgtcaactctgtgtgtgcaagtatgtgtatgtatatgtgtgtttgtgtgtttacaaactatgtgtatatatcaatatcagtatttgtgtgtgtatatatatatatatatagatgtattttctggtggaaaatagaaggtaacctaaggtagtcttagatatcaacattctgtggtatgtttgtgggtgtggctctcagctttttctttgtaccttgtgaccagtgggaagtcagctgttgaatcagggagaccctgcccttgcagtggcttgtcaggacacttccgattgtaggtgttctgtactgtgaagagcgtgggcttggagttcagatgacctggattcaaatcccaactctaccaccttcctgctgtgtgacctcccaaggcctctcatcctcacttgtaactgggattccttctttcaggctagtggtcatatgtgtaaaggcctcttgcacggtgtctgggacatggtagatgcctggttatatttggtttcacttcccttttgctttaaaaacctttggaagtttcacacacttgtttgacctggtggcaggtagaacatgcagaataaaactgctgaacagtctcagtctaaacagaggtgcttttccagccacttggtttccctggtcagcattaggatcttgccttttgtctacctagattcatatcttcacaacagacaactgctgttcaagaggtattcaaattccagaaatttaccacatcacaatttggagagcctttgagtaattcaagcacctgaaagacttcttaaaaatgagatcgagaaacagcccctgacctccaggaactagcctggcactctcagccaggccttggccctttcctgtggaacagaaacaatttcacagaacatcagcagcagacaaggccactctgcagctgtgatggatcaggacacaagcaggtggaatgggaagaaaagggtttttttcctaaaattaaaaataaataaataaataaaagaacacaaacaggactactctgctagcctgactaaacatagacaaaaaa

SEQ ID NO: 159518 - DNA, 3274 bp, Homo sapiens
  Payload ID: 11215
  Gene Symbol: NIPAL4
  Gene Name: NIPA-like domain containing 4
  Uniprot ID: Q0D2K0
  ENST ID: ENST00000311946
  CDS Start-End: 117-1517
agcacggggcggtgactccagagctgggagcctggcagcgtcctcaccccaggaaggcatgcgcccctctgcgggcggccccagccctgggccccctgcccccggaattgcccaagatgccgggtgactcctccccggggactctcccactctgggacgcgtcactctccccacccctgggtccggaccccggcggcttctcgcgcgcgagccacgcgggggacaagtcgcggccacctgctccggagctggggagcccgggcgccgtccgcccgcgcgtcggttcgtgtgccccgggccccatggagctgcgggtcagcaacaccagctgcgagaacggttccctgctccacctctactgctcctcccaagaagtcctgtgccagattgtcaatgacctcagccctgaggtgcccagcaatgccacctttcacagctggcaggaaagaatcaggcagaactatggcttctacatcggcctgggcctggcattcctgtctagcttcctcatcggcagcagcgtcatcctcaagaagaaaggcctcttgcgactcgtggccacgggagccactcgagctgtggatggaggcttcggctacctgaaagatgcaatgtggtgggctggatttctcaccatggctgctggagaagttgccaactttggagcctacgcatttgcacctgcaacagtcgtcacgcctctgggagcgctgagtgtcctcataagtgccatcctctcctcatatttcctgagggagagtctgaacctgctggggaagctgggctgtgtgatctgtgtggccggaagcacagtgatggtgatacatgctcctgaggaagagaaggtcactaccatcatggagatggcttccaagatgaaagacacagggttcatcgtgtttgctgtgcttctgctggtgtcatgcctcatcctcatctttgtcattgccccacgttacgggcaaaggaatatcctcatctacatcatcatctgctctgtgatcggggccttctctgtggctgctgtcaaggggctgggcatcaccatcaagaacttcttccaggggctgccagttgtccggcacccgctcccctacatcctgtccctcatcctggcactgtccctcagcactcaggtcaacttcctcaacagagcactggacattttcaacacttccctggtgttccccatctactacgtgttcttcaccacggtggtcgttacctcgtccatcatcctcttcaaggagtggtacagcatgtctgctgtggacattgcaggcaccctctcgggctttgtcaccatcatcttgggcgtgttcatgctgcatgctttcaaagacctggacatcagctgcgccagcttgccccacatgcacaaaaacccacccccttctcccgccccggaacccactgttattagactggaagacaagaacgtccttgtggacaatatagaacttgccagcacctcatcaccagaagagaaacccaaagtatttataatccattcctgaagcttggaatatgtgagtgagaggatgagtccgatggtacagcctgccctcccaatttcaaaaccacctggttattttccagtgcaactgttaccaatgggctctcttttcttgagaagttcatttatacctcatcactgtttccaggagaaaaatctttacccaaatagcaatggtggcagaacttcctggaaacagattcagtgaccaaatacccaagtttacatcagtgcctgcaggttccctggaccttccttctcattcattctttcggtgccatctctatgccgttgggaagaagatggagtctgacccactgaatgtagcacagtccaaggacttctctaagatattggtcattggaagttccttcacaccaattctcctcctgagacggaatctccgttgttgttgttgttgttgttttctagcccaaggatgacatagagctggctcccagaggcccacagagcaattggccatgcctccctatccagagctgacagggacacaaccagtgtaaaatatcctgttgcctttgtcacttcctctttggaggcagaagcaagacctcagctgaccttcttactgtgaaagccacttgatgtctcagggaaaaatttcaaccagctcattccccgagcactccagcctggcagtcagcacctcggcatccacccagtccatcccaccatcaccccttccccctctacttacatcctaaggagtcggtcactgagacataaaggcagtaatcgcagaactggaaacaaaacaataatagagccacagccaaactctggtggccaaacccagtgttgcattttgtcttactctgaaagaagaacagcaaattcactgcttcaaagtggcctggctgccaagctagaatttggcagaacgcactttactattcctcaaggagtcaaccaacctatgatctggggaggtgggaagaggatgaggagcaaagttgggatttggcagaaggcagtcccaggctctctggatactaggggctaacttttgtgttgactctggtgctcatctgggaacttaggagaaacgagctcaggggtaatttctgggttgcagccttaaaggcttggacagctgtgaatctcaatggccaactggaggtgcagacttggcatggggtgcattctagctgttgaccagattgctaccgagtcccctcctccactgatgagctgcccacactgggaagcagcatgccctgactgttccaacaccacctgctatggggagtacctttggtcccctcacatttggccagaggcatacaaaaaaccagagcagctggagagggagataattactattccttcccttcctatctcctttctagccacaagagtgtgggggttggagaagaaccattagaaagggaaattagtgggctggtgtatctggaaagagggaagacttgatcctcagccccgaggttggtgcagggcctcccctgtgtgactctacctgcactctgtgtttatatcctgtgccctaagtgggccaagcccaggtaaattcctgctggccttggaactccaaggtttggctgaccagcagactggctccctgactcttcagcctcaaatccccagtttttgatgaatgtggatttctgtctgtaattaaaagcaatgcaacaagttggctcttgagaatggcagtaaactgagggccctaagagtgtggtctgcagggtcaagaataaagattacagattatattta

SEQ ID NO: 159519 - DNA, 1600 bp, Homo sapiens
  Payload ID: 11215
  Gene Symbol: NIPAL4
  Gene Name: NIPA-like domain containing 4
  Uniprot ID: Q0D2K0
  ENST ID: ENST00000435489
  CDS Start-End: 117-1460
agcacggggcggtgactccagagctgggagcctggcagcgtcctcaccccaggaaggcatgcgcccctctgcgggcggccccagccctgggccccctgcccccggaattgcccaagatgccgggtgactcctccccggggactctcccactctgggacgcgtcactctccccacccctgggtccggaccccggcggcttctcgcgcgcgagccacgcgggggacaagtcgcggccacctgctccggagctggggagcccgggcgccgtccgcccgcgcgtcggttcgtgtgccccgggccccatggagctgcgggtcagcaacaccagctgcgagaacggttccctgctccacctctactgctcctcccaagaagtcctgtgccagattgtcaatgacctcagccctgaggtgcccagcaatgccacctttcacagctggcaggaaagaatcaggcagaactatggcttctacatcggcctgggcctggcattcctgtctagcttcctcatcggcagcagcgtcatcctcaagaagaaaggcctcttgcgactcgtggccacgggagccactcgagctgtggctgctggagaagttgccaactttggagcctacgcatttgcacctgcaacagtcgtcacgcctctgggagcgctgagtgtcctcataagtgccatcctctcctcatatttcctgagggagagtctgaacctgctggggaagctgggctgtgtgatctgtgtggccggaagcacagtgatggtgatacatgctcctgaggaagagaaggtcactaccatcatggagatggcttccaagatgaaagacacagggttcatcgtgtttgctgtgcttctgctggtgtcatgcctcatcctcatctttgtcattgccccacgttacgggcaaaggaatatcctcatctacatcatcatctgctctgtgatcggggccttctctgtggctgctgtcaaggggctgggcatcaccatcaagaacttcttccaggggctgccagttgtccggcacccgctcccctacatcctgtccctcatcctggcactgtccctcagcactcaggtcaacttcctcaacagagcactggacattttcaacacttccctggtgttccccatctactacgtgttcttcaccacggtggtcgttacctcgtccatcatcctcttcaaggagtggtacagcatgtctgctgtggacattgcaggcaccctctcgggctttgtcaccatcatcttgggcgtgttcatgctgcatgctttcaaagacctggacatcagctgcgccagcttgccccacatgcacaaaaacccacccccttctcccgccccggaacccactgttattagactggaagacaagaacgtccttgtggacaatatagaacttgccagcacctcatcaccagaagagaaacccaaagtatttataatccattcctgaagcttggaatatgtgagtgagaggatgagtccgatggtacagcctgccctcccaatttcaaaaccacctggttattttccagtgcaactgttaccaatgggctctcttttcttgagaagttcatttatacctcatcactg

SEQ ID NO: 159520 - DNA, 788 bp, Homo sapiens
  Payload ID: 11215
  Gene Symbol: NIPAL4
  Gene Name: NIPA-like domain containing 4
  ENST ID: ENST00000519150
  CDS Start-End: 1-399
cctgctccggagctggggagcccgggcgccgtccgcccgcgcgtcggttcgtgtgccccgggccccatggagctgcgggtcagcaacaccagctgcgagaacgctgggatggctgagaggagtcagggaaggaaagttccctgctccacctctactgctcctcccaagaagtcctgtgccagattgtcaatgacctcagccctgaggtgcccagcaatgccacctttcacagctggcaggaaagaatcaggcagaactatggcttctacatcggcctgggcctggcattcctgtctagcttcctcatcggcagcagcgtcatcctcaagaagaaaggcctcttgcgactcgtggccacgggagccactcgagctgtggatggaggcttcggctacctgaaagatgcaatgtggtgggctggatttctcaccatggctgctggagaagttgccaactttggagcctacgcatttgcacctgcaacagtcgtcacgcctctgggagcgctgagtgtcctcataagtgccatcctctcctcatatttcctgagggagagtctgaacctgctggggaagctgggctgtgtgatctgtgtggccggaagcacagtgatggtgatacatgctcctgaggaagagaaggtcactaccatcatggagatggcttccaagatgaaagacacagggttcatcgtgtttgctgtgcttctgctggtgtcatgcctcatcctcatctttgtcattgccccacgttacgggcaaaggaatatcctcatctacatcatcatc

SEQ ID NO: 159521 - DNA, 10435 bp, Homo sapiens
  Payload ID: 11216
  Gene Symbol: NIPBL
  Gene Name: Nipped-B homolog (Drosophila)
  Uniprot ID: Q6KC79
  ENST ID: ENST00000282516
  CDS Start-End: 500-8914
tccggtcggcattttgttctgagagggagagacggaacgagagagagacacacacagggctccttccccccgccctcccccccctccctccgtcggtaccgactcacccgacaccaccaagccgcagggagggacgcccccgccgacaggagaattggttcccgggcccgcggcgatgcccccccggtagctcgggcccgtggtcgggtgtttgtgagtgtttctatgtgggagaaggaggaggaggaggaagaagaagcaacgatttgtcttctcggctggtctccccccggctctacatgttccccgcactgaggagacggaagaggagccgtagccaccccccctcccggcccggattatagtctctcgccacagcggcctcggcctccccttggattcagacgccgattcgcccagtgtttgggaaatgggaagtaatgacagctggcacctgaactaagtacttttataggcaacaccattccagaaattcaggatgaatggggatatgccccatgtccccattactactcttgcggggattgctagtctcacagacctcctgaaccagctgcctcttccatctcctttacctgctacaactacaaagagccttctctttaatgcacgaatagcagaagaggtgaactgccttttggcttgtagggatgacaatttggtttcacagcttgtccatagcctcaaccaggtatcaacagatcacatagagttgaaagataaccttggcagtgatgacccagaaggtgacataccagtcttgttgcaggccgtcctggcaaggagtcctaatgttttcagggagaaaagcatgcagaacagatatgtacaaagtggaatgatgatgtctcagtataaactttctcagaattccatgcacagtagtcctgcatcttccaattatcaacaaaccactatctcacatagcccctccagccggtttgtgccaccacagacaagctctgggaacagatttatgccacagcaaaatagcccagtgcctagtccatacgccccacaaagccctgcaggatacatgccatattcccatccttcaagttacacaacacatccacagatgcaacaagcatcggtatcaagtcccattgttgcaggtggtttgagaaacatacatgataataaagtttctggtccgttgtctggcaattcagctaatcatcatgctgataatcctagacatggttcaagtgaggactacctacacatggtgcacaggctaagtagtgacgatggagattcttcaacaatgaggaatgctgcatcttttcccttgagatctccacagccagtatgctcccctgctggaagtgaaggaactcctaaaggctcaagaccacctttaatcctacaatctcagtctctaccttgttcatcacctcgagatgttccaccagatatcttgctagattctccagaaagaaaacaaaagaagcagaagaaaatgaaattaggcaaggatgaaaaagagcagagtgagaaagcggcaatgtatgatataattagttctccatccaaggactctactaaacttacattaagactttctcgtgtaaggtcttcagacatggaccagcaagaggatatgatttctggtgtggaaaatagcaatgtttcagaaaatgatattccttttaatgtgcagtacccaggacagacttcaaaaacacccattactccacaagatataaaccgcccactaaatgctgctcaatgtttgtcgcagcaagaacaaacagcattccttccagcaaatcaagtgcctgttttacaacagaacacttcagttgctgcaaaacaaccccagacttctgtggtacagaatcaacaacagatatcacaacagggacctatatatgatgaagtggaattggatgcattggctgaaattgagcgaatagagagagaatcagctattgaaagggagcgcttctcaaaagaagttcaagataaagataagcctttgaaaaaaagaaaacaagattcttacccacaggaggctgggggtgctacaggaggtaatagaccagcttctcaggagacgggttctacgggaaatgggtcaaggccagcattaatggttagcattgatcttcatcaggcaggaagagtggactctcaggcttctataactcaggattcagactccataaaaaagcctgaagaaatcaaacaatgtaatgatgcacctgtttctgttcttcaggaagatattgttggaagtcttaaatctacaccagaaaaccatcctgagacacctaaaaaaaagtctgatcctgagctttcaaagagtgaaatgaaacaaagtgaaagtagattagcagaatctaaaccaaatgaaaaccgattggtggagacaaaatcaagtgaaaataagttagaaactaaagttgagacccaaacagaagaacttaaacagaatgagagcagaacaactgaatgcaaacaaaacgagagcaccatagttgagcctaaacaaaatgaaaatagactgtctgacacaaaaccaaatgacaacaaacaaaataatggcagatcagaaacaacaaaatcaaggcctgaaaccccaaagcaaaagggtgaaagccggcctgagactccaaaacaaaagagtgatgggcatcctgaaaccccaaaacagaagggtgatggaaggcctgaaactccaaagcaaaaaggtgagagccgccctgaaactccaaagcaaaaaaatgaagggcgacctgaaacaccaaaacacaggcatgacaataggagggattctggaaagccatctacagagaaaaaacctgaagtgtctaaacataaacaagatactaaatctgactcacctcggttaaaatcagaacgagctgaagccttaaagcagagacctgatgggcgatctgtttctgagtcactaagacgtgaccatgataataaacaaaaatcagatgacaggggtgaatcagagcgacatcgaggggatcagtctagggttcgaagaccagaaacattgagatcctctagtagaaatgaacatggcattaaatctgatagttcaaaaactgataaactagaacgaaaacacaggcatgaatcaggggactcaagggaaagaccatcttctggggaacaaaaatcaagacctgacagtcctcgtgttaaacaaggagattctaataaatcaagatctgataaacttggttttaaatcaccaactagtaaagatgacaaaaggacagagggtaacaagagtaaagtagacactaataaagcacaccctgacaataaggcagaatttccaagttatttgttggggggcaggtctggtgcgttgaaaaattttgtcattccgaaaatcaagagggataaagatggcaatgttactcaggagacaaagaaaatggaaatgaaaggagagccgaaagacaaagtagaaaaaataggattagttgaagatctaaataaaggagctaagcctgtagttgtgctacaaaaactgtctttggatgatgttcagaaacttattaaagatagagaggacaaatcaagaagttcccttaaacctatcaagaataaaccatcaaagtcaaataaaggtagtatagatcaatcagtgttaaaagaattaccccctgaactcctggcagaaattgagtccaccatgccactttgtgaacgtgtgaaaatgaacaaacgcaagcgtagcacagttaatgaaaagccaaaatatgctgaaatcagttcagatgaagataatgatagtgatgaagcttttgaatcctctaggaaacgacataaaaaagatgatgataaagcttgggaatatgaagagcgtgacagaagaagctctggggatcataggagaagtggccactctcatgaaggaagaaggagttcaggtggtggtcgttatcgaaaccgaagtccgtcagattctgacatggaagattattctcctcctcccagccttagtgaggttgctaggaaaatgaagaaaaaagaaaaacagaagaaaaggaaagcatatgaaccaaaactaacacctgaagaaatgatggactcttcaacttttaagagattcacagcctcaatagagaatattttggataatttggaagatatggattttactgcgtttggtgatgatgatgaaattcctcaggaactgctcttaggaaaacatcagcttaatgaacttggcagtgaatctgctaaaataaaagcaatgggtataatggataagctttcaactgacaaaactgtgaaagtcttaaatatcttggagaagaatattcaggatgggtcaaagctttccactttgttaaatcataataacgatactgaagaagaagaaaggttatggagagaccttattatggagagagttacaaaatcagcggatgcttgtcttacaactatcaacattatgacatcccctaacatgccaaaagctgtgtacattgaggatgtaattgaaagagttatacagtacactaaatttcatttgcagaatacactttatcctcagtatgatcctgtttacagattagatcctcatggaggaggcttattaagttcaaaagcaaaacgggctaaatgttctacccataagcagagagtaatagtaatgctttataacaaagtttgtgacattgttagcagcttatcagaattgctagagatacaacttcttacagacacaacaattcttcaggtttcatctatgggaataacaccattttttgtggaaaatgtcagtgaactacagttgtgtgccattaagttagtcactgcagtattctcaagatatgaaaaacataggcagttaattttggaagaaatttttacttcacttgcaagattaccaaccagcaagaggagtttaaggaacttcaggttaaacagtagtgatatggatggagaacctatgtatattcagatggttacagcactggttttacaacttattcagtgtgtggtacacttaccatcatcagagaaggactctaatgcagaagaagattcaaataaaaaaattgaccaggatgttgtcattactaactcttatgaaacagctatgcgaacagcccaaaacttcctctccatcttccttaaaaaatgtggtagtaagcaaggtgaagaagattacagaccactgtttgaaaattttgttcaagaccttctttcaacagtcaataagcctgaatggccagctgctgaactactccttagtttgttagggagactgttggttcatcagttcagtaacaagtcaacagagatggctttaagagtggcatctcttgattaccttggaactgttgctgcacggctaagaaaagatgctgttacaagcaaaatggatcaaggatctatagaacgcattttaaaacaggtttcaggaggggaagatgaaatccaacaattacaaaaagcattgcttgattacttggatgaaaacactgagactgatccttcactagtgttttctcgtaaattctatatagcccagtggtttcgagacacaactctggaaacagaaaaagcaatgaaatcacaaaaagatgaagaatcatctgaaggaacacatcatgcaaaggaaattgagacaactggccaaattatgcatcgagctgaaaaccgaaaaaagtttcttagaagcattatcaaaaccacaccttctcagtttagcacattaaagatgaactctgatactgtggactatgatgatgcttgcttgattgttcgatacttggcctccatgaggccgtttgcccagagctttgatatttatttgacacagatcctacgagttcttggtgaaaatgcaattgctgttcgaacaaaagccatgaagtgtttgtctgaggttgttgctgtagaccccagtattctagcaaggcttgatatgcaacgaggtgttcatggacgattgatggataattcgactagtgtccgagaagcagcagtagaattactaggtcgatttgtcctttgtcgacctcagcttgctgaacagtattatgatatgctgattgaaagaatattggatactggtatcagtgtcaggaaaagagtaataaagattctcagagacatttgtattgaacaaccaacatttccaaaaatcacagaaatgtgtgtaaaaatgattcgcagagtcaatgatgaagagggcattaagaaattagtaaatgaaacattccagaaactctggtttactccaactccacacaatgacaaagaagcaatgacaaggaaaattttaaacattaccgatgtggttgcagcatgcagagatactggatatgactggtttgagcaactgcttcaaaacttgttgaagtccgaagaggattcctcatataaacctgtgaagaaagcttgtactcaacttgttgataacctagttgagcacattcttaaatatgaggaatctctagctgactctgacaataaaggtgtgaattctggaagattggtagcttgcataaccactttgttcttattcagcaaaataagaccccagctcatggttaaacatgcaatgactatgcaaccataccttaccactaaatgtagtacgcaaaatgatttcatggttatctgcaatgttgcaaaaatcctagagctagttgtaccactgatggagcatccaagtgaaacttttcttgccactattgaggaagatctaatgaagctcatcatcaaatatggcatgactgtagtgcaacattgtgtgagctgtcttggagctgttgtaaataaagtgacacaaaattttaaatttgtgtgggcttgtttcaatagatactatggtgccatttcaaaattaaaaagtcaacaccaagaggacccaaataacacttcacttctaacaaacaaaccagcacttcttagatcccttttcaccgttggagcactatgtcggcattttgattttgatctggaagattttaaaggcaacagcaaggttaacataaaagataaagtacttgaactattgatgtattttacaaaacactcagatgaagaagtacaaacaaaagctatcattggtctaggatttgcctttattcagcatccaagtctaatgttcgagcaagaagtgaagaatctatataataatattttatctgataagaactcctcagtcaatttaaaaatacaagtgttaaaaaacctccagacctacctacaagaagaagatacacgtatgcagcaggcagatagagactggaagaaagttgcaaaacaggaagacttaaaagaaatgggtgatgtttcctcagggatgagtagttccatcatgcagctttatctcaaacaggtgcttgaggcattttttcacacccagtcaagtgtacgccactttgccctaaatgtcattgcattgactctaaatcaaggtcttattcatccagttcagtgtgtgccatatttaattgctatgggcacagacccagaacctgctatgcggaacaaggctgatcagcaacttgtggaaatagacaaaaaatatgctggattcattcatatgaaagcagtggctggtatgaagatgtcttaccaggtacaacaggcaatcaacacatgcctaaaagatcctgtaaggggtttcagacaagacgagtcctctagcgctttgtgttcacacctttactccatgatccgtggaaaccgccaacacagacgagcctttcttatttctttactcaacctctttgatgacacagcaaaaacagacgtgactatgctcttgtatatagcagacaatctagcctgttttccataccagacacaggaagagccgttgtttataatgcatcatatagacattacactctcagtttctggtagtaacctactgcagtcattcaaggagtctatggtaaaggacaaaaggaaagagagaaaatcatcacctagtaaggaaaatgagtcaagcgacagtgaagaagaagtttccaggcctcggaagtcacggaaacgtgtagattcagattcagattcagattcagaagacgatataaattcagtgatgaaatgtttgccagaaaattcagctcctttaatcgaatttgcaaatgtgtcccagggtattttattacttctcatgttaaaacaacatttgaagaatctttgtggattttctgatagtaaaattcagaagtactctccatctgaatctgcaaaagtatatgataaagcgataaaccgaaaaacaggagttcattttcatccaaaacaaacactggacttcctgcggagtgacatggctaattccaaaatcacagaagaggtgaaaaggagtatagtaaaacagtatctagatttcaaacttctcatggaacatctggaccctgatgaagaagaagaagaaggggaggtttcagctagcacaaatgctcggaacaaagcaattacctcactgcttggaggaggcagccctaaaaataatacagcagcagagacagaagatgatgaaagtgatggggaggatagaggaggaggcacttcagggtcattgagaaggtcaaaacgaaattcagactctacggagttggcagcacagatgaatgaaagtgttgacgtcatggatgtcatcgctatttgctgtccaaagtacaaagatcgaccacaaattgcaagagtagtgcagaaaaccagcagtggcttcagtgttcagtggatggcaggctcctacagtggctcctggactgaggctaagcgccgtgatggccgcaaactggtgccttgggtagacactattaaagagtcagacattatttacaaaaaaattgctctaacgagtgctaataagctgactaataaagttgttcagactttacgatccctgtatgccgccaaggatgggacttccagctaatgaatttgtacatgcagccaaatttacaggaatttttttaaaaggcagaaaaacttgaaataccaacattctggcaaaaaaaaatcagttttatgaagagtaagtggaacctgggatgcaggaacaaaagaaggaaatgttgggcaaacatttttgtgggagctcccttcgctgttgtgcagcagaaacagattctcagttcatttttactcccactgtattatagtttaacaaaaattgtttatatcttggaaaaaaaactttctgtttaaaaaaaataaacaagtgaatgttggaaattagtctgttaatgttcttaataaagtgttcttggagtttaacctagcagcggatggctttctttagcttagcccagtttccagggaagcattgttttttccaggctgtaaaatggcagaatctcctggatatataatttattctgttgaaaaaaaaaaaagcatgcagtatctatgacctatctgcagaaggagtttttgtaaatgtagattttgatgtattaggtcaccctgaaaacaatacaagaaaagggatccccaggtaatctggtggagcgaatactgcaataaatttttttacttctctttgttacttgtctgtttccatttgaatttcttattgtaaaaatctgtttaaatccatttatattattttacagtcttttatgtaaaatttattatatcactggttttcaaagcaaaacataaaatattgtttatacagtttgtataggctgacttctgaataattggtatctattattttcattcccataagagggtgtaaacaattaactccagggttttattgtatcctgcaatatttagtattaactatatatgatttagcactgtgccaaacacattttcaagagtacattttgatataaaaagaaactatagtttattccttgtatgcttcaatttctttctagtgatgtcatgatgctgatatttattctttaaacctcgggtaaaggtaacctgttatttggaaaaccagcatttctcttggttaaaatgatgtccggttattttagaactagagttgagatgaatatgacacttcataattacactcactacatttttcacaaattattttttaatgctgaaaagagtaattttacttgttgagatgtttattcattttctaatctatgctaaaagcttttatcataagtcttgggaacagttgtcatttacacattacttactgcagatatcttgactaaatcaggagggaggtgtttaatcatttgatatgtatagttgacactcaggaatagtaatgcctaaaatttacagtggatgaggtctgtttcaagtttaattctttttaaaaatgttttacttatttttaaatcactttgaaaaaattgacctccagaatgctgttttatgaaattggcaaataaatgaaggtattcaatttttgaggaagaatgacattgccacaaaatacctttttgtgacacctattaaaccactatgaaaataa

SEQ ID NO: 159522 - DNA, 8729 bp, Homo sapiens
  Payload ID: 11216
  Gene Symbol: NIPBL
  Gene Name: Nipped-B homolog (Drosophila)
  Uniprot ID: Q6KC79
  ENST ID: ENST00000448238
  CDS Start-End: 469-8562
acggaacgagagagagacacacacagggctccttccccccgccctcccccccctccctccgtcggtaccgactcacccgacaccaccaagccgcagggagggacgcccccgccgacaggagaattggttcccgggcccgcggcgatgcccccccggtagctcgggcccgtggtcgggtgtttgtgagtgtttctatgtgggagaaggaggaggaggaggaagaagaagcaacgatttgtcttctcggctggtctccccccggctctacatgttccccgcactgaggagacggaagaggagccgtagccaccccccctcccggcccggattatagtctctcgccacagcggcctcggcctccccttggattcagacgccgattcgcccagtgtttgggaaatgggaagtaatgacagctggcacctgaactaagtacttttataggcaacaccattccagaaattcaggatgaatggggatatgccccatgtccccattactactcttgcggggattgctagtctcacagacctcctgaaccagctgcctcttccatctcctttacctgctacaactacaaagagccttctctttaatgcacgaatagcagaagaggtgaactgccttttggcttgtagggatgacaatttggtttcacagcttgtccatagcctcaaccaggtatcaacagatcacatagagttgaaagataaccttggcagtgatgacccagaaggtgacataccagtcttgttgcaggccgtcctggcaaggagtcctaatgttttcagggagaaaagcatgcagaacagatatgtacaaagtggaatgatgatgtctcagtataaactttctcagaattccatgcacagtagtcctgcatcttccaattatcaacaaaccactatctcacatagcccctccagccggtttgtgccaccacagacaagctctgggaacagatttatgccacagcaaaatagcccagtgcctagtccatacgccccacaaagccctgcaggatacatgccatattcccatccttcaagttacacaacacatccacagatgcaacaagcatcggtatcaagtcccattgttgcaggtggtttgagaaacatacatgataataaagtttctggtccgttgtctggcaattcagctaatcatcatgctgataatcctagacatggttcaagtgaggactacctacacatggtgcacaggctaagtagtgacgatggagattcttcaacaatgaggaatgctgcatcttttcccttgagatctccacagccagtatgctcccctgctggaagtgaaggaactcctaaaggctcaagaccacctttaatcctacaatctcagtctctaccttgttcatcacctcgagatgttccaccagatatcttgctagattctccagaaagaaaacaaaagaagcagaagaaaatgaaattaggcaaggatgaaaaagagcagagtgagaaagcggcaatgtatgatataattagttctccatccaaggactctactaaacttacattaagactttctcgtgtaaggtcttcagacatggaccagcaagaggatatgatttctggtgtggaaaatagcaatgtttcagaaaatgatattccttttaatgtgcagtacccaggacagacttcaaaaacacccattactccacaagatataaaccgcccactaaatgctgctcaatgtttgtcgcagcaagaacaaacagcattccttccagcaaatcaagtgcctgttttacaacagaacacttcagttgctgcaaaacaaccccagacttctgtggtacagaatcaacaacagatatcacaacagggacctatatatgatgaagtggaattggatgcattggctgaaattgagcgaatagagagagaatcagctattgaaagggagcgcttctcaaaagaagttcaagataaagataagcctttgaaaaaaagaaaacaagattcttacccacaggaggctgggggtgctacaggaggtaatagaccagcttctcaggagacgggttctacgggaaatgggtcaaggccagcattaatggttagcattgatcttcatcaggcaggaagagtggactctcaggcttctataactcaggattcagactccataaaaaagcctgaagaaatcaaacaatgtaatgatgcacctgtttctgttcttcaggaagatattgttggaagtcttaaatctacaccagaaaaccatcctgagacacctaaaaaaaagtctgatcctgagctttcaaagagtgaaatgaaacaaagtgaaagtagattagcagaatctaaaccaaatgaaaaccgattggtggagacaaaatcaagtgaaaataagttagaaactaaagttgagacccaaacagaagaacttaaacagaatgagagcagaacaactgaatgcaaacaaaacgagagcaccatagttgagcctaaacaaaatgaaaatagactgtctgacacaaaaccaaatgacaacaaacaaaataatggcagatcagaaacaacaaaatcaaggcctgaaaccccaaagcaaaagggtgaaagccggcctgagactccaaaacaaaagagtgatgggcatcctgaaaccccaaaacagaagggtgatggaaggcctgaaactccaaagcaaaaaggtgagagccgccctgaaactccaaagcaaaaaaatgaagggcgacctgaaacaccaaaacacaggcatgacaataggagggattctggaaagccatctacagagaaaaaacctgaagtgtctaaacataaacaagatactaaatctgactcacctcggttaaaatcagaacgagctgaagccttaaagcagagacctgatgggcgatctgtttctgagtcactaagacgtgaccatgataataaacaaaaatcagatgacaggggtgaatcagagcgacatcgaggggatcagtctagggttcgaagaccagaaacattgagatcctctagtagaaatgaacatggcattaaatctgatagttcaaaaactgataaactagaacgaaaacacaggcatgaatcaggggactcaagggaaagaccatcttctggggaacaaaaatcaagacctgacagtcctcgtgttaaacaaggagattctaataaatcaagatctgataaacttggttttaaatcaccaactagtaaagatgacaaaaggacagagggtaacaagagtaaagtagacactaataaagcacaccctgacaataaggcagaatttccaagttatttgttggggggcaggtctggtgcgttgaaaaattttgtcattccgaaaatcaagagggataaagatggcaatgttactcaggagacaaagaaaatggaaatgaaaggagagccgaaagacaaagtagaaaaaataggattagttgaagatctaaataaaggagctaagcctgtagttgtgctacaaaaactgtctttggatgatgttcagaaacttattaaagatagagaggacaaatcaagaagttcccttaaacctatcaagaataaaccatcaaagtcaaataaaggtagtatagatcaatcagtgttaaaagaattaccccctgaactcctggcagaaattgagtccaccatgccactttgtgaacgtgtgaaaatgaacaaacgcaagcgtagcacagttaatgaaaagccaaaatatgctgaaatcagttcagatgaagataatgatagtgatgaagcttttgaatcctctaggaaacgacataaaaaagatgatgataaagcttgggaatatgaagagcgtgacagaagaagctctggggatcataggagaagtggccactctcatgaaggaagaaggagttcaggtggtggtcgttatcgaaaccgaagtccgtcagattctgacatggaagattattctcctcctcccagccttagtgaggttgctaggaaaatgaagaaaaaagaaaaacagaagaaaaggaaagcatatgaaccaaaactaacacctgaagaaatgatggactcttcaacttttaagagattcacagcctcaatagagaatattttggataatttggaagatatggattttactgcgtttggtgatgatgatgaaattcctcaggaactgctcttaggaaaacatcagcttaatgaacttggcagtgaatctgctaaaataaaagcaatgggtataatggataagctttcaactgacaaaactgtgaaagtcttaaatatcttggagaagaatattcaggatgggtcaaagctttccactttgttaaatcataataacgatactgaagaagaagaaaggttatggagagaccttattatggagagagttacaaaatcagcggatgcttgtcttacaactatcaacattatgacatcccctaacatgccaaaagctgtgtacattgaggatgtaattgaaagagttatacagtacactaaatttcatttgcagaatacactttatcctcagtatgatcctgtttacagattagatcctcatggaggaggcttattaagttcaaaagcaaaacgggctaaatgttctacccataagcagagagtaatagtaatgctttataacaaagtttgtgacattgttagcagcttatcagaattgctagagatacaacttcttacagacacaacaattcttcaggtttcatctatgggaataacaccattttttgtggaaaatgtcagtgaactacagttgtgtgccattaagttagtcactgcagtattctcaagatatgaaaaacataggcagttaattttggaagaaatttttacttcacttgcaagattaccaaccagcaagaggagtttaaggaacttcaggttaaacagtagtgatatggatggagaacctatgtatattcagatggttacagcactggttttacaacttattcagtgtgtggtacacttaccatcatcagagaaggactctaatgcagaagaagattcaaataaaaaaattgaccaggatgttgtcattactaactcttatgaaacagctatgcgaacagcccaaaacttcctctccatcttccttaaaaaatgtggtagtaagcaaggtgaagaagattacagaccactgtttgaaaattttgttcaagaccttctttcaacagtcaataagcctgaatggccagctgctgaactactccttagtttgttagggagactgttggttcatcagttcagtaacaagtcaacagagatggctttaagagtggcatctcttgattaccttggaactgttgctgcacggctaagaaaagatgctgttacaagcaaaatggatcaaggatctatagaacgcattttaaaacaggtttcaggaggggaagatgaaatccaacaattacaaaaagcattgcttgattacttggatgaaaacactgagactgatccttcactagtgttttctcgtaaattctatatagcccagtggtttcgagacacaactctggaaacagaaaaagcaatgaaatcacaaaaagatgaagaatcatctgaaggaacacatcatgcaaaggaaattgagacaactggccaaattatgcatcgagctgaaaaccgaaaaaagtttcttagaagcattatcaaaaccacaccttctcagtttagcacattaaagatgaactctgatactgtggactatgatgatgcttgcttgattgttcgatacttggcctccatgaggccgtttgcccagagctttgatatttatttgacacagatcctacgagttcttggtgaaaatgcaattgctgttcgaacaaaagccatgaagtgtttgtctgaggttgttgctgtagaccccagtattctagcaaggcttgatatgcaacgaggtgttcatggacgattgatggataattcgactagtgtccgagaagcagcagtagaattactaggtcgatttgtcctttgtcgacctcagcttgctgaacagtattatgatatgctgattgaaagaatattggatactggtatcagtgtcaggaaaagagtaataaagattctcagagacatttgtattgaacaaccaacatttccaaaaatcacagaaatgtgtgtaaaaatgattcgcagagtcaatgatgaagagggcattaagaaattagtaaatgaaacattccagaaactctggtttactccaactccacacaatgacaaagaagcaatgacaaggaaaattttaaacattaccgatgtggttgcagcatgcagagatactggatatgactggtttgagcaactgcttcaaaacttgttgaagtccgaagaggattcctcatataaacctgtgaagaaagcttgtactcaacttgttgataacctagttgagcacattcttaaatatgaggaatctctagctgactctgacaataaaggtgtgaattctggaagattggtagcttgcataaccactttgttcttattcagcaaaataagaccccagctcatggttaaacatgcaatgactatgcaaccataccttaccactaaatgtagtacgcaaaatgatttcatggttatctgcaatgttgcaaaaatcctagagctagttgtaccactgatggagcatccaagtgaaacttttcttgccactattgaggaagatctaatgaagctcatcatcaaatatggcatgactgtagtgcaacattgtgtgagctgtcttggagctgttgtaaataaagtgacacaaaattttaaatttgtgtgggcttgtttcaatagatactatggtgccatttcaaaattaaaaagtcaacaccaagaggacccaaataacacttcacttctaacaaacaaaccagcacttcttagatcccttttcaccgttggagcactatgtcggcattttgattttgatctggaagattttaaaggcaacagcaaggttaacataaaagataaagtacttgaactattgatgtattttacaaaacactcagatgaagaagtacaaacaaaagctatcattggtctaggatttgcctttattcagcatccaagtctaatgttcgagcaagaagtgaagaatctatataataatattttatctgataagaactcctcagtcaatttaaaaatacaagtgttaaaaaacctccagacctacctacaagaagaagatacacgtatgcagcaggcagatagagactggaagaaagttgcaaaacaggaagacttaaaagaaatgggtgatgtttcctcagggatgagtagttccatcatgcagctttatctcaaacaggtgcttgaggcattttttcacacccagtcaagtgtacgccactttgccctaaatgtcattgcattgactctaaatcaaggtcttattcatccagttcagtgtgtgccatatttaattgctatgggcacagacccagaacctgctatgcggaacaaggctgatcagcaacttgtggaaatagacaaaaaatatgctggattcattcatatgaaagcagtggctggtatgaagatgtcttaccaggtacaacaggcaatcaacacatgcctaaaagatcctgtaaggggtttcagacaagacgagtcctctagcgctttgtgttcacacctttactccatgatccgtggaaaccgccaacacagacgagcctttcttatttctttactcaacctctttgatgacacagcaaaaacagacgtgactatgctcttgtatatagcagacaatctagcctgttttccataccagacacaggaagagccgttgtttataatgcatcatatagacattacactctcagtttctggtagtaacctactgcagtcattcaaggagtctatggtaaaggacaaaaggaaagagagaaaatcatcacctagtaaggaaaatgagtcaagcgacagtgaagaagaagtttccaggcctcggaagtcacggaaacgtgtagattcagattcagattcagattcagaagacgatataaattcagtgatgaaatgtttgccagaaaattcagctcctttaatcgaatttgcaaatgtgtcccagggtattttattacttctcatgttaaaacaacatttgaagaatctttgtggattttctgatagtaaaattcagaagtactctccatctgaatctgcaaaagtatatgataaagcgataaaccgaaaaacaggagttcattttcatccaaaacaaacactggacttcctgcggagtgacatggctaattccaaaatcacagaagaggtgaaaaggagtatagtaaaacagtatctagatttcaaacttctcatggaacatctggaccctgatgaagaagaagaagaaggggaggtttcagctagcacaaatgctcggaacaaagcaattacctcactgcttggaggaggcagccctaaaaataatacagcagcagagacagaagatgatgaaagtgatggggaggatagaggaggaggcacttcaggggtgaggcggaggaggagtcaacgtatttcgcagcgtattacgtaaaatgatttttatgtgcttatatatgtcagtctattaaatgtacaccaagtaatgtaatacttaaaagagaaaacattttgtagatagagattctctacttacccgtttatacatccttttgtagaaagtttaacataaaagacaataaaaaaacagaaatgagattt

SEQ ID NO: 159523 - DNA, 452 bp, Homo sapiens
  Payload ID: 11216
  Gene Symbol: NIPBL
  Gene Name: Nipped-B homolog (Drosophila)
  ENST ID: ENST00000513819
  CDS Start-End: 1-452
gacaaaaggaaagagagaaaatcatcacctagtaaggaaaatgagtcaagcgacagtgaagaagaagtttccaggcctcggaagtcacggaaacgtgtagattcagattcagattcagattcagaagacgatataaattcagtgatgaaatgtttgccagaaaattcagctcctttaatcgaatttgcaaatgtgtcccagggtattttattacttctcatgttaaaacaacatttgaagaatctttgtggattttctgatagttcaaacttctcatggaacatctggaccctgatgaagaagaagaagaaggggaggtttcagctagcacaaatgctcggaacaaagcaattacctcactgcttggaggaggcagccctaaaaataatacagcagcagagacagaagatgatgaaagtgatggggaggatagaggaggaggcacttcaggg

SEQ ID NO: 159524 - DNA, 518 bp, Homo sapiens
  Payload ID: 11216
  Gene Symbol: NIPBL
  Gene Name: Nipped-B homolog (Drosophila)
  ENST ID: ENST00000621733
  CDS Start-End: 23-337
ggaggaggaagaagaagcaacgatgaatgaaagtgttgacgtcatggatgtcatcgctatttgctgtccaaagtacaaagatcgaccacaaattgcaagagtagtgcagaaaaccagcagtggcttcagtgttcagtggatggcaggctcctacagtggctcctggactgaggctaagcgccgtgatggccgcaaactggtgccttgggtagacactattaaagagtcagacattatttacaaaaaaattgctctaacgagtgctaataagctgactaataaagttgttcagactttacgatccctgtatgccgccaaggatgggacttccagctaatgaatttgtacatgcagccaaatttacaggaatttttttaaaaggcagaaaaacttgaaataccaacattctggcaaaaaaaaatcagttttatgaagagtaagtggaacctgggatgcaggaacaaaagaaggaaatgttgggcaaacatttttgtgggagctcccttcgctgttgtgca

SEQ ID NO: 159525 - DNA, 2237 bp, Homo sapiens
  Payload ID: 11217
  Gene Symbol: NIPSNAP1
  Gene Name: nipsnap homolog 1 (C. elegans)
  Uniprot ID: Q9BPW8
  ENST ID: ENST00000216121
  CDS Start-End: 256-1110
ccacgctcccattttaccgaggtggatcctgaggcccagagtgggcaaagggcttgccaaggtcgcagagcgcgcagaggattagaaccctgacttccgtccagcacctgcggagttggagacgcccacaggaaacgcccacctgaccgggtgagtgagggggcgggcgagccggaggggtggagtttattcgcgccccgcctccgccaccagggcttgggggcggggccttcctgcaacctttgcggctccaacatggctccgcggctgtgcagcatctctgtgacggcgcggcggctgctggggggcccggggcctcgcgctggggacgttgcgtctgcagctgcggcgcgtttctattccaaggacaatgaaggcagctggttccgctccctctttgttcacaaagtggatccccggaaggatgcccactccaccctgctgtccaagaaggaaaccagcaacctctataagatccagtttcacaatgtaaagcctgaatacctggatgcctacaacagcctcacggaggctgtgctgcccaagcttcacctggatgaggactacccatgctcactcgtgggcaactggaacacgtggtatggggagcaggaccaggcagtgcacctgtggcgattctcaggtggctacccagccctcatggactgcatgaacaagctcaaaaacaataaggagtacctggagttccgaagggagcggagccagatgctgctgtccaggagaaaccagctgctcctcgagttcagcttctggaatgagccacagcccagaatgggtcccaacatctatgagctgaggacatacaagctcaagccaggaaccatgatcgagtgggggaacaactgggctcgggccatcaagtaccggcaggagaaccaggaggcagtgggcggcttcttctcacagataggagagctctacgtggtgcaccatctctgggcctataaagacctgcagtctcgggaggagactcgaaacgctgcctggaggaagagaggctgggatgaaaatgtctactatacagtccccctggtgcgacacatggagtctaggatcatgatccccttgaagatctcgcctctgcagtgatgctgcctacacctccacctccttccccttctccctcaggcaaccccgacagacagtggcactcctggtcctgctgtcttggttttgtcttggctctgggaggactctgaggggcagtgctcagttcagacaagggggaactgaaggctgacaagttctgaggattacagctctgcccaggccctttctactttccctgcctgcctccctccccctgctagaagtagtttctgatttccctgaatgaaagatagtgatcttttaggccttcatttatcttctaaaattcctcatctcaaggccaccagtccccagttatcacccttggaaatcctctgtttagcttagttgcacaaaaggtagtatgtccagtggctagaggtggggtgggaagagaggaggccaggccaggccctcaggaattccctggtttccactgggccacccacttgctggacagtctgagccaagtccctcctgctggagaaaagcctggaactgccaaaacaaaaaaacaaatacaaacaaacctcgtcaccacggtcaggaggaggttcagacattctgcccagaggggctggggaaagggatgggagccaggaaagatttaggggcaggagacagacacgtaacaggaactcggaaggtagaacttagaattcagaacttgggtttcaattgtagaatttggaatctggaatacagaattgggaagaagaacagagatgacaaaagaccacttgaagagaggttcctaatactagacagatggagagtggcttggctgtttccccctgcatattggggttgaaaacttaaatgtgtagttccagtccttctatgcagagtctctcctgccctccctccttcctgcaggcaaatatacaagctagaccctgttccctcaccctgtatcctgtctcccctaattgacattctatcagcccaaccctcattctgcagggccacctggtgtgtggaggtggcgggaggggtcagtgactctgggggtctcctcagtgacccccatacctcatcatgaacccttgggtagcttgattctgcctaccatccaggaaaacttgtgctggaattgctgatggaaacaattaaatatttactataaa

SEQ ID NO: 159526 - DNA, 674 bp, Homo sapiens
  Payload ID: 11217
  Gene Symbol: NIPSNAP1
  Gene Name: nipsnap homolog 1 (C. elegans)
  ENST ID: ENST00000437094
  CDS Start-End: 448-674
attttaccgaggtggatcctgaggcccagagtgggcaaagggcttgccaaggtcgcagagcgcgcagaggattagaaccctgacttccgtccagcacctgcggagttggagacgcccacaggaaacgcccacctgaccggtttctattccaaggacaatgaaggcagctggttccgctccctctttgttcacaaagtggatccccggaaggatgcccactccaccctgctgtccaagaaggaaaccagcaacctctataagatccagtttcacaatgtaaagcctgaatacctggatgcctacaacagcctcacggaggctgtgctgcccaagcttcacctggatgaggactacccatgctcactcgtgggcaactggaacacgtggtatggggagcaggaccaggcagtgcacctgtggcgattctcaggtggctacccagccctcatggactgcatgaacaagctcaaaaacaataaggagtacctggagttccgaagggagcggagccagatgctgctgtccaggagaaaccagctgctcctcgagttcagcttctggaatgagccacagcccagaatgggtcccaacatctatgagctgaggacatacaagctcaagccaggaaccatgatcgagtgggggaacaactgggctcgggccatcaagtaccg

SEQ ID NO: 159527 - DNA, 600 bp, Homo sapiens
  Payload ID: 11217
  Gene Symbol: NIPSNAP1
  Gene Name: nipsnap homolog 1 (C. elegans)
  ENST ID: ENST00000455496
  CDS Start-End: 12-398
gcggctccaacatggctccgcggctgtgcagcatctctgtgacggcgcggcggctgctggggggcccggggcctcgcgctggggacgttgcgtctgcagctgcggcgcgtttctattccaaggacaatgaaggcagctggttccgctccctctttgttcacaaagtggatccccggaaggatgcccactccaccctgctgtccaagaaggaaaccagcaacctctataagatccagtttcacaatgtaaagcctgaatacctggatgcctacaacagcctcacggaggctgtgctgcccaagcttcacctggatgaggactacccatgctcactcgtgggcaactggaacacgtggtatggggagcaggaccaggcaggtcattcctggttttggtagatttctatccatacagtacttttgccatttcctttgggaaaaagacctttaaaccatagggtcaggccattttgcagatgggaaaatcaaggcacagatggagtcaaaaaacagtgcacctgtggcgattctcaggtggctacccagccctcatggactgcatgaacaagctcaaaaacaataaggagtacctggagttccg

SEQ ID NO: 159528 - DNA, 661 bp, Homo sapiens
  Payload ID: 11217
  Gene Symbol: NIPSNAP1
  Gene Name: nipsnap homolog 1 (C. elegans)
  ENST ID: ENST00000415100
  CDS Start-End: 1-661
gcggctgtgcagcatctctgtgacggcgcggcggctgctggggggcccggggcctcgcgctggggacgttgcgtctgcagctgcggcgcgcctcccaccctcagagggctcaggactgtgtatggtcaaggaatatttaccaaagaatttctattccaaggacaatgaaggcagctggttccgctccctctttgttcacaaagtggatccccggaaggatgcccactccaccctgctgtccaagaaggaaaccagcaacctctataagatccagtttcacaatgtaaagcctgaatacctggatgcctacaacagcctcacggaggctgtgctgcccaagcttcacctggatgaggactacccatgctcactcgtgggcaactggaacacgtggtatggggagcaggaccaggcagtgcacctgtggcgattctcaggtggctacccagccctcatggactgcatgaacaagctcaaaaacaataaggagtacctggagttccgaagggagcggagccagatgctgctgtccaggagaaaccagctgctcctcgagttcagcttctggaatgagccacagcccagaatgggtcccaacatctatgagctgaggacatacaagctcaagccaggaaccatgatcgagtgggggaacaactgg

SEQ ID NO: 159529 - DNA, 1633 bp, Homo sapiens
  Payload ID: 11218
  Gene Symbol: NIPSNAP3A
  Gene Name: nipsnap homolog 3A (C. elegans)
  Uniprot ID: Q9UFN0
  ENST ID: ENST00000374767
  CDS Start-End: 106-849
gcgtctgccaatgatccaggagccgctcctttccactcgggaaaccttcagaggagtctcagaaaggacacggctggctgcttttctcagcgccgaagccgcgccatgctcgtcctcagaagcgccctgactcgggcgctggcctcacggacgctggcgcctcagatgtgctcatcttttgctacgggacccagacaatacgatggaatattctatgaatttcgttcttattaccttaagccctcaaagatgaatgagttcctggaaaattttgagaaaaacgctcatcttcggacagctcactctgaattggttggatactggagtgtagaatttggaggcagaatgaatacagtgtttcatatttggaagtatgataattttgctcatcgaactgaagttcggaaagccttggccaaagataaggaatggcaagaacaattcctcattccaaatttggctctcattgataaacaagagagtgagattacttatctggtaccatggtgcaaattagaaaaacctccaaaagaaggagtctatgaactggccacttttcagatgaaacctggtgggccagctctgtggggtgatgcatttaaaagggcagttcatgctcatgtcaatctaggctacacaaaactagttggagtgttccacacagagtacggagcactcaacagagttcatgttctttggtggaatgagagtgcagatagtcgtgcagctgggagacataagtcccatgaggatcccagagttgtggcagctgttcgggaaagtgtcaactacctagtatctcagcagaatatgcttctgattcctacatcgttttcaccactgaaatagttttctactgaaatacaaaacatttcattaactgctataggatctgtctgctaatggtgcttaaattctcccaagaggttctcacttttatttgaaggaggtgttaagttaatttgctatgtttcttgcattatgaaggctacatctgtgctttgtaagtaccacttcaaaaaatagttctgtttactttctgcatggtatttcagtgtctgtcatacattaaaaatacttgtcactgttttaagatcttgactcttcatttgtttcagaatagctcttctactgtattctgacaactctttgctttatagcattttgttgtattcaaatgataatggtagcatttccatgcttgtgacagcatttttaagttattaatatattttatcaacctttccatcatgtctgttttcctggttttttttggttgttttttgaccagtaaaatttattttgtaataccaaataggatttaagaaaattaacgtatttctttactatggaaaaccacattgtcatttgtgacatcatctatattaaatatggttttcacattagttatttgtcacttacttggaaaatgatgctgttaggtcctggtattaaaaatctagaaaagacttgttggtttatgtgctgaaatgtctttatttataattaattttaactactatttacttcatttcggatcctgtttaacaaagatacttgagacatccatttgttttaatgaaatctgtatggatatggaaatgcttgccctaataaaagcctacatatacct

SEQ ID NO: 159530 - DNA, 1752 bp, Homo sapiens
  Payload ID: 11219
  Gene Symbol: NIPSNAP3B
  Gene Name: nipsnap homolog 3B (C. elegans)
  Uniprot ID: Q9BS92
  ENST ID: ENST00000374762
  CDS Start-End: 72-815
actcgggaagacttcagagaagtctcacaaaggactcggctggctgcttttctcagtgccgaagccgcgccatgctcgttctcagaagcggcctgaccaaggcgcttgcctcacggacgctcgcgcctcaggtgtgttcatcttttgctacgggccctagacaatacgatggaacgttctatgaatttcgtacttattaccttaaaccttcaaatatgaatgcgttcatggaaaatcttaagaaaaacattcatcttcggacctcttactctgaattggttggattctggagtgtagaatttggaggcagaacgaataaagtgtttcatatttggaagtatgataattttgctcatcgagctgaagttcggaaagccttagccaactgtaaggaatggcaagaacaatctatcattccaaatttggctcgcattgataaacaagagacggaaattacttacctgataccatggtccaaattagaaaagcctccaaaagaaggagtctatgaactagctgtttttcagatgaaacctggtgggccagctctgtggggtgatgcatttgaaagagcaattaatgcccatgtcaatttaggctacacaaaagtagttggtgttttccacacagaatatggagaactcaacagagttcatgttctttggtggaatgagagtgcagatagtcgtgcagctgggagacataagtcccatgaggatcccagagttgtggcggctgttcgggaaagtgtcaactacctagtttctcagcagaatatgcttctgattcctgcatcattttcaccattgaaatagttttctactgaaatacaaaacatttcattaactgctctaagatgtgtctgctaatggtgcttaaattctcccaagaggttctcgcttttatttgaaggaggtggtaagttaattagttaatttgctgtgcttcttgcatttttgaaagttacatattctccactgctttaagaaataattcagttcactttcaccttggcatttcagtatctgttacacattagaagtagttgtcactatttcatcatcttggtttttcatttgttttagaatacctcttctgtattttgataactcattgctttatagcattttcttttactcaaataaggattttacatttccttgcctgacagtatttttgaattatttatataaaatatctatcttttcatcatgtctatagttcctgagattttaaaaaaatttgcttagtaaaggttattttgtgatataaaatgggatttataaaaatattagattgtttatttctttactgtggaaaagtacaatgtcatctgtattaattattgcttttacattcattgattattagtcattctaacttggaaaataatgcaattgggtcacagtgttaaaaatctagaaaagacttgttggtttatatgctgaaattgttcatttataattaattttactaatttctacttagtttggatcactaacagagatcttgggacatttatttgttttaaagaaatatttatggttatggaaacgcttgccctaataaaaatcctgcatattcattgtttttttaaattcacattttatacttatatgatctctaaagctcttgctatgttgctataagacagtaatatagtgataatttaccaactttattgaaaatgttgttacatcaataaaatagcatgctgggaacctgagaaggaaggtttctttagtactgcca

SEQ ID NO: 159531 - DNA, 1111 bp, Homo sapiens
  Payload ID: 11219
  Gene Symbol: NIPSNAP3B
  Gene Name: nipsnap homolog 3B (C. elegans)
  ENST ID: ENST00000460936
  CDS Start-End: 85-678
gccgcttttttccactcgggaagacttcagagaagtctcacaaaggactcggctggctgcttttctcagtgccgaagccgcgccatgctcgttctcagaagcggcctgaccaaggcgcttgcctcacggacgctcgcgcctcaggtgtgttcatcttttgctacgggccctagacaatacgatggaacgttctatgaatttcgtacttattaccttaaaccttcaaatatgaatgcgttcatggaaaatcttaagaaaaacattcatcttcggacctcttactctgaattggttggattctggagtgtagaatttggaggcagaacgaataaagtgtttcatatttggaagtatgataattttgctcatcgagctgaagttcggaaagccttagccaactgtaaggaatggcaagaacaatctatcattccaaatttggctcgcattgataaacaagagacggaaattacttacctgataccatggtccaaattagaaaagcctccaaaagaagttcatgttctttggtggaatgagagtgcagatagtcgtgcagctgggagacataagtcccatgaggatcccagagttgtggcggctgttcgggaaagtgtcaactacctagtttctcagcagaatatgcttctgattcctgcatcattttcaccattgaaatagttttctactgaaatacaaaacatttcattaactgctctaagatgtgtctgctaatggtgcttaaattctcccaagaggttctcgcttttatttgaaggaggtggaagagaaacagatatgcaaccaatctgatttggttccacaccctgccacagaagtcccaaaggagaagcaaatgccacttgtagactcaaactctggacttcattctcagcaccatctcttaacctactgagtaaatcctatgaacctgactagggtggcaactgaagttgtagtactttctgtcttcaaaggagggtgaacctggagtatgttggaagaagtgttaggttcattagagacacctctttcataactgctgtcacctagaatgtctattctctaagcaccttcttgaaagaagcacattcccccaggaggaggaaatggt

SEQ ID NO: 159532 - DNA, 5238 bp, Homo sapiens
  Payload ID: 11220
  Gene Symbol: NISCH
  Gene Name: nischarin
  Uniprot ID: Q9Y2I1
  ENST ID: ENST00000345716
  CDS Start-End: 135-4649
aggcggggccaagatggcggcgcagcgcgcggcgggggcgacgggcggcgggggccggggggcggtgggacgttgaccccgccccctgctgctgctagtctgcgccgggcggcggtggcggcggagacccgaacatggcgaccgcgcgcaccttcgggcccgagcgggaagccgagccggccaaggaagcgcgcgtcgtgggctcggagcttgtggacacttatacggtttacatcatccaggtcactgatggcagccatgagtggacagtaaagcaccgctacagcgacttccatgacctgcatgaaaagctcgttgcagagagaaagattgataaaaatctgcttccgcccaaaaagataattgggaaaaactcaagaagcttggtggagaagagggagaaggatctggaggtctacctccagaagctcctggctgccttccctggcgtgacccccagagtactggcccacttcttgcattttcacttctatgagataaatggcatcaccgcggcactggctgaagagctctttgagaaaggagaacagctcctgggggccggcgaggtctttgccattggacccctgcagctgtatgccgtcacggagcagctgcagcagggaaagcccacgtgcgccagtggggatgccaagaccgacctcgggcacatcctggacttcacctgtcgccttaagtaccttaaggtttctggcacagaaggaccttttgggaccagcaacattcaggagcagctcctgccgttcgacctatcaatattcaagtccctgcatcaggtggagataagtcactgtgatgctaagcacatcagagggctggtcgcatcgaagcccaccttagccacgctgagtgtccgcttctcagcaacctcgatgaaggaagtccttgttcctgaagcctcagaatttgatgagtgggagcctgaaggcacaaccctagaaggccctgtgactgccgtcatccccacttggcaggcattgaccacgcttgacctgagccacaacagcgtctccgagatcgacgagtctgtgaaactgatcccaaagattgagttcctggacctgagtcacaatggattgctggttgtggacaatctgcagcacctgtataaccttgtgcatctggacctgtcctacaacaagctctcctccttggaagggcttcacaccaagctggggaacatcaagaccttaaacctggcaggcaacctcctagagagtctgagtggcctgcacaagctctactcactggtcaacctggatctccgggacaacaggatcgaacagatggaggaggtccggagcataggcagcctcccgtgtctggagcacgtgtctctgctgaacaaccctctgagcatcatccccgactaccggaccaaggtgctggctcagttcggagagagggcctcagaggtctgtctggatgacacagtgaccacagagaaggagctggacactgtggaagtgctgaaagcaattcagaaagccaaggaggtcaagtccaaactgagcaacccagagaagaagggtggtgaagactcccggctctcagctgccccctgcatcagacccagcagctcccctcccactgtggctcccgcatctgcctccctgccccagcccatcctctctaaccaaggaatcatgttcgttcaggaggaggccctggccagcagcctctcgtccactgacagtctgactcccgagcaccagcccattgcccagggatgttctgattccttggagtccatccctgcgggacaggcagcttccgatgatttaagggacgtgccaggagctgttggtggtgcaagcccagaacatgccgagccggaggtccaggtggtgccggggtctggccagatcatcttcctgcccttcacctgcattggctacacggccaccaatcaggacttcatccagcgcctgagcacactgatccggcaggccatcgagcggcagctgcctgcctggatcgaggctgccaaccagcgggaggagggccagggtgaacagggcgaggaggaggatgaggaggaggaagaagaggaggacgtggctgagaaccgctactttgaaatggggcccccagacgtggaggaggaggagggaggaggccagggggaggaagaggaggaggaagaggaggatgaagaggccgaggaggagcgcctggctctggaatgggccctgggcgcggacgaggacttcctgctggagcacatccgcatcctcaaggtgctgtggtgcttcctgatccatgtgcagggcagtatccgccagttcgccgcctgccttgtgctcaccgacttcggcatcgcagtcttcgagatcccgcaccaggagtctcggggcagcagccagcacatcctctcctccctgcgctttgtcttttgcttcccgcatggcgacctcaccgagtttggcttcctcatgccggagctgtgtctggtgctcaaggtacggcacagtgagaacacgctcttcattatctcggacgccgccaacctgcacgagttccacgcggacctgcgctcatgctttgcaccccagcacatggccatgctgtgtagccccatcctctacggcagccacaccagcctgcaggagttcctgcgccagctgctcaccttctacaaggtggctggcggctgccaggagcgcagccagggctgcttccccgtctacctggtctacagtgacaagcgcatggtgcagacggccgccggggactactcaggcaacatcgagtgggccagctgcacactctgttcagccgtgcggcgctcctgctgcgcgccctctgaggccgtcaagtccgccgccatcccctactggctgttgctcacgccccagcacctcaacgtcatcaaggccgacttcaaccccatgcccaaccgtggcacccacaactgtcgcaaccgcaacagcttcaagctcagccgtgtgccgctctccaccgtgctgctggaccccacacgcagctgtacccagcctcggggcgcctttgctgatggccacgtgctagagctgctcgtggggtaccgctttgtcactgccatcttcgtgctgccccacgagaagttccacttcctgcgcgtctacaaccagctgcgggcctcgctgcaggacctgaagactgtggtcatcgccaagacccccgggacgggaggcagcccccagggctcctttgcggatggccagcctgccgagcgcagggccagcaatgaccagcgtccccaggaggtcccagcagaggctctggccccggccccagcggaagtcccagctccagcccctgcagcagcctcagcctcaggcccagcgaagactccggccccagcagaggcctcaacttcagctttggtcccagaggagacgccagtggaagctccagccccacccccagccgaggcccctgcccagtacccgagtgagcacctcatccaggccacctcggaggagaatcagatcccctcgcacttgcctgcctgcccgtcgctccggcacgtcgccagcctgcggggcagcgccatcatcgagctcttccacagcagcattgctgaggttgaaaacgaggagctgaggcacctcatgtggtcctcggtggtgttctaccagaccccagggctggaggtgactgcctgcgtgctgctctccaccaaggctgtgtactttgtgctccacgacggcctccgccgctacttctcagagccactgcaggatttctggcatcagaaaaacaccgactacaacaacagccctttccacatctcccagtgcttcgtgctaaagcttagtgacctgcagtcagtcaatgtggggcttttcgaccagcatttccggctgacgggttccaccccgatgcaggtggtcacgtgcttgacgcgggacagctacctgacgcactgcttcctccagcacctcatggtcgtgctgtcctctctggaacgcacgccctcgccggagcctgttgacaaggacttctactccgagtttgggaacaagaccacagggaagatggagaactacgagctgatccactctagtcgcgtcaagtttacctaccccagtgaggaggagattggggacctgacgttcactgtggcccaaaagatggctgagccagagaaggccccagccctcagcatcctgctgtacgtgcaggccttccaggtgggcatgccaccccctgggtgctgcaggggccccctgcgccccaagacactcctgctcaccagctccgagatcttcctcctggatgaggactgtgtccactacccactgcccgagtttgccaaagagccgccgcagagagacaggtaccggctggacgatggccgccgcgtccgggacctggaccgagtgctcatgggctaccagacctacccgcaggccctcaccctcgtcttcgatgacgtgcaaggtcatgacctcatgggcagtgtcaccctggaccactttggggaggtgccaggtggcccggctagagccagccagggccgtgaagtccagtggcaggtgtttgtccccagtgctgagagcagagagaagctcatctcgctgttggctcgccagtgggaggccctgtgtggccgtgagctgcctgtcgagctcaccggctagcccaggccacagccagcctgtcgtgtccagcctgacgcctactggggcagggcagcaggcttttgtgttctctaaaaatgttttatcctccctttggtaccttaatttgactgtcctcgcagagaatgtgaacatgtgtgtgtgttgtgttaattctttctcatgttgggagtgagaatgccgggcccctcagggctgtcggtgtgctgtcagcctcccacaggtggtacagccgtgcacaccagtgtcgtgtctgctgttgtgggaccgttgttaacacgtgacactgtgggtctgactttctcttctacacgtcctttcctgaagtgtcgagtccagtcctttgttgctgttgctgttgctgttgctgttgctgttgctgttggcatcttgctgctaatcctgaggctggtagcagaatgcacattggaagctcccaccccatattgttcttcaaagtggaggtctcccctgatccagacaagtgggagagcccgtgggggcaggggacctggagctgccagcaccaagcgtgattcctgctgcctgtattctctattccaataaagcagagtttgacaccgtctgc

SEQ ID NO: 159533 - DNA, 2589 bp, Homo sapiens
  Payload ID: 11220
  Gene Symbol: NISCH
  Gene Name: nischarin
  Uniprot ID: Q9Y2I1
  ENST ID: ENST00000420808
  CDS Start-End: 26-1573
cggcggtggcggcggagacccgaacatggcgaccgcgcgcaccttcgggcccgagcgggaagccgagccggccaaggaagcgcgcgtcgtgggctcggagcttgtggacacttatacggtttacatcatccaggtcactgatggcagccatgagtggacagtaaagcaccgctacagcgacttccatgacctgcatgaaaagctcgttgcagagagaaagattgataaaaatctgcttccgcccaaaaagataattgggaaaaactcaagaagcttggtggagaagagggagaaggatctggaggtctacctccagaagctcctggctgccttccctggcgtgacccccagagtactggcccacttcttgcattttcacttctatgagataaatggcatcaccgcggcactggctgaagagctctttgagaaaggagaacagctcctgggggccggcgaggtctttgccattggacccctgcagctgtatgccgtcacggagcagctgcagcagggaaagcccacgtgcgccagtggggatgccaagaccgacctcgggcacatcctggacttcacctgtcgccttaagtaccttaaggtttctggcacagaaggaccttttgggaccagcaacattcaggagcagctcctgccgttcgacctatcaatattcaagtccctgcatcaggtggagataagtcactgtgatgctaagcacatcagagggctggtcgcatcgaagcccaccttagccacgctgagtgtccgcttctcagcaacctcgatgaaggaagtccttgttcctgaagcctcagaatttgatgagtgggagcctgaaggcacaaccctagaaggccctgtgactgccgtcatccccacttggcaggcattgaccacgcttgacctgagccacaacagcgtctccgagatcgacgagtctgtgaaactgatcccaaagattgagttcctggacctgagtcacaatggattgctggttgtggacaatctgcagcacctgtataaccttgtgcatctggacctgtcctacaacaagctctcctccttggaagggcttcacaccaagctggggaacatcaagaccttaaacctggcaggcaacctcctagagagtctgagtggcctgcacaagctctactcactggtcaacctggatctccgggacaacaggatcgaacagatggaggaggtccggagcataggcagcctcccgtgtctggagcacgtgtctctgctgaacaaccctctgagcatcatccccgactaccggaccaaggtgctggctcagttcggagagagggcctcagaggtctgtctggatgacacagtgaccacagagaaggagctggacactgtggaagtgctgaaagcaattcagaaagccaaggaggtcaagtccaaactgagcaacccagagaagaagggtggtgaagactcccggctctcagctgccccctgcatcagacccagcagctcccctcccactgtggctcccgcatctgcctccctgccccagcccatcctctctaaccaaggcatcctcggagatgagtgagtgaagcaggtctcatgagcgtgtctgctggcccggcccccacggaagaggggagggtgtgccgtcccgagtggagccgaggctcgggacacgcaggaaaggacgccgcctgcccgggctcctggagacgcagaacttggtgtgaggtcttgggaaaacagttcaacccgatgttttaagagccagaaaaacattcccaccccttgacctggtaaccccactggtggggattttctcttagagggataagataccgggaaggggaggtgaaatgctcaccactgccaaaacacgggctgcaactgcaacatcggaggatgagagggagagtcggctgtggtgcagaatgctcagcagccctcccagcagggacaggaagactgggcaggaagaggggagaagcattcaagttaaggcaaaaggcccaacgcagagcagcacactgaggtcacacctgtgagatgtggaagagaattcctgagcgtggagcgatggggttaggtgccaggatgattgcccattttgcttctgtcagactcttgactaaggatttctggttgcattttattacataaaagccagggaggttatatcacggtgagaaagcttccctgacgctgcctcctgtagcgcagccaagcgagcctgtggaggtaccatatgactgtaggcctctggggacagggagctgcatctgcttctcaaggccagggacacagccatttctgccagcatctgttgatcagtgagtgagtgagtgggcaggtagagcaggagccagtgaagagcaggccctggatgggtggggatgcaccatgtccccaggctgcagctgcaggcagccccccacattgtcggagaagcctctgcaccagctcagccccctcctcactccccttgtgccctggggacactctgcagaggggcactctgcagtctgtccccgccatcgctggacttctggacatggcctccagatttgcacctcttaaataaaactgcagtggatgtctttg

SEQ ID NO: 159534 - DNA, 3168 bp, Homo sapiens
  Payload ID: 11220
  Gene Symbol: NISCH
  Gene Name: nischarin
  ENST ID: ENST00000488380
  CDS Start-End: 26-1777
cggcggtggcggcggagacccgaacatggcgaccgcgcgcaccttcgggcccgagcgggaagccgagccggccaaggaagcgcgcgtcgtgggctcggagcttgtggacacttatacggtttacatcatccaggtcactgatggcagccatgagtggacagtaaagcaccgctacagcgacttccatgacctgcatgaaaagctcgttgcagagagaaagattgataaaaatctgcttccgcccaaaaagataattgggaaaaactcaagaagcttggtggagaagagggagaaggatctggaggtctacctccagaagctcctggctgccttccctggcgtgacccccagagtactggcccacttcttgcattttcacttctatgagataaatggcatcaccgcggcactggctgaagagctctttgagaaaggagaacagctcctgggggccggcgaggtctttgccattggacccctgcagctgtatgccgtcacggagcagctgcagcagggaaagcccacgtgcgccagtggggatgccaagaccgacctcgggcacatcctggacttcacctgtcgccttaagtaccttaaggtttctggcacagaaggaccttttgggaccagcaacattcaggagcagctcctgccgttcgacctatcaatattcaagtccctgcatcaggtggagataagtcactgtgatgctaagcacatcagagggctggtcgcatcgaagcccaccttagccacgctgagtgtccgcttctcagcaacctcgatgaaggaagtccttgttcctgaagcctcagaatttgatgagtgggagcctgaaggcacaaccctagaaggccctgtgactgccgtcatccccacttggcaggcattgaccacgcttgacctgagccacaacagcgtctccgagatcgacgagtctgtgaaactgatcccaaagattgagttcctggacctgagtcacaatggattgctggttgtggacaatctgcagcacctgtataaccttgtgcatctggacctgtcctacaacaagctctcctccttggaagggcttcacaccaagctggggaacatcaagaccttaaacctggcaggcaacctcctagagagtctgagtggcctgcacaagctctactcactggtcaacctggatctccgggacaacaggatcgaacagatggaggaggtccggagcataggcagcctcccgtgtctggagcacgtgtctctgctgaacaaccctctgagcatcatccccgactaccggaccaaggtgctggctcagttcggagagagggcctcagaggtctgtctggatgacacagtgaccacagagaaggagctggacactgtggaagtgctgaaagcaattcagaaagccaaggaggtcaagtccaaactgagcaacccagagaagaagggtggtgaagactcccggctctcagctgccccctgcatcagacccagcagctcccctcccactgtggctcccgcatctgcctccctgccccagcccatcctctctaaccaaggtaatcgtgtatgtatcttgcttctagtggagccacacagccctgcctgggccccctggctgggctggggttgggggagaggtgccagcacctgcttccaacagggtcagacacagggagggcagtgccttctgcaggctggtcctcgcggggggacacatggcaggggtgcctggcctgatgccagctgttgcttgcttggtgaggactcccaattgctctgatgcccacatccagctcctctaggagaccgcagggtgtctgacaggccctgaggctgccctctgaacaggctcggggctgttggctcatgggacccattccctcaccggcagcacaagcaggttggctcctggttacaggaagccgggcttgtgactttactgtctggagcccgaatccctgtgcagggaaaagcttgcttttatcactgcctcatctctgtggggtgacccagccccagaacaccatgtttgtggggccaagatgggccatctctgtccctgtggacccatggaagaccaggcccattcgtctgcccactatcttagcgttttcaaagggctttcacctctgaacccaggcatcctcggagatgagtgagtgaagcaggtctcatgagcgtgtctgctggcccggcccccacggaagaggggagggtgtgccgtcccgagtggagccgaggctcgggacacgcaggaaaggacgccgcctgcccgggctcctggagacgcagaacttggtgtgaggtcttgggaaaacagttcaacccgatgttttaagagccagaaaaacattcccaccccttgacctggtaaccccactggtggggattttctcttagagggataagataccgggaaggggaggtgaaatgctcaccactgccaaaacacgggctgcaactgcaacatcggaggatgagagggagagtcggctgtggtgcagaatgctcagcagccctcccagcagggacaggaagactgggcaggaagaggggagaagcattcaagttaaggcaaaaggcccaacgcagagcagcacactgaggtcacacctgtgagatgtggaagagaattcctgagcgtggagcgatggggttaggtgccaggatgattgcccattttgcttctgtcagactcttgactaaggatttctggttgcattttattacataaaagccagggaggttatatcacggtgagaaagcttccctgacgctgcctcctgtagcgcagccaagcgagcctgtggaggtaccatatgactgtaggcctctggggacagggagctgcatctgcttctcaaggccagggacacagccatttctgccagcatctgttgatcagtgagtgagtgagtgggcaggtagagcaggagccagtgaagagcaggccctggatgggtggggatgcaccatgtccccaggctgcagctgcaggcagccccccacattgtcggagaagcctctgcaccagctcagccccctcctcactccccttgtgccctggggacactctgcagaggggcactctgcagtctgtccccgccatcgctggacttctggacatggcctccagatttgcacctcttaaataaaactgcagtggatgtc

SEQ ID NO: 159535 - DNA, 5173 bp, Homo sapiens
  Payload ID: 11220
  Gene Symbol: NISCH
  Gene Name: nischarin
  Uniprot ID: Q9Y2I1
  ENST ID: ENST00000479054
  CDS Start-End: 73-4587
gaactggcccagaatcactctcgccctgctccggcgtctgcgccgggcggcggtggcggcggagacccgaacatggcgaccgcgcgcaccttcgggcccgagcgggaagccgagccggccaaggaagcgcgcgtcgtgggctcggagcttgtggacacttatacggtttacatcatccaggtcactgatggcagccatgagtggacagtaaagcaccgctacagcgacttccatgacctgcatgaaaagctcgttgcagagagaaagattgataaaaatctgcttccgcccaaaaagataattgggaaaaactcaagaagcttggtggagaagagggagaaggatctggaggtctacctccagaagctcctggctgccttccctggcgtgacccccagagtactggcccacttcttgcattttcacttctatgagataaatggcatcaccgcggcactggctgaagagctctttgagaaaggagaacagctcctgggggccggcgaggtctttgccattggacccctgcagctgtatgccgtcacggagcagctgcagcagggaaagcccacgtgcgccagtggggatgccaagaccgacctcgggcacatcctggacttcacctgtcgccttaagtaccttaaggtttctggcacagaaggaccttttgggaccagcaacattcaggagcagctcctgccgttcgacctatcaatattcaagtccctgcatcaggtggagataagtcactgtgatgctaagcacatcagagggctggtcgcatcgaagcccaccttagccacgctgagtgtccgcttctcagcaacctcgatgaaggaagtccttgttcctgaagcctcagaatttgatgagtgggagcctgaaggcacaaccctagaaggccctgtgactgccgtcatccccacttggcaggcattgaccacgcttgacctgagccacaacagcgtctccgagatcgacgagtctgtgaaactgatcccaaagattgagttcctggacctgagtcacaatggattgctggttgtggacaatctgcagcacctgtataaccttgtgcatctggacctgtcctacaacaagctctcctccttggaagggcttcacaccaagctggggaacatcaagaccttaaacctggcaggcaacctcctagagagtctgagtggcctgcacaagctctactcactggtcaacctggatctccgggacaacaggatcgaacagatggaggaggtccggagcataggcagcctcccgtgtctggagcacgtgtctctgctgaacaaccctctgagcatcatccccgactaccggaccaaggtgctggctcagttcggagagagggcctcagaggtctgtctggatgacacagtgaccacagagaaggagctggacactgtggaagtgctgaaagcaattcagaaagccaaggaggtcaagtccaaactgagcaacccagagaagaagggtggtgaagactcccggctctcagctgccccctgcatcagacccagcagctcccctcccactgtggctcccgcatctgcctccctgccccagcccatcctctctaaccaaggaatcatgttcgttcaggaggaggccctggccagcagcctctcgtccactgacagtctgactcccgagcaccagcccattgcccagggatgttctgattccttggagtccatccctgcgggacaggcagcttccgatgatttaagggacgtgccaggagctgttggtggtgcaagcccagaacatgccgagccggaggtccaggtggtgccggggtctggccagatcatcttcctgcccttcacctgcattggctacacggccaccaatcaggacttcatccagcgcctgagcacactgatccggcaggccatcgagcggcagctgcctgcctggatcgaggctgccaaccagcgggaggagggccagggtgaacagggcgaggaggaggatgaggaggaggaagaagaggaggacgtggctgagaaccgctactttgaaatggggcccccagacgtggaggaggaggagggaggaggccagggggaggaagaggaggaggaagaggaggatgaagaggccgaggaggagcgcctggctctggaatgggccctgggcgcggacgaggacttcctgctggagcacatccgcatcctcaaggtgctgtggtgcttcctgatccatgtgcagggcagtatccgccagttcgccgcctgccttgtgctcaccgacttcggcatcgcagtcttcgagatcccgcaccaggagtctcggggcagcagccagcacatcctctcctccctgcgctttgtcttttgcttcccgcatggcgacctcaccgagtttggcttcctcatgccggagctgtgtctggtgctcaaggtacggcacagtgagaacacgctcttcattatctcggacgccgccaacctgcacgagttccacgcggacctgcgctcatgctttgcaccccagcacatggccatgctgtgtagccccatcctctacggcagccacaccagcctgcaggagttcctgcgccagctgctcaccttctacaaggtggctggcggctgccaggagcgcagccagggctgcttccccgtctacctggtctacagtgacaagcgcatggtgcagacggccgccggggactactcaggcaacatcgagtgggccagctgcacactctgttcagccgtgcggcgctcctgctgcgcgccctctgaggccgtcaagtccgccgccatcccctactggctgttgctcacgccccagcacctcaacgtcatcaaggccgacttcaaccccatgcccaaccgtggcacccacaactgtcgcaaccgcaacagcttcaagctcagccgtgtgccgctctccaccgtgctgctggaccccacacgcagctgtacccagcctcggggcgcctttgctgatggccacgtgctagagctgctcgtggggtaccgctttgtcactgccatcttcgtgctgccccacgagaagttccacttcctgcgcgtctacaaccagctgcgggcctcgctgcaggacctgaagactgtggtcatcgccaagacccccgggacgggaggcagcccccagggctcctttgcggatggccagcctgccgagcgcagggccagcaatgaccagcgtccccaggaggtcccagcagaggctctggccccggccccagcggaagtcccagctccagcccctgcagcagcctcagcctcaggcccagcgaagactccggccccagcagaggcctcaacttcagctttggtcccagaggagacgccagtggaagctccagccccacccccagccgaggcccctgcccagtacccgagtgagcacctcatccaggccacctcggaggagaatcagatcccctcgcacttgcctgcctgcccgtcgctccggcacgtcgccagcctgcggggcagcgccatcatcgagctcttccacagcagcattgctgaggttgaaaacgaggagctgaggcacctcatgtggtcctcggtggtgttctaccagaccccagggctggaggtgactgcctgcgtgctgctctccaccaaggctgtgtactttgtgctccacgacggcctccgccgctacttctcagagccactgcaggatttctggcatcagaaaaacaccgactacaacaacagccctttccacatctcccagtgcttcgtgctaaagcttagtgacctgcagtcagtcaatgtggggcttttcgaccagcatttccggctgacgggttccaccccgatgcaggtggtcacgtgcttgacgcgggacagctacctgacgcactgcttcctccagcacctcatggtcgtgctgtcctctctggaacgcacgccctcgccggagcctgttgacaaggacttctactccgagtttgggaacaagaccacagggaagatggagaactacgagctgatccactctagtcgcgtcaagtttacctaccccagtgaggaggagattggggacctgacgttcactgtggcccaaaagatggctgagccagagaaggccccagccctcagcatcctgctgtacgtgcaggccttccaggtgggcatgccaccccctgggtgctgcaggggccccctgcgccccaagacactcctgctcaccagctccgagatcttcctcctggatgaggactgtgtccactacccactgcccgagtttgccaaagagccgccgcagagagacaggtaccggctggacgatggccgccgcgtccgggacctggaccgagtgctcatgggctaccagacctacccgcaggccctcaccctcgtcttcgatgacgtgcaaggtcatgacctcatgggcagtgtcaccctggaccactttggggaggtgccaggtggcccggctagagccagccagggccgtgaagtccagtggcaggtgtttgtccccagtgctgagagcagagagaagctcatctcgctgttggctcgccagtgggaggccctgtgtggccgtgagctgcctgtcgagctcaccggctagcccaggccacagccagcctgtcgtgtccagcctgacgcctactggggcagggcagcaggcttttgtgttctctaaaaatgttttatcctccctttggtaccttaatttgactgtcctcgcagagaatgtgaacatgtgtgtgtgttgtgttaattctttctcatgttgggagtgagaatgccgggcccctcagggctgtcggtgtgctgtcagcctcccacaggtggtacagccgtgcacaccagtgtcgtgtctgctgttgtgggaccgttgttaacacgtgacactgtgggtctgactttctcttctacacgtcctttcctgaagtgtcgagtccagtcctttgttgctgttgctgttgctgttgctgttgctgttgctgttggcatcttgctgctaatcctgaggctggtagcagaatgcacattggaagctcccaccccatattgttcttcaaagtggaggtctcccctgatccagacaagtgggagagcccgtgggggcaggggacctggagctgccagcaccaagcgtgattcctgctgcctgtattctctattccaataaagcagagtttgacaccgtc

SEQ ID NO: 159536 - DNA, 3415 bp, Homo sapiens
  Payload ID: 11221
  Gene Symbol: NOA1
  Gene Name: nitric oxide associated 1
  Uniprot ID: Q8NC60
  ENST ID: ENST00000264230
  CDS Start-End: 1239-3335
aggatctgcgcctgcgcaaattgtaggtcaagcttgggccggggttagggttgcacacgcgtaaattgtgggccgccgctgccgggctgattgagaggacagctcccgcaatctgcggtcgtatccgttccgtcaatgttttatttctgcttgtttttcaatgttgttgcacaaataacgacacctgaaaacaaaaccaggtatacttattattaaaaagtgttcgtcctgtgaatccgcaacattgggatgctcaatttatttgcctttataaggaccaaaacacgaagctattttttatttttatttatttattattttttgaaatggagtctcgctctgtcgcccaggctggagtgcagtggagcgatctcggctcactgcaacctccgtctcccgggttcaagcgattctcctgcctcggcctcccaaatagctgggattacaggcaagggtcaccacgcccgggtaatttttgtatttttagtagagacggggtttcaccacgttggccaggctggtctcgaactgctgacctcaggtgatccacccgcctcggcctcccaaagtgctgggattacaggcgtgagccacgcgcccggccggaagctcctttctgtttttgttttgttttgtttttttgagacaggctcgctctgtcgcccaggctggagtgcagtggcgcgatctcggctcactgcaacctccgcctcccgcgttcaagccattctcctgcctcagcctcccgagtagctgggactacaggcgcccgccaccacgcctggctaattttttgtatttttagcagagatgggggtttcaccgtgtaagccaggatggtctcgatctcctgacctcatgatccgcccgcctcggcctcccaaattgctgggattacaggcgtgagccaccgcgcccgaccccggaagctcctttttaagtgtgatttattaagggcggcttgtgctagcagtgaggcgttaagcctgaaagtgaaaaaacccaaaacactcactgctcttttctgcccacctagctcaatcctccagtgcctttgccatagctttaagtaggttctcagtctcagagcttaaatcgcgagaactgacgggattagacgcaaaaccaaccaggacagctcccaagtacccacgcgctttcgtctcgggtcaaatgcgcgcctcggaccctagtgcgcgtgcgcgctggtggctccgcccctttggagctacttcctcatgctgcccgctcgcctaccgttcaggctgctgagccttttccttcgtggatccgctcccacggcagcgcgccatggcctccgggagccgctcctggagaggaggtgcgctgccgcctcctccttccagcactcatcgagtctgggacgcgagcttccttatgaccccgtggacacggagggctttggagaaggtggtgacatgcaggagcgttttctgttcccggagtacatcctggatccggagccgcaacccacccgcgaaaagcagctgcaggagctccagcaacagcaggaggaggaggagcgacagaggcagcagcggcgggaggagcggcgacagcaaaacctacgggccaggtcccgggagcacccggtcgtggggcacccggacccggcattgccgcccagcggcgtgaactgctcgggctgtggggcagagctgcactgccaggacgccggagtgcccggctacctgccccgagagaagttcctccgcacggcggaggcagacggcgggctggcacggaccgtgtgccagcgctgctggctgctgtcgcaccaccggcgcgctctacgcctgcaggtgagccgcgagcagtacctggagctggtgagcgccgcgttgcggcggcccggcccctccctggtgctctacatggtggacctgctggacctgcccgacgccctgctgcccgacttgcccgcgctggtgggccccaagcagctgatcgtgctgggaaacaaagtggacctcctgccccaggatgctcctggctaccggcagaggctgcgggagcgactgtgggaggactgtgcccgcgccgggctcctgctggcccctggccaccaagggccacagcgccccgtcaaggacgagccacaggacggggagaatccgaatccgccgaactggtcccgcacagtggtcagggacgtgcggctgatcagcgccaagaccggctatggagtggaagagttgatctctgcccttcagcgctcctggcgctaccgtggggacgtctacttagtgggcgccaccaacgccggcaaatccactctctttaacacgctcctggagtccgattactgcactgccaagggctccgaggccatcgacagagccaccatctccccttggccaggtactacattaaaccttctgaagtttcctatttgcaacccaactccttacagaatgtttaaaaggcatcaaagacttaaaaaagattcaactcaagctgaagaagatcttagtgagcaagaacaaaatcagcttaatgtcctcaaaaagcatggttatgtcgtaggaagagttggaaggacattcttgtattcagaagaacagaaggataacattccctttgagtttgatgctgattcacttgcctttgacatggaaaatgaccctgttatgggtacacacaaatccaccaaacaagtagaattgactgcacaagatgtgaaagatgcccactggttttatgacacccctggaattacaaaagaaaattgtattttaaatcttctaacagaaaaagaagtaaatattgttttgccaacacagtccattgttccaagaacttttgtgcttaaaccaggaatggttctgtttttgggtgctataggccgcatagatttcctgcagggaaatcagtcagcttggtttacagtcgtggcttccaacatcctccctgtgcatatcacctccttggacagggcagacgctctgtatcagaagcatgcaggtcatacgttactccagattccaatgggtggaaaagaacgaatggcaggatttcctcctcttgttgctgaagacattatgttaaaagaaggactgggggcatctgaagcagtggccgacatcaagttttcctctgcaggttgggtttcagtaacacctaattttaaggacagactgcatctccgaggctatacacctgaaggaacagttttgaccgtccggccccctctcttgccatatattgttaacatcaaaggacagcgcatcaagaaaagtgtggcctataaaaccaagaagcctccttcccttatgtacaacgtgaggaagaagaaaggaaagataaatgtatgagaccgaccttgttcactccagatattaactgtattgaacacaacaaaatacattgaatttgtattaaacatataacgcat

SEQ ID NO: 159537 - DNA, 12158 bp, Homo sapiens
  Payload ID: 11222
  Gene Symbol: NOS1
  Gene Name: nitric oxide synthase 1 (neuronal)
  Uniprot ID: P29475
  ENST ID: ENST00000317775
  CDS Start-End: 687-4991
agagcggctcttttaatgagggttgcgacgtctccctccccacacccataaaccagtcgggttggacgtcactgctaattcgtttcagtgatgataggataaaggagggacattaagaaataaattccccctcacgaccctcgctgagctcacggctcagtccctacatatttatgccgcgtttccagccgctgggtgaggagctacttagcgccgcggctcctccgaggggcggccgggcagcgagcagcggccgagcggacgggctcatgatgcctcagatctgatccgcatctaacaggctggcaatgaagatacccagagaatagttcacatctatcatgcgtcacttctagacacagccatcagacgcatctcctcccctttctgcctgaccttagggacacgtcccaccgcctctcttgacgtctgcctggtcaaccatcacttccttagagaataaggagagaggcggatgcaggaaatcatgccaccgacgggccaccagccatgagtgggtgacgctgagctgacgtcaaagacagagagggctgaagccttgtcagcacctgtcaccccggctcctgctctccgtgtagcctgaagcctggatcctcctggtgaaatcatcttggcctgatagcattgtgaggtcttcagacaggacccctcggaagctagttaccatggaggatcacatgttcggtgttcagcaaatccagcccaatgtcatttctgttcgtctcttcaagcgcaaagttgggggcctgggatttctggtgaaggagcgggtcagtaagccgcccgtgatcatctctgacctgattcgtgggggcgccgcagagcagagtggcctcatccaggccggagacatcattcttgcggtcaacggccggcccttggtggacctgagctatgacagcgccctggaggtactcagaggcattgcctctgagacccacgtggtcctcattctgaggggccctgaaggtttcaccacgcacctggagaccacctttacaggtgatgggacccccaagaccatccgggtgacacagcccctgggtccccccaccaaagccgtggatctgtcccaccagccaccggccggcaaagaacagcccctggcagtggatggggcctcgggtcccgggaatgggcctcagcatgcctacgatgatgggcaggaggctggctcactcccccatgccaacggcctggcccccaggcccccaggccaggaccccgcgaagaaagcaaccagagtcagcctccaaggcagaggggagaacaatgaactgctcaaggagatagagcctgtgctgagccttctcaccagtgggagcagaggggtcaagggaggggcacctgccaaggcagagatgaaagatatgggaatccaggtggacagagatttggacggcaagtcacacaaacctctgcccctcggcgtggagaacgaccgagtcttcaatgacctatgggggaagggcaatgtgcctgtcgtcctcaacaacccatattcagagaaggagcagccccccacctcaggaaaacagtcccccacaaagaatggcagcccctccaagtgtccacgcttcctcaaggtcaagaactgggagactgaggtggttctcactgacaccctccaccttaagagcacattggaaacgggatgcactgagtacatctgcatgggctccatcatgcatccttctcagcatgcaaggaggcctgaagacgtccgcacaaaaggacagctcttccctctcgccaaagagtttattgatcaatactattcatcaattaaaagatttggctccaaagcccacatggaaaggctggaagaggtgaacaaagagatcgacaccactagcacttaccagctcaaggacacagagctcatctatggggccaagcacgcctggcggaatgcctcgcgctgtgtgggcaggatccagtggtccaagctgcaggtattcgatgcccgtgactgcaccacggcccacgggatgttcaactacatctgtaaccatgtcaagtatgccaccaacaaagggaacctcaggtctgccatcaccatattcccccagaggacagacggcaagcacgacttccgagtctggaactcccagctcatccgctacgctggctacaagcagcctgacggctccaccctgggggacccagccaatgtgcagttcacagagatatgcatacagcagggctggaaaccgcctagaggccgcttcgatgtcctgccgctcctgcttcaggccaacggcaatgaccctgagctcttccagattcctccagagctggtgttggaagttcccatcaggcaccccaagtttgagtggttcaaggacctggggctgaagtggtacggcctccccgccgtgtccaacatgctcctagagattggcggcctggagttcagcgcctgtcccttcagtggctggtacatgggcacagagattggtgtccgcgactactgtgacaactcccgctacaatatcctggaggaagtggccaagaagatgaacttagacatgaggaagacgtcctccctgtggaaggaccaggcgctggtggagatcaatatcgcggttctctatagcttccagagtgacaaagtgaccattgttgaccatcactccgccaccgagtccttcattaagcacatggagaatgagtaccgctgccgggggggctgccctgccgactgggtgtggatcgtgccccccatgtccggaagcatcacccctgtgttccaccaggagatgctcaactaccggctcaccccctccttcgaataccagcctgatccctggaacacgcatgtctggaaaggcaccaacgggacccccacaaagcggcgagccattggcttcaagaagctagcagaagctgtcaagttctcggccaagctgatggggcaggctatggccaagagggtgaaagcgaccatcctctatgccacagagacaggcaaatcgcaagcttatgccaagaccttgtgtgagatcttcaaacacgcctttgatgccaaggtgatgtccatggaagaatatgacattgtgcacctggaacatgaaactctggtccttgtggtcaccagcacctttggcaatggagatccccctgagaatggggagaaattcggctgtgctttgatggaaatgaggcaccccaactctgtgcaggaagaaaggaagagctacaaggtccgattcaacagcgtctcctcctactctgactcccaaaaatcatcaggcgatgggcccgacctcagagacaactttgagagtgctggacccctggccaatgtgaggttctcagtttttggcctcggctcacgagcataccctcacttttgcgccttcggacacgctgtggacaccctcctggaagaactgggaggggagaggatcctgaagatgagggaaggggatgagctctgtgggcaggaagaggctttcaggacctgggccaagaaggtcttcaaggcagcctgtgatgtcttctgtgtgggagatgatgtcaacattgaaaaggccaacaattccctcatcagcaatgatcgcagctggaagagaaacaagttccgcctcacctttgtggccgaagctccagaactcacacaaggtctatccaatgtccacaaaaagcgagtctcagctgcccggctccttagccgtcaaaacctccagagccctaaatccagtcggtcaactatcttcgtgcgtctccacaccaacgggagccaggagctgcagtaccagcctggggaccacctgggtgtcttccctggcaaccacgaggacctcgtgaatgccctgatcgagcggctggaggacgcgccgcctgtcaaccagatggtgaaagtggaactgctggaggagcggaacacggctttaggtgtcatcagtaactggacagacgagctccgcctcccgccctgcaccatcttccaggccttcaagtactacctggacatcaccacgccaccaacgcctctgcagctgcagcagtttgcctccctagctaccagcgagaaggagaagcagcgtctgctggtcctcagcaagggtttgcaggagtacgaggaatggaaatggggcaagaaccccaccatcgtggaggtgctggaggagttcccatctatccagatgccggccaccctgctcctgacccagctgtccctgctgcagccccgctactattccatcagctcctccccagacatgtaccctgatgaagtgcacctcactgtggccatcgtttcctaccgcactcgagatggagaaggaccaattcaccacggcgtatgctcctcctggctcaaccggatacaggctgacgaactggtcccctgtttcgtgagaggagcacccagcttccacctgccccggaacccccaagtcccctgcatcctcgttggaccaggcaccggcattgcccctttccgaagcttctggcaacagcggcaatttgatatccaacacaaaggaatgaacccctgccccatggtcctggtcttcgggtgccggcaatccaagatagatcatatctacagggaagagaccctgcaggccaagaacaagggggtcttcagagagctgtacacggcttactcccgggagccagacaaaccaaagaagtacgtgcaggacatcctgcaggagcagctggcggagtctgtgtaccgagccctgaaggagcaagggggccacatatacgtctgtggggacgtcaccatggctgctgatgtcctcaaagccatccagcgcatcatgacccagcaggggaagctctcggcagaggacgccggcgtattcatcagccggatgagggatgacaaccgataccatgaggatatttttggagtcaccctgcgaacgtacgaagtgaccaaccgccttagatctgagtccattgccttcattgaagagagcaaaaaagacaccgatgaggttttcagctcctaactggaccctcttgcccagccggctgcaagttttgtaagcgcggacagacactgctgaacctttcctctgggaccccctgtggccctcgctctgcctcctgtccttgtcgctgtgccctggtttccctcctcgggcttctcgcccctcagtggtttcctcggccctcctgggtttactccttgagttttcctgctgcgatgcaatgcttttctaatctgcagtggctcttacaaaactctgttcccactccctctcttgccgacaagggcaactcacgggtgcatgaaaccactggaacatggccgtcgctgtgggggtttttttctctggggttcccctggaaaggctgcaggaactaggcacaagctctctgagccagtccctcagccactgaagtccccctttctccttttttatgatgacattttggttgtgcgtgcctgtgtgtgtgtgtgtgtgtgtgtgtgtgtgtgtgatgggccaggtctctgtccgtcctcttccctgcacaagtgtgtcgatcttagattgccactgctttcattgaagaccctcaatgccaagaaacgtgtccctggcccatattaatccctcgtgtgtccataattagggtccacgcccatgtacctgaaacatttggaagccccataattgttctagttagaaagggttcagggcatggggagaggagtgggaaattgattaaaggggctgtctcccaatgaaagaggcattcccagaatttgctgcatttagattttgataccagtgagcagagccctcatgtgacatgaacccatccaatggattgtgcaaatcccctccccaaacccacccataccagctagaatcacttgactttgccacatccattgactgaccccctcctccagcaatagcatccaaggggcctggaagttatgttgttcaaagaagcctggtggcaataaggatcttcccactttgccactggatgactttggatgggtcacttgtcctcagtttttcctagtcataatgtcatacgaacctaaagaatatgaatggattaaatgttaaagctttggtgcctggaaacaatatcaagtaacaatatgattattatttttttattcccccaaagcgggcttgctgcttcacccttggggatgaaataatggaagctggttaaagtggatgaggttggaaagagttgccataatgaggtcccacgtggcttcttcgataggagccacaacttggggtgggaagaacttgtccctcaggcttgttgccctctgcagttgatctccaaagttttaaacctgttaaattaattttgacaaataagttaccctcaactcagatcaaaaatgggcagccaagtcttcggtaggaattggagccggtgtaattcctccctaagaggcaacctgttgaatttactctctcagagtaaatggtgggaagggatccctttgtatacttttttaaatactacaaattagtgtcaggcagttcccagaaagagacaagaaatcctagtggcctcccagactgcagggtccccaaggatggaaagggaatgttctgctggttctaccctgtttgttgtgtcttgctatacagaaaaaccacatttcttttatatactgtacgtgggcatatcttgttgttcagtttgggtgtctgctaaagaggaagtgcactggccctctttgaaagggctttacagtgggggcaccaagaccccaaagggcccaggccaggagactgttaaagtgaaaaggcaatctatgactcaccttgctctgccatccctggcagcccccaccggtgtcctgttcctgccacatggagcttgacttcatgccagctataatctcccctgccttcctttaatcccaatttcccctgctcactcttccacagatataaagaacaaacacttagcatcccacactcaccccttctaatcctgaagggaagcccattctaaactcctttcctgcaaacccatttccagctcctagtagctttcctcccaaaggctttctttccaatcctttatagctttggagacgcctccccaattccccagggaaggaaactgttgtgtccaatccccattaaagacaaattgatcagtgcttcccactccaagtcaagctttatgcaggaatgcttttccatcagggaataaatacttagaagcgcttacaaggtgccaggcacctcctttctgcatgtgcctgcctttctagtagcagacagatggaaacattgtctcattttgtcaaggagtccaaagaaatgattataaaaccaggattcatccttcttctccagaaagatttttttttaagtaaacacctttcaatccccaacacaagctgcttcacaactccaggctagaaggcaggagagcgatctgatgtgtttctttcatttgccagaattcctgataccaaaagcctctctctctgttgagtaacctctcaaggaccagagtggagtccagattgttaggctcagatcaagggtggggaaatactgccctctcgtggtggcttttcatccaggcctcgtagccaaccgtttaagtgcaaaatagaattaagcaatgggtaagcaaaatagggttgacaagatatttgggggttattcgggttatggcccatttatttccctcttccccctgaattgaccagtagcagctccagccccatttcacaaaagtgagtttggccaggaggaatgagacgtctcctgaaataggaacaccggaacatcatgctcacctgccatcactatgcatccagttcccacagcttgtgtcgtgaaagagcagagagatgatgttaaactccttgggaggagagagggcttcttttggtttccctggagtgagacagccaggtgtctttcttttgcggggggacacttcagacccatcaatatggaattttgggagccgacctgagtgcaaatcctaattctgcccctgttggtgcagatggctgtgggcggctcacttgaccttttagagtctgcatacccacctgtataacaaggtggattgaatgagacaatgcccacgaaatgcccagttacagtacctggttcaaaacttactgcattttaatttttcacttaacttataacatgtcttgcttctccagtgtgtggaaggcaccgggcagtttgcagagataagcaaaacacagttcctctcgtgcagaaggttagaatctatttttttttttgacagagtcttgctctgtcacccaggctggcgtacagtggtacgatctcagctcactgcatcctctgcctcccccagttcaagtgattcttctgcctcggcctcctgagtaactgggactacaggcgcctaccaccacgcccagctaagttttgtatttttagtagagtcagggtttcaccatgttggccaggctggtcttgaattcctgacctcaaatgatccacgcacctcagcctcccaaagtgctggattacaggcatgagccaccacgcccagccaaaggttataatctgatggagagagacacccgtcttggaactgacataaatttctggggtttgagaaatgggcgggatttcactggtagcttctggaaggtaagagttgtccaggaattgggaagagtgagaggaaaggcacggacagggagcatgtaagataaattgaggctggctttggaaggctgaggagggtgagaaaaggtgggctgggaccagaccgtggggagaggtgagtggcattacaagaaatttaggctttattcagaaggcaacagggagtccctaagaatgtttttcaaaaagggacattaaggcgattggagttatacttggaaaagaaagttctggccacagtacagagcatggcccgttgagctgttgggggggttattgctgcaaccaaggcttgagtgagggaagaggcggatgtagtgataaagagactccaggaactgaatcagcgtacctggcaccccatccattgtagagggtgagaataaaggagaaattaaagcatcttgcaggctgggcgcggtagctcatgtctgtaatcccagcactttgggaggccgaggtgggtgtatcagttgaggtcaggagttggagaccagtcagccagttagtagaaaccctgactctactaagaaaatacaaaaattagctgggcatggtggcatgcgcctgtagtctcagctacctgggaggctgaggaaggaggatcgcttgagcccaggaggtggaggctgcagtgagccaagattgtaccactgcactccagcctgggtgacagagcaagactcttatctcaaaaaaaataaaataaaataaaataaaataaaacatcttgcccctagctgagagagaggtctctgaagagcaggctcagggaaaagatgagttttcagagctgatgtgatagtcagcttctctggagtcaacagggtgaatccttcccaagtccagccatgcccagatgcccggagggaaaactgacccccagccagtagacattggctaagaacacagaatcttctgaccaaacacgctttcagcagctgcctgctctggactttgaaagaggtcaggtcttgccctaagctcaaaacaagtgagaggtgtcctgacctagctcatagggcaaatggtcctaataggatgggcaatccagatgcctgagccccttcactccgacagcaccagcgcctaatgcagccttttcattcttgccattaggaaatctgtggacttctagcctgtgttttaaaccagccatgtttccttgtatatttccctacccgctgccccacatacccagcatgccgctgtggccaccatgtcctcaaagccttctgtctgtatcaggaatgtagtctgagactgccaggaagcaacaaggagagagaaacactaactagtcttcctttataacccattcatactctctggctgtccccaaccttcatagtctcctgcatccaaatgtcctctttggctcaaaaagtaggccaggcatggtggttcatgcctgtaatagcactttgggagactgaggtgggaggatcacttggggccaggagtttgagaccagcttgggcaacacagcgcaatctcgtctctactaaaaaaaaaaaaaaaaaaaaattagctgggcatgatggcatgctcctgtggtcccagctacttgggaggctgaggcaggaggatcacttggtcccaggagtttgaggcgacagtgagctaggatcgcaccactgcactccagcctgagtgacagagcaagaccctgtctctaaaaaaaattaaaatgaaagaccaggtgctgggattaaggaaacacaggtctgagggtctgagggaaggggcctgcctcccagggagtcaacatagatgttccccatgaacagggatttgactttggaggccaacctggcctggcctctgccctttatctcacactccctatccttggcccactgccagtccctgccttgtggcaaaggggccccaaaagaaaagctgcccttccccaaatgtaaggacccaggtacactttcacccgtggaaagcagtgtctgtcgagagtctgtttcctattaatacttatcaaagccatgtgcgagggaggtggtcagctgtcaatatgccttagtatgtttatatgagtttgttttgttctaaaatacccaaacagttctggtcaagcggggctatgcccgtctggcccaaaacacagtccgttattaacgagatggccctggcaggcgggaacaaatctgcctccatgcactgcttcctgtagtcttttagaaagtaactccaggacatcgaagtgcccagatttgactcctaagttctaggagactgtagcgcagggtctgtcaaccttagcactattggcatttggggctgggtaattctttcttgtgggggccgtcttgggtactgtaggaagctgagcagcattcctggcctccatccacaagatacctgtagcagtgtcctgccaacggtaacaatcaagtatgtcatcagacattgcccaatgtccccagggggcaacacccctctcttggacttcagggtcaagagaatctctgctggctaccccaggacttctcattatagatttcctggagcacgcagcagaaactttgcctagcccagtggttgtttccattatctgctgccaaagtgggatttgagggtgtccgggggagggggcatggggagggcagtatgctttcaaaaacccctcccaggccaggcgtggtggctcatgcctgtaatcacaggactttgggaggccgaggctggcagatcacttgaggctgggagttagagaccaacctggctaacatggcaaaacctcgtctctactaaaaatacaaaaatcagcccggcgtggtggcgggcatctgtaatcccatctactcgggaggctgaggcaggagaattacttgaacccaggaggcagaggctgcagtgagccgagatggcaccactgcactccagcttgttgacagaatgagaccctgtggaaaaaaaaaaaaaagccctcccatgccagaacagaggatggcagtctgtttcaataagacactgtgtccttggtgttggttctgattaagactcactgagatccagtgctcttgagctgggtctcagtcccctcccatgtcctgtgctctgccgccactgttttcattgttgtgttctcgttgtgattgttaagactcacactcctggctcagcagtggttttccagaaggcccaaagagcggtgccgggcaccccacgtcgcagtgtccgttccgggcttgggaagctggggaggtgggcagacctggtcgcatctcaccacacacacacacacacacacacacacacacgctgtcagaaactcggccgtcccccctacctctgagctctcaatgctgctaatctctgccaagtgtccctgtgctccagcaccttccttgaaggactgacgcccaccccacgctctttgcgaggttgtccaggctgtgtttgtcgcatgctcttcttctgtatagttctcatcttccaattttatgggattcaacaaaagcctattatgcttgtttgcattatggttacaatattaaaaagtggattcaa

SEQ ID NO: 159538 - DNA, 4462 bp, Homo sapiens
  Payload ID: 11222
  Gene Symbol: NOS1
  Gene Name: nitric oxide synthase 1 (neuronal)
  Uniprot ID: P29475
  ENST ID: ENST00000338101
  CDS Start-End: 6-4412
ttaccatggaggatcacatgttcggtgttcagcaaatccagcccaatgtcatttctgttcgtctcttcaagcgcaaagttgggggcctgggatttctggtgaaggagcgggtcagtaagccgcccgtgatcatctctgacctgattcgtgggggcgccgcagagcagagtggcctcatccaggccggagacatcattcttgcggtcaacggccggcccttggtggacctgagctatgacagcgccctggaggtactcagaggcattgcctctgagacccacgtggtcctcattctgaggggccctgaaggtttcaccacgcacctggagaccacctttacaggtgatgggacccccaagaccatccgggtgacacagcccctgggtccccccaccaaagccgtggatctgtcccaccagccaccggccggcaaagaacagcccctggcagtggatggggcctcgggtcccgggaatgggcctcagcatgcctacgatgatgggcaggaggctggctcactcccccatgccaacggcctggcccccaggcccccaggccaggaccccgcgaagaaagcaaccagagtcagcctccaaggcagaggggagaacaatgaactgctcaaggagatagagcctgtgctgagccttctcaccagtgggagcagaggggtcaagggaggggcacctgccaaggcagagatgaaagatatgggaatccaggtggacagagatttggacggcaagtcacacaaacctctgcccctcggcgtggagaacgaccgagtcttcaatgacctatgggggaagggcaatgtgcctgtcgtcctcaacaacccatattcagagaaggagcagccccccacctcaggaaaacagtcccccacaaagaatggcagcccctccaagtgtccacgcttcctcaaggtcaagaactgggagactgaggtggttctcactgacaccctccaccttaagagcacattggaaacgggatgcactgagtacatctgcatgggctccatcatgcatccttctcagcatgcaaggaggcctgaagacgtccgcacaaaaggacagctcttccctctcgccaaagagtttattgatcaatactattcatcaattaaaagatttggctccaaagcccacatggaaaggctggaagaggtgaacaaagagatcgacaccactagcacttaccagctcaaggacacagagctcatctatggggccaagcacgcctggcggaatgcctcgcgctgtgtgggcaggatccagtggtccaagctgcaggtattcgatgcccgtgactgcaccacggcccacgggatgttcaactacatctgtaaccatgtcaagtatgccaccaacaaagggaacctcaggtctgccatcaccatattcccccagaggacagacggcaagcacgacttccgagtctggaactcccagctcatccgctacgctggctacaagcagcctgacggctccaccctgggggacccagccaatgtgcagttcacagagatatgcatacagcagggctggaaaccgcctagaggccgcttcgatgtcctgccgctcctgcttcaggccaacggcaatgaccctgagctcttccagattcctccagagctggtgttggaagttcccatcaggcaccccaagtttgagtggttcaaggacctggggctgaagtggtacggcctccccgccgtgtccaacatgctcctagagattggcggcctggagttcagcgcctgtcccttcagtggctggtacatgggcacagagattggtgtccgcgactactgtgacaactcccgctacaatatcctggaggaagtggccaagaagatgaacttagacatgaggaagacgtcctccctgtggaaggaccaggcgctggtggagatcaatatcgcggttctctatagcttccagagtgacaaagtgaccattgttgaccatcactccgccaccgagtccttcattaagcacatggagaatgagtaccgctgccgggggggctgccctgccgactgggtgtggatcgtgccccccatgtccggaagcatcacccctgtgttccaccaggagatgctcaactaccggctcaccccctccttcgaataccagcctgatccctggaacacgcatgtctggaaaggcaccaacgggacccccacaaagcggcgagccattggcttcaagaagctagcagaagctgtcaagttctcggccaagctgatggggcaggctatggccaagagggtgaaagcgaccatcctctatgccacagagacaggcaaatcgcaagcttatgccaagaccttgtgtgagatcttcaaacacgcctttgatgccaaggtgatgtccatggaagaatatgacattgtgcacctggaacatgaaactctggtccttgtggtcaccagcacctttggcaatggagatccccctgagaatggggagaaattcggctgtgctttgatggaaatgaggcaccccaactctgtgcaggaagaaaggaagtacccggaacccttgcgtttctttccccgtaaagggcctcccctccccaatggtgacacagaagtccacggtctggctgcagcccgtgacagccagcacaggagctacaaggtccgattcaacagcgtctcctcctactctgactcccaaaaatcatcaggcgatgggcccgacctcagagacaactttgagagtgctggacccctggccaatgtgaggttctcagtttttggcctcggctcacgagcataccctcacttttgcgccttcggacacgctgtggacaccctcctggaagaactgggaggggagaggatcctgaagatgagggaaggggatgagctctgtgggcaggaagaggctttcaggacctgggccaagaaggtcttcaaggcagcctgtgatgtcttctgtgtgggagatgatgtcaacattgaaaaggccaacaattccctcatcagcaatgatcgcagctggaagagaaacaagttccgcctcacctttgtggccgaagctccagaactcacacaaggtctatccaatgtccacaaaaagcgagtctcagctgcccggctccttagccgtcaaaacctccagagccctaaatccagtcggtcaactatcttcgtgcgtctccacaccaacgggagccaggagctgcagtaccagcctggggaccacctgggtgtcttccctggcaaccacgaggacctcgtgaatgccctgatcgagcggctggaggacgcgccgcctgtcaaccagatggtgaaagtggaactgctggaggagcggaacacggctttaggtgtcatcagtaactggacagacgagctccgcctcccgccctgcaccatcttccaggccttcaagtactacctggacatcaccacgccaccaacgcctctgcagctgcagcagtttgcctccctagctaccagcgagaaggagaagcagcgtctgctggtcctcagcaagggtttgcaggagtacgaggaatggaaatggggcaagaaccccaccatcgtggaggtgctggaggagttcccatctatccagatgccggccaccctgctcctgacccagctgtccctgctgcagccccgctactattccatcagctcctccccagacatgtaccctgatgaagtgcacctcactgtggccatcgtttcctaccgcactcgagatggagaaggaccaattcaccacggcgtatgctcctcctggctcaaccggatacaggctgacgaactggtcccctgtttcgtgagaggagcacccagcttccacctgccccggaacccccaagtcccctgcatcctcgttggaccaggcaccggcattgcccctttccgaagcttctggcaacagcggcaatttgatatccaacacaaaggaatgaacccctgccccatggtcctggtcttcgggtgccggcaatccaagatagatcatatctacagggaagagaccctgcaggccaagaacaagggggtcttcagagagctgtacacggcttactcccgggagccagacaaaccaaagaagtacgtgcaggacatcctgcaggagcagctggcggagtctgtgtaccgagccctgaaggagcaagggggccacatatacgtctgtggggacgtcaccatggctgctgatgtcctcaaagccatccagcgcatcatgacccagcaggggaagctctcggcagaggacgccggcgtattcatcagccggatgagggatgacaaccgataccatgaggatatttttggagtcaccctgcgaacgtacgaagtgaccaaccgccttagatctgagtccattgccttcattgaagagagcaaaaaagacaccgatgaggttttcagctcctaactggaccctcttgcccagccggctgcaagttttgtaagcgcggacagaca

SEQ ID NO: 159539 - DNA, 4340 bp, Homo sapiens
  Payload ID: 11222
  Gene Symbol: NOS1
  Gene Name: nitric oxide synthase 1 (neuronal)
  ENST ID: ENST00000344089
  CDS Start-End: 11-4312
gctagttaccatggaggatcacatgttcggtgttcagcaaatccagcccaatgtcatttctgttcgtctcttcaagcgcaaagttgggggcctgggatttctggtgaaggagcgggtcagtaagccgcccgtgatcatctctgacctgattcgtgggggcgccgcagagcagagtggcctcatccaggccggagacatcattcttgcggtcaacggccggcccttggtggacctgagctatgacagcgccctggaggtactcagaggcattgcctctgagacccacgtggtcctcattctgaggggccctgaaggtttcaccacgcacctggagaccacctttacaggtgatgggacccccaagaccatccgggtgacacagcccctgggtccccccaccaaagccgtggatctgtcccaccagccaccggccggcaaagaacagcccctggcagtggatggggcctcgggtcccgggaatgggcctcagcatgcctacgatgatgggcaggaggctggctcactcccccatgccaacggctggccccaggcccccaggcaggaccccgcgaagaaagcaaccagagtcagcctccaaggcagaggggagaacaatgaactgctcaaggagatagagcctgtgctgagccttctcaccagtgggagcagaggggtcaagggaggggcacctgccaaggcagagatgaaagatatgggaatccaggtggacagagatttggacggcaagtcacacaaacctctgcccctcggcgtggagaacgaccgagtcttcaatgacctatgggggaagggcaatgtgcctgtcgtcctcaacaacccatattcagagaaggagcagccccccacctcaggaaaacagtcccccacaaagaatggcagcccctccaagtgtccacgcttcctcaaggtcaagaactgggagactgaggtggttctcactgacaccctccaccttaagagcacattggaaacgggatgcactgagtacatctgcatgggctccatcatgcatccttctcagcatgcaaggaggcctgaagacgtccgcacaaaaggacagctcttccctctcgccaaagagtttattgatcaatactattcatcaattaaaagatttggctccaaagcccacatggaaaggctggaagaggtgaacaaagagatcgacaccactagcacttaccagctcaaggacacagagctcatctatggggccaagcacgcctggcggaatgcctcgcgctgtgtgggcaggatccagtggtccaagctgcaggtattcgatgcccgtgactgcaccacggcccacgggatgttcaactacatctgtaaccatgtcaagtatgccaccaacaaagggaacctcaggtctgccatcaccatattcccccagaggacagacggcaagcacgacttccgagtctggaactcccagctcatccgctacgctggctacaagcagcctgacggctccaccctgggggacccagccaatgtgcagttcacagagatatgcatacagcagggctggaaaccgcctagaggccgcttcgatgtcctgccgctcctgcttcaggccaacggcaatgaccctgagctcttccagattcctccagagctggtgttggaagttcccatcaggcaccccaagtttgagtggttcaaggacctggggctgaagtggtacggcctccccgccgtgtccaacatgctcctagagattggcggcctggagttcagcgcctgtcccttcagtggctggtacatgggcacagagattggtgtccgcgactactgtgacaactcccgctacaatatcctggaggaagtggccaagaagatgaacttagacatgaggaagacgtcctccctgtggaaggaccaggcgctggtggagatcaatatcgcggttctctatagcttccagagtgacaaagtgaccattgttgaccatcactccgccaccgagtccttcattaagcacatggagaatgagtaccgctgccgggggggctgccctgccgactgggtgtggatcgtgccccccatgtccggaagcatcacccctgtgttccaccaggagatgctcaactaccggctcaccccctccttcgaataccagcctgatccctggaacacgcatgtctggaaaggcaccaacgggacccccacaaagcggcgagccattggcttcaagaagctagcagaagctgtcaagttctcggccaagctgatggggcaggctatggccaagagggtgaaagcgaccatcctctatgccacagagacaggcaaatcgcaagcttatgccaagaccttgtgtgagatcttcaaacacgcctttgatgccaaggtgatgtccatggaagaatatgacattgtgcacctggaacatgaaactctggtccttgtggtcaccagcacctttggcaatggagatccccctgagaatggggagaaattcggctgtgctttgatggaaatgaggcaccccaactctgtgcaggaagaaaggaagagctacaaggtccgattcaacagcgtctcctcctactctgactcccaaaaatcatcaggcgatgggcccgacctcagagacaactttgagagtgctggacccctggccaatgtgaggttctcagtttttggcctcggctcacgagcataccctcacttttgcgccttcggacacgctgtggacaccctcctggaagaactgggaggggagaggatcctgaagatgagggaaggggatgagctctgtgggcaggaagaggctttcaggacctgggccaagaaggtcttcaaggcagcctgtgatgtcttctgtgtgggagatgatgtcaacattgaaaaggccaacaattccctcatcagcaatgatcgcagctggaagagaaacaagttccgcctcacctttgtggccgaagctccagaactcacacaaggtctatccaatgtccacaaaaagcgagtctcagctgcccggctccttagccgtcaaaacctccagagccctaaatccagtcggtcaactatcttcgtgcgtctccacaccaacgggagccaggagctgcagtaccagcctggggaccacctgggtgtcttccctggcaaccacgaggacctcgtgaatgccctgatcgagcggctggaggacgcgccgcctgtcaaccagatggtgaaagtggaactgctggaggagcggaacacggctttaggtgtcatcagtaactggacagacgagctccgcctcccgccctgcaccatcttccaggccttcaagtactacctggacatcaccacgccaccaacgcctctgcagctgcagcagtttgcctccctagctaccagcgagaaggagaagcagcgtctgctggtcctcagcaagggtttgcaggagtacgaggaatggaaatggggcaagaaccccaccatcgtggaggtgctggaggagttcccatctatccagatgccggccaccctgctcctgacccagctgtccctgctgcagccccgctactattccatcagctcctccccagacatgtaccctgatgaagtgcacctcactgtggccatcgtttcctaccgcactcgagatggagaaggaccaattcaccacggcgtatgctcctcctggctcaaccggatacaggctgacgaactggtcccctgtttcgtgagaggagcacccagcttccacctgccccggaacccccaagtcccctgcatcctcgttggaccaggcaccggcattgcccctttccgaagcttctggcaacagcggcaatttgatatccaacacaaaggaatgaacccctgccccatggtcctggtcttcgggtgccggcaatccaagatagatcatatctacagggaagagaccctgcaggccaagaacaagggggtcttcagagagctgtacacggcttactcccgggagccagacaaaccaaagaagtacgtgcaggacatcctgcaggagcagctggcggagtctgtgtaccgagccctgaaggagcaagggggccacatatacgtctgtggggacgtcaccatggctgctgatgtcctcaaagccatccagcgcatcatgacccagcaggggaagctctcggcagaggacgccggcgtattcatcagccggatgagggatgacaaccgataccatgaggatatttttggagtcaccctgcgaacgtacgaagtgaccaaccgccttagatctgagtccattgccttcattgaagagagcaaaaaagacaccgatgaggttttcagctcctaactggaccctcttgcccagccggctgcaa

SEQ ID NO: 159540 - DNA, 12283 bp, Homo sapiens
  Payload ID: 11222
  Gene Symbol: NOS1
  Gene Name: nitric oxide synthase 1 (neuronal)
  Uniprot ID: P29475
  ENST ID: ENST00000618760
  CDS Start-End: 712-5118
ataaaagatgtatgctttggagcccagagcggctcttttaatgagggttgcgacgtctccctccccacacccataaaccagtcgggttggacgtcactgctaattcgtttcagtgatgataggataaaggagggacattaagaaataaattccccctcacgaccctcgctgagctcacggctcagtccctacatatttatgccgcgtttccagccgctgggtgaggagctacttagcgccgcggctcctccgaggggcggccgggcagcgagcagcggccgagcggacgggctcatgatgcctcagatctgatccgcatctaacaggctggcaatgaagatacccagagaatagttcacatctatcatgcgtcacttctagacacagccatcagacgcatctcctcccctttctgcctgaccttagggacacgtcccaccgcctctcttgacgtctgcctggtcaaccatcacttccttagagaataaggagagaggcggatgcaggaaatcatgccaccgacgggccaccagccatgagtgggtgacgctgagctgacgtcaaagacagagagggctgaagccttgtcagcacctgtcaccccggctcctgctctccgtgtagcctgaagcctggatcctcctggtgaaatcatcttggcctgatagcattgtgaggtcttcagacaggacccctcggaagctagttaccatggaggatcacatgttcggtgttcagcaaatccagcccaatgtcatttctgttcgtctcttcaagcgcaaagttgggggcctgggatttctggtgaaggagcgggtcagtaagccgcccgtgatcatctctgacctgattcgtgggggcgccgcagagcagagtggcctcatccaggccggagacatcattcttgcggtcaacggccggcccttggtggacctgagctatgacagcgccctggaggtactcagaggcattgcctctgagacccacgtggtcctcattctgaggggccctgaaggtttcaccacgcacctggagaccacctttacaggtgatgggacccccaagaccatccgggtgacacagcccctgggtccccccaccaaagccgtggatctgtcccaccagccaccggccggcaaagaacagcccctggcagtggatggggcctcgggtcccgggaatgggcctcagcatgcctacgatgatgggcaggaggctggctcactcccccatgccaacggcctggcccccaggcccccaggccaggaccccgcgaagaaagcaaccagagtcagcctccaaggcagaggggagaacaatgaactgctcaaggagatagagcctgtgctgagccttctcaccagtgggagcagaggggtcaagggaggggcacctgccaaggcagagatgaaagatatgggaatccaggtggacagagatttggacggcaagtcacacaaacctctgcccctcggcgtggagaacgaccgagtcttcaatgacctatgggggaagggcaatgtgcctgtcgtcctcaacaacccatattcagagaaggagcagccccccacctcaggaaaacagtcccccacaaagaatggcagcccctccaagtgtccacgcttcctcaaggtcaagaactgggagactgaggtggttctcactgacaccctccaccttaagagcacattggaaacgggatgcactgagtacatctgcatgggctccatcatgcatccttctcagcatgcaaggaggcctgaagacgtccgcacaaaaggacagctcttccctctcgccaaagagtttattgatcaatactattcatcaattaaaagatttggctccaaagcccacatggaaaggctggaagaggtgaacaaagagatcgacaccactagcacttaccagctcaaggacacagagctcatctatggggccaagcacgcctggcggaatgcctcgcgctgtgtgggcaggatccagtggtccaagctgcaggtattcgatgcccgtgactgcaccacggcccacgggatgttcaactacatctgtaaccatgtcaagtatgccaccaacaaagggaacctcaggtctgccatcaccatattcccccagaggacagacggcaagcacgacttccgagtctggaactcccagctcatccgctacgctggctacaagcagcctgacggctccaccctgggggacccagccaatgtgcagttcacagagatatgcatacagcagggctggaaaccgcctagaggccgcttcgatgtcctgccgctcctgcttcaggccaacggcaatgaccctgagctcttccagattcctccagagctggtgttggaagttcccatcaggcaccccaagtttgagtggttcaaggacctggggctgaagtggtacggcctccccgccgtgtccaacatgctcctagagattggcggcctggagttcagcgcctgtcccttcagtggctggtacatgggcacagagattggtgtccgcgactactgtgacaactcccgctacaatatcctggaggaagtggccaagaagatgaacttagacatgaggaagacgtcctccctgtggaaggaccaggcgctggtggagatcaatatcgcggttctctatagcttccagagtgacaaagtgaccattgttgaccatcactccgccaccgagtccttcattaagcacatggagaatgagtaccgctgccgggggggctgccctgccgactgggtgtggatcgtgccccccatgtccggaagcatcacccctgtgttccaccaggagatgctcaactaccggctcaccccctccttcgaataccagcctgatccctggaacacgcatgtctggaaaggcaccaacgggacccccacaaagcggcgagccattggcttcaagaagctagcagaagctgtcaagttctcggccaagctgatggggcaggctatggccaagagggtgaaagcgaccatcctctatgccacagagacaggcaaatcgcaagcttatgccaagaccttgtgtgagatcttcaaacacgcctttgatgccaaggtgatgtccatggaagaatatgacattgtgcacctggaacatgaaactctggtccttgtggtcaccagcacctttggcaatggagatccccctgagaatggggagaaattcggctgtgctttgatggaaatgaggcaccccaactctgtgcaggaagaaaggaagtacccggaacccttgcgtttctttccccgtaaagggcctcccctccccaatggtgacacagaagtccacggtctggctgcagcccgtgacagccagcacaggagctacaaggtccgattcaacagcgtctcctcctactctgactcccaaaaatcatcaggcgatgggcccgacctcagagacaactttgagagtgctggacccctggccaatgtgaggttctcagtttttggcctcggctcacgagcataccctcacttttgcgccttcggacacgctgtggacaccctcctggaagaactgggaggggagaggatcctgaagatgagggaaggggatgagctctgtgggcaggaagaggctttcaggacctgggccaagaaggtcttcaaggcagcctgtgatgtcttctgtgtgggagatgatgtcaacattgaaaaggccaacaattccctcatcagcaatgatcgcagctggaagagaaacaagttccgcctcacctttgtggccgaagctccagaactcacacaaggtctatccaatgtccacaaaaagcgagtctcagctgcccggctccttagccgtcaaaacctccagagccctaaatccagtcggtcaactatcttcgtgcgtctccacaccaacgggagccaggagctgcagtaccagcctggggaccacctgggtgtcttccctggcaaccacgaggacctcgtgaatgccctgatcgagcggctggaggacgcgccgcctgtcaaccagatggtgaaagtggaactgctggaggagcggaacacggctttaggtgtcatcagtaactggacagacgagctccgcctcccgccctgcaccatcttccaggccttcaagtactacctggacatcaccacgccaccaacgcctctgcagctgcagcagtttgcctccctagctaccagcgagaaggagaagcagcgtctgctggtcctcagcaagggtttgcaggagtacgaggaatggaaatggggcaagaaccccaccatcgtggaggtgctggaggagttcccatctatccagatgccggccaccctgctcctgacccagctgtccctgctgcagccccgctactattccatcagctcctccccagacatgtaccctgatgaagtgcacctcactgtggccatcgtttcctaccgcactcgagatggagaaggaccaattcaccacggcgtatgctcctcctggctcaaccggatacaggctgacgaactggtcccctgtttcgtgagaggagcacccagcttccacctgccccggaacccccaagtcccctgcatcctcgttggaccaggcaccggcattgcccctttccgaagcttctggcaacagcggcaatttgatatccaacacaaaggaatgaacccctgccccatggtcctggtcttcgggtgccggcaatccaagatagatcatatctacagggaagagaccctgcaggccaagaacaagggggtcttcagagagctgtacacggcttactcccgggagccagacaaaccaaagaagtacgtgcaggacatcctgcaggagcagctggcggagtctgtgtaccgagccctgaaggagcaagggggccacatatacgtctgtggggacgtcaccatggctgctgatgtcctcaaagccatccagcgcatcatgacccagcaggggaagctctcggcagaggacgccggcgtattcatcagccggatgagggatgacaaccgataccatgaggatatttttggagtcaccctgcgaacgtacgaagtgaccaaccgccttagatctgagtccattgccttcattgaagagagcaaaaaagacaccgatgaggttttcagctcctaactggaccctcttgcccagccggctgcaagttttgtaagcgcggacagacactgctgaacctttcctctgggaccccctgtggccctcgctctgcctcctgtccttgtcgctgtgccctggtttccctcctcgggcttctcgcccctcagtggtttcctcggccctcctgggtttactccttgagttttcctgctgcgatgcaatgcttttctaatctgcagtggctcttacaaaactctgttcccactccctctcttgccgacaagggcaactcacgggtgcatgaaaccactggaacatggccgtcgctgtgggggtttttttctctggggttcccctggaaaggctgcaggaactaggcacaagctctctgagccagtccctcagccactgaagtccccctttctccttttttatgatgacattttggttgtgcgtgcctgtgtgtgtgtgtgtgtgtgtgtgtgtgtgtgtgatgggccaggtctctgtccgtcctcttccctgcacaagtgtgtcgatcttagattgccactgctttcattgaagaccctcaatgccaagaaacgtgtccctggcccatattaatccctcgtgtgtccataattagggtccacgcccatgtacctgaaacatttggaagccccataattgttctagttagaaagggttcagggcatggggagaggagtgggaaattgattaaaggggctgtctcccaatgaaagaggcattcccagaatttgctgcatttagattttgataccagtgagcagagccctcatgtgacatgaacccatccaatggattgtgcaaatcccctccccaaacccacccataccagctagaatcacttgactttgccacatccattgactgaccccctcctccagcaatagcatccaaggggcctggaagttatgttgttcaaagaagcctggtggcaataaggatcttcccactttgccactggatgactttggatgggtcacttgtcctcagtttttcctagtcataatgtcatacgaacctaaagaatatgaatggattaaatgttaaagctttggtgcctggaaacaatatcaagtaacaatatgattattatttttttattcccccaaagcgggcttgctgcttcacccttggggatgaaataatggaagctggttaaagtggatgaggttggaaagagttgccataatgaggtcccacgtggcttcttcgataggagccacaacttggggtgggaagaacttgtccctcaggcttgttgccctctgcagttgatctccaaagttttaaacctgttaaattaattttgacaaataagttaccctcaactcagatcaaaaatgggcagccaagtcttcggtaggaattggagccggtgtaattcctccctaagaggcaacctgttgaatttactctctcagagtaaatggtgggaagggatccctttgtatacttttttaaatactacaaattagtgtcaggcagttcccagaaagagacaagaaatcctagtggcctcccagactgcagggtccccaaggatggaaagggaatgttctgctggttctaccctgtttgttgtgtcttgctatacagaaaaaccacatttcttttatatactgtacgtgggcatatcttgttgttcagtttgggtgtctgctaaagaggaagtgcactggccctctttgaaagggctttacagtgggggcaccaagaccccaaagggcccaggccaggagactgttaaagtgaaaaggcaatctatgactcaccttgctctgccatccctggcagcccccaccggtgtcctgttcctgccacatggagcttgacttcatgccagctataatctcccctgccttcctttaatcccaatttcccctgctcactcttccacagatataaagaacaaacacttagcatcccacactcaccccttctaatcctgaagggaagcccattctaaactcctttcctgcaaacccatttccagctcctagtagctttcctcccaaaggctttctttccaatcctttatagctttggagacgcctccccaattccccagggaaggaaactgttgtgtccaatccccattaaagacaaattgatcagtgcttcccactccaagtcaagctttatgcaggaatgcttttccatcagggaataaatacttagaagcgcttacaaggtgccaggcacctcctttctgcatgtgcctgcctttctagtagcagacagatggaaacattgtctcattttgtcaaggagtccaaagaaatgattataaaaccaggattcatccttcttctccagaaagatttttttttaagtaaacacctttcaatccccaacacaagctgcttcacaactccaggctagaaggcaggagagcgatctgatgtgtttctttcatttgccagaattcctgataccaaaagcctctctctctgttgagtaacctctcaaggaccagagtggagtccagattgttaggctcagatcaagggtggggaaatactgccctctcgtggtggcttttcatccaggcctcgtagccaaccgtttaagtgcaaaatagaattaagcaatgggtaagcaaaatagggttgacaagatatttgggggttattcgggttatggcccatttatttccctcttccccctgaattgaccagtagcagctccagccccatttcacaaaagtgagtttggccaggaggaatgagacgtctcctgaaataggaacaccggaacatcatgctcacctgccatcactatgcatccagttcccacagcttgtgtcgtgaaagagcagagagatgatgttaaactccttgggaggagagagggcttcttttggtttccctggagtgagacagccaggtgtctttcttttgcggggggacacttcagacccatcaatatggaattttgggagccgacctgagtgcaaatcctaattctgcccctgttggtgcagatggctgtgggcggctcacttgaccttttagagtctgcatacccacctgtataacaaggtggattgaatgagacaatgcccacgaaatgcccagttacagtacctggttcaaaacttactgcattttaatttttcacttaacttataacatgtcttgcttctccagtgtgtggaaggcaccgggcagtttgcagagataagcaaaacacagttcctctcgtgcagaaggttagaatctatttttttttttgacagagtcttgctctgtcacccaggctggcgtacagtggtacgatctcagctcactgcatcctctgcctcccccagttcaagtgattcttctgcctcggcctcctgagtaactgggactacaggcgcctaccaccacgcccagctaagttttgtatttttagtagagtcagggtttcaccatgttggccaggctggtcttgaattcctgacctcaaatgatccacgcacctcagcctcccaaagtgctggattacaggcatgagccaccacgcccagccaaaggttataatctgatggagagagacacccgtcttggaactgacataaatttctggggtttgagaaatgggcgggatttcactggtagcttctggaaggtaagagttgtccaggaattgggaagagtgagaggaaaggcacggacagggagcatgtaagataaattgaggctggctttggaaggctgaggagggtgagaaaaggtgggctgggaccagaccgtggggagaggtgagtggcattacaagaaatttaggctttattcagaaggcaacagggagtccctaagaatgtttttcaaaaagggacattaaggcgattggagttatacttggaaaagaaagttctggccacagtacagagcatggcccgttgagctgttgggggggttattgctgcaaccaaggcttgagtgagggaagaggcggatgtagtgataaagagactccaggaactgaatcagcgtacctggcaccccatccattgtagagggtgagaataaaggagaaattaaagcatcttgcaggctgggcgcggtagctcatgtctgtaatcccagcactttgggaggccgaggtgggtgtatcagttgaggtcaggagttggagaccagtcagccagttagtagaaaccctgactctactaagaaaatacaaaaattagctgggcatggtggcatgcgcctgtagtctcagctacctgggaggctgaggaaggaggatcgcttgagcccaggaggtggaggctgcagtgagccaagattgtaccactgcactccagcctgggtgacagagcaagactcttatctcaaaaaaaataaaataaaataaaataaaataaaacatcttgcccctagctgagagagaggtctctgaagagcaggctcagggaaaagatgagttttcagagctgatgtgatagtcagcttctctggagtcaacagggtgaatccttcccaagtccagccatgcccagatgcccggagggaaaactgacccccagccagtagacattggctaagaacacagaatcttctgaccaaacacgctttcagcagctgcctgctctggactttgaaagaggtcaggtcttgccctaagctcaaaacaagtgagaggtgtcctgacctagctcatagggcaaatggtcctaataggatgggcaatccagatgcctgagccccttcactccgacagcaccagcgcctaatgcagccttttcattcttgccattaggaaatctgtggacttctagcctgtgttttaaaccagccatgtttccttgtatatttccctacccgctgccccacatacccagcatgccgctgtggccaccatgtcctcaaagccttctgtctgtatcaggaatgtagtctgagactgccaggaagcaacaaggagagagaaacactaactagtcttcctttataacccattcatactctctggctgtccccaaccttcatagtctcctgcatccaaatgtcctctttggctcaaaaagtaggccaggcatggtggttcatgcctgtaatagcactttgggagactgaggtgggaggatcacttggggccaggagtttgagaccagcttgggcaacacagcgcaatctcgtctctactaaaaaaaaaaaaaaaaaaaaattagctgggcatgatggcatgctcctgtggtcccagctacttgggaggctgaggcaggaggatcacttggtcccaggagtttgaggcgacagtgagctaggatcgcaccactgcactccagcctgagtgacagagcaagaccctgtctctaaaaaaaattaaaatgaaagaccaggtgctgggattaaggaaacacaggtctgagggtctgagggaaggggcctgcctcccagggagtcaacatagatgttccccatgaacagggatttgactttggaggccaacctggcctggcctctgccctttatctcacactccctatccttggcccactgccagtccctgccttgtggcaaaggggccccaaaagaaaagctgcccttccccaaatgtaaggacccaggtacactttcacccgtggaaagcagtgtctgtcgagagtctgtttcctattaatacttatcaaagccatgtgcgagggaggtggtcagctgtcaatatgccttagtatgtttatatgagtttgttttgttctaaaatacccaaacagttctggtcaagcggggctatgcccgtctggcccaaaacacagtccgttattaacgagatggccctggcaggcgggaacaaatctgcctccatgcactgcttcctgtagtcttttagaaagtaactccaggacatcgaagtgcccagatttgactcctaagttctaggagactgtagcgcagggtctgtcaaccttagcactattggcatttggggctgggtaattctttcttgtgggggccgtcttgggtactgtaggaagctgagcagcattcctggcctccatccacaagatacctgtagcagtgtcctgccaacggtaacaatcaagtatgtcatcagacattgcccaatgtccccagggggcaacacccctctcttggacttcagggtcaagagaatctctgctggctaccccaggacttctcattatagatttcctggagcacgcagcagaaactttgcctagcccagtggttgtttccattatctgctgccaaagtgggatttgagggtgtccgggggagggggcatggggagggcagtatgctttcaaaaacccctcccaggccaggcgtggtggctcatgcctgtaatcacaggactttgggaggccgaggctggcagatcacttgaggctgggagttagagaccaacctggctaacatggcaaaacctcgtctctactaaaaatacaaaaatcagcccggcgtggtggcgggcatctgtaatcccatctactcgggaggctgaggcaggagaattacttgaacccaggaggcagaggctgcagtgagccgagatggcaccactgcactccagcttgttgacagaatgagaccctgtggaaaaaaaaaaaaaagccctcccatgccagaacagaggatggcagtctgtttcaataagacactgtgtccttggtgttggttctgattaagactcactgagatccagtgctcttgagctgggtctcagtcccctcccatgtcctgtgctctgccgccactgttttcattgttgtgttctcgttgtgattgttaagactcacactcctggctcagcagtggttttccagaaggcccaaagagcggtgccgggcaccccacgtcgcagtgtccgttccgggcttgggaagctggggaggtgggcagacctggtcgcatctcaccacacacacacacacacacacacacacacacgctgtcagaaactcggccgtcccccctacctctgagctctcaatgctgctaatctctgccaagtgtccctgtgctccagcaccttccttgaaggactgacgcccaccccacgctctttgcgaggttgtccaggctgtgtttgtcgcatgctcttcttctgtatagttctcatcttccaattttatgggattcaacaaaagcctattatgcttgtttgcattatggttacaatattaaaaagtggattc

SEQ ID NO: 159541 - DNA, 4931 bp, Homo sapiens
  Payload ID: 11223
  Gene Symbol: NOS1AP
  Gene Name: nitric oxide synthase 1 (neuronal) adaptor protein
  Uniprot ID: O75052
  ENST ID: ENST00000361897
  CDS Start-End: 403-1923
cgtcgccttttcttcttcgtcccgggcggtgcgttccactgctctggggccggcgccgcgcccagtcccgcttcgggccgcaagccccaccgctcccctccccgggcaggggcgccgcgcagcccgctcccgccgccacctcctcccctgccgccctcctagccggcaggaattgcgcgaccacagcgccgctcgcgtcgcccgcatcagctcagcccgctgccgctcggccctcggcaccgctccgggtccggccgccgcgcggccagggctccccctgcccagcgctcccaggccccgccacgcgtcgccgcgcccagctccagtctcccctccccggggtctcgccagccccttcctgcagccgccgcctccgaaggagcgggtccgccgcgggtaaccatgcctagcaaaaccaagtacaaccttgtggacgatgggcacgacctgcggatccccttgcacaacgaggacgccttccagcacggcatctgctttgaggccaagtacgtaggaagcctggacgtgccaaggcccaacagcagggtggagatcgtggctgccatgcgccggatacggtatgagtttaaagccaagaacatcaagaagaagaaagtgagcattatggtttcagtggatggagtgaaagtgattctgaagaagaagaaaaagcttcttttattgcagaaaaaggaatggacgtgggatgagagcaagatgctggtgatgcaggaccccatctacaggatcttctatgtctctcatgattcccaagacttgaagatcttcagctatatcgctcgagatggtgccagcaatatcttcaggtgtaacgtctttaaatccaagaagaagagccaagctatgagaatcgttcggacggtggggcaggcctttgaggtctgccacaagctgagcctgcagcacacgcagcagaatgcagatggccaggaagatggagagagcgagaggaacagcaacagctcaggagacccaggccgccagctcactggagccgagagggcctccacggccactgcagaggagactgacatcgatgcggtggaggtcccacttccagggaatgatgtcctggaattcagccgaggtgtgactgatctagatgctgtagggaaggaaggaggctctcacacaggctccaaggtttcgcacccccaggagcccatgctgacagcctcacccaggatgctgctcccttcttcttcctcgaagcctccaggcctgggcacagagacaccgctgtccactcaccaccagatgcagctcctccagcagctcctccagcagcagcagcagcagacacaagtggctgtggcccaggtacacttgctgaaggaccagttggctgctgaggctgcggcgcggctggaggcccaggctcgcgtgcatcagcttttgctgcagaacaaggacatgctccagcacatctccctgctggtcaagcaggtgcaagagctggaactgaagctgtcaggacagaacgccatgggctcccaggacagcttgctggagatcaccttccgctccggagccctgcccgtgctctgtgaccccacgacccctaagccagaggacctgcattcgccgccgctgggcgcgggcttggctgactttgcccaccctgcgggcagccccttaggtaggcgcgactgcttggtgaagctggagtgctttcgctttcttccgcccgaggacaccccgcccccagcgcagggcgaggcgctcctgggcggtctggagctcatcaagttccgagagtcaggcatcgcctcggagtacgagtccaacacggacgagagcgaggagcgcgactcgtggtcccaggaggagctgccgcgcctgctgaatgtcctgcagaggcaggaactgggcgacggcctggatgatgagatcgccgtgtaggtgccgagggcgaggagatggaggcggcggcgtggctggaggggccgtgtctggctgctgcccgggtaggggatgcccagtgaatgtgcactgccgaggagaatgccagccagggcccgggagagtgtgaggtttcaggaaagtattgagattctgctttggagggtaaagtggggaagaaatcggattcccagaggtgaatcagctcctctcctacttgtgactagagggtggtggaggtaaggccttccagagcccatggcttcaggagagggtctctctccaggactgccaggctgctggaggacctgcccctacctgctgcatcgtcaggctcccacgctttgtccgtgatgcccccctaccccctcactctccccgtctccatggtcccgaccaggaagggaagccatcggtaccttctcaggtactttgtttctggatatcacgatgctgcgagttgcctaaccctccccctacctttatgagaggaattccttctccaggcccttgctgagattgtagagattgagtgctctggaccgcaaaagccaggctagtccttgtagggtgagcatggaattggaatgtgtcacagtggataagcttttagaggaactgaatccaaacattttctccagccggacattgaatgttgctacaaagggagccttgaagctttaacatggttcaggcccttggtgtgagagcccagggggaggacagcttgtctgctgctccaaatcacttagatctgattcctgttttgaaagtcctgccctgccttcctcctgcctgtagcccagcccatctaaatggaagctgggaattgcccctcacctcccctgtgtcctgtccagctgaagcttttgcagcactttacctctctgaaagccccagaggaccagagcccccagccttacctctcaacctgtcccctccactgggcagtggtggtcagtttttactgcaaaaaaaaaaaaagaaaaaagagaaagaaaaaaaagaatgaatgcaagctgatagctgagactgtgagactgtttttgtccactcttctgaatcactgccacttgggtcagggaccacagccattgccacccttggcccatctctctgcgtgcgtgccttgagcacacatataaaaagtgccatgtgcaattgtcttatcttttatgatctaggctttgcctagggatcactactccttaacgggctggctggggcaatgaggaaaagctcctttgctcctgtaaggccataagtggctgttaacagattttcaaatgcctgaagagattgctgagacctgctagagtcatatgttcggggaattaagtctttatcctagacaacaaggtacagatgcaaactgcagtgttattggagggtcaatcggcaaggatatgattatcccaaaatggagttcatcgaccctagctttcctttagattatatataaataaaagtgcagtcctcttctaatggccacagttggttttcttgtagcccagaaagtccaaattaaaggaaataaattcagttttatgttagccttccttggtgcatcagggtgtcagtggaaataggatcaggtggtgtgtgtgtgtgtgttttgtgtgtgtgtgtacacatgtgtttatatatacatgtgtgagggaaagtgtgtacatatatgtaggattgtaaccagacggaaaagaacgaggatctccagggtgtttgaatcagcaacagatttgtgttttctaacatgcatttagttggagaggcatggttctgtttgttttgttttgatctaatttgccattggaaataggtacagttacacagagaaggaagaaccaggaaagtgagatccatgaaactaaatgagcagctgtcagaatccagtgtggctgagcctacctagcttatgaaatctaacccagggttccctgagtccaagaccacttagattattaagattttgaacgtccagaggagtgaaaagtctgttttctgacgtaagccggagctgaggataaagccagaggccagtggattaggtgtatggaatgtggatggagagggcttgtgtgggatgtggccagggagtgggtgaggaaggccgcttctaaatggcctgtaaaaacttgagattggatagacgaaaggaaatggagaaattaaagaattggagaaactagttatctgtgttgctgactttgggacccatccaagactcctgcccttggggtgttccatggtggtttcttcctgcctgggcgccaccctttccccagttcaggccctccctggaggactagtttgtgtattggtatcctccccagtggacccaaaccagcgcatacttggtgtgtggagatgggagacaaaggacagatctaggagccttgaaggatcaccagccaccgaccctccatcagggccaactgggcaggaaagggaacattgcagacctgatttcccgacgatgtcaccctgtcctccctccttgcttcttgctctgctaactcaactctgccttcctctttttcattcttctactctgccctatatggaggacaaatggacaccaggggtgctaaccttattggtgcctgccccagcctaccccaggtgccagcagactctcgtgcacaggaggctcccacagttatggagccaggaaagaatttctctgcactggatggactgtatattgagattaaaaattatattccttatattcctgcttatatcaatgctctctctgtaaaacctcttcctagcctcatttctctcaactgatcttgtttaggcgttgtattccttttatttactctttgcttgactgcttcctcctaaccctctacccactagcactctacttcctaaagctgttgtgtcattaactctgttggatcaactctctgggaaaagattctgttaatgtaagtgcacttactccctggatgttgtcactagtctagtggcttttgctaaataaacctttcttatttcta

SEQ ID NO: 159542 - DNA, 1732 bp, Homo sapiens
  Payload ID: 11223
  Gene Symbol: NOS1AP
  Gene Name: nitric oxide synthase 1 (neuronal) adaptor protein
  ENST ID: ENST00000430120
  CDS Start-End: 89-1138
gcccagctccagtctcccctccccggggtctcgccagccccttcctgcagccgccgcctccgaaggagcgggtccgccgcgggtaaccatgcctagcaaaaccaagtacaaccttgtggacgatgggcacgacctgcggatccccttgcacaacgaggacgccttccagcacggcatctgctttgaggccaagtacgtaggaagcctggacgtgccaaggcccaacagcagggtggagatcgtggctgccatgcgccggatacggtatgagtttaaagccaagaacatcaagaagaagaaagtgagcattatggtttcagtggatggagtgaaagtgattctgaagaagaagaaaaagaaaaaggaatggacgtgggatgagagcaagatgctggtgatgcaggaccccatctacaggatcttctatgtctctcatgattcccaagacttgaagatcttcagctatatcgctcgagatggtgccagcaatatcttcaggtgtaacgtctttaaatccaagaagaagagccaagctatgagaatcgttcggacggtggggcaggcctttgaggtctgccacaagctgagcctgcagcacacgcagcagaatgcagatggccaggaagatggagagagcgagaggaacagcaacagctcaggagacccaggccgccagctcactggagccgagagggcctccacggccactgcagaggagactgacatcgatgcggtggaggtcccacttccagggaatgatgtcctggaattcagccgaggtgtgactgatctagatgctgtagggaaggaaggaggctctcacacaggctccaaggtttcgcacccccaggagcccatgctgacagcctcacccaggatgctgctcccttcttcttcctcgaagcctccaggcctgggcacagagacaccgctgtccactcaccaccagatgcagctcctccagcagctcctccagcagcagcagcagcagacacaagtggctgtggcccagtgtgtggtggggcaaattgctctggttctctccactgccatttccatgtgcctgctactccctaacttcagcctggccctgccctcacttctgatggaggagctggagtccaggtacacttgctgaaggaccagttggctgctgaggctgcggcgcggctggaggcccaggctcgcgtgcatcagcttttgctgcagaacaaggacatgctccagcacatctccctgctggtcaagcaggtgcaagagctggaactgaagctgtcaggacagaacgccatgggctcccaggacagcttgctggagatcaccttccgctccggagccctgcccgtgctctgtgaccccacgacccctaagccagaggacctgcattcgccgccgctgggcgcgggcttggctgactttgcccaccctgcgggcagccccttaggtaggcgcgactgcttggtgaagctggagtgctttcgctttcttccgcccgaggacaccccgcccccagcgcagggcgaggcgctcctgggcggtctggagctcatcaagttccgagagtcaggcatcgcctcggagtacgagtccaacacggacgagagcgaggagcgcgactcgtggtcccaggaggagctgccgcgcctgctgaatgtcctgcagaggcaggaactgggcgacggcctggatgatgagatcgccgtgtaggtgccgagggcgaggagatggaggc

SEQ ID NO: 159543 - DNA, 2894 bp, Homo sapiens
  Payload ID: 11223
  Gene Symbol: NOS1AP
  Gene Name: nitric oxide synthase 1 (neuronal) adaptor protein
  Uniprot ID: O75052
  ENST ID: ENST00000530878
  CDS Start-End: 405-1910
accgtcgccttttcttcttcgtcccgggcggtgcgttccactgctctggggccggcgccgcgcccagtcccgcttcgggccgcaagccccaccgctcccctccccgggcaggggcgccgcgcagcccgctcccgccgccacctcctcccctgccgccctcctagccggcaggaattgcgcgaccacagcgccgctcgcgtcgcccgcatcagctcagcccgctgccgctcggccctcggcaccgctccgggtccggccgccgcgcggccagggctccccctgcccagcgctcccaggccccgccacgcgtcgccgcgcccagctccagtctcccctccccggggtctcgccagccccttcctgcagccgccgcctccgaaggagcgggtccgccgcgggtaaccatgcctagcaaaaccaagtacaaccttgtggacgatgggcacgacctgcggatccccttgcacaacgaggacgccttccagcacggcatctgctttgaggccaagtacgtaggaagcctggacgtgccaaggcccaacagcagggtggagatcgtggctgccatgcgccggatacggtatgagtttaaagccaagaacatcaagaagaagaaagtgagcattatggtttcagtggatggagtgaaagtgattctgaagaagaagaaaaagaaaaaggaatggacgtgggatgagagcaagatgctggtgatgcaggaccccatctacaggatcttctatgtctctcatgattcccaagacttgaagatcttcagctatatcgctcgagatggtgccagcaatatcttcaggtgtaacgtctttaaatccaagaagaagagccaagctatgagaatcgttcggacggtggggcaggcctttgaggtctgccacaagctgagcctgcagcacacgcagcagaatgcagatggccaggaagatggagagagcgagaggaacagcaacagctcaggagacccaggccgccagctcactggagccgagagggcctccacggccactgcagaggagactgacatcgatgcggtggaggtcccacttccagggaatgatgtcctggaattcagccgaggtgtgactgatctagatgctgtagggaaggaaggaggctctcacacaggctccaaggtttcgcacccccaggagcccatgctgacagcctcacccaggatgctgctcccttcttcttcctcgaagcctccaggcctgggcacagagacaccgctgtccactcaccaccagatgcagctcctccagcagctcctccagcagcagcagcagcagacacaagtggctgtggcccaggtacacttgctgaaggaccagttggctgctgaggctgcggcgcggctggaggcccaggctcgcgtgcatcagcttttgctgcagaacaaggacatgctccagcacatctccctgctggtcaagcaggtgcaagagctggaactgaagctgtcaggacagaacgccatgggctcccaggacagcttgctggagatcaccttccgctccggagccctgcccgtgctctgtgaccccacgacccctaagccagaggacctgcattcgccgccgctgggcgcgggcttggctgactttgcccaccctgcgggcagccccttaggtaggcgcgactgcttggtgaagctggagtgctttcgctttcttccgcccgaggacaccccgcccccagcgcagggcgaggcgctcctgggcggtctggagctcatcaagttccgagagtcaggcatcgcctcggagtacgagtccaacacggacgagagcgaggagcgcgactcgtggtcccaggaggagctgccgcgcctgctgaatgtcctgcagaggcaggaactgggcgacggcctggatgatgagatcgccgtgtaggtgccgagggcgaggagatggaggcggcggcgtggctggaggggccgtgtctggctgctgcccgggtaggggatgcccagtgaatgtgcactgccgaggagaatgccagccagggcccgggagagtgtgaggtttcaggaaagtattgagattctgctttggagggtaaagtggggaagaaatcggattcccagaggtgaatcagctcctctcctacttgtgactagagggtggtggaggtaaggccttccagagcccatggcttcaggagagggtctctctccaggactgccaggctgctggaggacctgcccctacctgctgcatcgtcaggctcccacgctttgtccgtgatgcccccctaccccctcactctccccgtctccatggtcccgaccaggaagggaagccatcggtaccttctcaggtactttgtttctggatatcacgatgctgcgagttgcctaaccctccccctacctttatgagaggaattccttctccaggcccttgctgagattgtagagattgagtgctctggaccgcaaaagccaggctagtccttgtagggtgagcatggaattggaatgtgtcacagtggataagcttttagaggaactgaatccaaacattttctccagccggacattgaatgttgctacaaagggagccttgaagctttaacatggttcaggcccttggtgtgagagcccagggggaggacagcttgtctgctgctccaaatcacttagatctgattcctgttttgaaagtcctgccctgccttcctcctgcctgtagcccagcccatctaaatggaagctgggaattgcccctcacctcccctgtgtcctgtccagctgaagcttttgcagcactttacctctctgaaagccccagaggaccagagcccccagccttacctctcaacctgtcccctccactgggcagtggtggtcagtttttactgcaaaaaaaaaaaaa

SEQ ID NO: 159544 - DNA, 5559 bp, Homo sapiens
  Payload ID: 11223
  Gene Symbol: NOS1AP
  Gene Name: nitric oxide synthase 1 (neuronal) adaptor protein
  Uniprot ID: O75052
  ENST ID: ENST00000493151
  CDS Start-End: 2368-3003
ctatgaccaaatgtatggggctttttcccacacaccaagcaagcaagcagttctgcagagggcacacagtgtcctctaactcagtttgattctgatactatctacctggaaacagcatcagatcccacagtttgagggctcaatcccacaagactttcccccatttcagacaccaatcacaagtaatagtttgtcacctacacctctgaccaagtggctataaattggtgttcccactaccctctccttggactcaactgatttgctagagcaactgacagaactcaggaaaacacctacatttactggtttattttaaaggatattataagggataccaatgaacaccagatggaagagatgcatagggcagggtctgtgggaagggtggcagagctcccatgccctcccaacgtgcaccaccctccaggaacctctaaatgttcagctgcccggcagctccccacacccagtccttttgagtttttaatggaggctttattatgtaggcatgattgattacatcattggccactggtgattagtttaacttttagcccctcatctcctggaggttggggcgtgggactgaaaaatcctatcctctaatcataccttggtctgtcctgtgagcagcccccatcccgaagcttccaggggttccccaaccactaatcatctaataagcatacaaaaaacactcttaccactctggagatctcaagggtttggggagctatatgtcaggaaacagggatgaagaccaaacatgtatttcactgtatcacacctgttctcacccctccccagatcttctctcaattaatatgagacaaaaaaatgagtctgacttcttgaccaaaatatcagttctgtccttagcagctttatggaggacagatttagtttaaattccttaggcattatgcccctgtggctccactcaatcagaaatagggtcaacggcaaggtcagggcctccaatctgggcaagagggaggcagccacggtatccacaagtgtaattctctgagtgctggttgctgggaggggcacaccctgggccagcaagtcacttggccaagggtggccaactgtgaggtagcactgccctttactccctaaaaaaatgtgaatctctttggagcaaactcctcttcagaaatttgagcacttgttttctgagcaagggaatcagctaatgcttttgactccccatccatcttcctgcatcctcgtcccacctctcctgcccccactcacctggctctgtctttacccacaccatggttttggtacaagaacacccttttccccataagctacattggtccaggccataaaaattcattagttccctttcttcaggggccttctgaaatgctccctggagaactctttattcacttctttgcacaagaatcacatatgtgtgaacactggtattggccttctaactcagtttcttcaaaccagggtcctggtctggttgcccctgtctcctcccactgagttttatctccacataagtattgctcaccaagaacagagctgttgacaccactgggcctcaagcatgctgaatgcattgctgccaactgctctgccttaagaaggttggaaactgatgagggtgccacaaattgttcacctcagcccttctgggctggttggaggaggccctctcatgaatcagtcagcaaatgtttgacccctaccaggtggtcctggtaatatgtggtatgaatcatggtcctagatgtctgccatagcaaataaaaaaggaagacagggaaagaagctgtcgcctacagagtggcttgatgacagctgcctcactaatttaaaaagccatgtgtagtgcttcctatttctcactatgtttgggtgagtgggagagggagaaagattatatgggcttcgttgtgacactgttcttagccagtgggtcaatagatgagttttggttttgttttttagaagacaggatgagaagagagtgcccccttccacctccaacatggcatgccatgctaggtgctgaaggagttctctaagcagggatggagcaccgtgcgtgtgtgtgtgtatatgtgcacgtgtgtgtgtacgtgtgtgtgtgtggcaggtctagagggtcgatggctctttcctgcctcttgcccttggtatgggtaccttagtgatgcatcatggccctcccttaggacacacagcttcgcagtgccagtgaacccactccttttggctcctcctctggaatgataagcccagatgcccatgctgcccgtgaagggcttcttcttgaactgaatgtggagggcatctctggtcccggccatctgccagtgactctcatgtgcattcatgtccctctcttctctctgtcctgtcttctctgccgctgcctcttctctgcaggtacacttgctgaaggaccagttggctgctgaggctgcggcgcggctggaggcccaggctcgcgtgcatcagcttttgctgcagaacaaggacatgctccagcacatctccctgctggtcaagcaggtgcaagagctggaactgaagctgtcaggacagaacgccatgggctcccaggacagcttgctggagatcaccttccgctccggagccctgcccgtgctctgtgaccccacgacccctaagccagaggacctgcattcgccgccgctgggcgcgggcttggctgactttgcccaccctgcgggcagccccttaggtaggcgcgactgcttggtgaagctggagtgctttcgctttcttccgcccgaggacaccccgcccccagcgcagggcgaggcgctcctgggcggtctggagctcatcaagttccgagagtcaggcatcgcctcggagtacgagtccaacacggacgagagcgaggagcgcgactcgtggtcccaggaggagctgccgcgcctgctgaatgtcctgcagaggcaggaactgggcgacggcctggatgatgagatcgccgtgtaggtgccgagggcgaggagatggaggcggcggcgtggctggaggggccgtgtctggctgctgcccgggtaggggatgcccagtgaatgtgcactgccgaggagaatgccagccagggcccgggagagtgtgaggtttcaggaaagtattgagattctgctttggagggtaaagtggggaagaaatcggattcccagaggtgaatcagctcctctcctacttgtgactagagggtggtggaggtaaggccttccagagcccatggcttcaggagagggtctctctccaggactgccaggctgctggaggacctgcccctacctgctgcatcgtcaggctcccacgctttgtccgtgatgcccccctaccccctcactctccccgtctccatggtcccgaccaggaagggaagccatcggtaccttctcaggtactttgtttctggatatcacgatgctgcgagttgcctaaccctccccctacctttatgagaggaattccttctccaggcccttgctgagattgtagagattgagtgctctggaccgcaaaagccaggctagtccttgtagggtgagcatggaattggaatgtgtcacagtggataagcttttagaggaactgaatccaaacattttctccagccggacattgaatgttgctacaaagggagccttgaagctttaacatggttcaggcccttggtgtgagagcccagggggaggacagcttgtctgctgctccaaatcacttagatctgattcctgttttgaaagtcctgccctgccttcctcctgcctgtagcccagcccatctaaatggaagctgggaattgcccctcacctcccctgtgtcctgtccagctgaagcttttgcagcactttacctctctgaaagccccagaggaccagagcccccagccttacctctcaacctgtcccctccactgggcagtggtggtcagtttttactgcaaaaaaaaaaaaagaaaaaagagaaagaaaaaaaagaatgaatgcaagctgatagctgagactgtgagactgtttttgtccactcttctgaatcactgccacttgggtcagggaccacagccattgccacccttggcccatctctctgcgtgcgtgccttgagcacacatataaaaagtgccatgtgcaattgtcttatcttttatgatctaggctttgcctagggatcactactccttaacgggctggctggggcaatgaggaaaagctcctttgctcctgtaaggccataagtggctgttaacagattttcaaatgcctgaagagattgctgagacctgctagagtcatatgttcggggaattaagtctttatcctagacaacaaggtacagatgcaaactgcagtgttattggagggtcaatcggcaaggatatgattatcccaaaatggagttcatcgaccctagctttcctttagattatatataaataaaagtgcagtcctcttctaatggccacagttggttttcttgtagcccagaaagtccaaattaaaggaaataaattcagttttatgttagccttccttggtgcatcagggtgtcagtggaaataggatcaggtggtgtgtgtgtgtgtgttttgtgtgtgtgtgtacacatgtgtttatatatacatgtgtgagggaaagtgtgtacatatatgtaggattgtaaccagacggaaaagaacgaggatctccagggtgtttgaatcagcaacagatttgtgttttctaacatgcatttagttggagaggcatggttctgtttgttttgttttgatctaatttgccattggaaataggtacagttacacagagaaggaagaaccaggaaagtgagatccatgaaactaaatgagcagctgtcagaatccagtgtggctgagcctacctagcttatgaaatctaacccagggttccctgagtccaagaccacttagattattaagattttgaacgtccagaggagtgaaaagtctgttttctgacgtaagccggagctgaggataaagccagaggccagtggattaggtgtatggaatgtggatggagagggcttgtgtgggatgtggccagggagtgggtgaggaaggccgcttctaaatggcctgtaaaaacttgagattggatagacgaaaggaaatggagaaattaaagaattggagaaactagttatctgtgttgctgactttgggacccatccaagactcctgcccttggggtgttccatggtggtttcttcctgcctgggcgccaccctttccccagttcaggccctccctggaggactagtttgtgtattggtatcctccccagtggacccaaaccagcgcatacttggtgtgtggagatgggagacaaaggacagatctaggagccttgaaggatcaccagccaccgaccctccatcagggccaactgggcaggaaagggaacattgcagacctgatttcccgacgatgtcaccctgtcctccctccttgcttcttgctctgctaactcaactctgccttcctctttttcattcttctactctgcc

SEQ ID NO: 159545 - DNA, 724 bp, Homo sapiens
  Payload ID: 11223
  Gene Symbol: NOS1AP
  Gene Name: nitric oxide synthase 1 (neuronal) adaptor protein
  ENST ID: ENST00000464284
  CDS Start-End: 482-724
tagtacagttcagtattgctatttaaagatttctcctctacctgctgccacttctgtttgttcaggaacaaggaattggttatttatgcttcgcaatcatgtatgctgtagttagaggaacagtgctaacaaaactccgcatccccaccccaggccctctatttagcatatgtccctgtggcttctcccagtccccagcacgctggcatgcactgcccaagtccctgccatgtgcatgctgagacagcggcgcctgcctctgcttctgtgtccagtgtgtggtggggcaaattgctctggttctctccactgccatttccatgtgcctgctactccctaacttcagcctggccctgccctcacttctgatggaggagctggagtccaggtacacttgctgaaggaccagttggctgctgaggctgcggcgcggctggaggcccaggctcgcgtgcatcagcttttgctgcagaacaaggacatgctccagcacatctccctgctggtcaagcaggtgcaagagctggaactgaagctgtcaggacagaacgccatgggctcccaggacagcttgctggagatcaccttccgctccggagccctgcccgtgctctgtgaccccacgacccctaagccagaggacctgcattcgccgccgctgggcgcgggcttggctgactttgcccaccctgcgggcagccccttaggtaggcgcgactgcttg

SEQ ID NO: 159546 - DNA, 4176 bp, Homo sapiens
  Payload ID: 11224
  Gene Symbol: NOS2
  Gene Name: nitric oxide synthase 2, inducible
  Uniprot ID: P35228
  ENST ID: ENST00000313735
  CDS Start-End: 235-3696
tccggccgcagagaactcagcctcattcctgctttaaaatctctcggccacctttgatgaggggactgggcagttctagacagtcccgaagttctcaaggcacaggtctcttcctggtttgactgtccttaccccggggaggcagtgcagccagctgcaagccccacagtgaagaacatctgagctcaaatccagataagtgacataagtgacctgctttgtaaagccatagagatggcctgtccttggaaatttctgttcaagaccaaattccaccagtatgcaatgaatggggaaaaagacatcaacaacaatgtggagaaagccccctgtgccacctccagtccagtgacacaggatgaccttcagtatcacaacctcagcaagcagcagaatgagtccccgcagcccctcgtggagacgggaaagaagtctccagaatctctggtcaagctggatgcaaccccattgtcctccccacggcatgtgaggatcaaaaactggggcagcgggatgactttccaagacacacttcaccataaggccaaagggattttaacttgcaggtccaaatcttgcctggggtccattatgactcccaaaagtttgaccagaggacccagggacaagcctacccctccagatgagcttctacctcaagctatcgaatttgtcaaccaatattacggctccttcaaagaggcaaaaatagaggaacatctggccagggtggaagcggtaacaaaggagatagaaacaacaggaacctaccaactgacgggagatgagctcatcttcgccaccaagcaggcctggcgcaatgccccacgctgcattgggaggatccagtggtccaacctgcaggtcttcgatgcccgcagctgttccactgcccgggaaatgtttgaacacatctgcagacacgtgcgttactccaccaacaatggcaacatcaggtcggccatcaccgtgttcccccagcggagtgatggcaagcacgacttccgggtgtggaatgctcagctcatccgctatgctggctaccagatgccagatggcagcatcagaggggaccctgccaacgtggaattcactcagctgtgcatcgacctgggctggaagcccaagtacggccgcttcgatgtggtccccctggtcctgcaggccaatggccgtgaccctgagctcttcgaaatcccacctgaccttgtgcttgaggtggccatggaacatcccaaatacgagtggtttcgggaactggagctaaagtggtacgccctgcctgcagtggccaacatgctgcttgaggtgggcggcctggagttcccagggtgccccttcaatggctggtacatgggcacagagatcggagtccgggacttctgtgacgtccagcgctacaacatcctggaggaagtgggcaggagaatgggcctggaaacgcacaagctggcctcgctctggaaagaccaggctgtcgttgagatcaacattgctgtgctccatagtttccagaagcagaatgtgaccatcatggaccaccactcggctgcagaatccttcatgaagtacatgcagaatgaataccggtcccgtgggggctgcccggcagactggatttggctggtccctcccatgtctgggagcatcacccccgtgtttcaccaggagatgctgaactacgtcctgtcccctttctactactatcaggtagaggcctggaaaacccatgtctggcaggacgagaagcggagacccaagagaagagagattccattgaaagtcttggtcaaagctgtgctctttgcctgtatgctgatgcgcaagacaatggcgtcccgagtcagagtcaccatcctctttgcgacagagacaggaaaatcagaggcgctggcctgggacctgggggccttattcagctgtgccttcaaccccaaggttgtctgcatggataagtacaggctgagctgcctggaggaggaacggctgctgttggtggtgaccagtacgtttggcaatggagactgccctggcaatggagagaaactgaagaaatcgctcttcatgctgaaagagctcaacaacaaattcaggtacgctgtgtttggcctcggctccagcatgtaccctcggttctgcgcctttgctcatgacattgatcagaagctgtcccacctgggggcctctcagctcaccccgatgggagaaggggatgagctcagtgggcaggaggacgccttccgcagctgggccgtgcaaaccttcaaggcagcctgtgagacgtttgatgtccgaggcaaacagcacattcagatccccaagctctacacctccaatgtgacctgggacccgcaccactacaggctcgtgcaggactcacagcctttggacctcagcaaagccctcagcagcatgcatgccaagaacgtgttcaccatgaggctcaaatctcggcagaatctacaaagtccgacatccagccgtgccaccatcctggtggaactctcctgtgaggatggccaaggcctgaactacctgccgggggagcaccttggggtttgcccaggcaaccagccggccctggtccaaggtatcctggagcgagtggtggatggccccacaccccaccagacagtgcgcctggaggccctggatgagagtggcagctactgggtcagtgacaagaggctgcccccctgctcactcagccaggccctcacctacttcctggacatcaccacacccccaacccagctgctgctccaaaagctggcccaggtggccacagaagagcctgagagacagaggctggaggccctgtgccagccctcagagtacagcaagtggaagttcaccaacagccccacattcctggaggtgctagaggagttcccgtccctgcgggtgtctgctggcttcctgctttcccagctccccattctgaagcccaggttctactccatcagctcctcccgggatcacacgcccacagagatccacctgactgtggccgtggtcacctaccacacccgagatggccagggtcccctgcaccacggcgtctgcagcacatggctcaacagcctgaagccccaagacccagtgccctgctttgtgcggaatgccagcggcttccacctccccgaggatccctcccatccttgcatcctcatcgggcctggcacaggcatcgcgcccttccgcagtttctggcagcaacggctccatgactcccagcacaagggagtgcggggaggccgcatgaccttggtgtttgggtgccgccgcccagatgaggaccacatctaccaggaggagatgctggagatggcccagaagggggtgctgcatgcggtgcacacagcctattcccgcctgcctggcaagcccaaggtctatgttcaggacatcctgcggcagcagctggccagcgaggtgctccgtgtgctccacaaggagccaggccacctctatgtttgcggggatgtgcgcatggcccgggacgtggcccacaccctgaagcagctggtggctgccaagctgaaattgaatgaggagcaggtcgaggactatttctttcagctcaagagccagaagcgctatcacgaagatatctttggtgctgtatttccttacgaggcgaagaaggacagggtggcggtgcagcccagcagcctggagatgtcagcgctctgagggcctacaggaggggttaaagctgccggcacagaacttaaggatggagccagctctgcattatctgaggtcacagggcctggggagatggaggaaagtgatatcccccagcctcaagtcttatttcctcaacgttgctccccatcaagccctttacttgacctcctaacaagtagcaccctggattgatcggagcctcctctctcaaactggggcctccctggtcccttggagacaaaatcttaaatgccaggcctggcaagtgggtgaaagatggaacttgctgctgagtgcaccacttcaagtgaccaccaggaggtgctatcgcaccactgtgtatttaactgccttgtgtacagttatttatgcctctgtatttaaaaaactaacacccagtctgttccccatggccacttgggtcttccctgtatgattccttgatggagatatttacatgaattgcattttactttaatcaca

SEQ ID NO: 159547 - DNA, 3345 bp, Homo sapiens
  Payload ID: 11224
  Gene Symbol: NOS2
  Gene Name: nitric oxide synthase 2, inducible
  Uniprot ID: P35228
  ENST ID: ENST00000621962
  CDS Start-End: 1-3345
atggcctgtccttggaaatttctgttcaagaccaaattccaccagtatgcaatgaatggggaaaaagacatcaacaacaatgtggagaaagccccctgtgccacctccagtccagtgacacaggatgaccttcagtatcacaacctcagcaagcagcagaatgagtccccgcagcccctcgtggagacgggaaagaagtctccagaatctctggtcaagctggatgcaaccccattgtcctccccacggcatgtgaggatcaaaaactggggcagcgggatgactttccaagacacacttcaccataaggccaaagggattttaacttgcaggtccaaatcttgcctggggtccattatgactcccaaaagtttgaccagaggacccagggacaagcctacccctccagatgagcttctacctcaagctatcgaatttgtcaaccaatattacggctccttcaaagaggcaaaaatagaggaacatctggccagggtggaagcggtaacaaaggagatagaaacaacaggaacctaccaactgacgggagatgagctcatcttcgccaccaagcaggcctggcgcaatgccccacgctgcattgggaggatccagtggtccaacctgcaggtcttcgatgcccgcagctgttccactgcccgggaaatgtttgaacacatctgcagacacgtgcgttactccaccaacaatggcaacatcaggtcggccatcaccgtgttcccccagcggagtgatggcaagcacgacttccgggtgtggaatgctcagctgtgcatcgacctgggctggaagcccaatggccgtgaccctgagctcttcgaaatcccacctgaccttgtgcttgaggtggccatggaacatcccaaatacgagtggtttcgggaactggagctaaagtggtacgccctgcctgcagtggccaacatgctgcttgaggtgggcggcctggagttcccagggtgccccttcaatggctggtacatgggcacagagatcggagtccgggacttctgtgacgtccagcgctacaacatcctggaggaagtgggcaggagaatgggcctggaaacgcacaagctggcctcgctctggaaagaccaggctgtcgttgagatcaacattgctgtgctccatagtttccagaagcagaatgtgaccatcatggaccaccactcggctgcagaatccttcatgaagtacatgcagaatgaataccggtcccgtgggggctgcccggcagactggatttggctggtccctcccatgtctgggagcatcacccccgtgtttcaccaggagatgctgaactacgtcctgtcccctttctactactatcaggtagaggcctggaaaacccatgtctggcaggacgagaagcggagacccaagagaagagagattccattgaaagtcttggtcaaagctgtgctctttgcctgtatgctgatgcgcaagacaatggcgtcccgagtcagagtcaccatcctctttgcgacagagacaggaaaatcagaggcgctggcctgggacctgggggccttattcagctgtgccttcaaccccaaggttgtctgcatggataagtacaggctgagctgcctggaggaggaacggctgctgttggtggtgaccagtacgtttggcaatggagactgccctggcaatggagagaaactgaagaaatcgctcttcatgctgaaagagctcaacaacaaattcaggtacgctgtgtttggcctcggctccagcatgtaccctcggttctgcgcctttgctcatgacattgatcagaagctgtcccacctgggggcctctcagctcaccccgatgggagaaggggatgagctcagtgggcaggaggacgccttccgcagctgggccgtgcaaaccttcaaggcagcctgtgagacgtttgatgtccgaggcaaacagcacattcagatccccaagctctacacctccaatgtgacctgggacccgcaccactacaggctcgtgcaggactcacagcctttggacctcagcaaagccctcagcagcatgcatgccaagaacgtgttcaccatgaggctcaaatctcggcagaatctacaaagtccgacatccagccgtgccaccatcctggtggaactctcctgtgaggatggccaaggcctgaactacctgccgggggagcaccttggggtttgcccaggcaaccagccggccctggtccaaggtatcctggagcgagtggtggatggccccacaccccaccagacagtgcgcctggaggccctggatgagagtggcagctactgggtcagtgacaagaggctgcccccctgctcactcagccaggccctcacctacttcctggacatcaccacacccccaacccagctgctgctccaaaagctggcccaggtggccacagaagagcctgagagacagaggctggaggccctgtgccagccctcagagtacagcaagtggaagttcaccaacagccccacattcctggaggtgctagaggagttcccgtccctgcgggtgtctgctggcttcctgctttcccagctccccattctgaagcccaggttctactccatcagctcctcccgggatcacacgcccacagagatccacctgactgtggccgtggtcacctaccacacccgagatggccagggtcccctgcaccacggcgtctgcagcacatggctcaacagcctgaagccccaagacccagtgccctgctttgtgcggaatgccagcggcttccacctccccgaggatccctcccatccttgcatcctcatcgggcctggcacaggcatcgcgcccttccgcagtttctggcagcaacggctccatgactcccagcacaagggagtgcggggaggccgcatgaccttggtgtttgggtgccgccgcccagatgaggaccacatctaccaggaggagatgctggagatggcccagaagggggtgctgcatgcggtgcacacagcctattcccgcctgcctggcaagcccaaggtctatgttcaggacatcctgcggcagcagctggccagcgaggtgctccgtgtgctccacaaggagccaggccacctctatgtttgcggggatgtgcgcatggcccgggacgtggcccacaccctgaagcagctggtggctgccaagctgaaattgaatgaggagcaggtcgaggactatttctttcagctcaagagccagaagcgctatcacgaagatatctttggtgctgtatttccttacgaggcgaagaaggacagggtggcggtgcagcccagcagcctggagatgtcagcgctctga

SEQ ID NO: 159548 - DNA, 4388 bp, Homo sapiens
  Payload ID: 11225
  Gene Symbol: NOS3
  Gene Name: nitric oxide synthase 3 (endothelial cell)
  Uniprot ID: P29474
  ENST ID: ENST00000297494
  CDS Start-End: 358-3969
agcaggtgaccagtggtgactcagttcggagcaggtgatagaagctaggagggggttgtttactgaaactaggggcaaggagacgaagagaacatgaaagttaaactttaagatgaagaacaaagctgaacatactgatgcattggatctttggagaggatctcagaactcattgtacttaatttacaggctaaaaccttagaagaggaatttattatatcctacacaagactccagggaagcacatggccttggactgaaggctggcatctggaagctgtcagccaccagcaccttctgcagcaggaaaaggccagggctctgctggagcaggcagcagagtggacgcacagtaacatgggcaacttgaagagcgtggcccaggagcctgggccaccctgcggcctggggctggggctgggccttgggctgtgcggcaagcagggcccagccaccccggcccctgagcccagccgggccccagcatccctactcccaccagcgccagaacacagccccccgagctccccgctaacccagcccccagaggggcccaagttccctcgtgtgaagaactgggaggtggggagcatcacctatgacaccctcagcgcccaggcgcagcaggatgggccctgcaccccaagacgctgcctgggctccctggtatttccacggaaactacagggccggccctcccccggccccccggcccctgagcagctgctgagtcaggcccgggacttcatcaaccagtactacagctccattaagaggagcggctcccaggcccacgaacagcggcttcaagaggtggaagccgaggtggcagccacaggcacctaccagcttagggagagcgagctggtgttcggggctaagcaggcctggcgcaacgctccccgctgcgtgggccggatccagtgggggaagctgcaggtgttcgatgcccgggactgcaggtctgcacaggaaatgttcacctacatctgcaaccacatcaagtatgccaccaaccggggcaaccttcgctcggccatcacagtgttcccgcagcgctgccctggccgaggagacttccgaatctggaacagccagctggtgcgctacgcgggctaccggcagcaggatggctctgtgcggggggacccagccaacgtggagatcaccgagctctgcattcagcacggctggaccccaggaaacggtcgcttcgacgtgctgcccctgctgctgcaggccccagatgatcccccagaactcttccttctgccccccgagctggtccttgaggtgcccctggagcaccccacgctggagtggtttgcagccctgggcctgcgctggtacgccctcccggcagtgtccaacatgctgctggaaattgggggcctggagttccccgcagcccccttcagtggctggtacatgagcactgagatcggcacgaggaacctgtgtgaccctcaccgctacaacatcctggaggatgtggctgtctgcatggacctggatacccggaccacctcgtccctgtggaaagacaaggcagcagtggaaatcaacgtggccgtgctgcacagttaccagctagccaaagtcaccatcgtggaccaccacgccgccacggcctctttcatgaagcacctggagaatgagcagaaggccagggggggctgccctgcagactgggcctggatcgtgccccccatctcgggcagcctcactcctgttttccatcaggagatggtcaactatttcctgtccccggccttccgctaccagccagacccctggaaggggagtgccgccaagggcaccggcatcaccaggaagaagacctttaaagaagtggccaacgccgtgaagatctccgcctcgctcatgggcacggtgatggcgaagcgagtgaaggcgacaatcctgtatggctccgagaccggccgggcccagagctacgcacagcagctggggagactcttccggaaggcttttgatccccgggtcctgtgtatggatgagtatgacgtggtgtccctcgaacacgagacgctggtgctggtggtaaccagcacatttgggaatggggatcccccggagaatggagagagctttgcagctgccctgatggagatgtccggcccctacaacagctcccctcggccggaacagcacaagagttataagatccgcttcaacagcatctcctgctcagacccactggtgtcctcttggcggcggaagaggaaggagtccagtaacacagacagtgcaggggccctgggcaccctcaggttctgtgtgttcgggctcggctcccgggcatacccccacttctgcgcctttgctcgtgccgtggacacacggctggaggaactgggcggggagcggctgctgcagctgggccagggcgacgagctgtgcggccaggaggaggccttccgaggctgggcccaggctgccttccaggccgcctgtgagaccttctgtgtgggagaggatgccaaggccgccgcccgagacatcttcagccccaaacggagctggaagcgccagaggtaccggctgagcgcccaggccgagggcctgcagttgctgccaggtctgatccacgtgcacaggcggaagatgttccaggctacaatccgctcagtggaaaacctgcaaagcagcaagtccacgagggccaccatcctggtgcgcctggacaccggaggccaggaggggctgcagtaccagccgggggaccacataggtgtctgcccgcccaaccggcccggccttgtggaggcgctgctgagccgcgtggaggacccgccggcgcccactgagcccgtggcagtagagcagctggagaagggcagccctggtggccctccccccggctgggtgcgggacccccggctgcccccgtgcacgctgcgccaggctctcaccttcttcctggacatcacctccccacccagccctcagctcttgcggctgctcagcaccttggcagaagagcccagggaacagcaggagctggaggccctcagccaggatccccgacgctacgaggagtggaagtggttccgctgccccacgctgctggaggtgctggagcagttcccgtcggtggcgctgcctgccccactgctcctcacccagctgcctctgctccagccccggtactactcagtcagctcggcacccagcacccacccaggagagatccacctcactgtagctgtgctggcatacaggactcaggatgggctgggccccctgcactatggagtctgctccacgtggctaagccagctcaagcccggagaccctgtgccctgcttcatccggggggctccctccttccggctgccacccgatcccagcttgccctgcatcctggtgggtccaggcactggcattgcccccttccggggattctggcaggagcggctgcatgacattgagagcaaagggctgcagcccactcccatgactttggtgttcggctgccgatgctcccaacttgaccatctctaccgcgacgaggtgcagaacgcccagcagcgcggggtgtttggccgagtcctcaccgccttctcccgggaacctgacaaccccaagacctacgtgcaggacatcctgaggacggagctggctgcggaggtgcaccgcgtgctgtgcctcgagcggggccacatgtttgtctgcggcgatgttaccatggcaaccaacgtcctgcagaccgtgcagcgcatcctggcgacggagggcgacatggagctggacgaggccggcgacgtcatcggcgtgctgcgggatcagcaacgctaccacgaagacattttcgggctcacgctgcgcacccaggaggtgacaagccgcatacgcacccagagcttttccttgcaggagcgtcagttgcggggcgcagtgccctgggcgttcgaccctcccggctcagacaccaacagcccctgagagccgcctggctttcccttccagttccgggagagcggctgcccgactcaggtccgcccgaccaggatcagccccgctcctcccctcttgaggtggtgccttctcacatctgtccagaggctgcaaggattcagcattattcctccaggaaggagcaaaacgcctcttttccctctctaggcctgttgcctcgggcctgggtccgccttaatctggaaggcccctcccagcagcggtaccccagggcctactgccacccgcttcctgtttcttagtcgaatgttagattcctcttgcctctctcaggagtatcttacctgtaaagtctaatctctaaatcaagtatttattattgaagatttaccataagggactgtgccagatgttaggagaactactaaagtgcctaccccagctca

SEQ ID NO: 159549 - DNA, 3644 bp, Homo sapiens
  Payload ID: 11225
  Gene Symbol: NOS3
  Gene Name: nitric oxide synthase 3 (endothelial cell)
  ENST ID: ENST00000461406
  CDS Start-End: 346-3339
aagatgaagaacaaagctgaacatactgatgcattggatctttggagaggatctcagaactcattgtacttaatttacaggctaaaaccttagaagaggaatttattatatcctacacaagactccagggaagcacatggccttggactgaaggctggcatctggaagctgtcagccaccagcaccttctgcagcagccccccgagctccccgctaacccagcccccagaggggcccaagttccctcgtgtgaagaactgggaggtggggagcatcacctatgacaccctcagcgcccaggcgcagcaggtgttcgatgcccgggactgcaggtctgcacaggaaatgttcacctacatctgcaaccacatcaagtatgccaccaaccggggcaaccttcgctcggccatcacagtgttcccgcagcgctgccctggccgaggagacttccgaatctggaacagccagctggtgcgctacgcgggctaccggcagcaggatggctctgtgcggggggacccagccaacgtggagatcaccgagctctgcattcagcacggctggaccccaggaaacggtcgcttcgacgtgctgcccctgctgctgcaggccccagatgatcccccagaactcttccttctgccccccgagctggtccttgaggtgcccctggagcaccccacgctggagtggtttgcagccctgggcctgcgctggtacgccctcccggcagtgtccaacatgctgctggaaattgggggcctggagttccccgcagcccccttcagtggctggtacatgagcactgagatcggcacgaggaacctgtgtgaccctcaccgctacaacatcctggaggatgtggctgtctgcatggacctggatacccggaccacctcgtccctgtggaaagacaaggcagcagtggaaatcaacgtggccgtgctgcacagttaccagctagccaaagtcaccatcgtggaccaccacgccgccacggcctctttcatgaagcacctggagaatgagcagaaggccagggggggctgccctgcagactgggcctggatcgtgccccccatctcgggcagcctcactcctgttttccatcaggagatggtcaactatttcctgtccccggccttccgctaccagccagacccctggaaggggagtgccgccaagggcaccggcatcaccaggaagaagacctttaaagaagtggccaacgccgtgaagatctccgcctcgctcatgggcacggtgatggcgaagcgagtgaaggcgacaatcctgtatggctccgagaccggccgggcccagagctacgcacagcagctggggagactcttccggaaggcttttgatccccgggtcctgtgtatggatgagtatgacgtggtgtccctcgaacacgagacgctggtgctggtggtaaccagcacatttgggaatggggatcccccggagaatggagagagctttgcagctgccctgatggagatgtccggcccctacaacagctcccctcggccggaacagcacaagagttataagatccgcttcaacagcatctcctgctcagacccactggtgtcctcttggcggcggaagaggaaggagtccagtaacacagacagtgcaggggccctgggcaccctcaggttctgtgtgttcgggctcggctcccgggcatacccccacttctgcgcctttgctcgtgccgtggacacacggctggaggaactgggcggggagcggctgctgcagctgggccagggcgacgagctgtgcggccaggaggaggccttccgaggctgggcccaggctgccttccaggccgcctgtgagaccttctgtgtgggagaggatgccaaggccgccgcccgagacatcttcagccccaaacggagctggaagcgccagaggtaccggctgagcgcccaggccgagggcctgcagttgctgccaggtctgatccacgtgcacaggcggaagatgttccaggctacaatccgctcagtggaaaacctgcaaagcagcaagtccacgagggccaccatcctggtgcgcctggacaccggaggccaggaggggctgcagtaccagccgggggaccacataggtgtctgcccgcccaaccggcccggccttgtggaggcgctgctgagccgcgtggaggacccgccggcgcccactgagcccgtggcagtagagcagctggagaagggcagccctggtggccctccccccggctgggtgcgggacccccggctgcccccgtgcacgctgcgccaggctctcaccttcttcctggacatcacctccccacccagccctcagctcttgcggctgctcagcaccttggcagaagagcccagggaacagcaggagctggaggccctcagccaggatccccgacgctacgaggagtggaagtggttccgctgccccacgctgctggaggtgctggagcagttcccgtcggtggcgctgcctgccccactgctcctcacccagctgcctctgctccagccccggtactactcagtcagctcggcacccagcacccacccaggagagatccacctcactgtagctgtgctggcatacaggactcaggatgggctgggccccctgcactatggagtctgctccacgtggctaagccagctcaagcccggagaccctgtgccctgcttcatccggggggctccctccttccggctgccacccgatcccagcttgccctgcatcctggtgggtccaggcactggcattgcccccttccggggattctggcaggagcggctgcatgacattgagagcaaagggctgcagcccactcccatgactttggtgttcggctgccgatgctcccaacttgaccatctctaccgcgacgaggtgcagaacgcccagcagcgcggggtgtttggccgagtcctcaccgccttctcccgggaacctgacaaccccaagacctacgtgcaggacatcctgaggacggagctggctgcggaggtgcaccgcgtgctgtgcctcgagcggggccacatgtttgtctgcggcgatgttaccatggcaaccaacgtcctgcagaccgtgcagcgcatcctggcgacggagggcgacatggagctggacgaggccggcgacgtcatcggcgtgctgcgggatcagcaacgctaccacgaagacattttcgggctcacgctgcgcacccaggaggtgacaagccgcatacgcacccagagcttttccttgcaggagcgtcagttgcggggcgcagtgccctgggcgttcgaccctcccggctcagacaccaacagcccctgagagccgcctggctttcccttccagttccgggagagcggctgcccgactcaggtccgcccgaccaggatcagccccgctcctcccctcttgaggtggtgccttctcacatctgtccagaggctgcaaggattcagcattattcctccaggaaggagcaaaacgcctcttttccctctctaggcctgttgcctcgggcctgggtccgccttaatctggaaggcccctcccagcagcggtaccccagggcctactgccacccgcttcctgtttcttagtcgaatgttagattcctcttgcctctctca

SEQ ID NO: 159550 - DNA, 1143 bp, Homo sapiens
  Payload ID: 11225
  Gene Symbol: NOS3
  Gene Name: nitric oxide synthase 3 (endothelial cell)
  ENST ID: ENST00000475017
  CDS Start-End: 1-920
gtgagaccttctgtgtgggagaggatgccaaggccgccgcccgagacatcttcagccccaaacggagctggaagcgccagaggtaccggctgagcgcccaggccgagggcctgcagttgctgccaggtctgatccacgtgcacaggcggaagatgttccaggctacaatccgctcagtggaaaacctgcaaagcagcaagtccacgagggccaccatcctggtgcgcctggacaccggaggccaggaggggctgcagtaccagccgggggaccacataggtgtctgcccgcccaaccggcccggccttgtggaggcgctgctgagccgcgtggaggacccgccggcgcccactgagcccgtggcagtagagcagctggagaagggcagccctggtggccctccccccggctgggtgcgggacccccggctgcccccgtgcacgctgcgccaggctctcaccttcttcctggacatcacctccccacccagccctcagctcttgcggctgctcagcaccttggcagaagagcccagggaacagcaggagctggaggccctcagccaggatccccgacgctacgaggagtggaagtggttccgctgccccacgctgctggaggtgctggagcagttcccgtcggtggcgctgcctgccccactgctcctcacccagctgcctctgctccagccccggtactactcagtcagctcggcacccagcacccacccaggagagatccacctcactgtagctgtgctggcatacaggactcaggatgggctgggccccctgcactatggagtctgctccacgtggctaagccagctcaagcccggagaccctgtgccctgcttcatccggggtcttgggattacaggtgtgagccaccgcgcccggaccgagggtgaaggattttaagagacccttccttcatgctgtgtccagaagtcttgcccgctctcgcagccaggaaccaaaagtcctggtaggactgagaacagttcctaggctgccatcagctgggcctggtgattcaaatccacccaggtggctaaactacaaataaaccgtacccatctactgaacataaactaaataccactattaaggatacttaaaataaacacacttagtgaaccca

SEQ ID NO: 159551 - DNA, 2537 bp, Homo sapiens
  Payload ID: 11225
  Gene Symbol: NOS3
  Gene Name: nitric oxide synthase 3 (endothelial cell)
  Uniprot ID: P29474
  ENST ID: ENST00000484524
  CDS Start-End: 1-1890
atgggcaacttgaagagcgtggcccaggagcctgggccaccctgcggcctggggctggggctgggccttgggctgtgcggcaagcagggcccagccaccccggcccctgagcccagccgggccccagcatccctactcccaccagcgccagaacacagccccccgagctccccgctaacccagcccccagaggggcccaagttccctcgtgtgaagaactgggaggtggggagcatcacctatgacaccctcagcgcccaggcgcagcaggatgggccctgcaccccaagacgctgcctgggctccctggtatttccacggaaactacagggccggccctcccccggccccccggcccctgagcagctgctgagtcaggcccgggacttcatcaaccagtactacagctccattaagaggagcggctcccaggcccacgaacagcggcttcaagaggtggaagccgaggtggcagccacaggcacctaccagcttagggagagcgagctggtgttcggggctaagcaggcctggcgcaacgctccccgctgcgtgggccggatccagtgggggaagctgcaggtgttcgatgcccgggactgcaggtctgcacaggaaatgttcacctacatctgcaaccacatcaagtatgccaccaaccggggcaaccttcgctcggccatcacagtgttcccgcagcgctgccctggccgaggagacttccgaatctggaacagccagctggtgcgctacgcgggctaccggcagcaggatggctctgtgcggggggacccagccaacgtggagatcaccgagctctgcattcagcacggctggaccccaggaaacggtcgcttcgacgtgctgcccctgctgctgcaggccccagatgatcccccagaactcttccttctgccccccgagctggtccttgaggtgcccctggagcaccccacgctggagtggtttgcagccctgggcctgcgctggtacgccctcccggcagtgtccaacatgctgctggaaattgggggcctggagttccccgcagcccccttcagtggctggtacatgagcactgagatcggcacgaggaacctgtgtgaccctcaccgctacaacatcctggaggatgtggctgtctgcatggacctggatacccggaccacctcgtccctgtggaaagacaaggcagcagtggaaatcaacgtggccgtgctgcacagttaccagctagccaaagtcaccatcgtggaccaccacgccgccacggcctctttcatgaagcacctggagaatgagcagaaggccagggggggctgccctgcagactgggcctggatcgtgccccccatctcgggcagcctcactcctgttttccatcaggagatggtcaactatttcctgtccccggccttccgctaccagccagacccctggaaggggagtgccgccaagggcaccggcatcaccaggaagaagacctttaaagaagtggccaacgccgtgaagatctccgcctcgctcatgggcacggtgatggcgaagcgagtgaaggcgacaatcctgtatggctccgagaccggccgggcccagagctacgcacagcagctggggagactcttccggaaggcttttgatccccgggtcctgtgtatggatgagtatgacgtggtgtccctcgaacacgagacgctggtgctggtggtaaccagcacatttgggaatggggatcccccggagaatggagagggtctcactttgtggcccaggctggagtgcagtagtacaatcacggctcactgcagcctcaacctcctagactcaagcaatcctcccacttcaacctcccaagtagttgggactacaggcgcatgccatgatgcctagctaatttttgtattttttatagagatggggtttcgccatgttgcccaggctggtctctaactcctgggttcaagcaatccacctgcctcggcctcccaaagtgctgcgattatagacgtgagccactgcacctggccctcagtatcttaagcaagttggaatctcgtgaaaccctttttgctgccttagtgtccgtttcagccctcattctgacctaccttttcaagaaaaatagcaccagcaattgacttttttttagcataaaggtgtatagacacccatataacctacagccttcacaaggcatagcacattttcaccaccctggaaagttccctcatcagttcctcacgtgaatcccttcccagtctgtctccctgccagaagtgtctgtcaccacagaatagtttcgcctgctctagaacggcacctagatggaagcacgcagtgttgcggcgtctcctgctgaggctgtttttgaggcgcactcgtgttgctgcgtgactcagtatttcactcattctgctgctgagtgccgttcattgtgtgaatatccccagtttgtttacccattctcttgttggtgacacttgggctgtttccaggtcggggctattatgaataaacctgttatgaacattcttgta

SEQ ID NO: 159552 - DNA, 2377 bp, Homo sapiens
  Payload ID: 11225
  Gene Symbol: NOS3
  Gene Name: nitric oxide synthase 3 (endothelial cell)
  ENST ID: ENST00000467517
  CDS Start-End: 1-1845
atgggcaacttgaagagcgtggcccaggagcctgggccaccctgcggcctggggctggggctgggccttgggctgtgcggcaagcagggcccagccaccccggcccctgagcccagccgggccccagcatccctactcccaccagcgccagaacacagccccccgagctccccgctaacccagcccccagaggggcccaagttccctcgtgtgaagaactgggaggtggggagcatcacctatgacaccctcagcgcccaggcgcagcaggatgggccctgcaccccaagacgctgcctgggctccctggtatttccacggaaactacagggccggccctcccccggccccccggcccctgagcagctgctgagtcaggcccgggacttcatcaaccagtactacagctccattaagaggagcggctcccaggcccacgaacagcggcttcaagaggtggaagccgaggtggcagccacaggcacctaccagcttagggagagcgagctggtgttcggggctaagcaggcctggcgcaacgctccccgctgcgtgggccggatccagtgggggaagctgcaggtgttcgatgcccgggactgcaggtctgcacaggaaatgttcacctacatctgcaaccacatcaagtatgccaccaaccggggcaaccttcgctcggccatcacagtgttcccgcagcgctgccctggccgaggagacttccgaatctggaacagccagctggtgcgctacgcgggctaccggcagcaggatggctctgtgcggggggacccagccaacgtggagatcaccgagctctgcattcagcacggctggaccccaggaaacggtcgcttcgacgtgctgcccctgctgctgcaggccccagatgatcccccagaactcttccttctgccccccgagctggtccttgaggtgcccctggagcaccccacgctggagtggtttgcagccctgggcctgcgctggtacgccctcccggcagtgtccaacatgctgctggaaattgggggcctggagttccccgcagcccccttcagtggctggtacatgagcactgagatcggcacgaggaacctgtgtgaccctcaccgctacaacatcctggaggatgtggctgtctgcatggacctggatacccggaccacctcgtccctgtggaaagacaaggcagcagtggaaatcaacgtggccgtgctgcacagttaccagctagccaaagtcaccatcgtggaccaccacgccgccacggcctctttcatgaagcacctggagaatgagcagaaggccagggggggctgccctgcagactgggcctggatcgtgccccccatctcgggcagcctcactcctgttttccatcaggagatggtcaactatttcctgtccccggccttccgctaccagccagacccctggaaggggagtgccgccaagggcaccggcatcaccaggaagaagacctttaaagaagtggccaacgccgtgaagatctccgcctcgctcatgggcacggtgatggcgaagcgagtgaaggcgacaatcctgtatggctccgagaccggccgggcccagagctacgcacagcagctggggagactcttccggaaggcttttgatccccgggtcctgtgtatggatgagtatgacgtggtgtccctcgaacacgagacgctggtgctggtggtaaccagcacatttgggaatggggatcccccggagaatggagagagatggggtttcgccatgttgcccaggctggtctctaactcctgggttcaagcaatccacctgcctcggcctcccaaagtgctgcgattatagacgtgagccactgcacctggccctcagtatcttaagcaagttggaatctcgtgaaaccctttttgctgccttagtgtccgtttcagccctcattctgacctaccttttcaagaaaaatagcaccagcaattgacttttttttagcataaaggtgtatagacacccatataacctacagccttcacaaggcatagcacattttcaccaccctggaaagttccctcatcagttcctcacgtgaatcccttcccagtctgtctccctgccagaagtgtctgtcaccacagaatagtttcgcctgctctagaacggcacctagatggaagcacgcagtgttgcggcgtctcctgctgaggctgtttttgaggcgcactcgtgttgctgcgtgactcagtatttcactcattctgctgctgagtgccgttcattgtgtgaatatccccagtttgtttacccattctcttgttggtgacacttgggctgtttccaggtcggggctattatgaataaacctgttatgaacattcttgta

SEQ ID NO: 159553 - DNA, 1000 bp, Homo sapiens
  Payload ID: 11226
  Gene Symbol: NOSIP
  Gene Name: nitric oxide synthase interacting protein
  ENST ID: ENST00000339093
  CDS Start-End: 46-960
gcacagttgaagaagcgaccgagggactgggagtcgttagtgaggatgacgcggcatggcaagaactgcaccgcaggggccgtctacacctaccacgagaagaagaaggacacagcggcctcgggctatgggacccagaacattcgactgagccgggatgccgtgaaggacttcgactgctgttgtctctccctgcagccttgccacgatcctgttgtcaccccagatggctacctgtatgagcgtgaggccatcctggagtacattctgcaccagaagaaggagattgcccggcagatgaaggcctacgagaagcagcggggcacccggcgcgaggagcagaaggagcttcagcgggcggcctcgcaggaccatgtgcggggcttcctggagaaggagtcggctatcgtgagccggcccctcaaccctttcacagccaaggccctctcgggcaccagcccaggtgactcagatgatgtccaacctgggcccagtgtgggtcctccaagtaaggacaaggacaaagtgctgcccagcttctggatcccgtcgctgacgcccgaagccaaggccaccaagctggagaagccgtcccgcacggtgacctgccccatgtcagggaagcccctgcgcatgtcggacctgacgcccgtgcacttcacaccgctagacagctccgtggaccgcgtggggctcatcacccgcagcgagcgctacgtgtgtgccgtgacccgcgacagcctgagcaacgccaccccctgcgctgtgctgcggccctctggggctgtggtcaccctcgaatgcgtggagaagctgattcggaaggacatggtggaccctgtgactggagacaaactcacagaccgcgacatcatcgtgctgcagcggggcggtaccggcttcgcgggctccggagtgaagctgcaagcggagaaatcacggccggtgatgcaggcctgagtgtgtgcgggagaccaaataaaccggcttgggtgcgcaa

SEQ ID NO: 159554 - DNA, 429 bp, Homo sapiens
  Payload ID: 11226
  Gene Symbol: NOSIP
  Gene Name: nitric oxide synthase interacting protein
  ENST ID: ENST00000598544
  CDS Start-End: 140-429
aaaaccagaaacattgctgatatgaccacaataccatcatcacactttaaaagaacaaccgtaattctagactactatccattacgtggtgcagagtcaagtccagtgtaactgtgggtttgttggaatcaggatatagatgacgcggcatggcaagaactgcaccgcaggggccgtctacacctaccacgagaagaagaaggacacagcggcctcgggctatgggacccagaacattcgactgagccgggatgccgtgaaggacttcgactgctgttgtctctccctgcagccttgccacgatcctgttgtcaccccagatggctacctgtatgagcgtgaggccatcctggagtacattctgcaccagaagaaggagattgcccggcagatgaaggcctacgagaagcagcggggcacccggcgcga

SEQ ID NO: 159555 - DNA, 1005 bp, Homo sapiens
  Payload ID: 11226
  Gene Symbol: NOSIP
  Gene Name: nitric oxide synthase interacting protein
  Uniprot ID: Q9Y314
  ENST ID: ENST00000596358
  CDS Start-End: 60-965
tttccggtgtcggggcacagttgaagaagcgaccgagggactgggagtcgttagtgaggatgacgcggcatggcaagaactgcaccgcaggggccgtctacacctaccacgagaagaagaaggacacagcggcctcgggctatgggacccagaacattcgactgagccgggatgccgtgaaggacttcgactgctgttgtctctccctgcagccttgccacgatcctgttgtcaccccagatggctacctgtatgagcgtgaggccatcctggagtacattctgcaccagaagaaggagattgcccggcagatgaaggcctacgagaagcagcggggcacccggcgcgaggagcagaaggagcttcagcgggcggcctcgcaggaccatgtgcggggcttcctggagaaggagtcggctatcgtgagccggcccctcaaccctttcacagccaaggccctctcgggcaccagcccagatgatgtccaacctgggcccagtgtgggtcctccaagtaaggacaaggacaaagtgctgcccagcttctggatcccgtcgctgacgcccgaagccaaggccaccaagctggagaagccgtcccgcacggtgacctgccccatgtcagggaagcccctgcgcatgtcggacctgacgcccgtgcacttcacaccgctagacagctccgtggaccgcgtggggctcatcacccgcagcgagcgctacgtgtgtgccgtgacccgcgacagcctgagcaacgccaccccctgcgctgtgctgcggccctctggggctgtggtcaccctcgaatgcgtggagaagctgattcggaaggacatggtggaccctgtgactggagacaaactcacagaccgcgacatcatcgtgctgcagcggggcggtaccggcttcgcgggctccggagtgaagctgcaagcggagaaatcacggccggtgatgcaggcctgagtgtgtgcgggagaccaaataaaccggcttgggtgcgcaa

SEQ ID NO: 159556 - DNA, 697 bp, Homo sapiens
  Payload ID: 11226
  Gene Symbol: NOSIP
  Gene Name: nitric oxide synthase interacting protein
  ENST ID: ENST00000601015
  CDS Start-End: 1-697
aggacacagcggcctcgggctatgggacccagaacattcgactgagccgggatgccgtgaaggacttcgactgctgttgtctctccctgcagccttgccacgatcctgttgtcaccccagatggctacctgtatgagcgtgaggccatcctggagtacattctgcaccagaagaaggagattgcccggcagatgaaggcctacgagaagcagcggggcacccggcgcgaggagcagaaggagcttcagcgggcggcctcgcaggaccatgtgcggggcttcctggagaaggagtcggctatcgtgagccggcccctcaaccctttcacagccaaggccctctcgggcaccagcccagatgatgtccaacctgggcccagtgtgggtcctccaagtaaggacaaggacaaagtgctgcccagcttctggatcccgtcgctgacgcccgaagccaaggccaccaagctggagaagccgtggggctgtggtcaccctcgaatgcgtggagaagctgattcggaaggacatggtggaccctgtgactggagacaaactcacagaccgcgacatcatcgtgctgcagcggggcggtaccggcttcgcgggctccggagtgaagctgcaagcggagaaatcacggccggtgatgcaggcctgagtgtgtgcgggagaccaaataaaccggcttgggtgcgcaa

SEQ ID NO: 159557 - DNA, 1167 bp, Homo sapiens
  Payload ID: 11226
  Gene Symbol: NOSIP
  Gene Name: nitric oxide synthase interacting protein
  ENST ID: ENST00000600019
  CDS Start-End: 44-235
acagttgaagaagcgaccgagggactgggagtcgttagtgaggatgacgcggcatggcaagaactgcaccgcaggggccgtctacacctaccacgagaagaagaaggacacagcggcctcgggctatgggacccagaacattcgactgagccgggatgccgtgaaggacttcgactgctgttgtctctccctgcagccttgccacgatcctgttgtcacatggctacctgtatgagcgtgaggccatcctggagtacattctgcaccagaagaaggagattgcccggcagatgaaggtggctccccctgtgcccatgtcctccacacagcctggtggtcatgtcggaggccctcatgagcatccatcactgtcactgttacctcctcactcagctgggtggcccagggtggtctggaactgcagcaccgcccaggcaactgctgtgcgccaggcagggctgagctcaggtcatggcttcacttctcccgtcctcactcactgtccgtccatagacatgggctcctcagcattcccttagatctgaagtctacatcccccgtcccaaacacgggctggggcatgcactgtatagaaaacttaattggccagcaggtgacattaattaaatgcttagctgagtgccaggtgaggctctccatgctgtaaacactcaccttatgtaacccttcagtgagccgctgaggtgggtaaccactgttaggctgttttacagatgaagaaactgaggccaggagaggtcatagtgctcacttaggccacagagtgacagagatgggctttgagccctggcagtctggctatacaacgcagtaaggttcacacccacccagggtggcagttaccaccctctgccacatagtgcctccatcagagggtcccctttgtgggcctcagtttacctacctgtgaaatgggaggaagatacccccagccccacgggcagatgctcagcccactttccccgacgcaggcctacgagaagcagcggggcacccggcgcgaggagcagaaggagcttcagcgggcggcctcgcaggaccatgtgcggggcttcctggagaaggagtcggctatcgtgagccggcccctcaaccctttcacagccaaggccctctcgggcaccagcccagatgatgtccaacctg

SEQ ID NO: 159558 - DNA, 529 bp, Homo sapiens
  Payload ID: 11226
  Gene Symbol: NOSIP
  Gene Name: nitric oxide synthase interacting protein
  ENST ID: ENST00000598296
  CDS Start-End: 1-529
atgacgcggcatggcaagaactgcaccgcaggggccgtctacacctaccacgagaagaagaaggacacagcggcctcgggctatgggacccagaacattcgactgagccgggatgccgtgaaggacttcgactgctgttgtctctccctgcagccttgccacgatcctgttgtcaccccagatggctacctgtatgagcgtgaggccatcctggagtacattctgcaccagaagaaggagattgcccggcagatgaaggcctacgagaagcagcggggcacccggcgcgaggagcagaaggagcttcagcgggcggcctcgcaggaccatgtgcggggcttcctggagaaggagtcggctatcgtgagccggcccctcaaccctttcacagccaaggccctctcgggcaccagcccagatgatgtccaacctgggcccagtgtgggtcctccaaacagctccgtggaccgcgtggggctcatcacccgcagcgagcgctacgtgtgtgccgtgacccgcgacagcctga

SEQ ID NO: 159559 - DNA, 602 bp, Homo sapiens
  Payload ID: 11226
  Gene Symbol: NOSIP
  Gene Name: nitric oxide synthase interacting protein
  ENST ID: ENST00000594932
  CDS Start-End: 20-211
ctgggagtcgttagtgaggatgacgcggcatggcaagaactgcaccgcaggggccgtctacacctaccacgagaagaagaaggacacagcggcctcgggctatgggacccagaacattcgactgagccgggatgccgtgaaggacttcgactgctgttgtctctccctgcagccttgccacgatcctgttgtcacatggctacctgtatgagcgtgaggccatcctggagtacattctgcaccagaagaaggagattgcccggcagatgaaggcctacgagaagcagcggggcacccggcgcgaggagcagaaggagcttcagcgggcggcctcgcaggaccatgtgcggggcttcctggagaaggagtcggctatcgtgagccggcccctcaaccctttcacagccaaggccctctcgggcaccagcccagatgatgtccaacctgggcccagtgtgggtcctccaagtaaggacaaggacaaagtgctgcccagcttctggatcccgtcgctgacgcccgaagccaaggccaccaagctggagaagccgctccgtggaccgcgtggggctcatcacccgcagcgagcgctacgtgtgtgc

SEQ ID NO: 159560 - DNA, 833 bp, Homo sapiens
  Payload ID: 11226
  Gene Symbol: NOSIP
  Gene Name: nitric oxide synthase interacting protein
  ENST ID: ENST00000599537
  CDS Start-End: 109-833
ctgggcacaggccccaccctcctatacggctccacacatacaacgctgggccacgcccctagaccattgcatggggccccgcccccgcactccaagccccgccccaggatgacgcggcatggcaagaactgcaccgcaggggccgtctacacctaccacgagaagaagaaggacacagcggcctcgggctatgggacccagaacattcgactgagccgggatgccgtgaaggacttcgactgctgttgtctctccctgcagccttgccacgatcctgttgtcaccccagatggctacctgtatgagcgtgaggccatcctggagtacattctgcaccagaagaaggagattgcccggcagatgaaggcctacgagaagcagcggggcacccggcgcgaggagcagaaggagcttcagcgggcggcctcgcaggaccatgtgcggggcttcctggagaaggagtcggctatcgtgagccggcccctcaaccctttcacagccaaggccctctcgggcaccagcccagatgatgtccaacctgggcccagtgtgggtcctccaagtaaggacaaggacaaagtgctgcccagcttctggatcccgtcgctgacgcccgaagccaaggccaccaagctggagaagccgtcccgcacggtgacctgccccatgtcagggaagcccctgcgcatgtcggacctgacgcccgtgcacttcacaccgctagacagctccgtggaccgcgtggggctcatcacccgcagcgagcgctacgtgtgtgccgtgacccgcgacagcctgagcaacgccaccccctgcgctgtgctgcggccctc

SEQ ID NO: 159561 - DNA, 2294 bp, Homo sapiens
  Payload ID: 11227
  Gene Symbol: NOSTRIN
  Gene Name: nitric oxide synthase trafficking
  Uniprot ID: Q8IVI9
  ENST ID: ENST00000317647
  CDS Start-End: 230-1750
attctcactatctcacactggccgtcttgacccagagcagttctttactttctcgggacacaaacgggatgaaagtccagggctgggacttcctccttggaatgtttgacaaggactgacgtactctaggccctttgaatcccggaagtccaggacacacccaaccttgattacagtgtccagaatgctggagcgtaggtgaaaggacaaaagccagacacatttcaacatgagggacccactgacagattgtccgtataataaagtatacaagaacctaaaggagttttctcaaaatggagagaatttctgcaaacaggtcacatctgttcttcagcaaagggcaaacctggaaattagctatgccaaaggacttcagaaactggcaagcaagctgagcaaagcattacagaacacgagaaaaagttgtgttagcagtgcctgggcctgggcctcagagggaatgaaatccacagcggacctgcatcaaaaacttggcaaagcaattgaattggaagcaataaaaccgacttatcaagtcctaaatgtacaagagaagaagagaaaatcacttgacaatgaagttgaaaagacagcaaatcttgtcattagcaactggaatcagcaaattaaggccaagaagaaattaatggttagtaccaagaaacatgaagcacttttccagcttgtagaaagctccaagcaatctatgactgagaaggagaagcggaagctcctcaataaactgacaaaatcaactgaaaagttggaaaaggaagatgaaaattactaccaaaaaaacatggcgggttattctaccagactgaaatgggaaaacacactagagaactgctaccagagcattctggagctggagaaggaaagaattcaacttttatgcaataacttaaaccagtacagccaacatatttctctttttggccaaaccctgaccacatgccacacgcagattcactgtgccatcagcaagattgacattgaaaaagatatccaggctgtaatggaagaaactgcaattttatctacagaaaacaaatctgagttcctgttaacggattactttgaagaagatcctaacagtgcaatggataaagagagacgaaagtctttactaaaaccaaaattattgagactgcagagagacattgaaaaagcctcaaaagacaaggaaggcctggaacgaatgcttaaaacgtactccagcacctcctccttctctgatgcaaagagccagaaagacacagcagcgttaatggatgagaacaatttgaaactagaccttttggaagcgaactcctacaaactgtcatcaatgttagcagaacttgagcaaagacctcaacccagccatccttgtagtaattccatcttcaggtggagggaaaaggagcatactcatagctatgtgaaaatatctcggccttttttaatgaagagattagagaatattgtgagcaaggcatcttctggtgggcagagcaatccaggttcttcaactccagcccctggtgcagcccagctcagcagcagactttgcaaggccttgtattcttttcaagccaggcaagatgatgagttgaatttggaaaagggtgacattgtgattatacacgagaaaaaagaaggaggatggtggtttggatctttgaatgggaaaaaaggccattttcctgccgcttatgtggaggagttaccttcaaatgctggcaacacagctacaaaggcataaaacaagactctgaacatactaccttcacactcggtaatcaacaatacagtgtggttcaaataagaataaagtgctcttacctttacatgtttttcttttgaaatggatggagttctacctgcatgtcacagcactttgcattcatgattattagcttgaaacagtcagaaaaaagatggatgggtggagacagacaaggaagaggctccttggttcctagaggagtttccaaattctaggagaccctagagatgatccagtataacccctggtgtcacagaaacagacggagtccaaggtgggttcagctgcttgcctgaagtcagagttatctggtagacaacagcagtgggacttagatgtctttttcctctggatttgggtggcaacagaacacagcaggcctatgagggggtcaagcagagcctgggagatgaggaacacagatcaattccaagaagagagacaggcaatcaagacaccaatgagatcaacccaaattaggggatggtaggatatctctgacaaacccacagccaatatc

SEQ ID NO: 159562 - DNA, 1446 bp, Homo sapiens
  Payload ID: 11227
  Gene Symbol: NOSTRIN
  Gene Name: nitric oxide synthase trafficking
  Uniprot ID: Q8IVI9
  ENST ID: ENST00000397206
  CDS Start-End: 160-1446
cacatttcaacatgagggacccactgacagattgtccgggcaaacctggaaattagctatgccaaaggacttcagaaactggcaagcaagctgagcaaagcattacagaacacgagaaaaagttgtgttagcagtgcctgggcctgggcctcagagggaatgaaatccacagcggacctgcatcaaaaacttggcaaagcaattgaattggaagcaataaaaccgacttatcaagtcctaaatgtacaagagaagaagagaaaatcacttgacaatgaagttgaaaagacagcaaatcttgtcattagcaactggaatcagcaaattaaggccaagaagaaattaatggttagtaccaagaaacatgaagcacttttccagcttgtagaaagctccaagcaatctatgactgagaaggagaagcggaagctcctcaataaactgacaaaatcaactgaaaagttggaaaaggaagatgaaaattactaccaaaaaaacatggcgggttattctaccagactgaaatgggaaaacacactagagaactgctaccagagcattctggagctggagaaggaaagaattcaacttttatgcaataacttaaaccagtacagccaacatatttctctttttggccaaaccctgaccacatgccacacgcagattcactgtgccatcagcaagattgacattgaaaaagatatccaggctgtaatggaagaaactgcaattttatctacagaaaacaaatctgagttcctgttaacggattactttgaagaagatcctaacagtgcaatggataaagagagacgaaagtctttactaaaaccaaaattattgagactgcagagagacattgaaaaagcctcaaaagacaaggaaggcctggaacgaatgcttaaaacgtactccagcacctcctccttctctgatgcaaagagccagaaagacacagcagcgttaatggatgagaacaatttgaaactagaccttttggaagcgaactcctacaaactgtcatcaatgttagcagaacttgagcaaagacctcaacccagccatccttgtagtaattccatcttcaggtggagggaaaaggagcatactcatagctatgtgaaaatatctcggccttttttaatgaagagattagagaatattgtgagcaaggcatcttctggtgggcagagcaatccaggttcttcaactccagcccctggtgcagcccagctcagcagcagactttgcaaggccttgtattcttttcaagccaggcaagatgatgagttgaatttggaaaagggtgacattgtgattatacacgagaaaaaagaaggaggatggtggtttggatctttgaatgggaaaaaaggccattttcctgccgcttatgtggaggagttaccttcaaatgctggcaacacagctacaaaggcataa

SEQ ID NO: 159563 - DNA, 1437 bp, Homo sapiens
  Payload ID: 11227
  Gene Symbol: NOSTRIN
  Gene Name: nitric oxide synthase trafficking
  Uniprot ID: Q8IVI9
  ENST ID: ENST00000397209
  CDS Start-End: 1-1437
atgagggacccactgacagattgtccgtataataaagtatacaagaacctaaaggagttttctcaaaatggagagaatttctgcaaacaggtcacatctgttcttcagcaaagttgtgttagcagtgcctgggcctgggcctcagagggaatgaaatccacagcggacctgcatcaaaaacttggcaaagcaattgaattggaagcaataaaaccgacttatcaagtcctaaatgtacaagagaagaagagaaaatcacttgacaatgaagttgaaaagacagcaaatcttgtcattagcaactggaatcagcaaattaaggccaagaagaaattaatggttagtaccaagaaacatgaagcacttttccagcttgtagaaagctccaagcaatctatgactgagaaggagaagcggaagctcctcaataaactgacaaaatcaactgaaaagttggaaaaggaagatgaaaattactaccaaaaaaacatggcgggttattctaccagactgaaatgggaaaacacactagagaactgctaccagagcattctggagctggagaaggaaagaattcaacttttatgcaataacttaaaccagtacagccaacatatttctctttttggccaaaccctgaccacatgccacacgcagattcactgtgccatcagcaagattgacattgaaaaagatatccaggctgtaatggaagaaactgcaattttatctacagaaaacaaatctgagttcctgttaacggattactttgaagaagatcctaacagtgcaatggataaagagagacgaaagtctttactaaaaccaaaattattgagactgcagagagacattgaaaaagcctcaaaagacaaggaaggcctggaacgaatgcttaaaacgtactccagcacctcctccttctctgatgcaaagagccagaaagacacagcagcgttaatggatgagaacaatttgaaactagaccttttggaagcgaactcctacaaactgtcatcaatgttagcagaacttgagcaaagacctcaacccagccatccttgtagtaattccatcttcaggtggagggaaaaggagcatactcatagctatgtgaaaatatctcggccttttttaatgaagagattagagaatattgtgagcaaggcatcttctggtgggcagagcaatccaggttcttcaactccagcccctggtgcagcccagctcagcagcagactttgcaaggccttgtattcttttcaagccaggcaagatgatgagttgaatttggaaaagggtgacattgtgattatacacgagaaaaaagaaggaggatggtggtttggatctttgaatgggaaaaaaggccattttcctgccgcttatgtggaggagttaccttcaaatgctggcaacacagctacaaaggcataa

SEQ ID NO: 159564 - DNA, 475 bp, Homo sapiens
  Payload ID: 11227
  Gene Symbol: NOSTRIN
  Gene Name: nitric oxide synthase trafficking
  ENST ID: ENST00000427068
  CDS Start-End: 1-62
tgcagagagacattgaaaaagcctcaaaagacaaggaagaagttaggcatgtcagactgtgaagcagctctaaagcaacaaggatgacaaaaacgactccacatttgtgactctgatgtctacctagtaacttgttttatatggaccacgataactcattgcaatggaatactagagagcaaattcaagatagaaaacatttagtgatgtgaataccataacgaggaagaagccaacgttgggtaactgttagcaattgctagaatgggtcgactgaaagaatttcaaaatctcatctggaaaaataacaatcaagatgctttaagcaccagcacttctcaaatttcattaagtgaagagaaaggcctggaacgaatgcttaaaacgtactccagcacctcctccttctctgatgcaaagagccagaaagacacagcagcgttaatggatgagaacaatttgaaactagaccttt

SEQ ID NO: 159565 - DNA, 794 bp, Homo sapiens
  Payload ID: 11227
  Gene Symbol: NOSTRIN
  Gene Name: nitric oxide synthase trafficking
  ENST ID: ENST00000447264
  CDS Start-End: 300-794
aatagatcagcttcatttttgaaaagttctcctgggtctttcatatccaggtagaagagacttcatctttattttaagaactcatccaaaagtataataaagtatacaagaacctaaaggagttttctcaaaatggagagaatttctgcaaacaggtcacatctgttcttcagcaaagggcaaacctggaaattagctatgccaaaggacttcagaaactggcaagcaagctgagcaaagcattacagaacacgagaaaaagttgtgttagcagtgcctgggcctgggcctcagagggaatgaaatccacagcggacctgcatcaaaaacttggcaaagcaattgaattggaagcaataaaaccgacttatcaagtcctaaatgtacaagagaagaagagaaaatcacttgacaatgaagttgaaaagacagcaaatcttgtcattagcaactggaatcagcaaattaaggccaagaagaaattaatggttagtaccaagaaacatgaagcacttttccagcttgtagaaagctccaagcaatctatgactgagaaggagaagcggaagctcctcaataaactgacaaaatcaactgaaaagttggaaaaggaagatgaaaattactaccaaaaaaacatggcgggttattctaccagactgaaatgggaaaacacactagagaactgctaccagagcattctggagctggagaaggaaagaattcaacttttatgcaataacttaaaccagtacagccaacatatttctctttttggccaaaccctgaccaca

SEQ ID NO: 159566 - DNA, 2537 bp, Homo sapiens
  Payload ID: 11227
  Gene Symbol: NOSTRIN
  Gene Name: nitric oxide synthase trafficking
  Uniprot ID: Q8IVI9
  ENST ID: ENST00000444448
  CDS Start-End: 477-2168
acagatgcagaacccagggatatggagagccaattgtatttgtaaaacacttagaatggtgcctgacacgtgagttgctttgtctaattctagccctgtggtagctacccaagattgttgtaacctccagtgatcaagttctttggataagcaaagagggagggcattaagtgtgtggaaaagacccctcctctccactcttgttgcaaggactcaggatcctgccctctgagggtttacagaagtcattctcactatctcacactggccgtcttgacccagagcagttctttactttctcgggacacaaacgggatgaaagtccagggctgggacttcctccttggaatgtttgacaaggactgacgtactctaggccctttgaatcccggaagtccaggacacacccaaccttgattacagtgtccagaatgctggagcgtaggtgaaaggacaaaagccagacacatttcaacatgagggacccactgacagattgtccgtataataaagtatacaagaacctaaaggagttttctcaaaatggagagaatttctgcaaacaggtcacatctgttcttcagcaaagggcaaacctggaaattagctatgccaaaggacttcagaaactggcaagcaagctgagcaaagcattacagaacacgagaaaaagttgtgttagcagtgcctgggcctgggcctcagagggaatgaaatccacagcggacctgcatcaaaaacttggcaaagcaattgaattggaagcaataaaaccgacttatcaagtcctaaatgtacaagagaagaagagaaaatcacttgacaatgaagttgaaaagacagcaaatcttgtcattagcaactggaatcagcaaattaaggccaagaagaaattaatggttagtaccaagaaacatgaagcacttttccagcttgtagaaagctccaagcaatctatgactgagaaggagaagcggaagctcctcaataaactgacaaaatcaactgaaaagttggaaaaggaagatgaaaattactaccaaaaaaacatggcgggttattctaccagactgaaatgggaaaacacactagagaactgctaccaggtaacccacagcatctgcctatatgccttttgggtcaaaagagcctggggaaagtgtgtgagtgatttaagataccaagacacattccttcctggaaatctccctccactatggtttggatatgacatagtcaagaggctaatcatgagactttgttcagtctgtcttcagagcattctggagctggagaaggaaagaattcaacttttatgcaataacttaaaccagtacagccaacatatttctctttttggccaaaccctgaccacatgccacacgcagattcactgtgccatcagcaagattgacattgaaaaagatatccaggctgtaatggaagaaactgcaattttatctacagaaaacaaatctgagttcctgttaacggattactttgaagaagatcctaacagtgcaatggataaagagagacgaaagtctttactaaaaccaaaattattgagactgcagagagacattgaaaaagcctcaaaagacaaggaaggcctggaacgaatgcttaaaacgtactccagcacctcctccttctctgatgcaaagagccagaaagacacagcagcgttaatggatgagaacaatttgaaactagaccttttggaagcgaactcctacaaactgtcatcaatgttagcagaacttgagcaaagacctcaacccagccatccttgtagtaattccatcttcaggtggagggaaaaggagcatactcatagctatgtgaaaatatctcggccttttttaatgaagagattagagaatattgtgagcaaggcatcttctggtgggcagagcaatccaggttcttcaactccagcccctggtgcagcccagctcagcagcagactttgcaaggccttgtattcttttcaagccaggcaagatgatgagttgaatttggaaaagggtgacattgtgattatacacgagaaaaaagaaggaggatggtggtttggatctttgaatgggaaaaaaggccattttcctgccgcttatgtggaggagttaccttcaaatgctggcaacacagctacaaaggcataaaacaagactctgaacatactaccttcacactcggtaatcaacaatacagtgtggttcaaataagaataaagtgctcttacctttacatgtttttcttttgaaatggatggagttctacctgcatgtcacagcactttgcattcatgattattagcttgaaacagtcagaaaaaagatggatgggtggagacagacaaggaagaggctccttggttcctagaggagtttccaaattctaggagaccctagagatgatccagtataacccctggtgtcacagaaacagacggagtccaaggtgggttcagctgcttgcctgaagtcagagttatctggtagacaacagcagtgggacttagatgtcttttt

SEQ ID NO: 159567 - DNA, 2535 bp, Homo sapiens
  Payload ID: 11227
  Gene Symbol: NOSTRIN
  Gene Name: nitric oxide synthase trafficking
  Uniprot ID: Q8IVI9
  ENST ID: ENST00000458381
  CDS Start-End: 759-2450
gcgcatgcagcccttcccaagcactggtagggcactgggcatgcagacagcccaccagaagggaagaatcaggagaaaagggatgcaagatcccagagataaactgaagcacaagagggtaaaaactttgtccttggtcttacagccagaaagtggtgatgcaaagaacttagtccaagctttgatctgttctgcactgcctgccaaagcagaaccttgagaaatacccatgtttgggggatgagaagaagaagataaatcagcaaagaaaatagtgataagaaagatgcagaacccagggatatggagagccaattgtatttgtaaaacacttagaatggtgcctgacacgtgagttgctttgtctaattctagccctgtggtagctacccaagattgttgtaacctccagtgatcaagttctttggataagcaaagagggagggcattaagtgtgtggaaaagacccctcctctccactcttgttgcaaggactcaggatcctgccctctgagggtttacagaagtcattctcactatctcacactggccgtcttgacccagagcagttctttactttctcgggacacaaacgggatgaaagtccagggctgggacttcctccttggaatgtttgacaaggactgacgtactctaggccctttgaatcccggaagtccaggacacacccaaccttgattacagtgtccagaatgctggagcgtaggtgaaaggacaaaagccagacacatttcaacatgagggacccactgacagattgtccgtataataaagtatacaagaacctaaaggagttttctcaaaatggagagaatttctgcaaacaggtcacatctgttcttcagcaaagggcaaacctggaaattagctatgccaaaggacttcagaaactggcaagcaagctgagcaaagcattacagaacacgagaaaaagttgtgttagcagtgcctgggcctgggcctcagagggaatgaaatccacagcggacctgcatcaaaaacttggcaaagcaattgaattggaagcaataaaaccgacttatcaagtcctaaatgtacaagagaagaagagaaaatcacttgacaatgaagttgaaaagacagcaaatcttgtcattagcaactggaatcagcaaattaaggccaagaagaaattaatggttagtaccaagaaacatgaagcacttttccagcttgtagaaagctccaagcaatctatgactgagaaggagaagcggaagctcctcaataaactgacaaaatcaactgaaaagttggaaaaggaagatgaaaattactaccaaaaaaacatggcgggttattctaccagactgaaatgggaaaacacactagagaactgctaccaggtaacccacagcatctgcctatatgccttttgggtcaaaagagcctggggaaagtgtgtgagtgatttaagataccaagacacattccttcctggaaatctccctccactatggtttggatatgacatagtcaagaggctaatcatgagactttgttcagtctgtcttcagagcattctggagctggagaaggaaagaattcaacttttatgcaataacttaaaccagtacagccaacatatttctctttttggccaaaccctgaccacatgccacacgcagattcactgtgccatcagcaagattgacattgaaaaagatatccaggctgtaatggaagaaactgcaattttatctacagaaaacaaatctgagttcctgttaacggattactttgaagaagatcctaacagtgcaatggataaagagagacgaaagtctttactaaaaccaaaattattgagactgcagagagacattgaaaaagcctcaaaagacaaggaaggcctggaacgaatgcttaaaacgtactccagcacctcctccttctctgatgcaaagagccagaaagacacagcagcgttaatggatgagaacaatttgaaactagaccttttggaagcgaactcctacaaactgtcatcaatgttagcagaacttgagcaaagacctcaacccagccatccttgtagtaattccatcttcaggtggagggaaaaggagcatactcatagctatgtgaaaatatctcggccttttttaatgaagagattagagaatattgtgagcaaggcatcttctggtgggcagagcaatccaggttcttcaactccagcccctggtgcagcccagctcagcagcagactttgcaaggccttgtattcttttcaagccaggcaagatgatgagttgaatttggaaaagggtgacattgtgattatacacgagaaaaaagaaggaggatggtggtttggatctttgaatgggaaaaaaggccattttcctgccgcttatgtggaggagttaccttcaaatgctggcaacacagctacaaaggcataaaacaagactctgaacatactaccttcacactcggtaatcaacaatacagtgtggttcaaataagaataaagtgctcttaccttta

SEQ ID NO: 159568 - DNA, 1569 bp, Homo sapiens
  Payload ID: 11227
  Gene Symbol: NOSTRIN
  Gene Name: nitric oxide synthase trafficking
  Uniprot ID: Q8IVI9
  ENST ID: ENST00000445023
  CDS Start-End: 199-1485
ccagaatgctggagcgtaggtgaaaggacaaaagccagacacatttcaacatgagggacccactgacagattgtccgggcaaacctggaaattagctatgccaaaggacttcagaaactggcaagcaagctgagcaaagcattacagaacacgagaaaaagttgtgttagcagtgcctgggcctgggcctcagagggaatgaaatccacagcggacctgcatcaaaaacttggcaaagcaattgaattggaagcaataaaaccgacttatcaagtcctaaatgtacaagagaagaagagaaaatcacttgacaatgaagttgaaaagacagcaaatcttgtcattagcaactggaatcagcaaattaaggccaagaagaaattaatggttagtaccaagaaacatgaagcacttttccagcttgtagaaagctccaagcaatctatgactgagaaggagaagcggaagctcctcaataaactgacaaaatcaactgaaaagttggaaaaggaagatgaaaattactaccaaaaaaacatggcgggttattctaccagactgaaatgggaaaacacactagagaactgctaccagagcattctggagctggagaaggaaagaattcaacttttatgcaataacttaaaccagtacagccaacatatttctctttttggccaaaccctgaccacatgccacacgcagattcactgtgccatcagcaagattgacattgaaaaagatatccaggctgtaatggaagaaactgcaattttatctacagaaaacaaatctgagttcctgttaacggattactttgaagaagatcctaacagtgcaatggataaagagagacgaaagtctttactaaaaccaaaattattgagactgcagagagacattgaaaaagcctcaaaagacaaggaaggcctggaacgaatgcttaaaacgtactccagcacctcctccttctctgatgcaaagagccagaaagacacagcagcgttaatggatgagaacaatttgaaactagaccttttggaagcgaactcctacaaactgtcatcaatgttagcagaacttgagcaaagacctcaacccagccatccttgtagtaattccatcttcaggtggagggaaaaggagcatactcatagctatgtgaaaatatctcggccttttttaatgaagagattagagaatattgtgagcaaggcatcttctggtgggcagagcaatccaggttcttcaactccagcccctggtgcagcccagctcagcagcagactttgcaaggccttgtattcttttcaagccaggcaagatgatgagttgaatttggaaaagggtgacattgtgattatacacgagaaaaaagaaggaggatggtggtttggatctttgaatgggaaaaaaggccattttcctgccgcttatgtggaggagttaccttcaaatgctggcaacacagctacaaaggcataaaacaagactctgaacatactaccttcacactcggtaatcaacaatacagtgtggttcaaataagaataaagtgctcttaccttt

SEQ ID NO: 159569 - DNA, 584 bp, Homo sapiens
  Payload ID: 11227
  Gene Symbol: NOSTRIN
  Gene Name: nitric oxide synthase trafficking
  ENST ID: ENST00000439509
  CDS Start-End: 56-349
agtgtccagaatgctggagcgtaggtgaaaggacaaaagccagacacatttcaacatgagggacccactgacagattgtccgtataataaagtatacaagaacctaaaggagttttctcaaaatggagagaatttctgcaaacaggtcacatctgttcttcagcaaagagatggggttctcattctgctgctcaggctggagtgcagtggtgcaattatagcttgctgcagcctcagactcctgtgctcgcgaactcctctcgcctcagcctctcaagtagctaggactgcagggcaaacctggaaattagctatgccaaaggacttcagaaactggcaagcaagctgagcaaagcattacagaacacgagaaaaagttgtgttagcagtgcctgggcctgggcctcagagggaatgaaatccacagcggacctgcatcaaaaacttggcaaagcaattgaattggaagcaataaaaccgacttatcaagtcctaaatgtacaagagaagaagagaaaatcacttgacaatgaagttgaaaagacagcaaatcttgtcattagcaactggaatcagcaaattaa

SEQ ID NO: 159570 - DNA, 475 bp, Homo sapiens; identical to SEQ ID NO: 159564
  Payload ID: 11227
  Gene Symbol: NOSTRIN
  Gene Name: nitric oxide synthase trafficking
  ENST ID: ENST00000613802
  CDS Start-End: 1-62

SEQ ID NO: 159571 - DNA, 1263 bp, Homo sapiens
  Payload ID: 11227
  Gene Symbol: NOSTRIN
  Gene Name: nitric oxide synthase trafficking
  ENST ID: ENST00000610378
  CDS Start-End: 1-1179
cttgacaatgaagttgaaaagacagcaaatcttgtcattagcaactggaatcagcaaattaaggccaagaagaaattaatggttagtaccaagaaacatgaagcacttttccagcttgtagaaagctccaagcaatctatgactgagaaggagaagcggaagctcctcaataaactgacaaaatcaactgaaaagttggaaaaggaagatgaaaattactaccaaaaaaacatggcgggttattctaccagactgaaatgggaaaacacactagagaactgctaccagagcattctggagctggagaaggaaagaattcaacttttatgcaataacttaaaccagtacagccaacatatttctctttttggccaaaccctgaccacatgccacacgcagattcactgtgccatcagcaagattgacattgaaaaagatatccaggctgtaatggaagaaactgcaattttatctacagaaaacaaatctgagttcctgttaacggattactttgaagaagatcctaacagtgcaatggataaagagagacgaaagtctttactaaaaccaaaattattgagactgcagagagacattgaaaaagcctcaaaagacaaggaaggcctggaacgaatgcttaaaacgtactccagcacctcctccttctctgatgcaaagagccagaaagacacagcagcgttaatggatgagaacaatttgaaactagaccttttggaagcgaactcctacaaactgtcatcaatgttagcagaacttgagcaaagacctcaacccagccatccttgtagtaattccatcttcaggtggagggaaaaggagcatactcatagctatgtgaaaatatctcggccttttttaatgaagagattagagaatattgtgagcaaggcatcttctggtgggcagagcaatccaggttcttcaactccagcccctggtgcagcccagctcagcagcagactttgcaaggccttgtattcttttcaagccaggcaagatgatgagttgaatttggaaaagggtgacattgtgattatacacgagaaaaaagaagaaggatggtggtttggatctttgaatgggaaaaaaggccattttcctgccgcttatgtggaggagttaccttcaaatgctggcaacacagctacaaaggcataaaacaagactctgaacatactaccttcacactcggtaatcaacaatacagtgtggttcaaataagaataaagtgctcttaccttt

SEQ ID NO: 159572 - DNA, 1723 bp, Homo sapiens
  Payload ID: 11227
  Gene Symbol: NOSTRIN
  Gene Name: nitric oxide synthase trafficking
  ENST ID: ENST00000618893
  CDS Start-End: 1-1179
cttgacaatgaagttgaaaagacagcaaatcttgtcattagcaactggaatcagcaaattaaggccaagaagaaattaatggttagtaccaagaaacatgaagcacttttccagcttgtagaaagctccaagcaatctatgactgagaaggagaagcggaagctcctcaataaactgacaaaatcaactgaaaagttggaaaaggaagatgaaaattactaccaaaaaaacatggcgggttattctaccagactgaaatgggaaaacacactagagaactgctaccagagcattctggagctggagaaggaaagaattcaacttttatgcaataacttaaaccagtacagccaacatatttctctttttggccaaaccctgaccacatgccacacgcagattcactgtgccatcagcaagattgacattgaaaaagatatccaggctgtaatggaagaaactgcaattttatctacagaaaacaaatctgagttcctgttaacggattactttgaagaagatcctaacagtgcaatggataaagagagacgaaagtctttactaaaaccaaaattattgagactgcagagagacattgaaaaagcctcaaaagacaaggaaggcctggaacgaatgcttaaaacgtactccagcacctcctccttctctgatgcaaagagccagaaagacacagcagcgttaatggatgagaacaatttgaaactagaccttttggaagcgaactcctacaaactgtcatcaatgttagcagaacttgagcaaagacctcaacccagccatccttgtagtaattccatcttcaggtggagggaaaaggagcatactcatagctatgtgaaaatatctcggccttttttaatgaagagattagagaatattgtgagcaaggcatcttctggtgggcagagcaatccaggttcttcaactccagcccctggtgcagcccagctcagcagcagactttgcaaggccttgtattcttttcaagccaggcaagatgatgagttgaatttggaaaagggtgacattgtgattatacacgagaaaaaagaagaaggatggtggtttggatctttgaatgggaaaaaaggccattttcctgccgcttatgtggaggagttaccttcaaatgctggcaacacagctacaaaggcataaaacaagactctgaacatactaccttcacactcggtaatcaacaatacagtgtggttcaaataagaataaagtgctcttacctttacatgtttttcttttgaaatggatggagttctacctgcatgtcacagcactttgcattcatgattattagcttgaaacagtcagaaaaaagatggatgggtggagacagacaaggaagaggctccttggttcctagaggagtttccaaattctaggagaccctagagatgatccagtataacccctggtgtcacagaaacagacggagtccaaggtgggttcagctgcttgcctgaagtcagagttatctggtagacaacagcagtgggacttagatgtctttttcctctggatttgggtggcaacagaacacagcaggcctatgagggggtcaagcagagcctgggagatgaggaacacagatcaattccaagaagagagacaggcaatcaagacaccaatgagatcaacccaaattaggggatggtaggatatctctgacaaacccacagccaatatc

SEQ ID NO: 159573 - DNA, 1179 bp, Homo sapiens
  Payload ID: 11227
  Gene Symbol: NOSTRIN
  Gene Name: nitric oxide synthase trafficking
  ENST ID: ENST00000620516
  CDS Start-End: 1-1179
cttgacaatgaagttgaaaagacagcaaatcttgtcattagcaactggaatcagcaaattaaggccaagaagaaattaatggttagtaccaagaaacatgaagcacttttccagcttgtagaaagctccaagcaatctatgactgagaaggagaagcggaagctcctcaataaactgacaaaatcaactgaaaagttggaaaaggaagatgaaaattactaccaaaaaaacatggcgggttattctaccagactgaaatgggaaaacacactagagaactgctaccagagcattctggagctggagaaggaaagaattcaacttttatgcaataacttaaaccagtacagccaacatatttctctttttggccaaaccctgaccacatgccacacgcagattcactgtgccatcagcaagattgacattgaaaaagatatccaggctgtaatggaagaaactgcaattttatctacagaaaacaaatctgagttcctgttaacggattactttgaagaagatcctaacagtgcaatggataaagagagacgaaagtctttactaaaaccaaaattattgagactgcagagagacattgaaaaagcctcaaaagacaaggaaggcctggaacgaatgcttaaaacgtactccagcacctcctccttctctgatgcaaagagccagaaagacacagcagcgttaatggatgagaacaatttgaaactagaccttttggaagcgaactcctacaaactgtcatcaatgttagcagaacttgagcaaagacctcaacccagccatccttgtagtaattccatcttcaggtggagggaaaaggagcatactcatagctatgtgaaaatatctcggccttttttaatgaagagattagagaatattgtgagcaaggcatcttctggtgggcagagcaatccaggttcttcaactccagcccctggtgcagcccagctcagcagcagactttgcaaggccttgtattcttttcaagccaggcaagatgatgagttgaatttggaaaagggtgacattgtgattatacacgagaaaaaagaagaaggatggtggtttggatctttgaatgggaaaaaaggccattttcctgccgcttatgtggaggagttaccttcaaatgctggcaacacagctacaaaggcataa

SEQ ID NO: 159574 - DNA, 387 bp, Homo sapiens
  Payload ID: 11227
  Gene Symbol: NOSTRIN
  Gene Name: nitric oxide synthase trafficking
  ENST ID: ENST00000619846
  CDS Start-End: 1-387
cttgacaatgaagttgaaaagacagcaaatcttgtcattagcaactggaatcagcaaattaaggccaagaagaaattaatggttagtaccaagaaacatgaagcacttttccagcttgtagaaagctccaagcaatctatgactgagaaggagaagcggaagctcctcaataaactgacaaaatcaactgaaaagttggaaaaggaagatgaaaattactaccaaaaaaacatggcgggttattctaccagactgaaatgggaaaacacactagagaactgctaccagagcattctggagctggagaaggaaagaattcaacttttatgcaataacttaaaccagtacagccaacatatttctctttttggccaaaccctgaccaca

SEQ ID NO: 159575 - DNA, 1179 bp, Homo sapiens; identical to SEQ ID NO: 159573
  Payload ID: 11227
  Gene Symbol: NOSTRIN
  Gene Name: nitric oxide synthase trafficking
  ENST ID: ENST00000614842
  CDS Start-End: 1-1179

SEQ ID NO: 159576 - DNA, 1179 bp, Homo sapiens; identical to SEQ ID NO: 159573
  Payload ID: 11227
  Gene Symbol: NOSTRIN
  Gene Name: nitric oxide synthase trafficking
  ENST ID: ENST00000611498
  CDS Start-End: 1-1179

SEQ ID NO: 159577 - DNA, 1435 bp, Homo sapiens
  Payload ID: 11227
  Gene Symbol: NOSTRIN
  Gene Name: nitric oxide synthase trafficking
  ENST ID: ENST00000610364
  CDS Start-End: 1-1350
cttgacaatgaagttgaaaagacagcaaatcttgtcattagcaactggaatcagcaaattaaggccaagaagaaattaatggttagtaccaagaaacatgaagcacttttccagcttgtagaaagctccaagcaatctatgactgagaaggagaagcggaagctcctcaataaactgacaaaatcaactgaaaagttggaaaaggaagatgaaaattactaccaaaaaaacatggcgggttattctaccagactgaaatgggaaaacacactagagaactgctaccaggtaacccacagcatctgcctatatgccttttgggtcaaaagagcctggggaaagtgtgtgagtgatttaagataccaagacatattccttcctggaaatctccctccactatggtttggatatgacatagtcaagaggctaatcatgagactttgttcagtctgtcttcagagcattctggagctggagaaggaaagaattcaacttttatgcaataacttaaaccagtacagccaacatatttctctttttggccaaaccctgaccacatgccacacgcagattcactgtgccatcagcaagattgacattgaaaaagatatccaggctgtaatggaagaaactgcaattttatctacagaaaacaaatctgagttcctgttaacggattactttgaagaagatcctaacagtgcaatggataaagagagacgaaagtctttactaaaaccaaaattattgagactgcagagagacattgaaaaagcctcaaaagacaaggaaggcctggaacgaatgcttaaaacgtactccagcacctcctccttctctgatgcaaagagccagaaagacacagcagcgttaatggatgagaacaatttgaaactagaccttttggaagcgaactcctacaaactgtcatcaatgttagcagaacttgagcaaagacctcaacccagccatccttgtagtaattccatcttcaggtggagggaaaaggagcatactcatagctatgtgaaaatatctcggccttttttaatgaagagattagagaatattgtgagcaaggcatcttctggtgggcagagcaatccaggttcttcaactccagcccctggtgcagcccagctcagcagcagactttgcaaggccttgtattcttttcaagccaggcaagatgatgagttgaatttggaaaagggtgacattgtgattatacacgagaaaaaagaagaaggatggtggtttggatctttgaatgggaaaaaaggccattttcctgccgcttatgtggaggagttaccttcaaatgctggcaacacagctacaaaggcataaaacaagactctgaacatactaccttcacactcggtaatcaacaatacagtgtggttcaaataagaataaagtgctcttaccttta

SEQ ID NO: 159578 - DNA, 1437 bp, Homo sapiens; identical to SEQ ID NO: 159563
  Payload ID: 11227
  Gene Symbol: NOSTRIN
  Gene Name: nitric oxide synthase trafficking
  Uniprot ID: Q8IVI9
  ENST ID: ENST00000628859
  CDS Start-End: 1-1437

SEQ ID NO: 159579 - DNA, 1749 bp, Homo sapiens
  Payload ID: 11228
  Gene Symbol: NIT1
  Gene Name: nitrilase 1
  Uniprot ID: Q86X76
  ENST ID: ENST00000368007
  CDS Start-End: 383-1321
gcttctggctccagaccgccctccggatcggaccctgcgaatggttttggctatatcttcatgtaggacctactccctatcccgtcggccgcggtgaatcccacctgcggtgctttaacttgtgtaacagagatgctgcctctgggagaggcggggagggacgggccaactggagcgggcggcgggagggtggagggcggggcgcggcttggggcctgggttcctttgccccttgcccaccagggaggggtgggagacgagagagggtgaactttcccctgcgagattctggtgaaaggggaaatatgcttcgagtcagtaaagctgcgcaagtgcacagtcaaggagagagtcttgggaaaaccaaggatagttcccggagatgacttttggactgcggaaacgtttgtcagaggaaagaggcttcagtttaatgcccagagccatggctatctcctcttcctcctgcgaactgcccctggtggctgtgtgccaggtaacatcgacgccagacaagcaacagaactttaaaacatgtgctgagctggttcgagaggctgccagactgggtgcctgcctggctttcctgcctgaggcatttgacttcattgcacgggaccctgcagagacgctacacctgtctgaaccactgggtgggaaacttttggaagaatacacccagcttgccagggaatgtggactctggctgtccttgggtggtttccatgagcgtggccaagactgggagcagactcagaaaatctacaattgtcacgtgctgctgaacagcaaaggggcagtagtggccacttacaggaagacacatctgtgtgacgtagagattccagggcaggggcctatgtgtgaaagcaactctaccatgcctgggcccagtcttgagtcacctgtcagcacaccagcaggcaagattggtctagctgtctgctatgacatgcggttccctgaactctctctggcattggctcaagctggagcagagatacttacctatccttcagcttttggatccattacaggcccagcccactgggaggtgttgctgcgggcccgtgctatcgaaacccagtgctatgtagtggcagcagcacagtgtggacgccaccatgagaagagagcaagttatggccacagcatggtggtagacccctggggaacagtggtggcccgctgctctgaggggccaggcctctgccttgcccgaatagacctcaactatctgcgacagttgcgccgacacctgcctgtgttccagcaccgcaggcctgacctctatggcaatctgggtcacccactgtcttaagacttgacttctgtgagtttagacctgcccctcccacccccaccctgccactatgagctagtgctcatgtgacttggaggcaggatccaggcacagctcccctcacttggagaaccttgactctcttgatggaacacagatgggctgcttgggaaagaaactttcacctgagcttcacctgaggtcagactgcagtttcagaaaggtggaattttatatagtcattgtttatttcatggaaactgaagttctgctgagggctgagcagcactggcattgaaaaatataataatcataaagtctgtgtctggacatcgcctttgggaactagaaggggagttggtattgtaccagctggactaagctccagttctagacctcctggctcattcaacatgcctccctacctaaataaaagtgcaacactc

SEQ ID NO: 159580 - DNA, 2081 bp, Homo sapiens
  Payload ID: 11228
  Gene Symbol: NIT1
  Gene Name: nitrilase 1
  Uniprot ID: Q86X76
  ENST ID: ENST00000368008
  CDS Start-End: 60-791
cttctggctccagaccgccctccggatcggaccctgcgaatggttttggctatatcttcatgctgggcttcatcaccaggcctcctcacagattcctgtcccttctgtgtcctggactccggatacctcaactctcagtactttgtgctcagcccaggcccagagccatggctatctcctcttcctcctgcgaactgcccctggtggctgtgtgccaggtaacatcgacgccagacaagcaacagaactttaaaacatgtgctgagctggttcgagaggctgccagactgggtgcctgcctggctttcctgcctgaggcatttgacttcattgcacgggaccctgcagagacgctacacctgtctgaaccactgggtgggaaacttttggaagaatacacccagcttgccagggaatgtggactctggctgtccttgggtggtttccatgagcgtggccaagactgggagcagactcagaaaatctacaattgtcacgtgctgctgaacagcaaaggggcagtagtggccacttacaggaagacacatctgtgtgacgtagagattccagggcaggggcctatgtgtgaaagcaactctaccatgcctgggcccagtcttgagtcacctgtcagcacaccagcaggcaagattggtctagctgtctgctatgacatgcggttccctgaactctctctggcattggctcaagctggagcagagatacttacctatccttcagcttttggatccattacaggcccagcccactgggagcccgtctcctcttgagggtgacgtagggcagcaggtcgtggcgagtgatgatgcgcagcagctgcagcacctggcgaaagttactttcatcacagcggccctggcgctccagtgccaataagaagtcacgtccatttcggatgagtccacgctcgtggtcatcaatgacatcaacaaagaggaaagaaagcacgcgcacatctctgtgtgtcagatgagtgcccacgatgtcaaacatgcggtgcaggctgtacagcccatgttcctgctcaccatgctcttctggccacacctggcttgcccgccgctttaggcccgccatgctgggggctcaggtacgcaatgctttccagaatccctgctcagcagctgcaatccccaccgtactgaaagggcagggaaagaaccgatgagacactcaagggcaggaactagtctcatgcattcccatattcccagttgctaacaatgcctggcacagtatagtgctttatacatgtttattaaatttttgaagtgtttgtttaaaaataaacactggccaggcacaggggctcacacctgtaatcccagcattttgggaggccaaggcaggaggatcacttgagcccaggcgtttaagaccagcctgggcaacatagggagacccgtttctacaaaaaaagaaaaaattagctgggcttggtggtacacgcctgtagtcccagctgcacaggaggctgaggtgggaggaaggcttgaggccaggagttcaagatcagcctggtcaacatagcaagaccccatctctacaaaaaagaaaaaaattagcaaggcatggtggcatgtgcctgtagtccctgctactcaggaggctgaggcaggaggatcacttgagcccaggagttcaaggctgcagtgagccataatcctgcactgtagcctgggtgacagagtgagtcccccatctcggaaaaaaaagaactagtttaaattctgactgtatcactgaaaggctgtgtagctgtgtgaccgtaagcaagtcacttaactccagattctcagtgctgtcatctataaacagggatgaatgaatatacacctcagagttgttaagaatccaatgagaaaatcacgggtaacccttatataaatggttgtgaaacatttcaaagatacaagcatccttggcctttgcagcccagaatcatccctccacatttttcctacaatccaaccacatcaagaaatgataactgctcagaaagtttatcaatatttaccaaaactcatggatttaaaataaacattaagtttctacaataa

SEQ ID NO: 159581 - DNA, 1362 bp, Homo sapiens
  Payload ID: 11228
  Gene Symbol: NIT1
  Gene Name: nitrilase 1
  Uniprot ID: Q86X76
  ENST ID: ENST00000368009
  CDS Start-End: 77-1060
gcccactcgctgcggcgcttctggctccagaccgccctccggatcggaccctgcgaatggttttggctatatcttcatgctgggcttcatcaccaggcctcctcacagattcctgtcccttctgtgtcctggactccggatacctcaactctcagtactttgtgctcagcccaggcccagagccatggctatctcctcttcctcctgcgaactgcccctggtggctgtgtgccaggtaacatcgacgccagacaagcaacagaactttaaaacatgtgctgagctggttcgagaggctgccagactgggtgcctgcctggctttcctgcctgaggcatttgacttcattgcacgggaccctgcagagacgctacacctgtctgaaccactgggtgggaaacttttggaagaatacacccagcttgccagggaatgtggactctggctgtccttgggtggtttccatgagcgtggccaagactgggagcagactcagaaaatctacaattgtcacgtgctgctgaacagcaaaggggcagtagtggccacttacaggaagacacatctgtgtgacgtagagattccagggcaggggcctatgtgtgaaagcaactctaccatgcctgggcccagtcttgagtcacctgtcagcacaccagcaggcaagattggtctagctgtctgctatgacatgcggttccctgaactctctctggcattggctcaagctggagcagagatacttacctatccttcagcttttggatccattacaggcccagcccactgggaggtgttgctgcgggcccgtgctatcgaaacccagtgctatgtagtggcagcagcacagtgtggacgccaccatgagaagagagcaagttatggccacagcatggtggtagacccctggggaacagtggtggcccgctgctctgaggggccaggcctctgccttgcccgaatagacctcaactatctgcgacagttgcgccgacacctgcctgtgttccagcaccgcaggcctgacctctatggcaatctgggtcacccactgtcttaagacttgacttctgtgagtttagacctgcccctcccacccccaccctgccactatgagctagtgctcatgtgacttggaggcaggatccaggcacagctcccctcacttggagaaccttgactctcttgatggaacacagatgggctgcttgggaaagaaactttcacctgagcttcacctgaggtcagactgcagtttcagaaaggtggaattttatatagtcattgtttatttcatggaaactgaagttctgctgagggctgagcagcactggcattgaaaaatataataatcataaagtc

SEQ ID NO: 159582 - DNA, 1518 bp, Homo sapiens
  Payload ID: 11228
  Gene Symbol: NIT1
  Gene Name: nitrilase 1
  Uniprot ID: Q86X76
  ENST ID: ENST00000392190
  CDS Start-End: 215-1090
cttctggctccagaccgccctccggatcggaccctgcgaatggttttggctatatcttcatgtaggacctactccctatcccgtcggccgcggtgaatcccacctgcggctgggcttcatcaccaggcctcctcacagattcctgtcccttctgtgtcctggactccggatacctcaactctcagtactttgtgctcagcccaggcccagagccatggctatctcctcttcctcctgcgaactgcccctggtggctgtgtgccaggtaacatcgacgccagacaagcaacagaactttaaaacatgtgctgagctggttcgagaggctgccagactgggtgcctgcctggctttcctgcctgaggcatttgacttcattgcacgggaccctgcagagacgctacacctgtctgaaccactgggtgggaaacttttggaagaatacacccagcttgccagggaatgtggactctggctgtccttgggtggtttccatgagcgtggccaagactgggagcagactcagaaaatctacaattgtcacgtgctgctgaacagcaaaggggcagtagtggccacttacaggaagacacatctgtgtgacgtagagattccagggcaggggcctatgtgtgaaagcaactctaccatgcctgggcccagtcttgagtcacctgtcagcacaccagcaggcaagattggtctagctgtctgctatgacatgcggttccctgaactctctctggcattggctcaagctggagcagagatacttacctatccttcagcttttggatccattacaggcccagcccactgggaggtgttgctgcgggcccgtgctatcgaaacccagtgctatgtagtggcagcagcacagtgtggacgccaccatgagaagagagcaagttatggccacagcatggtggtagacccctggggaacagtggtggcccgctgctctgaggggccaggcctctgccttgcccgaatagacctcaactatctgcgacagttgcgccgacacctgcctgtgttccagcaccgcaggcctgacctctatggcaatctgggtcacccactgtcttaagacttgacttctgtgagtttagacctgcccctcccacccccaccctgccactatgagctagtgctcatgtgacttggaggcaggatccaggcacagctcccctcacttggagaaccttgactctcttgatggaacacagatgggctgcttgggaaagaaactttcacctgagcttcacctgaggtcagactgcagtttcagaaaggtggaattttatatagtcattgtttatttcatggaaactgaagttctgctgagggctgagcagcactggcattgaaaaatataataatcataaagtctgtgtctggacatcgcctttgggaactagaaggggagttggtattgtaccagctggactaagctccagttctagacctcctggctcattcaacatgcctccctacctaaataaaagtgcaacactc

SEQ ID NO: 159583 - DNA, 7289 bp, Homo sapiens
  Payload ID: 11229
  Gene Symbol: NIT2
  Gene Name: nitrilase family, member 2
  Uniprot ID: Q9NQR4
  ENST ID: ENST00000394140
  CDS Start-End: 92-922
gacgcggtccccgccccaccgtagcgacgccgcggtccgccggatctccagcgctcagtccgcgccgcaggtggtgcttgtctgcagagtcatgacctctttccgcttggccctcatccagcttcagatttcttccatcaaatcagataacgtcactcgcgcttgtagcttcatccgggaggcagcaacgcaaggagccaaaatagtttctttgccggaatgctttaattctccatatggagcgaaatattttcctgaatatgcagagaaaattcctggtgaatccacacagaagctttctgaagtagcaaaggaatgcagcatatatctcattggaggctctatccctgaagaggatgctgggaaattatataacacctgtgctgtgtttgggcctgatggaactttactagcaaagtatagaaagatccatctgtttgacattgatgttcctggaaaaattacatttcaagaatctaaaacattgagtccgggtgatagtttctccacatttgatactccttactgcagagtgggtctgggcatctgctacgacatgcggtttgcagagcttgcacaaatctacgcacagagaggctgccagctgttggtatatccaggagcttttaatctgaccactggaccagcccattgggagttacttcagcgaagccgggctgttgataatcaggtgtatgtggccacagcctctcctgcccgggatgacaaagcctcctatgttgcctggggacacagcaccgtggtgaacccttggggggaggttctagccaaagctggcacagaagaagcaatcgtgtattcagacatagacctgaagaagctggctgaaatacgccagcaaatccccgtttttagacagaagcgatcagacctctatgctgtggagatgaaaaagccctaaagtttatgtttctaatgtgtcacagaataggacgatatgattctacaacataatcaactccctattaaattctttaatgaagattttttttttaattcggccttgtccttcctaggttctctattgagatgagaaagcctcattatgctgacattttccacgccacattaaatagttaaaaaggatgcagcctggagccagagagcagaaagctgggctggttctgaagcttcttccatacttaagttgcctccaagcagtttgtgaaagtatcagatcttggtatcctggtgattgattcacctaatataaatatatttgtgtcatgaacctcttatcccgttgctggagttgtaatctccatcatctagaaaacgtggtctggtgctattcttttccaagcagtaccttgaagttccatttttggttcatgagtagctatagaacgcaaggtgatacatctttggtgtttgccagagaagttggcagccccacccctcctaccagcctttgcactcttcaaatttaaaaaggagctacttatcaaccccaggcccttctggtcttagaggaaggactgggccaacaaagagcaccatgggagaatggcagtggtggcatttagtgaagacaatttagtatgaatgtctgcaaaagatttttttgatagcgttgagtgtctgaaagtcccattatttttcttttttctttttccccagtaacactttctagctccacggataaggaatcactgaacctagtagttcttagacagcttggtttgagaatccttttgcggttaaaaattagggactgagccaggcgcagtagcatgcgcctgtagtcctagccacattggaggctgaggtaggaggatcccttgagtccacaagtttgagttcagccagagaccctatctcactatatatatgtatctcaaagacttcaatgggtttttgcttacatgggccagtaattgttgaacaaccagctatttgagaaaaagccctgattttgctgcttttcatggtgtaaatacttaaccatggctgagtttgagctatctgcatgacacctctaaacacagagttgggaatagatgtgcacaatcagctctggggagctggtgcaatcctgccctagcacaccactggtttaagatagatatatcatatagatatttaccatttaccatattggaaagtaaaatggagaaaaatttaaaacacaagatacatgagcacacattccattagctattaaggtgatggacacggtgtccaaatgacacggtgtcatttaacttctggaaaacaacactgtgtactgagaacaagagaaagacaaatgacttttttaaattaagtttttaatttacaattgatgcataattttactttaaaaaaataagtgtgcaatttggtaaactttgacatatacagctataaaccactccaatcaagataacatatttaccacccccaacagtttccatgtgctgtattataatccctctggctagtcctttgtcaatcactgataaattttattactatagattagcttgcattttctaaaattatataaaaatgaaatcatgccattagtgctttttctgtatgtcttctttcactcaaaatcacttggaactcaaaattacttctttcactcaaaatcactcaaaattacatactctgtatgtcttctttcactcaaaattacttctttcatttttagacggaagcatttagacctcaaaattacttggagattcatctggtatgtgcattaataattcataattcattccttttttattgctgagtagtatacaatttgtttatccatttatctgctgttggagatttgggctatttccagattttggctgttgcaaaaaagcaacctcacagatccttttaaaggatgtcaggtgctttcaggtaaccctagactatagtaccactgctctctatcctagcaggcacactgaaagttaaaccttgtaatagtgcgaaatcattttcttttttaaaaatatattttcttacttttatatattttactcaatctcatgacagattacattttcttttttaaatagaaagtcttactgtaaagcccacatctgtataaaaaaatgaaagaatgatctggttgatgtggatgtgtggaacctaggaaccttctcttggattttctcttattccccaaaaaacttcatttcctctaaagagctgctcagaagtttgaaaaccagtggacaagccatcctagctgtcttgatgctagagaagcaaagacgctttacagagatgtagcattcctgtaacaggtaaggcaggtggatgctaaactttttacatttcttttttttttttttttttttttgagacagagtcacgctgtcgcccaagctggagtgcagtggcatgatcttggttcactgcatcctctacctccttggttgaagcaattctcaggcctcagcctcctaaaagtagctgagactacaggcacgtgccaccatgcctggctaatttttgtgtttttagtagagatggggtttcaccatcttggccaggctggtcttgaactcctgacctcaagtgatccacctgccttagcctcccaaaatgctaggattagaggcgtgagccaccgcgcccggcctaatttttgtatttttagtagaaatggggtttcaccatgttggccagtctgatctcgaactcctggcctcaagtgatccaccagccttggcctccccaaagtgttgggattacagacgtgagccacggcacccagccttttgtttgtttttgtttttatgtatttcattaaatgaattgtccttttagtggtatatcaggagatcttgccttctggtactcttgaaaaatatgaaaagaaacaactgaagtaggcatctcctataattagtatgtagcattttattctcagaaaatgtgtggtaacctggccctggattttacctttttgcaaagtgatatccgaataaaatgaacactagattcccacttggagtggaagaacattgcagttgaggccttgggtaagttttaactgccatacccctgtactccccgactttctaatgaattagacaatgatgttttatttttgttttttgtttttgcataatactttgaagtctgctatcacaagttgtgaacctctatctcttgcagtttaggtaaggcaacacatttaatgaattcacatttaagtgaattcctcacagggatgacgacctctgttgaaataggtcaggatgtgcagtttgtggtgaaagttctacttgactttgacctagctgtttgaagctgagagctaacagataataagtgttgcactggttgcaaatgaataaataagtaacattatggggttttaaatgaccaaggagtagattgtgacatcgactgggtatttagggaaggactccttcctgataccaaaagttaggtctgtgcaaagtacaccaagtggaaaaaagtttagacaagagtttaggtttcaagataaatgttctgctctattggcactggttttaagtcttttgtgctactttttaggcattgctgtgtaagttttggtggtgcgtgggtacaatgaagccaggagggatagaaagggaaatgatgtgtgtgctgcaggctaaacaggggctcttccttatgcctcataaccacctgtgtgtgacagtttcacatttcctatcaaattattatcttcattcatttctacttgtgaatgaagttcggagactaagaaaaagccagctgttggaatagaaagcactttaggataaaatggtcttgttaaaatcaccaattaaaaagttaagcccctgatgtacaaataactaaaacacatacatacaaagacagtgcttcttgttcaatgatttacttcacagctgattcataatcaaatgaacaagaatctgcaagaacagaacatggtgggcagggtccagtaattccaaatgttgtcatcctagctcttcctgaagcatattgaatcctccaagtatatcccgttgtgctaactaggctttaagtcttttgtctgtagattcattctcaaagtttctccctcagaacaaagagcacgccatcctgtaaagtactcttcctgattttttttcacccaatttcttagtttctttcaattgcttttcagaccccggcaggcagattctgccctcatctgtccagtgacactcttctggcagattactaaagaccgatttgtagacctgtccatgtggcctctctcaacaccattggtgtgaccttgctcatactgcctctctcaccacttaacattgtcccttagatgttaaaggcccttatattaatagttttattttagctcctttacattttattttgtcctgaggaatctcagctacatgcatggtcttcaatatatgccgataattctcattcacatagctctcctgttggcttttccccactcgtttaaaaacaaccacttcactttgctggactctaccttgaatgcctcattttcagctcacactcatgctgtgcctttatttagatttgttgtggttgtttccccacattctggaagctccttacctaaatcctgtttattccttaatgcttagcacaatttattactcttgtttccatggcactacattgtacttctgttttagagactaccttcctctgaagcatatgacaggttcatttactatccagcccaccaaaactcagtttttgagctcctctatgttcatctttttatggctaaccctcaccatcatgagtgcttagtaaatgttgagttggaatgaatttattcctacaggttgcacttgctctctcaccaagtgttctggccaaataattctggaatgatttccttaccttaagggagtctgatctgggaagagcctgggacgtgatgtaacttcatatgctgtagagctgaatattcatttacttaagatcttagctccattagaaagcagtgaaagcagtgttaattcagaggccgggtatggtggctcacgcctgtaatcccagcactttgggaggccaagatgggcagatcacttaaggtcaggagttcaagaccagcctggccaacatggcaaaaccccatctctactaaaaatacaaaaattagccgggtgtggtggcacatgcctgtgatcccagctactcgggagggtaaggcaggaggaggttacagtgagccaagatcacaccactgtactcctgggcaacagagttaaactgtatcaaaaaaaaaatgcagtattgatttagagctaaggtcacctgatgctcaggccagtaatttctccctgcatcatgctgttgtctaaggcagacactgtaaagctctacactgctgaaaaactaagcttgagatgcataaaagaacacatagagatggggagtcagttctccatacattttgtgagtagaggcattggtgttttgttccaaactatccaatcgagaatgttcatataatgacagctttggaaggtagagactatcttcctctggatcataggacaggtttgtttactatctgatacagtcaaaatagtgtttccctctaatgcgaaagtcaggccagtttgcttgtgacctcattagatttgggctgtgacgcaaacccactgcatgtgcagtatccacctagcttgccctgtgtcactcccatgggatctgtggctcaaactcatgttgcttgctatgttctaaataattaagtctgttgtctgacccaggagtctcatgtcttctgccagcattcagaaaactagttttcaagaagggtaacatcttagaccttttacagctcttgacacagagcaatattgagaaataaaatcaggtaaaagttatttaatatagcagttcataatttaggccatggatcatctctgcagagaatcctaccatgctgcattcttgctttaaacctttcgccctctaaaacaatgcccaagagccaatgttagtcatggtcttcctgtatttgctctaggtaagctgtttcatagccttccaggacaacacttgcacaggttatctttaagcaccaacaaaagaaatggagaaatttgagccatgtatcctgagctctgaaaggcagcaatcatcttgaccccaagcatacaccatgttcagcttcctccccttggccaggtaccacagctacttctatcccagtgatcagcaggccctccagcatgaagacctttgagaaggatctatagctgtcaactcctaatatgatttgtgcactatcaccttgaagtaaaccagactagttattttcatgctaa

SEQ ID NO: 159584 - DNA, 625 bp, Homo sapiens
  Payload ID: 11229
  Gene Symbol: NIT2
  Gene Name: nitrilase family, member 2
  ENST ID: ENST00000480073
  CDS Start-End: 23-301
ggtggtgcttgtctgcagagtcatgacctctttccgcttggccctcatccagcttcagatttcttccatcaaatcagataacgtcactcgcgcttgtagcttcatccgggaggcagcaacgcaaggagccaaaatagtttctttgccggaatgctttaattctccatatggagcgaaatattttcctgaatatgcagagaaaattcctggtgaatccacacagaagctttctgaagtagcaaaggaatgcagcatatatctcattggaggtaacttcctacccacaaggctctatccctgaagaggatgctgggaaattatataacacctgtgctgtgtttgggcctgatggaactttactagcaaagtatagaaagatccatctgtttgacattgatgttcctggaaaaattacatttcaagaatctaaaacattgagtccgggtgatagtttctccacatttgatactccttactgcagagtgggtctgggcatctgctacgacatgcggtttgcagagcttgcacaaatctacgcacagagaggctgccagctgttggtatatccaggagcttttaatctgaccactggaccagcccattgggagttacttcagcgaagccg

SEQ ID NO: 159585 - DNA, 795 bp, Homo sapiens
  Payload ID: 11229
  Gene Symbol: NIT2
  Gene Name: nitrilase family, member 2
  ENST ID: ENST00000497785
  CDS Start-End: 1-795
gccgcgcgctgcagctcgagttcgggccgcgggggaggctttggagcggcgccggcggtggctcggccggctcagcccctccgccccgcgtccccgccgtgcgcggccttccctgaggcgggcgtccgcgtgggtccgggatcgcgtggccgggcggccgggcgcactcccgggattccaggcttccggggtggcgggcgaggcccagaaagcaccaggccacccggccgcgccggcacccgccgcgtcctgcttgacagaggctgatggacgtgtatttctccacgctttccgcttggccctcatccagcttcagatttcttccatcaaatcagataacgtcactcgcgcttgtagcttcatccgggaggcagcaacgcaaggagccaaaatagtttctttgccggaatgctttaattctccatatggagcgaaatattttcctgaatatgcagagaaaattcctggtgaatccacacagaagctttctgaagtagcaaaggaatgcagcatatatctcattggaggctctatccctgaagaggatgctgggaaattatataacacctgtgctgtgtttgggcctgatggaactttactagcaaagtatagaaagatccatctgtttgacattgatgttcctggaaaaattacatttcaagaatctaaaacattgagtccgggtgatagtttctccacatttgatactccttactgcagagtgggtctgggcatctgctacgacatgcggtttgcagagcttgcacaaatctacgcacagagaggtgaggcagt

SEQ ID NO: 159586 - DNA, 648 bp, Homo sapiens
  Payload ID: 11229
  Gene Symbol: NIT2
  Gene Name: nitrilase family, member 2
  ENST ID: ENST00000460317
  CDS Start-End: 17-151
gcttgtctgcagagtcatgacctgtaagtggcgcggccgcgcgctgcagctcgagttcgggccgcgggggaggctttggagcggcgccggcggtggctcggccggctcagcccctccgccccgcgtccccgccgtgcgcggccttccctgaggcgggcgtccgcgtgggtccgggatcgcgtggccgggcggccgggcgcactcccgggattccaggcttccggggtggcgggcgaggcccagaaagcaccaggccacccggccgcgccggcacccgccgcgtcctgcttgacagaggctgatggacgtgtatttctccacggtgtgggccgcggtgctttccgcttggccctcatccagcttcagatttcttccatcaaatcagataacgtcactcgcgcttgtagcttcatccgggaggcagcaacgcaaggagccaaaatagtttctttgccggaatgctttaattctccatatggagcgaaatattttcctgaatatgcagagaaaattcctggtgaatccacacagaagctttctgaagtagcaaaggaatgcagcatatatctcattggaggctctatccctgaagaggatgctgggaaattatataacacctgtgctgtgtttgggcctgatggaacttta

SEQ ID NO: 159587 - DNA, 1236 bp, Homo sapiens
  Payload ID: 11230
  Gene Symbol: NKX1-1
  Gene Name: NK1 homeobox 1
  Uniprot ID: Q15270
  ENST ID: ENST00000422806
  CDS Start-End: 1-1236
atggacgggcgcgccgagctgccggcctttccccgcgctggagccccgccgctcgcggccagcgacactgtgcctgcggcgcccgagggggctggagcggcccggcccgcagcgcccctgcgccccacctccttctcggtactggacatcctggaccccaacaagttcaacagcaggaggcgtcgttgcgtgctgctgggcccagtggctcccgctgcgtgcgccccttgcgcttcggccccatgcgcccctgcacccgccgcctcgggacgcccgccacgcgcggaggagctggagcgccgcgccctcgccggcgccgggggagtcggagccgccggagctgagccgccgaacgccggcgaccccttcaaggcaggggaggccgagaccaacgacaccaacggctacagcagcggcggcggcggccacagcccgagcgcggacagcggggacgaggttcccgacgacgaggacgacgacgaggacgaagcgcccgagacggaggcggcgcgaggcgcggaggaggcgcggggaggcggcggcggcctcggggcccgcgggtcgggttgccagggcgcggctgagaccgacgcgtcccccggagccaccgtcgacgaggcagcggcccccggaccccgcgagaactcgcccgttgcccagggcccaccgggaggtgcagcggcgccggggggcgcggggaccaccccgcagggcacggcgacggcggcgaagcccaagcggaagcgcacggggtccgactccaagtccgggaagccgcggcgagcgcgcaccgccttcacctacgagcagctcgtggcgctggagaacaagttcaaggccacgcgctacctgtcggtgtgcgagcgcctcaacctggcgctgtcgctcagcctcaccgagacgcaggtgaagatctggttccagaaccgccgaaccaagtggaagaagcagaacccgggcgccgacaccagcgctccgaccggcggcgggggcggaccgggaccgggggccgggcctggcacggggctgcccggcggcctcagcccgctcagcccctcgccgcccatgggcgccccgctcggcatgcacggcccggccgggtacccggcgcacggccccggaggcctggtgtgcgccgcgcagctgccgttcctgtcgagcccggcggtgctctcgcccttcgtgctgggctcgcagacctacggggcgcccgccttctacgcgccgcacctctga

SEQ ID NO: 159588 - DNA, 3364 bp, Homo sapiens
  Payload ID: 11231
  Gene Symbol: NKX1-2
  Gene Name: NK1 homeobox 2
  Uniprot ID: Q9UD57
  ENST ID: ENST00000451024
  CDS Start-End: 242-1174
gcggccgcggcacagcgcctgatagtcccgaggctggcccgggctgcgccggtgccaatcggcgcgcagccccccgcggcgctctccccgccccgcctccccgcccccctccccagcttcacttggcagcgcggacccggctcctggctggaaagctaccgccaagccacagccgaaggcaagcccgagcggcgccatccccaaccccgcgccgccgaccgccggcccgtgggcgacgggcatgctggcatggcaggacggcggggccaaggcggctccctcccaccacaagatttctttctctgtcctggacatcctggacccacagaaattcacccgcgcagcgctccctgccgtgcgcccggctccccgggaagccaggaaaagtttggcggaggtcgaagcggggaaagatgccagctccagggaccctgtccgacagctggagacccctgatgctgcgggcccaggcgccggccaggcgtcccccctggagggttccgaggcggaagaggaggaggatgcggaggatccgaggaggccgcggctgcgggagcgggctgcgcgcttgctgccgggcctagcgcgctcacctgacgccccggccggggcattggcgtctggggagccctgcgaggacggcgggggcggccctgtgaggtcccccccgggatcccccggctccccgcgtcccaggcgccggcgcctggagcccaactgcgccaagccgcggcgcgcgcgcaccgccttcacctacgagcagctggtggccttggagaacaagttccgggccacgcgctacctgtcagtgtgcgagcgcctgaacctcgcgctgtctctcagcctcaccgagacgcaggtcaaaatctggttccagaatcgcaggaccaagtggaagaagcagaacccgggtgccgacggcgcggcgcaggtggggggtggcgcgccccagccaggggcggcggggggcggcggcggcggcggctcggggggcagtcctggccctcccggcaccggcgctctgcacttccagactttcccctcctactccgcggccaatgtcctcttcccgtccgccgcctccttcccgctgacggctgccgcccccgggagccctttcgcgccgttccttgggccttcctacctgacccccttctacgccccgcgtctatgaatccggagccccctggcccctctttcgcgggattcacgagggattggcatcgtcgtgtgccctcggctcctccaccgggggtgcaggtgcgcgggtgtcagcgcacccctgcccgccgcgcgcacccgcgatcctcgcgggccaccaaggggtcagggatctgccgtccttcaaagtgtccggggacggaggctgacctcaagccttgccgtttctggaccttgctgttcactttgggtcaggtttaattcagttcaggggctagtttttgagggtctgggtgttcggcgcggggctaaccaagatgccaggagggaaatacagggagcagagacgccctggctgccagctgctggcggctaggatggaacctttaaaggtgctggctcatcagagggtgagaaacagtctctgttcacaactgacagcttcccctcctcgtgctcgatggttcagcccaaacccagagagttcttccaaatcctgaacgaggctggggagagcttggtcctggagcacagacggccgctctgaaacggactatttttaaaatgcataaaactccacatttctagatctttacttaagattcggactggaacacaatacttgttccaaataacctccccaggctattcctgagagagggggtaccttggtttttggagtaggccagaagtttgtggtaggaaaggtgactgatttgcagctagactcacctgctaaagtagacacgggtctgttgcactgcaggttttgagaacagcctggaccaaaccacacagtgaccccaaaggcataaaaatgataatgaaggcagcgatggctcaactaatatcatgaagtctatgcatgaggctgcctactttgatttgcagtagttgatactttaaaacttcagtcctggcttatctgcctgtcccagggattcctgggctcccaatagtgagccaggatggggaagagctagctccatcagcacacactacatgtggacagttggactggactgttttttaaaagcacaaactcaacatttttagatcttcgtctaggattctgacttgaaaacaattcttgttacaaacagactctttatggtggtgaacaagcagagattgtaagggcccatgaaagcaatacttgggtgtgaagagccgtcatattcctaatggattcacctccaggaatctgatacatggacatgcattttaactgctgcttttattacctcccttaaaaaattagttctgtgaaattcccttgccacttttgcttggaatacatttcctttagttttctacctaatataatcttgtagcccacgtctcagaaacccagaggtccccagttgtgtcatgtatgtttcattctcacttttgattacttgaggccagccgagatctgtgtggataccatattccttgctattttttggtagcctgtgctactaacaatcaaatttaatggtcaatggcttcaaagtaaagcaccctgtttggtattatggattacattccatgactatgatcttgaaatatctagttctgttatcaggaatgatagaaaatattccccatttctcctaaattaagtgaagacttcatggttcatgtgactctcataatatttgatagtatgtattatttaattacttaatatccactaattagactcttttccttctaaagaagaatgtcccccaaacaacacattgtaactttctaaaagacagttggtgccagatgagattaaaaatgcagttactctactagataatattcaccttacacttcggtaaacactcctttaataactatttgttggtttctcaaaagcaatatcccatattaaacagacaattcaaatgtgacaattcctctgtaacaaagaagctgaattctgtaataaatgggaaacatttcattccagtcttctcaggtaccagaatcatggacttcagtagaagagagggaatagggagagaggtgggaggctgatctgttcgtggcccagcacggtgctgtaattcctgacccttctggtttccacagatcattgcagagtaatgcttgaagcgtgtgactttggacttctgctgctttaaaaggcccagtggctttccaaccaaatccttagactcaatctattggtgtgtttgtctaataaattctttttgtagtaaattta

SEQ ID NO: 159589 - DNA, 2191 bp, Homo sapiens
  Payload ID: 11232
  Gene Symbol: NKX2-1
  Gene Name: NK2 homeobox 1
  Uniprot ID: P43699
  ENST ID: ENST00000354822
  CDS Start-End: 100-1305
agactgacagacacgtagaccaacagtgcggccccagggttcgtccccagactcgctcgctcatttgttggcgactggggctcagcgcagcgaagcccgatgtggtccggaggcagtgggaaggcgcggggctgggaggccgcggcgggagggaggagcagccccggcaggctcagccgccgccgaatcatgtcgatgagtccaaagcacacgactccgttctcagtgtctgacatcttgagtcccctggaggaaagctacaagaaagtgggcatggagggcggcggcctcggggctccgctggcggcgtacaggcagggccaggcggcaccgccaacagcggccatgcagcagcacgccgtggggcaccacggcgccgtcaccgccgcctaccacatgacggcggcgggggtgccccagctctcgcactccgccgtggggggctactgcaacggcaacctgggcaacatgagcgagctgccgccgtaccaggacaccatgaggaacagcgcctctggccccggatggtacggcgccaacccagacccgcgcttccccgccatctcccgcttcatgggcccggcgagcggcatgaacatgagcggcatgggcggcctgggctcgctgggggacgtgagcaagaacatggccccgctgccaagcgcgccgcgcaggaagcgccgggtgctcttctcgcaggcgcaggtgtacgagctggagcgacgcttcaagcaacagaagtacctgtcggcgccggagcgcgagcacctggccagcatgatccacctgacgcccacgcaggtcaagatctggttccagaaccaccgctacaaaatgaagcgccaggccaaggacaaggcggcgcagcagcaactgcagcaggacagcggcggcggcgggggcggcgggggcaccgggtgcccgcagcagcaacaggctcagcagcagtcgccgcgacgcgtggcggtgccggtcctggtgaaagacggcaaaccgtgccaggcgggtgcccccgcgccgggcgccgccagcctacaaggccacgcgcagcagcaggcgcagcaccaggcgcaggccgcgcaggcggcggcagcggccatctccgtgggcagcggtggcgccggccttggcgcacacccgggccaccagccaggcagcgcaggccagtctccggacctggcgcaccacgccgccagccccgcggcgctgcagggccaggtatccagcctgtcccacctgaactcctcgggctcggactacggcaccatgtcctgctccaccttgctatacggtcggacctggtgagaggacgccgggccggccctagcccagcgctctgcctcaccgcttccctcctgcccgccacacagaccaccatccaccgctgctccacgcgcttcgacttttcttaacaacctggccgcgtttagaccaaggaacaaaaaaaccacaaaggccaaactgctggacgtctttctttttttccccccctaaaatttgtgggtttttttttttaaaaaaagaaaatgaaaaacaaccaagcgcatccaatctcaaggaatctttaagcagagaagggcataaaacagctttggggtgtctttttttggtgattcaaatgggttttccacgctagggcggggcacagattggagagggctctgtgctgacatggctctggactctaaagaccaaacttcactctgggcacactctgccagcaaagaggactcgcttgtaaataccaggatttttttttttttttgaagggaggacgggagctggggagaggaaagagtcttcaacataacccacttgtcactgacacaaaggaagtgccccctccccggcaccctctggccgcctaggctcagcggcgaccgccctccgcgaaaatagtttgtttaatgtgaacttgtagctgtaaaacgctgtcaaaagttggactaaatgcctagtttttagtaatctgtacattttgttgtaaaaagaaaaaccactcccagtccccagcccttcacattttttatgggcattgacaaatctgtgtatattatttggcagtttggtatttgcggcgtcagtctttttctgttgtaacttatgtagatatttggcttaaatatagttcctaagaagcttctaataaattatacaaattaaaaagattctttttctgattaaaaccctc

SEQ ID NO: 159590 - DNA, 2583 bp, Homo sapiens
  Payload ID: 11232
  Gene Symbol: NKX2-1
  Gene Name: NK2 homeobox 1
  Uniprot ID: P43699
  ENST ID: ENST00000518149
  CDS Start-End: 607-1722
agcaacgcgggggacacccccgattccgctggggagcgcagcccacagctccccctcgccaggcgcccaaggaccctcaaggcgcggggcccacacttgaagcctgggaacgcgcagacaggaaaccctcttcctcctaagcagtttcttgctcgtcggatgagaggcgcccaattgaagcagaatgatcctcatctactaatatccagcgtggccacaaagcgactggccatttacgccaccactttaaacaaagatatttggttattcccgggaagcaagagcacttttgcatggctgagctgcgggcggaggcgagcctcggcccagcctcccgcccgctgagctgcccgcacctcggcattcgccccctcctggccagcgctccagccgccggggttcaggctcagttccgcccggcaacagacagacgggcactcacgccgctccctgctcgcgcgctccctgaagcatcagaggggaaaacagcgtggctctgggctcgggtgctggggctgtgatgtcctcggaaagtcagctccagccccagatccccgcgtgtctgggagatgggcgagggtcagggacaccagccgccgccgaatcatgtcgatgagtccaaagcacacgactccgttctcagtgtctgacatcttgagtcccctggaggaaagctacaagaaagtgggcatggagggcggcggcctcggggctccgctggcggcgtacaggcagggccaggcggcaccgccaacagcggccatgcagcagcacgccgtggggcaccacggcgccgtcaccgccgcctaccacatgacggcggcgggggtgccccagctctcgcactccgccgtggggggctactgcaacggcaacctgggcaacatgagcgagctgccgccgtaccaggacaccatgaggaacagcgcctctggccccggatggtacggcgccaacccagacccgcgcttccccgccatctcccgcttcatgggcccggcgagcggcatgaacatgagcggcatgggcggcctgggctcgctgggggacgtgagcaagaacatggccccgctgccaagcgcgccgcgcaggaagcgccgggtgctcttctcgcaggcgcaggtgtacgagctggagcgacgcttcaagcaacagaagtacctgtcggcgccggagcgcgagcacctggccagcatgatccacctgacgcccacgcaggtcaagatctggttccagaaccaccgctacaaaatgaagcgccaggccaaggacaaggcggcgcagcagcaactgcagcaggacagcggcggcggcgggggcggcgggggcaccgggtgcccgcagcagcaacaggctcagcagcagtcgccgcgacgcgtggcggtgccggtcctggtgaaagacggcaaaccgtgccaggcgggtgcccccgcgccgggcgccgccagcctacaaggccacgcgcagcagcaggcgcagcaccaggcgcaggccgcgcaggcggcggcagcggccatctccgtgggcagcggtggcgccggccttggcgcacacccgggccaccagccaggcagcgcaggccagtctccggacctggcgcaccacgccgccagccccgcggcgctgcagggccaggtatccagcctgtcccacctgaactcctcgggctcggactacggcaccatgtcctgctccaccttgctatacggtcggacctggtgagaggacgccgggccggccctagcccagcgctctgcctcaccgcttccctcctgcccgccacacagaccaccatccaccgctgctccacgcgcttcgacttttcttaacaacctggccgcgtttagaccaaggaacaaaaaaaccacaaaggccaaactgctggacgtctttctttttttccccccctaaaatttgtgggtttttttttttaaaaaaagaaaatgaaaaacaaccaagcgcatccaatctcaaggaatctttaagcagagaagggcataaaacagctttggggtgtctttttttggtgattcaaatgggttttccacgctagggcggggcacagattggagagggctctgtgctgacatggctctggactctaaagaccaaacttcactctgggcacactctgccagcaaagaggactcgcttgtaaataccaggatttttttttttttttgaagggaggacgggagctggggagaggaaagagtcttcaacataacccacttgtcactgacacaaaggaagtgccccctccccggcaccctctggccgcctaggctcagcggcgaccgccctccgcgaaaatagtttgtttaatgtgaacttgtagctgtaaaacgctgtcaaaagttggactaaatgcctagtttttagtaatctgtacattttgttgtaaaaagaaaaaccactcccagtccccagcccttcacattttttatgggcattgacaaatctgtgtatattatttggcagtttggtatttgcggcgtcagtctttttctgttgtaacttatgtagatatttggcttaaatatagttcctaagaagcttctaataaattatacaaattaaaaa

SEQ ID NO: 159591 - DNA, 1417 bp, Homo sapiens
  Payload ID: 11232
  Gene Symbol: NKX2-1
  Gene Name: NK2 homeobox 1
  Uniprot ID: P43699
  ENST ID: ENST00000522719
  CDS Start-End: 241-1356
gcccgatgtggtccggaggcagtgggaaggcgcggggctgggaggccgcggcgggagggaggagcagccccggcaggctcagcgcttacgccccgcctctggtggctgcctaaaacctggcgccgggctaaaacaaacgcgaggcagcccccgagcctccactcaagccaattaaggaggactcggtccactccgttacgtgtacatccaacaagatcggcgttaagccgccgccgaatcatgtcgatgagtccaaagcacacgactccgttctcagtgtctgacatcttgagtcccctggaggaaagctacaagaaagtgggcatggagggcggcggcctcggggctccgctggcggcgtacaggcagggccaggcggcaccgccaacagcggccatgcagcagcacgccgtggggcaccacggcgccgtcaccgccgcctaccacatgacggcggcgggggtgccccagctctcgcactccgccgtggggggctactgcaacggcaacctgggcaacatgagcgagctgccgccgtaccaggacaccatgaggaacagcgcctctggccccggatggtacggcgccaacccagacccgcgcttccccgccatctcccgcttcatgggcccggcgagcggcatgaacatgagcggcatgggcggcctgggctcgctgggggacgtgagcaagaacatggccccgctgccaagcgcgccgcgcaggaagcgccgggtgctcttctcgcaggcgcaggtgtacgagctggagcgacgcttcaagcaacagaagtacctgtcggcgccggagcgcgagcacctggccagcatgatccacctgacgcccacgcaggtcaagatctggttccagaaccaccgctacaaaatgaagcgccaggccaaggacaaggcggcgcagcagcaactgcagcaggacagcggcggcggcgggggcggcgggggcaccgggtgcccgcagcagcaacaggctcagcagcagtcgccgcgacgcgtggcggtgccggtcctggtgaaagacggcaaaccgtgccaggcgggtgcccccgcgccgggcgccgccagcctacaaggccacgcgcagcagcaggcgcagcaccaggcgcaggccgcgcaggcggcggcagcggccatctccgtgggcagcggtggcgccggccttggcgcacacccgggccaccagccaggcagcgcaggccagtctccggacctggcgcaccacgccgccagccccgcggcgctgcagggccaggtatccagcctgtcccacctgaactcctcgggctcggactacggcaccatgtcctgctccaccttgctatacggtcggacctggtgagaggacgccgggccggccctagcccagcgctctgcctcaccgcttccctcctgcccgccac

SEQ ID NO: 159592 - DNA, 2338 bp, Homo sapiens
  Payload ID: 11232
  Gene Symbol: NKX2-1
  Gene Name: NK2 homeobox 1
  Uniprot ID: P43699
  ENST ID: ENST00000498187
  CDS Start-End: 337-1452
ttaaaggtgtttaccttgtcatcagcatgtaagctaattatctcgggcaagatgtaggcttctattgtcttgttgctttagcgcttacgccccgcctctggtggctgcctaaaacctggcgccgggctaaaacaaacgcgaggcagcccccgagcctccactcaagccaattaaggaggactcggtccactccgttacgtgtacatccaacaagatcggcgttaaggtaacaccagaatatttggcaaagggagaaaaaaaaagcagcgaggcttcgccttccccctctcccttttttttcctcctcttccttcctcctccagccgccgccgaatcatgtcgatgagtccaaagcacacgactccgttctcagtgtctgacatcttgagtcccctggaggaaagctacaagaaagtgggcatggagggcggcggcctcggggctccgctggcggcgtacaggcagggccaggcggcaccgccaacagcggccatgcagcagcacgccgtggggcaccacggcgccgtcaccgccgcctaccacatgacggcggcgggggtgccccagctctcgcactccgccgtggggggctactgcaacggcaacctgggcaacatgagcgagctgccgccgtaccaggacaccatgaggaacagcgcctctggccccggatggtacggcgccaacccagacccgcgcttccccgccatctcccgcttcatgggcccggcgagcggcatgaacatgagcggcatgggcggcctgggctcgctgggggacgtgagcaagaacatggccccgctgccaagcgcgccgcgcaggaagcgccgggtgctcttctcgcaggcgcaggtgtacgagctggagcgacgcttcaagcaacagaagtacctgtcggcgccggagcgcgagcacctggccagcatgatccacctgacgcccacgcaggtcaagatctggttccagaaccaccgctacaaaatgaagcgccaggccaaggacaaggcggcgcagcagcaactgcagcaggacagcggcggcggcgggggcggcgggggcaccgggtgcccgcagcagcaacaggctcagcagcagtcgccgcgacgcgtggcggtgccggtcctggtgaaagacggcaaaccgtgccaggcgggtgcccccgcgccgggcgccgccagcctacaaggccacgcgcagcagcaggcgcagcaccaggcgcaggccgcgcaggcggcggcagcggccatctccgtgggcagcggtggcgccggccttggcgcacacccgggccaccagccaggcagcgcaggccagtctccggacctggcgcaccacgccgccagccccgcggcgctgcagggccaggtatccagcctgtcccacctgaactcctcgggctcggactacggcaccatgtcctgctccaccttgctatacggtcggacctggtgagaggacgccgggccggccctagcccagcgctctgcctcaccgcttccctcctgcccgccacacagaccaccatccaccgctgctccacgcgcttcgacttttcttaacaacctggccgcgtttagaccaaggaacaaaaaaaccacaaaggccaaactgctggacgtctttctttttttccccccctaaaatttgtgggtttttttttttaaaaaaagaaaatgaaaaacaaccaagcgcatccaatctcaaggaatctttaagcagagaagggcataaaacagctttggggtgtctttttttggtgattcaaatgggttttccacgctagggcggggcacagattggagagggctctgtgctgacatggctctggactctaaagaccaaacttcactctgggcacactctgccagcaaagaggactcgcttgtaaataccaggatttttttttttttttgaagggaggacgggagctggggagaggaaagagtcttcaacataacccacttgtcactgacacaaaggaagtgccccctccccggcaccctctggccgcctaggctcagcggcgaccgccctccgcgaaaatagtttgtttaatgtgaacttgtagctgtaaaacgctgtcaaaagttggactaaatgcctagtttttagtaatctgtacattttgttgtaaaaagaaaaaccactcccagtccccagcccttcacattttttatgggcattgacaaatctgtgtatattatttggcagtttggtatttgcggcgtcagtctttttctgttgtaacttatgtagatatttggcttaaatatagttcctaagaagcttctaataaattatacaaattaaaaagattctttttctgattaaaaccctc

SEQ ID NO: 159593 - DNA, 653 bp, Homo sapiens
  Payload ID: 11232
  Gene Symbol: NKX2-1
  Gene Name: NK2 homeobox 1
  ENST ID: ENST00000546983
  CDS Start-End: 551-653
aatatccagcgtggccacaaagcgactggccatttacgccaccactttaaacaaagatatttggttattcccgggaagcaagagcacttttgcatggctgagctgcgggcggaggcgagcctcggcccagcctcccgcccgctgagctgcccgcacctcggcattcgccccctcctggccagcgctccagccgccggggttcaggctcagttccgcccggcaacagacagacgggcactcacgccgctccctgctcgcgcgctccctgaagcatcagaggggaaaacagcgtggctctgggctcgggtgctggggctgtgatgtcctcggaaagtcagctccagccccagatccccgcgtgtctgggagatgggcgagggtcagggacaccagggggaaagggggcggggagcagaggtgtccctctgacggcggcagaagagaggcagacagactgacagacacgtagaccaacagtgcggccccagggttcgtccccagactcgctcgctcatttgttggcgactggggctcagcgcagcgaagcccgatgtggtccggaggcagtgggaaggcgcggggctgggaggccgcggcgggagggaggagcagccccggcaggctcagcgcttacgccccgcctctggtggctg

SEQ ID NO: 159594 - DNA, 2092 bp, Homo sapiens
  Payload ID: 11233
  Gene Symbol: NKX2-2
  Gene Name: NK2 homeobox 2
  Uniprot ID: O95096
  ENST ID: ENST00000377142
  CDS Start-End: 358-1179
gcggccgccggagcccgagctgacgccgccttggcacccctcctggagttagaaactaaggccggggcccgcggcgctcggcgcgcaggccgcccggcttcctgcgtccatttccgcgtgctttcaaagaagacagagagaggcactgggttgggcttcatttttttcctccccatccccagtttctttctctttttaaaaataataattatcccaataattaaagccaattcccccctcccctcccccagtccctccccccaactcccccctcccccgcccgccggggcaggggagcgccacgaattgaccaagtgaagctacaactttgcgacataaattttggggtctcgaaccatgtcgctgaccaacacaaagacggggttttcggtcaaggacatcttagacctgccggacaccaacgatgaggagggctctgtggccgaaggtccggaggaagagaacgaggggcccgagccagccaagagggccgggccgctggggcagggcgccctggacgcggtgcagagcctgcccctgaagaaccccttctacgacagcagcgacaacccgtacacgcgctggctggccagcaccgagggccttcagtactccctgcacggtctggctgccggggcgccccctcaggactcaagctccaagtccccggagccctcggccgacgagtcaccggacaatgacaaggagaccccgggcggcgggggggacgccggcaagaagcgaaagcggcgagtgcttttctccaaggcgcagacctacgagctggagcggcgctttcggcagcagcggtacctgtcggcgcccgagcgcgaacacctggccagcctcatccgcctcacgcccacgcaggtcaagatctggttccagaaccaccgctacaagatgaagcgcgcccgggccgagaaaggtatggaggtgacgcccctgccctcgccgcgccgggtggccgtgcccgtcttggtcagggacggcaaaccatgtcacgcgctcaaagcccaggacctggcagccgccaccttccaggcgggcattcccttttctgcctacagcgcgcagtcgctgcagcacatgcagtacaacgcccagtacagctcggccagcaccccccagtacccgacagcacaccccctggtccaggcccagcagtggacttggtgagcgccgccccaacgagactcgcggccccaggcccaggccccaccccggcggcggtggcggcgaggaggcctcggtccttatggtggttattattattattataattattattatggagtcgagttgactctcggctccactagggaggcgccgggaggttgcctgcgtctccttggagtggcagattccacccacccagctctgcccatgcctctccttctgaaccttgggagagggctgaactctacgccgtgtttacagaatgtttgcgcagcttcgcttctttgcctctccccggggggaccaaaccgtcccagcgttaatgtcgtcacttgaaaacgagaaaaagaccgaccccccacccctgctttcgtgcattttgtaaaatatgtttgtgtgagtagcgatattgtcagccgtcttctaaagcaagtggagaacactttaaaaatacagagaatttcttcctttttttaaaaaaaaataagaaaatgctaaatatttatggccatgtaaacgttctgacaactggtggcagatttcgcttttcgttgtaaatatcggtggtgattgttgccaaaatgaccttcaggaccggcctgtttcccgtctgggtccaactcctttctttgtggcttgtttgggtttgttttttgttttgtttttgtttttgcgttttcccctgctttcttcctttctctttttattttattgtgcaaacatttctcaaatatggaaaagaaaaccctgtaggcagggagccctctgccctgtcctccgggccttcagccccgaacttggagctcagctattcggcgcggttccccaacagcgccgggcgcagaaagctttcgattttttaaataagaattttaataaaaatcctgtgtttaaaaaagaaaaaaagaaaaaa

SEQ ID NO: 159595 - DNA, 2097 bp, Homo sapiens
  Payload ID: 11234
  Gene Symbol: NKX2-3
  Gene Name: NK2 homeobox 3
  Uniprot ID: Q8TAU0
  ENST ID: ENST00000344586
  CDS Start-End: 200-1294
agtccctgcagtggctgtaacaaaacccagacccccaggtcccggccaatggaggcgatttagactggagtgggaccgcgtctgtcaaaagcccgactcggcagcagcggcggagtccaggaggagagctggagccgccgcgctgcctccccgcccccgccgggatttattatttggactggacaattaagtggccctgatgatgttaccaagcccggtcacctccacccctttctcagtcaaagacattttgaatctggagcagcagcaccagcacttccatggtgcgcacttgcaggcggacttggagcaccacttccactctgcgccctgcatgctggccgccgctgaggggacgcaattttctgacggaggggaggaggacgaggaagacgagggcgagaaattgtcctatttgaactcactagccgcagcagacggccacggggattcagggctgtgtccccagggctatgtccacacggtcctgcgagactcgtgcagcgagcccaaggaacatgaagaggagcccgaggtcgtgagggaccggagccaaaaaagctgccagctgaagaagtctctagagacggccggagactgcaaggcggcggaggagagcgagaggccgaagccacgcagccgccggaagccccgggtcctcttctcgcaagcccaggtcttcgagctggaacgcaggttcaagcagcagcggtacctgtcggcacccgagcgcgagcacctcgccagcagcctgaagctcacatccactcaggtgaaaatctggttccagaatcgcaggtacaagtgcaagagacagcggcaggacaagtctctggagcttggcgcacacgcgcccccgccgccgccgcgccgcgtggctgtcccggtgctggtgcgggacggcaagccgtgcgtcacgcccagcgcgcaggcctacggcgcgccctacagcgtgggcgccagcgcctactcctacaacagcttccccgcctacggctatgggaactcggccgcggccgccgccgccgccgccgccgccgccgcagcagcggcggcctacagcagcagctatggctgtgcgtacccggcgggcggcggcggcggcggcggcgggacctccgcggcgaccactgccatgcagcccgcctgcagcgcggccggaggcggcccctttgtgaacgtgagcaacctaggaggcttcggcagcggcggcagcgcacagccgttgcaccagggtactgcagccggggccgcgtgcgctcagggcaccttgcagggcatccgggcctggtagggacggggcgggtcacgcggcgggcaccccagcgcagcctggcgccgcgggactgaagctcgagaagggcctgacctaaaggtcaggtcccctcgttaaaaaaatatgtacgtctagctcctcagggcttcggatcgcagctcactcgaggcctggggaaggggactcaggggcgaggaggatgactgggtccggtcgccaggactgtctctgaggcagaaacgccggctgggcgccggggaggacgatggccccgaccctggcagcgagaggagaccaggaggctaggaccctggccgcgcttggttcttccaaagcgagaagggcttctctccctctgcctttccgcggcctccgcgaagcgttggcggggagcccaaggacataacaaattaaaagcatgaaggagagaaaaatgggggtcgtggcttgagaaattccaggccctaccgatcctctgccccctttgcgggcctggagcgccatagcacagtcgatttcgtttcgcagctgtctcccctccgcagcagatacctcggtccagatctccggattgtcgggggacgcaggactcttcgaggaaaaccagccgaatgagatcaaaagttgggggtggggggaggctgaacaaactcaggacctggtggcccaccggaggtgttaccgggtttcctttctgtttcgtattctgtattcagcacatgttatctatctatctatctatataactataaccacacgccgtgtagacacccgctgccacacactacaggagtcaataaacaaggtgcaatattttcaaa

SEQ ID NO: 159596 - DNA, 1986 bp, Homo sapiens
  Payload ID: 11234
  Gene Symbol: NKX2-3
  Gene Name: NK2 homeobox 3
  ENST ID: ENST00000622383
  CDS Start-End: 180-1070
caaaacccagacccccaggtcccggccaatggaggcgatttagactggagtgggaccgcgtctgtcaaaagcccgactcggcagcagcggcggagtccaggaggagagctggagccgccgcgctgcctccccgcccccgccgggatttattatttggactggacaattaagtggccctgatgatgttaccaagcccggtcacctccacccctttctcagtcaaagacattttgaatctggagcagcagcaccagcacttccatggtgcgcacttgcaggcggacttggagcaccacttccactctgcgccctgcatgctggccgccgctgaggggacgcaattttctgacggaggggaggaggacgaggaagacgagggcgagaaattgtcctatttgaactcactagccgcagcagacggccacggggattcagggctgtgtccccagggctatgtccacacggtcctgcgagactcgtgcagcgagcccaaggaacatgaagaggagcccgaggtcgtgagggaccggagccaaaaaagctgccagctgaagaagtctctagagacggccggagactgcaaggcggcggaggagagcgagaggccgaagccacgcagccgccggaagccccgggtcctcttctcgcaagcccaggtcttcgagctggaacgcaggttcaagcagcagcggtacctgtcggcacccgagcgcgagcacctcgccagcagcctgaagctcacatccactcaggtgaaaatctggttccagaatcgcaggtacaagtgcaagagacagcggcaggacaagtctctggagcttggcgcacacgcgcccccgccgccgccgcgccgcgtggctgtcccggtgctggtgcgggacggcaagccgtgcgtcacgcccagcgcgcaggcctacggcgcgccctacagcgtgggcgccagcgcctactcctacaacagcttccccgcctacggctatgggaactcggcggcggcggcggcgggacctccgcggcgaccactgccatgcagcccgcctgcagcgcggccggaggcggcccctttgtgaacgtgagcaacctaggaggcttcggcagcggcggcagcgcacagccgttgcaccagggtactgcagccggggccgcgtgcgctcagggcaccttgcagggcatccgggcctggtagggacggggcgggtcacgcggcgggcaccccagcgcagcctggcgccgcgggactgaagctcgagaagggcctgacctaaaggtcaggtcccctcgttaaaaaaatatgtacgtctagctcctcagggcttcggatcgcagctcactcgaggcctggggaaggggactcaggggcgaggaggatgactgggtccggtcgccaggactgtctctgaggcagaaacgccggctgggcgccggggaggacgatggccccgaccctggcagcgagaggagaccaggaggctaggaccctggccgcgcttggttcttccaaagcgagaagggcttctctccctctgcctttccgcggcctccgcgaagcgttggcggggagcccaaggacataacaaattaaaagcatgaaggagagaaaaatgggggtcgtggcttgagaaattccaggccctaccgatcctctgccccctttgcgggcctggagcgccatagcacagtcgatttcgtttcgcagctgtctcccctccgcagcagatacctcggtccagatctccggattgtcgggggacgcaggactcttcgaggaaaaccagccgaatgagatcaaaagttgggggtggggggaggctgaacaaactcaggacctggtggcccaccggaggtgttaccgggtttcctttctgtttcgtattctgtattcagcacatgttatctatctatctatctatataactataaccacacgccgtgtagacacccgctgccacacactacaggagtcaataaacaaggtgcaatattttc

SEQ ID NO: 159597 - DNA, 2238 bp, Homo sapiens
  Payload ID: 11235
  Gene Symbol: NKX2-4
  Gene Name: NK2 homeobox 4
  Uniprot ID: Q9H2Z4
  ENST ID: ENST00000351817
  CDS Start-End: 630-1694
tttaacactttaggtgatggagcgaatgaggggctgataactggagaggacgaagcaagcccccgcaacaccctccccccaaacttagcagcacgttccccattccgcaattataccggactttggtgcgaagtcactttagaaaactgggatctggaaggggccaggcgcggagtccatgtctagcctcgacgccagcctccgagtttctatttctggtgctcgagggctggggtaacggccgcggatggaggagcgaaggatgggaaaagcaaaggatgggaaaagcaaagatgggaaaagcaacggggagtgatctttccaagaaacacccaactgccccttttacctttttttgcctccattatggggcgggggttgggggggcgagagaaaaagatgtcaatgaccattgtttgctcgtttgggatgttgctccgccccccgagtctgtcgtaaacctggcgccggactaaaataaaccccagatcccgcagcccggggggctcgccgagccgccgactcctcgtcacaggctcagctgccgcggccgaggtggcggcgacgagcggccgccgcgtcctgccggcgcgcgccccaggcccccctacctggctgcccgccgagccatgtcgttgagcccaaagcacacgacgcccttctccgtgtccgacatcctgagccccatcgaggagacctacaagaagttcagcggcgccatggacggcgcgccacccggcctgggggcgcccctgggggccgcggccgcctaccgcgcgccgccacctgggccctcctcgcaggcggcgaccgtggcgggcatgcagccttctcacgccatggcgggtcacaacgcggcggccgcggcggcggcggcagcagctgcggcggcggcggccgccacctaccacatgccgcccggcgtctcgcagttcccgcacggcgccatgggcagctactgcaacggcggcctgggcaacatgggcgagctgcccgcctacacggacggcatgcggggcggcgcggccaccggctggtacggcgccaacccggacccacgctactcgtcaatctccaggttcatggggccgtcggcgggcgtgaatgtggccggcatggggtcgctgaccggcatcgcggacgccgccaagtcgctgggcccgctgcacgcggcggcggcggcagccgctccgcgaaggaagcgccgcgtgctcttctcgcaggcgcaggtctacgagctggagcggcgcttcaagcagcagaagtacctgtcggcgcccgagcgcgagcacctggccagcatgatccacctgacgcccacgcaggtcaagatctggttccagaaccaccggtacaagatgaaacggcaggccaaggacaaggcggcgcagcagctgcagcaggagggcggcctgggcccgccgccgcctccgccgccgtccccgcgccgcgtggcggtgcctgtgctggtcaaggacggcaagccgtgccagaacggcgccagcacgcccacccccggccaggccggtccgcagccgccggccccgacgccagcacctgagctggaggagctgtcgcccagcccacccgcgctgcacggcccggggggcggcctggcggccctggacgcggccgccggggagtacagcggcggcgtcctgggcgccaacctgctctatggcaggacgtggtgacagcgagggcgccccggggctaggtcctggtgcacccgaagggtctgcaagaaactgctagaacggatgggggaggcatgcgaaaaccgactcgcgcgtgtaaactgcgattcaaaacgaaccggtctcagagaggagcaggctgtgaacctcttgctgggggcgggggacagcgacagcccggaaaccgagtagtgtaacattatgccacgaggctttgaggtggtgattttctcctcctagaagttcttaaatgacgcgaaaaggtggagaagttcacacggcattcttaactacagctctcaaagttggaaactttgttggcgtttgtaactataaaaatcaacccagctttaacaatcagtcctttttgaagtggaatttatcttgggagattaattttcgaagggccccctaagtgcaatttcattaatgtttgattgaaagtaaattgaagtgtagctcaaggtggatcatacacatagcaacattattgcagaggaattattgccatttaggtaatagagcaatggaatcaaaataa

SEQ ID NO: 159598 - DNA, 1709 bp, Homo sapiens
  Payload ID: 11236
  Gene Symbol: NKX2-5
  Gene Name: NK2 homeobox 5
  Uniprot ID: P52952
  ENST ID: ENST00000329198
  CDS Start-End: 275-1249
tttttttgccgtatgactatattaggtgacacgaaactgctcatcgctcctgtcatcgaggcccctggcccaatggcaggctgagtccccctcctctggcctggtcccgcctctcctgccccttgtgctcagcgctacctgctgcccggacacatccagagctggccgacgggtgcgcgggcgggcggcggcaccatgcagggaagctgccaggggccgtgggcagcgccgctttctgccgcccacctggcgctgtgagactggcgctgccaccatgttccccagccctgctctcacgcccacgcccttctcagtcaaagacatcctaaacctggaacagcagcagcgcagcctggctgccgccggagagctctctgcccgcctggaggcgaccctggcgccctcctcctgcatgctggccgccttcaagccagaggcctacgctgggcccgaggcggctgcgccgggcctcccagagctgcgcgcagagctgggccgcgcgccttcaccggccaagtgtgcgtctgcctttcccgccgcccccgccttctatccacgtgcctacagcgaccccgacccagccaaggaccctagagccgaaaagaaagagctgtgcgcgctgcagaaggcggtggagctggagaagacagaggcggacaacgcggagcggccccgggcgcgacggcggaggaagccgcgcgtgctcttctcgcaggcgcaggtctatgagctggagcggcgcttcaagcagcagcggtacctgtcggcccccgaacgcgaccagctggccagcgtgctgaaactcacgtccacgcaggtcaagatctggttccagaaccggcgctacaagtgcaagcggcagcggcaggaccagactctggagctggtggggctgcccccgccgccgccgccgcctgcccgcaggatcgcggtgccagtgctggtgcgcgatggcaagccatgcctaggggactcggcgccctacgcgcctgcctacggcgtgggcctcaatccctacggttataacgcctaccccgcctatccgggttacggcggcgcggcctgcagccctggctacagctgcactgccgcttaccccgccgggccttccccagcgcagccggccactgccgccgccaacaacaacttcgtgaacttcggcgtcggggacttgaatgcggttcagagccccgggattccgcagagcaactcgggagtgtccacgctgcatggtatccgagcctggtagggaagggacccgcgtggcgcgaccctgaccgatcccacctcaacagctccctgactctcggggggagaaggggctcccaacatgaccctgagtcccctggattttgcattcactcctgcggagacctaggaactttttctgtcccacgcgcgtttgttcttgcgcacgggagagtttgtggcggcgattatgcagcgtgcaatgagtgatcctgcagcctggtgtcttagctgtccccccaggagtgccctccgagagtccatgggcacccccggttggaactgggactgagctcgggcacgcagggcctgagatctggccgcccattccgcgagccagggccgggcgcccgggcctttgctatctcgccgtcgcccgcccacgcacccacccgtatttatgtttttacctattgctgtaagaaatgacgatccccttcccattaaagagagtgcgttga

SEQ ID NO: 159599 - DNA, 1124 bp, Homo sapiens
  Payload ID: 11236
  Gene Symbol: NKX2-5
  Gene Name: NK2 homeobox 5
  Uniprot ID: P52952
  ENST ID: ENST00000424406
  CDS Start-End: 182-520
ctctggcctggtcccgcctctcctgccccttgtgctcagcgctacctgctgcccggacacatccagagctggccgacgggtgcgcgggcgggcggcggcaccatgcagggaagctgccaggggccgtgggcagcgccgctttctgccgcccacctggcgctgtgagactggcgctgccaccatgttccccagccctgctctcacgcccacgcccttctcagtcaaagacatcctaaacctggaacagcagcagcgcagcctggctgccgccggagagctctctgcccgcctggaggcgaccctggcgccctcctcctgcatgctggccgccttcaagccagaggcctacgctgggcccgaggcggctgcgccgggcctcccagagctgcgcgcagagctgggccgcgcgccttcaccggccaagtgtgcgtctgcctttcccgccgcccccgccttctatccacgtgcctacagcgaccccgacccagccaaggaccctagagccgaaaagaaagcctgaaattttaagtcaccgtctgtctccctcaccagggtgtgaactgccccgagggcagagacctcccgttttgttctccagcgccttgagccagcctgactttctacaaatgctgagtgagacgtgtcggtggctcccagtgcacttggcagagtgagccgcagccagctgggcgctccaggcaggacacagtggcctccacgaggatcccttaccattactgtgcggccgcgctccgtaggtcaagccgctcttaccaagcgtctctctgcctctctgttccccctcagagctgtgcgcgctgcagaaggcggtggagctggagaagacagaggcggacaacgcggagcggccccgggcgcgacggcggaggaagccgcgcgtgctcttctcgcaggcgcaggtctatgagctggagcggcgcttcaagcagcagcggtacctgtcggcccccgaacgcgaccagctggccagcgtgctgaaactcacgtccacgcaggtcaagatctggttccagaaccggcgctacaagtgcaagcggcagcggcaggaccagactctggagctggtggggctgcccccgccgccgccgccgcctgcccgcagg

SEQ ID NO: 159600 - DNA, 1027 bp, Homo sapiens
  Payload ID: 11236
  Gene Symbol: NKX2-5
  Gene Name: NK2 homeobox 5
  Uniprot ID: P52952
  ENST ID: ENST00000521848
  CDS Start-End: 124-579
acatccagagctggccgacgggtgcgcgggcgggcggcggcaccatgcagggaagctgccaggggccgtgggcagcgccgctttctgccgcccacctggcgctgtgagactggcgctgccaccatgttccccagccctgctctcacgcccacgcccttctcagtcaaagacatcctaaacctggaacagcagcagcgcagcctggctgccgccggagagctctctgcccgcctggaggcgaccctggcgccctcctcctgcatgctggccgccttcaagccagaggcctacgctgggcccgaggcggctgcgccgggcctcccagagctgcgcgcagagctgggccgcgcgccttcaccggccaagtgtgcgtctgcctttcccgccgcccccgccttctatccacgtgcctacagcgaccccgacccagccaaggaccctagagccgaaaagaaagggtgtgaactgccccgagggcagagacctcccgttttgttctccagcgccttgagccagcctgactttctacaaatgctgagtgagacgtgtcggtggctcccagtgcacttggcagagtgagccgcagccagctgggcgctccaggcaggacacagtggcctccacgaggatcccttaccattactgtgcggccgcgctccgtaggtcaagccgctcttaccaagcgtctctctgcctctctgttccccctcagagctgtgcgcgctgcagaaggcggtggagctggagaagacagaggcggacaacgcggagcggccccgggcgcgacggcggaggaagccgcgcgtgctcttctcgcaggcgcaggtctatgagctggagcggcgcttcaagcagcagcggtacctgtcggcccccgaacgcgaccagctggccagcgtgctgaaactcacgtccacgcaggtcaagatctggttccagaaccggcgctacaagtgcaagcggcagcggcaggaccagactctggagctggtggggctgcccccgccgccgccgccgcctgcccgca

SEQ ID NO: 159601 - DNA, 655 bp, Homo sapiens
  Payload ID: 11236
  Gene Symbol: NKX2-5
  Gene Name: NK2 homeobox 5
  ENST ID: ENST00000517440
  CDS Start-End: 229-655
ctcctgtcatcgaggcccctggcccaatggcaggctgagtccccctcctctggcctggtcccgcctctcctgccccttgtgctcagcgctacctgctgcccggacacatccagagctggccgacgggtgcgcgggcgggcggcggcaccatgcagggaagctgccaggggccgtgggcagcgccgctttctgccgcccacctggcgctgtgagactggcgctgccaccatgttccccagccctgctctcacgcccacgcccttctcagtcaaagacatcctaaacctggaacagcagcagcgcagcctggctgccgccggagagctctctgcccgcctggaggcgaccctggcgccctcctcctgcatgctggccgccttcaagccagaggcctacgctgggcccgaggcggctgcgccgggcctcccagagctgcgcgcagagctgggccgcgcgccttcaccggccaagtgtgcgtctgcctttcccgccgcccccgccttctatccacgtgcctacagcgaccccgacccagccaaggaccctagagccgaaaagaaagcacaacttgccggcgcggccagggcggagaggttccctcgtggaaaagttaggaaatgctgcgctaccgcgggcacaagggagtggacgagat

SEQ ID NO: 159602 - DNA, 906 bp, Homo sapiens
  Payload ID: 11237
  Gene Symbol: NKX2-6
  Gene Name: NK2 homeobox 6
  Uniprot ID: A6NCS4
  ENST ID: ENST00000325017
  CDS Start-End: 1-906
atgctgctgagccccgtcacctccacccccttctcggtcaaggacatcctgcgactggagcgcgagcggagctgccccgcggcttcgccacatccgcgggtgcggaagagcccggaaaactttcagtacctgagaatggacgcagagccgcgagggtcagaggttcacaacgctggtggcggcggcggtgacagaaagctggatggttcggagcctcctgggggtccctgtgaggcagtcttggagatggacgcggaacggatgggggagccacagcccggcctgaacgcggcctcgcccctcggcggcgggaccagggtgccagagcgcggcgttggcaacagcggcgacagcgtgcggggtggccgctcggagcagcccaaggcgcggcaacgacggaagccgcgcgtgctcttttcgcaggcgcaggtgctggccctggagcggcgcttcaagcagcagcggtacctgtcagcgcccgagcgcgagcacctggccagcgcgctgcagctcacgtccacgcaggtcaagatctggttccagaaccgacgctacaaatgcaagagacagcgccaggacaagtcgctggaactggctggccaccctctaacgccgcgccgagtagctgtgcccgtcctggtgcgcgatggcaagccctgcctgggccccgggcccggcgcacctgccttccccagcccctacagtgcagcagtgtcgccctactcttgctacggaggctacagcggagcaccctacggcgcaggctacggcacctgctacgcgggcgcgccctcgggtcctgcgccacacacaccactggccagcgcgggcttcggacacggtggccagaatgccaccccgcagggccatctggcagccacgctgcagggtgtcagggcctggtga

SEQ ID NO: 159603 - DNA, 1261 bp, Homo sapiens
  Payload ID: 11238
  Gene Symbol: NKX2-8
  Gene Name: NK2 homeobox 8
  Uniprot ID: O15522
  ENST ID: ENST00000258829
  CDS Start-End: 219-938
attcaggtacttaacaccctggagacccggacctcggctttcaaagcggcctgggtgggaagagctgtttatataaacagagattccgctgtaaatgcgctaatatcccggctgccagcgcatggcgagcgcctcccacgcccatccgtaggagcggcgtcccggccgcccctccgttcccagcctgccctgcccccgcctccttcccctcctcggccatggccacctctggacgcctgagcttcaccgtgcgcagccttctagatttacccgagcaggacgcgcaacacctgccgaggcgggagccagaaccacgcgccccccagcccgacccctgcgccgcctggctggattcggagcgcggccactacccttcctcggacgagagcagcctggagaccagcccgccagactcgtcgcagcggccgtccgctaggcccgcgtctccgggctcggacgccgagaaaaggaagaagcggcgggtgctattctccaaggcgcagacgctggagttggagcggcgcttccggcagcagcggtacctgtctgcgcccgagcgcgagcagctggcgagcctgcttcgcctcacgcccacgcaggtcaagatctggttccagaatcatcgctacaagctgaagcgcgctcgcgctccaggggcggcggagtcgcctgacctggcagcatccgccgagctgcacgccgcgcccggcctgctgcgtcgcgtggtggtgccggtgcttgttcgcgacgggcagccgtgcggcggcggcggcggtggcgaggtgggaaccgccgcggcccaggagaagtgcggcgcccctccagccgccgcctgccctctgccgggctaccctgccttcggtcccggctcggcgcttggcctcttccccgcctaccagcacttagcatcccccgccctggtctcctggaactggtgaggccgcagggcggcacctggggctaccctcgactttggagcgcgctctgcgattggagcagggccggagccgaacgcctggaacgctctccgtccgcctccctgcagccccatctccttgggcgccagggtccctggcgcgccctcatcagccgtcgcgcaagcacacacgagggacgtgtgccagagccccctccctcaccttccctccaccgccagccccagagttagattttatgcttgggccttatttgtatatttttaaatagcgatttgtataggaagcaagttatttttttaaaaaatagagtatttttcctcgta

SEQ ID NO: 159604 - DNA, 3271 bp, Homo sapiens
  Payload ID: 11239
  Gene Symbol: NKX3-1
  Gene Name: NK3 homeobox 1
  Uniprot ID: Q99801
  ENST ID: ENST00000380871
  CDS Start-End: 39-743
ccgggcgggtgcattcaggccaaggcggggccgccgggatgctcagggttccggagccgcggcccggggaggcgaaagcggagggggccgcgccgccgaccccgtccaagccgctcacgtccttcctcatccaggacatcctgcgggacggcgcgcagcggcaaggcggccgcacgagcagccagagacagcgcgacccggagccggagccagagccagagccagagggaggacgcagccgcgccggggcgcagaacgaccagctgagcaccgggccccgcgccgcgccggaggaggccgagacgctggcagagaccgagccagaaaggcacttggggtcttatctgttggactctgaaaacacttcaggcgcccttccaaggcttccccaaacccctaagcagccgcagaagcgctcccgagctgccttctcccacactcaggtgatcgagttggagaggaagttcagccatcagaagtacctgtcggcccctgaacgggcccacctggccaagaacctcaagctcacggagacccaagtgaagatatggttccagaacagacgctataagactaagcgaaagcagctctcctcggagctgggagacttggagaagcactcctctttgccggccctgaaagaggaggccttctcccgggcctccctggtctccgtgtataacagctatccttactacccatacctgtactgcgtgggcagctggagcccagctttttggtaatgccagctcaggtgacaaccattatgatcaaaaactgccttccccagggtgtctctatgaaaagcacaaggggccaaggtcagggagcaagaggtgtgcacaccaaagctattggagatttgcgtggaaatctcagattcttcactggtgagacaatgaaacaacagagacagtgaaagttttaatacctaagtcattcctccagtgcatactgtaggtcattttttttgcttctggctacctgtttgaaggggagagagggaaaatcaagtggtattttccagcactttgtatgattttggatgagttgtacacccaaggattctgttctgcaactccatcctcctgtgtcactgaatatcaactctgaaagagcaaacctaacaggagaaaggacaaccaggatgaggatgtcaccaactgaattaaacttaagtccagaagcctcctgttggccttggaatatggccaaggctctctctgtccctgtaaaagagaggggcaaatagagagtctccaagagaacgccctcatgctcagcacatatttgcatgggagggggagatgggtgggaggagatgaaaatatcagcttttcttattcctttttattccttttaaaatggtatgccaacttaagtatttacagggtggcccaaatagaacaagatgcactcgctgtgattttaagacaagctgtataaacagaactccactgcaagagggggggccgggccaggagaatctccgcttgtccaagacaggggcctaaggagggtctccacactgctgctaggggctgttgcatttttttattagtagaaagtggaaaggcctcttctcaacttttttcccttgggctggagaatttagaatcagaagtttcctggagttttcaggctatcatatatactgtatcctgaaaggcaacataattcttccttccctccttttaaaattttgtgttcctttttgcagcaattactcactaaagggcttcattttagtccagatttttagtctggctgcacctaacttatgcctcgcttatttagcccgagatctggtctttttttttttttttttttttttttttccgtctccccaaagctttatctgtcttgactttttaaaaaagtttgggggcagattctgaattggctaaaagacatgcatttttaaaactagcaactcttatttctttcctttaaaaatacatagcattaaatcccaaatcctatttaaagacctgacagcttgagaaggtcactactgcatttataggaccttctggtggttctgctgttacgtttgaagtctgacaatccttgagaatctttgcatgcagaggaggtaagaggtattggattttcacagaggaagaacacagcgcagaatgaagggccaggcttactgagctgtccagtggagggctcatgggtgggacatggaaaagaaggcagcctaggccctggggagcccagtccactgagcaagcaagggactgagtgagccttttgcaggaaaaggctaagaaaaaggaaaaccattctaaaacacaacaagaaactgtccaaatgctttgggaactgtgtttattgcctataatgggtccccaaaatgggtaacctagacttcagagagaatgagcagagagcaaaggagaaatctggctgtccttccattttcattctgttatctcaggtgagctggtagaggggagacattagaaaaaaatgaaacaacaaaacaattactaatgaggtacgctgaggcctgggagtctcttgactccactacttaattccgtttagtgagaaacctttcaattttcttttattagaagggccagcttactgttggtggcaaaattgccaacataagttaatagaaagttggccaatttcaccccattttctgtggtttgggctccacattgcaatgttcaatgccacgtgctgctgacaccgaccggagtactagccagcacaaaaggcagggtagcctgaattgctttctgctctttacatttcttttaaaataagcatttagtgctcagtccctactgagtactctttctctcccctcctctgaatttaattctttcaacttgcaatttgcaaggattacacatttcactgtgatgtatattgtgttgcaaaaaaaaaaaaaaagtgtctttgtttaaaattacttggtttgtgaatccatcttgctttttccccattggaactagtcattaacccatctctgaactggtagaaaaacatctgaagagctagtctatcagcatctgacaggtgaattggatggttctcagaaccatttcacccagacagcctgtttctatcctgtttaataaattagtttgggttctctacatgcataacaaaccctgctccaatctgtcacataaaagtctgtgacttgaagtttagtcagcacccccaccaaactttatttttctatgtgttttttgcaacatatgagtgttttgaaaataaagtacccatgtctttattagattta

SEQ ID NO: 159605 - DNA, 713 bp, Homo sapiens
  Payload ID: 11239
  Gene Symbol: NKX3-1
  Gene Name: NK3 homeobox 1
  Uniprot ID: Q99801
  ENST ID: ENST00000523261
  CDS Start-End: 1-480
atgctcagggttccggagccgcggcccggggaggccgagacgctggcagagaccgagccagaaaggcacttggggtcttatctgttggactctgaaaacacttcaggcgcccttccaaggcttccccaaacccctaagcagccgcagaagcgctcccgagctgccttctcccacactcaggtgatcgagttggagaggaagttcagccatcagaagtacctgtcggcccctgaacgggcccacctggccaagaacctcaagctcacggagacccaagtgaagatatggttccagaacagacgctataagactaagcgaaagcagctctcctcggagctgggagacttggagaagcactcctctttgccggccctgaaagaggaggccttctcccgggcctccctggtctccgtgtataacagctatccttactacccatacctgtactgcgtgggcagctggagcccagctttttggtaatgccagctcaggtgacaaccattatgatcaaaaactgccttccccagggtgtctctatgaaaagcacaaggggccaaggtcagggagcaagaggtgtgcacaccaaagctattggagatttgcgtggaaatctcagattcttcactggtgagacaatgaaacaacagagacagtgaaagttttaatacctaagtcattcctccagtgcatactgtaggtcattttttttgctt

SEQ ID NO: 159606 - DNA, 2801 bp, Homo sapiens
  Payload ID: 11240
  Gene Symbol: NKX3-2
  Gene Name: NK3 homeobox 2
  Uniprot ID: P78367
  ENST ID: ENST00000382438
  CDS Start-End: 637-1638
cgggaggggggtggtacagtggaacgcaagggaaggaaagagaaaagaaacagataaaaccagggcagggggtaaaaaagttccccgcgcctctcggaatccagcggccgcggccgcggctaccgccgccgccgccgggggtgggctccggaagagcctgcccagcagggaaggggaggacgggccaggagcgaaatcctgcaggcgaggaagggacagacgcgcaaagaaaaagtgactcgggctgtgcgccccggcggcgctcgggaggggactgctgccacggaggggcccccgccaatcctccttcacgtcccccgagggggcagaccccagcccgcccctaagggcgagaagcgatgagataatccagctgagctgcgaaaggagagcgtctggctctggattcggggggagggggtctccgggcggggtgggcctctaaggtgggggcgagggtcggcgctgatcctgggacggagtggggcgggagctgctgggccgcgcagcagtgggcggcggcggcctcgcacacccagctcactcgcgctgcggccgccggcgctctctgtcccgctcggagctgctcggcgccccagctgcccgccccgccggccgctcctgcccgcggcgcagatggctgtgcgcggcgccaacaccttgacgtccttctccatccaggcgatcctcaacaagaaagaggagcgcggcgggctggccgcgccagaggggcgcccggcgcccgggggcacagcggcatcggtggccgcggctcccgctgtctgctgttggcggctctttggggagagggacgcgggcgcgttggggggcgccgaggactctctgctggcgtctcctgccggtaccagaacagctgcggggcggactgcggagagcccggaaggctgggactcggactccgcgctcagcgaggagaacgagagcaggcggcgctgcgcggacgcgcggggggccagcggggccggccttgcggggggatccttgagcctcggccagccggtctgtgagctggccgcttccaaagacctagaggaggaagccgcgggccggagcgacagcgagatgtccgccagcgtctcaggcgaccgcagcccaaggaccgaggacgacggtgttggccccagaggtgcacacgtgtccgcgctgtgcagcggggccggcggcgggggcggcagcgggccggcaggcgtcgcggaggaggaggaggagccggcggcgcccaagccacgcaagaagcgctcgcgggccgctttctcccacgcgcaggtcttcgagctggagcgccgctttaaccaccagcgctacctgtccgggcccgagcgcgcagacctggccgcgtcgctgaagctcaccgagacgcaggtgaaaatctggttccagaaccgtcgctacaagacaaagcgccggcagatggcagccgacctgctggcctcggcgcccgccgccaagaaggtggccgtaaaggtgctggtgcgcgacgaccagagacaatacctgcccggcgaagtgctgcggccaccctcgcttctgccactgcagccctcctactattacccgtactactgcctcccaggctgggcgctctccacctgcgcagctgccgcaggcacccagtgaacccgcttgggctgaggcagcgagtgattcccgcgctccggctccggaccggcgctgacagctgtaggctgtagcctgcacggggcgccccgccaaggaggcacctggaggtgaaacccagctccagctcccgttagccaggacttgtcccctggcagctgggctgagtctgccctgagggggcgcctttttctaatttgaacagaggcaccctatggcctaggggccctgatcgcccacctgcctggaagcccctgggctctatttattatcatgacaatgttggaattaaattttgattcgaatatgtctgcctgggggtggggttttccctgagcggcaactcctggagaccacatagcctgaatcctcagaatttcaggcctgctgggagctttctgcactaggccacactagttcatggtatccatgctaccaatctatgtgtatctacatatcttttatttttggaaattgcatttgtaaccaaggggtgcgaaaccctggcagtcccaggcagcaccaggccaggggttgatttgaaacgtgaaggattgggttttcaggccctctgctccacccctcctgtgtgtcagagctagggtgggggtgcccgattcgggtgctgaatgtaaggaggggagcctccaagtgtggtgcaagccgggggtctccacatcttccttctctgaagtccaggtacctgcacaagcaggaagcgcctgggagtcccggaaggaggagagcgcacacccaggcagccctctgcggaaactttccttggtttctttttatttgtgtaaaggaggttaagacgtgtcgcacttttcagttgtttgtattcaaatgacgattatttttctactcaatgtgaatatccctggccagcctttccacggcgcccaccgcagtgccgctgcctggccctcagtgtctaccttctgccctctgcgactccagtgctctggcccgggactcccctatccgcccctcacttacccttaaacaggtgatcccacctgtcttgtcaacctcgccgcttttcgcctccttaatggcactgtgcactcaactagagtattaactgtaaaaagatttgtgaagtttggaagctctattcgctgtattttttctttaatttataaacttttagtttaacatgc

SEQ ID NO: 159607 - DNA, 2628 bp, Homo sapiens
  Payload ID: 11241
  Gene Symbol: NKX6-1
  Gene Name: NK6 homeobox 1
  Uniprot ID: P78426
  ENST ID: ENST00000295886
  CDS Start-End: 223-1326
ggcgagctgccgcctcccgcgtggagggtttggacatctctgctgcgcagctaggcgagcaactcccggcagcggcatttttggttcagttggcagctcgcctccgggcgcgccgagtgcctctccgctcgcgccctcggcgcttccggctcctctgagccccgcggggggcaccagccagcgccctcgctgcaaggctacggtctccggcgtggccgtgggatgttagcggtgggggcaatggagggcacccggcagagcgcattcctgctcagcagccctcccctggccgccctgcacagcatggccgagatgaagaccccgctgtaccctgccgcgtatcccccgctgcctgccggccccccctcctcctcgtcctcgtcgtcgtcctcctcgtcgccctccccgcctctgggcacccacaacccaggcggcctgaagcccccggccacgggggggctctcatccctcggcagccccccgcagcagctctcggccgccaccccacacggcatcaacgatatcctgagccggccctccatgcccgtggcctcgggggccgccctgccctccgcctcgccctccggttcctcctcctcctcttcctcgtccgcctctgcctcctccgcctctgccgccgccgcggctgctgccgcggccgcagccgccgcctcatccccggcggggctgctggccggactgccacgctttagcagcctgagcccgccgccgccgccgcccgggctctacttcagccccagcgccgcggccgtggccgccgtgggccggtaccccaagccgctggctgagctgcctggccggacgcccatcttctggcccggagtgatgcagagcccgccctggagggacgcacgcctggcctgtacccctcatcaaggatccattttgttggacaaagacgggaagagaaaacacacgagacccactttttccggacagcagatcttcgccctggagaagactttcgaacaaacaaaatacttggcggggcccgagagggctcgtttggcctattcgttggggatgacagagagtcaggtcaaggtctggttccagaaccgccggaccaagtggaggaagaagcacgctgccgagatggccacggccaagaagaagcaggactcggagacagagcgcctcaagggggcctcggagaacgaggaagaggacgacgactacaataagcctctggatcccaactcggacgacgagaaaatcacgcagctgttgaagaagcacaagtccagcagcggcggcggcggcggcctcctactgcacgcgtccgagccggagagctcatcctgaacgccgccgcccgccgcaccttcccggctccggcctccacctctggggccgcgaggggcgcggggaccgcgtgcacgccgcgcctgcccgctcctcggggcccggaggacccggccctgcctgcggggaccctttgctatttttgagatgtacatatctatttttttaaccttgaagttgtgggaggggatgtaggggagagagactccggggttgataaggcaagaaagaccaccaaatgcactgcgtaaatgtcgctactgaaacccgcagccgggccacggtcccagccgcgtccccataggcgggcagcggcctcagcgcccgggtccccctcgcccccagattttgcccccgcgggcggcggggtagggggcgccgagaggtgctgtggaagggttcacgctcaccgcatgggggacctcggagcgaagcgggcgggcgctgccacagatgggaagagggacgtttccccccccacacactgctgtgcaactaaagtaacctgttgaaggctctttgtaaataaatcgtgagttacactgactagaagttactttattgtgaatatttaaaatgtaaaatgcttttttgaatttcgtataaaaagatggactttcttccttctcctcctcccctttgaagagcgactcaagccacaccttcccttttattttgaacttaatttgagaagcgtagaatagaatgtccccaccttctccgtcccctcctctcgttcctctttcccgtttggatttgcagaatctcacctttgcccttcatctcttctcgccctgccctgccctgcccaccccctggatctacactgcgctcccgccccccggacttgaagtggaagacgtgggaaccagggagggcctctcacctgcctccctgttcctctctgaaattgcacagtcgtttgttgctatttattagtgatttaaagaaaatattggggagggaggggctacaatagcttgtatttaactcctttctgataaaaatgcgtgttaaagtaggtggtgggaattgttacaaccgctctgggtctgaaacataaaaattcatttagttactgtaattgaatttgaagtgttttgtatcataagaatactatagaatatgtaaattgttttctttttacagctaataatggtgatatattagcatctttaacctttattaatttatataaggaattcggtttgtaaagagaagaaaaccccctttgcaagaccagttaaatgtaatgcactttctgtttcaaaggataaatcaaattaaaaaaaacagtttgaa

SEQ ID NO: 159608 - DNA, 2194 bp, Homo sapiens
  Payload ID: 11241
  Gene Symbol: NKX6-1
  Gene Name: NK6 homeobox 1
  ENST ID: ENST00000515820
  CDS Start-End: 611-892
cattgaagacagtccagcgtccccagggcagggcgagcgcttccagccgctcaccagcgctgggcccgcgctttcccacctgcctccactctgggggctggcacacgctgcgtccgggcacatttggggacatcgtggagctcaacaccctaacacaagagcgagccaggagaagagtgagatgaagggacacggcctggggaaaatgtaccatcccgcaaagaccttgcttgaggcaaactgagttgccccaagatcacgctagtcttcggggtagtaggccgcagcgccgcggaggctcccagccttccaggtggacttcagggcccagcctggggtccttttctcgctcagttcttcgcctttcagcgagtctccgaagtttcttccaagtctccggacctccttagtgcggctgagcggcagtaactgcgggaagttgcgaaagccaagtggagatcaaggatccattttgttggacaaagacgggaagagaaaacacacgagacccactttttccggacagcagatcttcgccctggagaagactttcgaacaaacaaaatacttggcggggcccgagagggctcgtttggcctattcgttggggatgacagagagtcaggtcaaggtctggttccagaaccgccggaccaagtggaggaagaagcacgctgccgagatggccacggccaagaagaagcaggactcggagacagagcgcctcaagggggcctcggagaacgaggaagaggacgacgactacaataagcctctggatcccaactcggacgacgagaaaatcacgcagctgttgaagaagcacaagtccagcagcggcggcggcggcggcctcctactgcacgcgtccgagccggagagctcatcctgaacgccgccgcccgccgcaccttcccggctccggcctccacctctggggccgcgaggggcgcggggaccgcgtgcacgccgcgcctgcccgctcctcggggcccggaggacccggccctgcctgcggggaccctttgctatttttgagatgtacatatctatttttttaaccttgaagttgtgggaggggatgtaggggagagagactccggggttgataaggcaagaaagaccaccaaatgcactgcgtaaatgtcgctactgaaacccgcagccgggccacggtcccagccgcgtccccataggcgggcagcggcctcagcgcccgggtccccctcgcccccagattttgcccccgcgggcggcggggtagggggcgccgagaggtgctgtggaagggttcacgctcaccgcatgggggacctcggagcgaagcgggcgggcgctgccacagatgggaagagggacgtttccccccccacacactgctgtgcaactaaagtaacctgttgaaggctctttgtaaataaatcgtgagttacactgactagaagttactttattgtgaatatttaaaatgtaaaatgcttttttgaatttcgtataaaaagatggactttcttccttctcctcctcccctttgaagagcgactcaagccacaccttcccttttattttgaacttaatttgagaagcgtagaatagaatgtccccaccttctccgtcccctcctctcgttcctctttcccgtttggatttgcagaatctcacctttgcccttcatctcttctcgccctgccctgccctgcccaccccctggatctacactgcgctcccgccccccggacttgaagtggaagacgtgggaaccagggagggcctctcacctgcctccctgttcctctctgaaattgcacagtcgtttgttgctatttattagtgatttaaagaaaatattggggagggaggggctacaatagcttgtatttaactcctttctgataaaaatgcgtgttaaagtaggtggtgggaattgttacaaccgctctgggtctgaaacataaaaattcatttagttactgtaattgaatttgaagtgttttgtatcataagaatactatagaatatgtaaattgttttctttttacagctaataatggtgatatattagcatctttaacctttattaatttatataaggaattcggtttgtaaagagaagaaaaccccctttgcaagaccagttaaatgtaatgcactttctgtttcaaaggataaatcaaattaaaaaaaacagtttgaa

SEQ ID NO: 159609 - DNA, 2673 bp, Homo sapiens
  Payload ID: 11242
  Gene Symbol: NKX6-2
  Gene Name: NK6 homeobox 2
  Uniprot ID: Q9C056
  ENST ID: ENST00000368592
  CDS Start-End: 105-938
gcagccgacgcccgcccgggccgcgcgcaaacttcccgggccggcgggcaggggcggcggcggcggggcccggatgggagcccgggccggcggcggcggcgcccatggacactaaccgcccgggcgcgttcgtgctgagcagtgccccgctggccgcgctgcacaacatggccgagatgaagacgtcgctgttcccctacgcgctgcagggtccggccggcttcaaggcgcccgcgctggggggcctgggcgcgcagctcccgctcgggaccccgcacggcatcagcgacatcctgggccggcccgtgggcgcggcgggcgggggcctcctgggggggctgccccggctcaacgggctcgcgtcgtccgccggcgtttacttcgggcccgcggccgctgtggcgcgcggctaccccaagcccctggccgagctgccggggcgcccgcccatcttctggcccggcgtggtgcagggcgcgccctggagggacccgcgtctggctggcccggccccggccggcggcgtcctggacaaggacgggaagaagaagcactcgcgcccgaccttctcgggccagcagatcttcgcgctggagaaaaccttcgagcagaccaagtacctggcgggcccggagcgcgcgcgtctcgcctactcgctgggcatgaccgagagccaggtgaaggtctggttccagaaccgccggaccaagtggcgcaagcggcacgcggtggagatggcgtcggccaagaagaagcaggactcggacgccgagaagctgaaggtgggcggctcggacgcggaggacgacgacgaatacaaccggcccctggaccccaactcggacgacgagaagatcacgcggctgctcaagaagcacaaaccctcgaacttggcgctggtcagcccgtgcggcggcggcgcgggggacgccttgtgaggacccgcggggtgggggcgaatctatttttgcagaatccgggggcggccccgggtgggcgcgagtcgctttgtatcatcaataaattatttaacgggtccccgtcggagccgtcgctccggagcctgcgccgcgtgtttcttccgtctcgaacccggagcgaggcggcccctccccggccccggcttcgcccctgcgcccgcctcgggtcctccgggttcccggtgcggaggctgcgggccccgggcaggcgcgaggaggcggcgaaggcgcagggaaggggcccggcccgcgggaaggaaccgcagcgacagccgccaggagcccgggacggagccggggacggagcagcaggtacggcccggcccgcctcgcctcggggcggattcggacgcgcttgggggttcccgaaagggcgggtgagccgcgtacccgcctcgagtccccgcgggaggtttttcttcttccgttttcccgctttggggccacgtactcgttgccaccgggcacccgttcccgcttggccgagggcttcgctctgattatttccaaagtccctctgcgcatcagcggatcccataggcccgccctgggctcagccggtggaaccgggtctgatccgctgcacggaggcccttcggtcaccatcccgccagatcttcccgcggtggaaagcagtttcttccgaactaggaccgcaaagagaaatccgaaataattccgcccgcggagcggcggggcctcccgtgggtcacgcggggtcagggagccggaggccccctgggcaaggcccgcagcgcccagccgggggctcgggggacccgtctcctgccctgaaatgccgccagctccgcggggctgtgactgcggctgacaaaacccctccagcctcccgcagcctctgtggccggggctgcccatcgctgcatcttaatgggcgtggctgttgagttttaatttttaaaaattaaatgtaaataatgatatcactgcggtggtacgatttctcttggcatttgcggaagcgttaaagggaaatagaaagggcttaaactcggcgcgttttgttttaggctcttagcagccttctttacaaggaagcaactcgaagggcagaagcaacgcttttctgtggggagcccctctcagctcagagcagaggggcttcttaaagttttgaggaaggcaaagcgttgatataatcccgttttaaaatgttgagggataaatcctttattacagtagaaagtccaaaaggctgtgtttctcctctcaatgaacggcttagtgttttgtgacagcgtgtgatacagtgaaattccaggatttctaatgagcttgatctcaaataacaggctatacaggaggccgctcccctgagttagcatttcaaaggtggcaggagaagggaaaggaagaaaaagcaacacgggactattttcaccacggtcaattttattgcttaggaaccagaccggtcacttccaaaggcccctcagaacgaccaacagctgaaacccgcggggcggactccgtgttgaaccgcggacagcggcaaccacagcagcgacacggacctgtgcttccaccaagaacagattccgcagcggacagcagtcacttgcagtggtagtatttatcccacacaaacacccagctaatgccttcacccggtccaggaactctgtagtgttctaaagtaaaatcaataaaacatacatttgtgtttcatcaa

SEQ ID NO: 159610 - DNA, 1352 bp, Homo sapiens
  Payload ID: 11243
  Gene Symbol: NKX6-3
  Gene Name: NK6 homeobox 3
  Uniprot ID: A6NJ46
  ENST ID: ENST00000518699
  CDS Start-End: 178-975
gcagctgatcgggtgccggttcctgggccagggcctggcccatgccttaggtgggaggcagtcaggagctcggagacggtcctaagcctccaggcctgccatgagatttggggctagagagtgggctcttgggttttaggggcctggagaagccttccctgtcctgactgggagatcatggagtccaacctgcaggggacgttcctgctgaacaacacgccgctggctcagtttccggagatgaaggccccggtgtgccagtactctgtgcagaactccttctacaagctcagccccccagggctgggcccccagctggccgccggaaccccccacgggatcacggacatcctgagcaggcccgtggctgcgccgaacaacagcctcctctccggctacccccacgtggcaggctttggggggctcagctcgcagggggtctactacagcccccaggtagggaatttttccaaggctgggaacgagtacccgacccggacccggaactgctgggcggacacgggccaagactggcgaggcgggcggcagtgcagcaacaccccagaccccctgagtgacagcatacacaagaagaagcacacccggcccaccttcacggggcaccagatctttgccctggagaaaacctttgagcagaccaagtacttggctggccccgagagggcacggctggcatactcactgggcatgaccgagtcgcaggtcaaggtgtggttccagaaccgcaggaccaagtggcggaagaagagcgccctggagccctcgtcctccacgccccgggccccgggcggcgcgggtgcaggcgcaggcggggaccgcgcaccctcggagaacgaggacgacgagtacaacaagccgctggaccccgactcggacgacgagaagatccgcctgctgctgcgcaagcaccgcgccgccttctcggtgctcagcctgggagcgcacagcgtctgacgcccgccgtccaggcccgggatcctggctgcagcctgcggggggacgccgaggagcctaccttcccctccccttccccacgctcctgggggcgcagggactgagtctttctttggatgaggggcgcgtggaggaggagcagcaggtgcaggggaggaggaggggaggcgggggaggaggaggaaaaggagggaaaggggacaggcatcctagctaagggaggaggaggccaggagggaggcacagcactcctgagacctggaagccgctgccccttgcacctcctcgggcctcgcctgccagttctgcagattcacaagtggacagaggactaaaatgaccaggctctgcagccaagaaactggctgtggggtccc

SEQ ID NO: 159611 - DNA, 1683 bp, Homo sapiens
  Payload ID: 11243
  Gene Symbol: NKX6-3
  Gene Name: NK6 homeobox 3
  Uniprot ID: A6NJ46
  ENST ID: ENST00000524115
  CDS Start-End: 5-412
aaggatgcagcaggggcagctggcacctgggtctaggctttgctcagggccctggggcctccccgagctccaacccgctgcgccctcctcatcagccgctcagctgccctggggcgagagctggggggaagaagcagacactcctgcatgtctttctgcttctggggtgtggttccagaaccgcaggaccaagtggcggaagaagagcgccctggagccctcgtcctccacgccccgggccccgggcggcgcgggtgcaggcgcaggcggggaccgcgcaccctcggagaacgaggacgacgagtacaacaagccgctggaccccgactcggacgacgagaagatccgcctgctgctgcgcaagcaccgcgccgccttctcggtgctcagcctgggagcgcacagcgtctgacgcccgccgtccaggcccgggatcctggctgcagcctgcggggggacgccgaggagcctaccttcccctccccttccccacgctcctgggggcgcagggactgagtctttctttggatgaggggcgcgtggaggaggagcagcaggtgcaggggaggaggaggggaggcgggggaggaggaggaaaaggagggaaaggggacaggcatcctagctaagggaggaggaggccaggagggaggcacagcactcctgagacctggaagccgctgccccttgcacctcctcgggcctcgcctgccagttctgcagattcacaagtggacagaggactaaaatgaccaggctctgcagccaagaaactggctgtggggtcccagacatgccactgtgatccagctgttggggcggggggagtgggcaggacttcccagggagggaggcagctggctggggagtcagaagtccagagtcttgggccccaagccagctgctggctgcagaagaaaagacaggtgagtggccaggtgcactcctcagacctgtgcacaggaagggtcccactggaggggccagagctgagcacctaacccaggctgcaggaaatctgcctccaggaggggaagtgggacatcccagtggagaaaaaatgcccctgacactgcaggatgacggcccctgagctgcggaaatccccctggcctcctttctccgatttaccctcagggtcaatacctctgagaccgctgtgccctcctcatcctgacagccggggaaaaggggagggtgcagggagaggggaggcggggacggtgtgcccaagggccacccacctgggcatcatttggtgctgatataaggacaggcccacccagagagaaaaagcatcccacctggggaggaaaggaagggctgggaaagaccccagaacggcacccctccaacaaggcaggaagggagaaggacagcccctccggctgggtggaggatgccaggaaggggctgaaccacggcctgctgggaatcacggcccttcctttcctcagatcgccttgcggcctggcactggagctggtgctgacagggacgctggccaacagggtggtatttttcacccgggtgatctgagctgctggcaggtagggggtgggctgggggaggcgggtgagggctggtcttagataggaatgcagcccagaagggaccaagcacttgcccatcctcactggctttcaaaaaataaacagtaaaaataaaagtcccatgaacctt

SEQ ID NO: 159612 - DNA, 3744 bp, Homo sapiens
  Payload ID: 11244
  Gene Symbol: NLRX1
  Gene Name: NLR family member X1
  Uniprot ID: Q86UT6
  ENST ID: ENST00000292199
  CDS Start-End: 242-3169
cccgcggggatggaggcagggaggggggacgatggcgggacgggtggcgccggggttccagccctgcgcctgctccggagcaccgggcccctctcgctgaccccctcgtcccaggaccccgcaggcccgagtgcctgggctcgtcctctttcgcgcccgctgccaggtgccagggccgcgcaggcgggcggaggacagaagtcggtcctaggccccccaggctctgaccttctttcccaggatgaggtggggccaccatttgcccagggcctcttggggctctggttttagaagagcactccagcgaccagatgatcgtatccccttcctgatccactggagttggccccttcaaggggagcgtccctttgggccccctagggcctttatacgccaccacggaagctcggtagatagcgctcccccacccgggaggcatggacggctgttccccagcgcctctgcaactgaagctatacagcggcaccgccggaacctggctgagtggttcagccggctgcccagggaggagcgccagtttggcccaacctttgccctagacacggtccacgttgaccctgtgatccgcgagagtacccctgatgagctacttcgcccacccgcggagctggccctggagcatcagccaccccaggccgggctccccccactggccttgtctcagctctttaacccggatgcctgtgggcgccgggtgcagacagtggtgctgtatgggacagtgggcacaggcaagagcacgctggtgcgcaagatggttctggactggtgttatgggcggctgccggccttcgagctgctcatccccttctcctgtgaggacctgtcatccctgggccctgccccagcctccctgtgccaacttgtggcccagcgctacacgcccctgaaggaggttctgcccctgatggctgctgctgggtcccacctcctctttgtgctccatggcttagagcatctcaacctcgacttccggctggcaggcacgggactttgtagtgacccggaggaaccgcaggaaccagctgctatcatcgtcaacctgctgcgcaaatacatgctgcctcaggccagcattctggtgaccactcggccctctgccattggccgtatccccagcaagtacgtgggccgctatggtgagatctgcggtttctctgataccaacctgcagaagctctacttccagctccgcctcaaccagccgtactgcgggtatgccgttggcggttcaggtgtctctgccacaccagctcagcgtgaccacctggtgcagatgctctcccggaacctggaggggcaccaccagatagccgctgcctgcttcctgccgtcctattgctggctcgtttgtgccaccttgcacttcctgcatgcccccacgcctgctgggcagacccttacaagcatctataccagcttcctgcgcctcaacttcagcggggaaaccctggacagcactgacccctccaatttgtccctgatggcctatgcagcccgaaccatgggcaagttggcctatgagggggtgtcctcccgcaagacctacttctctgaagaggatgtctgtggctgcctggaggctggcatcaggacggaggaggagtttcagctgctgcacatcttccgtcgggatgccctgaggtttttcctggccccatgtgtggagccagggcgtgcaggcaccttcgtgttcaccgtgcccgccatgcaggaatacctggctgccctctacattgtgctgggtttgcgcaagacgaccctgcaaaaggtgggcaaggaagtggctgagctcgtgggccgtgttggggaggacgtcagcctggtactgggcatcatggccaagctgctgcctctgcgggctctgcctctgctcttcaacctgatcaaggtggttccacgagtgtttgggcgcatggtgggtaaaagccgggaggcggtggctcaggccatggtgctggagatgtttcgagaggaggactactacaacgatgatgttctggaccagatgggcgccagtatcctgggcgtggagggcccccggcgccacccagatgagccccctgaggatgaagtcttcgagctcttccccatgttcatgggggggcttctctctgcccacaaccgagctgtgctagctcagcttggctgccccatcaagaacctggatgccctggagaatgcccaggccatcaagaagaagctgggcaagctgggccggcaggtgctgcccccatcagagctccttgaccacctcttcttccactatgagttccagaaccagcgcttctccgctgaggtgctcagctccctgcgtcagctcaacctggcaggtgtgcgcatgacaccagtcaagtgcacagtggtggcagctgtgctgggcagcggaaggcatgccctggatgaggtgaacttggcctcctgccagctagatcctgctgggctgcgcacactcctgcctgtcttcctgcgtgcccggaagctgggcttgcaactcaacagcctgggccctgaggcctgcaaggacctccgagacctgttgctgcatgaccagtgccaaattaccacactgcggctgtccaacaacccgctgacggcggcaggtgttgccgtgctaatggaggggctggcaggaaacacctcagtgacgcacctgtccctgctgcacacgggccttggggacgaaggcctggagctgctggctgcccagctggaccgcaaccggcagctgcaggagctgaacgtggcgtacaacggtgctggtgacacagcggccctggccctggccagagctgcccgggagcacccttccctggaactgctacacctctacttcaatgagctgagctcagagggccgccaggtcttgcgagacttggggggtgctgctgaaggtggtgcccgggtggtggtgtcactgacagaggggacggcggtgtcagaatactggtcagtgatcctcagtgaagtccagcggaacctcaatagctgggatcgggcccgggttcagcgacaccttgagctcctactgcgggatctggaagatagccggggtgccacccttaatccttggcgcaaggcccagctgctgcgagtggagggcgaggtcagggccctcctggagcagctgggaagctctggaagctgagacactggcggcaggcacctagctatgtgaccactggccctaaaccttttccctctgtggcctcctggcttgcactgctccctctagaaagattccttcaggtctggaggcagaggaatgggcatagctgagccagttgccctcctagggcatgtttgaccaggactgagtctggaatctccaagttaaagatggtgaatcaatgcttcgggcttggagatggaacatgcctcctctccattcagctagaaggaccaaagcatgtggcatttggatggccagagtgccctgaagcaccactaccaaccttgcctccccctcctctcaaagagcctctgactgtgtcaccaaggggctcacatcttatgtctgccatgccaggggtgtcgccatccagatgtgttggaagcttcccctcctgccttatgctcacctgtggacaccgaggatgccctcacattggtgctttctcctcatcctcatgccccctttgccacaatggtatgatggcttggtagcccctcgaggcagatgcacctgacttgctgctattaaaaagccgtgtgccttctacc

SEQ ID NO: 159613 - DNA, 3716 bp, Homo sapiens
  Payload ID: 11244
  Gene Symbol: NLRX1
  Gene Name: NLR family member X1
  Uniprot ID: Q86UT6
  ENST ID: ENST00000409991
  CDS Start-End: 216-3143
gcccgcggggatggaggcagggaggggggacgatggcgggacgggtggcgccggggttccagccctgcgcctgctccggagcaccgggcccctctcgctgaccccctcgtcccaggaccccgcaggcccgagtgcctgggctcgtcctctttcgcgcccgctgccaggacagaagtcggtcctaggccccccaggctctgaccttctttcccaggatgaggtggggccaccatttgcccagggcctcttggggctctggttttagaagagcactccagcgaccagatgatcgtatccccttcctgatccactggagttggccccttcaaggggagcgtccctttgggccccctagggcctttatacgccaccacggaagctcggtagatagcgctcccccacccgggaggcatggacggctgttccccagcgcctctgcaactgaagctatacagcggcaccgccggaacctggctgagtggttcagccggctgcccagggaggagcgccagtttggcccaacctttgccctagacacggtccacgttgaccctgtgatccgcgagagtacccctgatgagctacttcgcccacccgcggagctggccctggagcatcagccaccccaggccgggctccccccactggccttgtctcagctctttaacccggatgcctgtgggcgccgggtgcagacagtggtgctgtatgggacagtgggcacaggcaagagcacgctggtgcgcaagatggttctggactggtgttatgggcggctgccggccttcgagctgctcatccccttctcctgtgaggacctgtcatccctgggccctgccccagcctccctgtgccaacttgtggcccagcgctacacgcccctgaaggaggttctgcccctgatggctgctgctgggtcccacctcctctttgtgctccatggcttagagcatctcaacctcgacttccggctggcaggcacgggactttgtagtgacccggaggaaccgcaggaaccagctgctatcatcgtcaacctgctgcgcaaatacatgctgcctcaggccagcattctggtgaccactcggccctctgccattggccgtatccccagcaagtacgtgggccgctatggtgagatctgcggtttctctgataccaacctgcagaagctctacttccagctccgcctcaaccagccgtactgcgggtatgccgttggcggttcaggtgtctctgccacaccagctcagcgtgaccacctggtgcagatgctctcccggaacctggaggggcaccaccagatagccgctgcctgcttcctgccgtcctattgctggctcgtttgtgccaccttgcacttcctgcatgcccccacgcctgctgggcagacccttacaagcatctataccagcttcctgcgcctcaacttcagcggggaaaccctggacagcactgacccctccaatttgtccctgatggcctatgcagcccgaaccatgggcaagttggcctatgagggggtgtcctcccgcaagacctacttctctgaagaggatgtctgtggctgcctggaggctggcatcaggacggaggaggagtttcagctgctgcacatcttccgtcgggatgccctgaggtttttcctggccccatgtgtggagccagggcgtgcaggcaccttcgtgttcaccgtgcccgccatgcaggaatacctggctgccctctacattgtgctgggtttgcgcaagacgaccctgcaaaaggtgggcaaggaagtggctgagctcgtgggccgtgttggggaggacgtcagcctggtactgggcatcatggccaagctgctgcctctgcgggctctgcctctgctcttcaacctgatcaaggtggttccacgagtgtttgggcgcatggtgggtaaaagccgggaggcggtggctcaggccatggtgctggagatgtttcgagaggaggactactacaacgatgatgttctggaccagatgggcgccagtatcctgggcgtggagggcccccggcgccacccagatgagccccctgaggatgaagtcttcgagctcttccccatgttcatgggggggcttctctctgcccacaaccgagctgtgctagctcagcttggctgccccatcaagaacctggatgccctggagaatgcccaggccatcaagaagaagctgggcaagctgggccggcaggtgctgcccccatcagagctccttgaccacctcttcttccactatgagttccagaaccagcgcttctccgctgaggtgctcagctccctgcgtcagctcaacctggcaggtgtgcgcatgacaccagtcaagtgcacagtggtggcagctgtgctgggcagcggaaggcatgccctggatgaggtgaacttggcctcctgccagctagatcctgctgggctgcgcacactcctgcctgtcttcctgcgtgcccggaagctgggcttgcaactcaacagcctgggccctgaggcctgcaaggacctccgagacctgttgctgcatgaccagtgccaaattaccacactgcggctgtccaacaacccgctgacggcggcaggtgttgccgtgctaatggaggggctggcaggaaacacctcagtgacgcacctgtccctgctgcacacgggccttggggacgaaggcctggagctgctggctgcccagctggaccgcaaccggcagctgcaggagctgaacgtggcgtacaacggtgctggtgacacagcggccctggccctggccagagctgcccgggagcacccttccctggaactgctacacctctacttcaatgagctgagctcagagggccgccaggtcttgcgagacttggggggtgctgctgaaggtggtgcccgggtggtggtgtcactgacagaggggacggcggtgtcagaatactggtcagtgatcctcagtgaagtccagcggaacctcaatagctgggatcgggcccgggttcagcgacaccttgagctcctactgcgggatctggaagatagccggggtgccacccttaatccttggcgcaaggcccagctgctgcgagtggagggcgaggtcagggccctcctggagcagctgggaagctctggaagctgagacactggcggcaggcacctagctatgtgaccactggccctaaaccttttccctctgtggcctcctggcttgcactgctccctctagaaagattccttcaggtctggaggcagaggaatgggcatagctgagccagttgccctcctagggcatgtttgaccaggactgagtctggaatctccaagttaaagatggtgaatcaatgcttcgggcttggagatggaacatgcctcctctccattcagctagaaggaccaaagcatgtggcatttggatggccagagtgccctgaagcaccactaccaaccttgcctccccctcctctcaaagagcctctgactgtgtcaccaaggggctcacatcttatgtctgccatgccaggggtgtcgccatccagatgtgttggaagcttcccctcctgccttatgctcacctgtggacaccgaggatgccctcacattggtgctttctcctcatcctcatgccccctttgccacaatggtatgatggcttggtagcccctcgaggcagatgcacctgacttgctgctattaaaaagccgtgtgccttcta

SEQ ID NO: 159614 - DNA, 3665 bp, Homo sapiens
  Payload ID: 11244
  Gene Symbol: NLRX1
  Gene Name: NLR family member X1
  Uniprot ID: Q86UT6
  ENST ID: ENST00000409265
  CDS Start-End: 163-3090
cttctttcttaaccaaggttaccagcagccacacacataggtctgggctctgaagaggaccggatacataaggcagaacccaaggaagccttaggctcaggtctctgcctgaaggacagaagtcggtcctaggccccccaggctctgaccttctttcccaggatgaggtggggccaccatttgcccagggcctcttggggctctggttttagaagagcactccagcgaccagatgatcgtatccccttcctgatccactggagttggccccttcaaggggagcgtccctttgggccccctagggcctttatacgccaccacggaagctcggtagatagcgctcccccacccgggaggcatggacggctgttccccagcgcctctgcaactgaagctatacagcggcaccgccggaacctggctgagtggttcagccggctgcccagggaggagcgccagtttggcccaacctttgccctagacacggtccacgttgaccctgtgatccgcgagagtacccctgatgagctacttcgcccacccgcggagctggccctggagcatcagccaccccaggccgggctccccccactggccttgtctcagctctttaacccggatgcctgtgggcgccgggtgcagacagtggtgctgtatgggacagtgggcacaggcaagagcacgctggtgcgcaagatggttctggactggtgttatgggcggctgccggccttcgagctgctcatccccttctcctgtgaggacctgtcatccctgggccctgccccagcctccctgtgccaacttgtggcccagcgctacacgcccctgaaggaggttctgcccctgatggctgctgctgggtcccacctcctctttgtgctccatggcttagagcatctcaacctcgacttccggctggcaggcacgggactttgtagtgacccggaggaaccgcaggaaccagctgctatcatcgtcaacctgctgcgcaaatacatgctgcctcaggccagcattctggtgaccactcggccctctgccattggccgtatccccagcaagtacgtgggccgctatggtgagatctgcggtttctctgataccaacctgcagaagctctacttccagctccgcctcaaccagccgtactgcgggtatgccgttggcggttcaggtgtctctgccacaccagctcagcgtgaccacctggtgcagatgctctcccggaacctggaggggcaccaccagatagccgctgcctgcttcctgccgtcctattgctggctcgtttgtgccaccttgcacttcctgcatgcccccacgcctgctgggcagacccttacaagcatctataccagcttcctgcgcctcaacttcagcggggaaaccctggacagcactgacccctccaatttgtccctgatggcctatgcagcccgaaccatgggcaagttggcctatgagggggtgtcctcccgcaagacctacttctctgaagaggatgtctgtggctgcctggaggctggcatcaggacggaggaggagtttcagctgctgcacatcttccgtcgggatgccctgaggtttttcctggccccatgtgtggagccagggcgtgcaggcaccttcgtgttcaccgtgcccgccatgcaggaatacctggctgccctctacattgtgctgggtttgcgcaagacgaccctgcaaaaggtgggcaaggaagtggctgagctcgtgggccgtgttggggaggacgtcagcctggtactgggcatcatggccaagctgctgcctctgcgggctctgcctctgctcttcaacctgatcaaggtggttccacgagtgtttgggcgcatggtgggtaaaagccgggaggcggtggctcaggccatggtgctggagatgtttcgagaggaggactactacaacgatgatgttctggaccagatgggcgccagtatcctgggcgtggagggcccccggcgccacccagatgagccccctgaggatgaagtcttcgagctcttccccatgttcatgggggggcttctctctgcccacaaccgagctgtgctagctcagcttggctgccccatcaagaacctggatgccctggagaatgcccaggccatcaagaagaagctgggcaagctgggccggcaggtgctgcccccatcagagctccttgaccacctcttcttccactatgagttccagaaccagcgcttctccgctgaggtgctcagctccctgcgtcagctcaacctggcaggtgtgcgcatgacaccagtcaagtgcacagtggtggcagctgtgctgggcagcggaaggcatgccctggatgaggtgaacttggcctcctgccagctagatcctgctgggctgcgcacactcctgcctgtcttcctgcgtgcccggaagctgggcttgcaactcaacagcctgggccctgaggcctgcaaggacctccgagacctgttgctgcatgaccagtgccaaattaccacactgcggctgtccaacaacccgctgacggcggcaggtgttgccgtgctaatggaggggctggcaggaaacacctcagtgacgcacctgtccctgctgcacacgggccttggggacgaaggcctggagctgctggctgcccagctggaccgcaaccggcagctgcaggagctgaacgtggcgtacaacggtgctggtgacacagcggccctggccctggccagagctgcccgggagcacccttccctggaactgctacacctctacttcaatgagctgagctcagagggccgccaggtcttgcgagacttggggggtgctgctgaaggtggtgcccgggtggtggtgtcactgacagaggggacggcggtgtcagaatactggtcagtgatcctcagtgaagtccagcggaacctcaatagctgggatcgggcccgggttcagcgacaccttgagctcctactgcgggatctggaagatagccggggtgccacccttaatccttggcgcaaggcccagctgctgcgagtggagggcgaggtcagggccctcctggagcagctgggaagctctggaagctgagacactggcggcaggcacctagctatgtgaccactggccctaaaccttttccctctgtggcctcctggcttgcactgctccctctagaaagattccttcaggtctggaggcagaggaatgggcatagctgagccagttgccctcctagggcatgtttgaccaggactgagtctggaatctccaagttaaagatggtgaatcaatgcttcgggcttggagatggaacatgcctcctctccattcagctagaaggaccaaagcatgtggcatttggatggccagagtgccctgaagcaccactaccaaccttgcctccccctcctctcaaagagcctctgactgtgtcaccaaggggctcacatcttatgtctgccatgccaggggtgtcgccatccagatgtgttggaagcttcccctcctgccttatgctcacctgtggacaccgaggatgccctcacattggtgctttctcctcatcctcatgccccctttgccacaatggtatgatggcttggtagcccctcgaggcagatgcacctgacttgctgctattaaaaagccgtgtgccttctacc

SEQ ID NO: 159615 - DNA, 4092 bp, Homo sapiens
  Payload ID: 11244
  Gene Symbol: NLRX1
  Gene Name: NLR family member X1
  Uniprot ID: Q86UT6
  ENST ID: ENST00000409109
  CDS Start-End: 588-3515
cgggacgggtggcgccggggttccagccctgcgcctgctccggagcaccgggcccctctcgctgaccccctcgtcccaggaccccgcaggcccgagtgcctgggctcgtcctctttcgcgcccgctgccaggtgccagggccgcgcaggcgggcggaggtgggcaggaagcgccacgccgaggagccggggactctgggagctagcgggagacgccggcgtccgcccagccgacccctctgggccgcggccgacggctcccggaactgggcagccgcgggtaaaggcctagcgggcttgataacccctgcgccctggctgggaggccgcgctgagcggggggcagggcgggccgggggaggaggctgtgcaagggccgcggggagatcccggccgagaacgagagggacggagctgggcgctgaatggcgggcgttctggcaagtctccccctgcgttcccgaggccacccgaaagtaggagagctgtttgggacccagtttggtggaggagctctggacctgtaggaacaccgcccctgacagaagtcggtcctaggccccccaggctctgaccttctttcccaggatgaggtggggccaccatttgcccagggcctcttggggctctggttttagaagagcactccagcgaccagatgatcgtatccccttcctgatccactggagttggccccttcaaggggagcgtccctttgggccccctagggcctttatacgccaccacggaagctcggtagatagcgctcccccacccgggaggcatggacggctgttccccagcgcctctgcaactgaagctatacagcggcaccgccggaacctggctgagtggttcagccggctgcccagggaggagcgccagtttggcccaacctttgccctagacacggtccacgttgaccctgtgatccgcgagagtacccctgatgagctacttcgcccacccgcggagctggccctggagcatcagccaccccaggccgggctccccccactggccttgtctcagctctttaacccggatgcctgtgggcgccgggtgcagacagtggtgctgtatgggacagtgggcacaggcaagagcacgctggtgcgcaagatggttctggactggtgttatgggcggctgccggccttcgagctgctcatccccttctcctgtgaggacctgtcatccctgggccctgccccagcctccctgtgccaacttgtggcccagcgctacacgcccctgaaggaggttctgcccctgatggctgctgctgggtcccacctcctctttgtgctccatggcttagagcatctcaacctcgacttccggctggcaggcacgggactttgtagtgacccggaggaaccgcaggaaccagctgctatcatcgtcaacctgctgcgcaaatacatgctgcctcaggccagcattctggtgaccactcggccctctgccattggccgtatccccagcaagtacgtgggccgctatggtgagatctgcggtttctctgataccaacctgcagaagctctacttccagctccgcctcaaccagccgtactgcgggtatgccgttggcggttcaggtgtctctgccacaccagctcagcgtgaccacctggtgcagatgctctcccggaacctggaggggcaccaccagatagccgctgcctgcttcctgccgtcctattgctggctcgtttgtgccaccttgcacttcctgcatgcccccacgcctgctgggcagacccttacaagcatctataccagcttcctgcgcctcaacttcagcggggaaaccctggacagcactgacccctccaatttgtccctgatggcctatgcagcccgaaccatgggcaagttggcctatgagggggtgtcctcccgcaagacctacttctctgaagaggatgtctgtggctgcctggaggctggcatcaggacggaggaggagtttcagctgctgcacatcttccgtcgggatgccctgaggtttttcctggccccatgtgtggagccagggcgtgcaggcaccttcgtgttcaccgtgcccgccatgcaggaatacctggctgccctctacattgtgctgggtttgcgcaagacgaccctgcaaaaggtgggcaaggaagtggctgagctcgtgggccgtgttggggaggacgtcagcctggtactgggcatcatggccaagctgctgcctctgcgggctctgcctctgctcttcaacctgatcaaggtggttccacgagtgtttgggcgcatggtgggtaaaagccgggaggcggtggctcaggccatggtgctggagatgtttcgagaggaggactactacaacgatgatgttctggaccagatgggcgccagtatcctgggcgtggagggcccccggcgccacccagatgagccccctgaggatgaagtcttcgagctcttccccatgttcatgggggggcttctctctgcccacaaccgagctgtgctagctcagcttggctgccccatcaagaacctggatgccctggagaatgcccaggccatcaagaagaagctgggcaagctgggccggcaggtgctgcccccatcagagctccttgaccacctcttcttccactatgagttccagaaccagcgcttctccgctgaggtgctcagctccctgcgtcagctcaacctggcaggtgtgcgcatgacaccagtcaagtgcacagtggtggcagctgtgctgggcagcggaaggcatgccctggatgaggtgaacttggcctcctgccagctagatcctgctgggctgcgcacactcctgcctgtcttcctgcgtgcccggaagctgggcttgcaactcaacagcctgggccctgaggcctgcaaggacctccgagacctgttgctgcatgaccagtgccaaattaccacactgcggctgtccaacaacccgctgacggcggcaggtgttgccgtgctaatggaggggctggcaggaaacacctcagtgacgcacctgtccctgctgcacacgggccttggggacgaaggcctggagctgctggctgcccagctggaccgcaaccggcagctgcaggagctgaacgtggcgtacaacggtgctggtgacacagcggccctggccctggccagagctgcccgggagcacccttccctggaactgctacacctctacttcaatgagctgagctcagagggccgccaggtcttgcgagacttggggggtgctgctgaaggtggtgcccgggtggtggtgtcactgacagaggggacggcggtgtcagaatactggtcagtgatcctcagtgaagtccagcggaacctcaatagctgggatcgggcccgggttcagcgacaccttgagctcctactgcgggatctggaagatagccggggtgccacccttaatccttggcgcaaggcccagctgctgcgagtggagggcgaggtcagggccctcctggagcagctgggaagctctggaagctgagacactggcggcaggcacctagctatgtgaccactggccctaaaccttttccctctgtggcctcctggcttgcactgctccctctagaaagattccttcaggtctggaggcagaggaatgggcatagctgagccagttgccctcctagggcatgtttgaccaggactgagtctggaatctccaagttaaagatggtgaatcaatgcttcgggcttggagatggaacatgcctcctctccattcagctagaaggaccaaagcatgtggcatttggatggccagagtgccctgaagcaccactaccaaccttgcctccccctcctctcaaagagcctctgactgtgtcaccaaggggctcacatcttatgtctgccatgccaggggtgtcgccatccagatgtgttggaagcttcccctcctgccttatgctcacctgtggacaccgaggatgccctcacattggtgctttctcctcatcctcatgccccctttgccacaatggtatgatggcttggtagcccctcgaggcagatgcacctgacttgctgctattaaaaagccgtgtgccttctaccaa

SEQ ID NO: 159616 - DNA, 762 bp, Homo sapiens
  Payload ID: 11244
  Gene Symbol: NLRX1
  Gene Name: NLR family member X1
  ENST ID: ENST00000454811
  CDS Start-End: 309-762
gtgagcccagggtgtggaagtgtgtggaagtgtagggataagggtgggggctttgggaactgggaagccccagggctaggccatgaatgggtgtcagacccgaagagcaggttggggtgcaagttgtccttcagcccccattcttccttctttcttaaccaaggttaccagcagccacacacataggtctgggctctgaagaggaccggatacataaggcagaacccaaggaagccttaggctcaggtctctgcctgaaggacagaagtcggtcctaggccccccaggctctgaccttctttcccaggatgaggtggggccaccatttgcccagggcctcttggggctctggttttagaagagcactccagcgaccagatgatcgtatccccttcctgatccactggagttggccccttcaaggggagcgtccctttgggccccctagggcctttatacgccaccacggaagctcggtagatagcgctcccccacccgggaggcatggacggctgttccccagcgcctctgcaactgaagctatacagcggcaccgccggaacctggctgagtggttcagccggctgcccagggaggagcgccagtttggcccaacctttgccctagacacggtccacgttgaccctgtgatccgcgagagtacccctgatgagctacttcgcccacccgcggagctggccctggagcatcagccaccccaggccgggctccccccactggccttgtctcagctctttaacc

SEQ ID NO: 159617 - DNA, 544 bp, Homo sapiens
  Payload ID: 11244
  Gene Symbol: NLRX1
  Gene Name: NLR family member X1
  ENST ID: ENST00000422249
  CDS Start-End: 164-544
agaacccaaggaagccttaggctcaggtctctgcctgaaggtaggctggggaggcggagagggacagagggaagaatcccctggacaccgcgcctcagggaggcccaggggtaaggacagaagtcggtcctaggccccccaggctctgaccttctttcccaggatgaggtggggccaccatttgcccagggcctcttggggctctggttttagaagagcactccagcgaccagatgatcgtatccccttcctgatccactggagttggccccttcaaggggagcgtccctttgggccccctagggcctttatacgccaccacggaagctcggtagatagcgctcccccacccgggaggcatggacggctgttccccagcgcctctgcaactgaagctatacagcggcaccgccggaacctggctgagtggttcagccggctgcccagggaggagcgccagtttggcccaacctttgccctagacacggtccacgttgaccctgtgatccgcgagagtacccctgatgagctacttcgcccaccc

SEQ ID NO: 159618 - DNA, 558 bp, Homo sapiens
  Payload ID: 11244
  Gene Symbol: NLRX1
  Gene Name: NLR family member X1
  ENST ID: ENST00000449394
  CDS Start-End: 146-558
ctttcttaaccaaggttaccagcagccacacacataggtctgggctctgaagaggaccggatacataaggcagaacccaaggaagccttaggctcaggacagaagtcggtcctaggccccccaggctctgaccttctttcccaggatgaggtggggccaccatttgcccagggcctcttggggctctggttttagaagagcactccagcgaccagatgatcgtatccccttcctgatccactggagttggccccttcaaggggagcgtccctttgggccccctagggcctttatacgccaccacggaagctcggtagatagcgctcccccacccgggaggcatggacggctgttccccagcgcctctgcaactgaagctatacagcggcaccgccggaacctggctgagtggttcagccggctgcccagggaggagcgccagtttggcccaacctttgccctagacacggtccacgttgaccctgtgatccgcgagagtacccctgatgagctacttcgcccacccgcggagctggccctggagcatcagccacccca

SEQ ID NO: 159619 - DNA, 2850 bp, Homo sapiens
  Payload ID: 11244
  Gene Symbol: NLRX1
  Gene Name: NLR family member X1
  Uniprot ID: Q86UT6
  ENST ID: ENST00000525863
  CDS Start-End: 49-2814
gacagaagtcggtcctaggccccccaggctctgaccttctttcccaggatgaggtggggccaccatttgcccagggcctcttggggctctggttttagaagagcactccagcgaccagatgatcgtatccccttcctgatccactggagttggccccttcaaggggagcgtccctttgggccccctagggcctttatacgccaccacggaagctcggtagatagcgctcccccacccgggaggcatggacggctgttccccagcgcctctgcaactgaagctatacagcggcaccgccggaacctggctgagtggttcagccggctgcccagggaggagcgccagtttggcccaacctttgccctagacacggtccacgttgaccctgtgatccgcgagagtacccctgatgagctacttcgcccacccgcggagctggccctggagcatcagccaccccaggccgggctccccccactggccttgtctcagctctttaacccggatgcctgtgggcgccgggtgcagacagtggtgctgtatgggacagtgggcacaggcaagagcacgctggtgcgcaagatggttctggactggtgttatgggcggctgccggccttcgagctgctcatccccttctcctgtgaggacctgtcatccctgggccctgccccagcctccctgtgccaacttgtggcccagcgctacacgcccctgaaggaggttctgcccctgatggctgctgctgggtcccacctcctctttgtgctccatggcttagagcatctcaacctcgacttccggctggcaggcacgggactttgtagtgacccggaggaaccgcaggaaccagctgctatcatcgtcaacctgctgcgcaaatacatgctgcctcaggccagcattctggtgaccactcggccctctgccattggccgtatccccagcaagtacgtgggccgctatggtgagatctgcggtttctctgataccaacctgcagaagctctacttccagctccgcctcaaccagccgtactgcgggtatgccgttggcggttcaggtgtctctgccacaccagctcagcgtgaccacctggtgcagatgctctcccggaacctggaggggcaccaccagatagccgctgcctgcttcctgccgtcctattgctggctcgtttgtgccaccttgcacttcctgcatgcccccacgcctgctgggcagacccttacaagcatctataccagcttcctgcgcctcaacttcagcggggaaaccctggacagcactgacccctccaatttgtccctgatggcctatgcagcccgaaccatgggcaagttggcctatgagggggtgtcctcccgcaagacctacttctctgaagaggatgtctgtggctgcctggaggctggcatcaggacggaggaggagtttcagctgctgcacatcttccgtcgggatgccctgaggtttttcctggccccatgtgtggagccagggcgtgcaggcaccttcgtgttcaccgtgcccgccatgcaggaatacctggctgccctctacattgtgctgggtttgcgcaagacgaccctgcaaaaggtgggcaaggaagtggctgagctcgtgggccgtgttggggaggacgtcagcctggtactgggcatcatggccaagctgctgcctctgcgggctctgcctctgctcttcaacctgatcaaggtggttccacgagtgtttgggcgcatggtgggtaaaagccgggaggcggtggctcaggccatggtgctggagatgtttcgagaggaggactactacaacgatgatgttctggaccagatgggcgccagtatcctgggcgtggagggcccccggcgccacccagatgagccccctgaggatgaagtcttcgagctcttccccatgttcatgggggggcttctctctgcccacaaccgagctgtgctagctcagcttggctgccccatcaagaacctggatgccctggagaatgcccaggccatcaagaagaagctgggcaagctgggccggcaggtgctgcccccatcagagctccttgaccacctcttcttccactatgagttccagaaccagcgcttctccgctgaggtgctcagctccctgcgtcagctcaacctggcaggtgtgcgcatgacaccagtcaagtgcacagtggtggcagctgtgctgggcagcggaaggcatgccctggatgaggtgaacttggcctcctgccagctagatcctgctgggctgcgcacactcctgcctgtcttcctgcgtgcccggaagctgggcttgcaactcaacagcctgggccctgaggcctgcaaggacctccgagacctgttgctgcatgaccagtgccaaattaccacactgcggctgtccaacaacccgctgacggcggcaggtgttgccgtgctaatggaggggctggcaggaaacacctcagtgacgcacctgtccctgctgcacacgggccttggggacgaaggcctggagctgctggctgcccagctggaccgcaaccggcagctgcaggagctgaacgtggcgtacaacggtgctggtgacacagcggccctggccctggccagagctgcccgggagcacccttccctggaactgctacagggtgtcgccatccagatgtgttggaagcttcccctcctgccttatgctcacctgtggacaccgaggatgccctcacattggtgctttctcctcatcctcatgccccctttgccacaatggtatgatggcttggtagcccctcgaggcagatgcacctgacttgctgctattaaaaagccgtgtgccttctaccaa

SEQ ID NO: 159620 - DNA, 5347 bp, Homo sapiens
  Payload ID: 11245
  Gene Symbol: NAIP
  Gene Name: NLR family, apoptosis inhibitory protein
  Uniprot ID: Q13075
  ENST ID: ENST00000503719
  CDS Start-End: 1-3726
atgccacttcatattggggacttcgtctgggattccaaggtgcattcattgcaaagttccttaaatattttctcactgcttcctactaaaggacggacagagcatttgttcttcagccacatactttccttccactggccagcattctcctctattagactagaactgtggataaacctcagatgtgaatttcttcggagtaagaaatcctcagaggaaattacccagtatattcaaagctacaagggatttgttgacataacgggagaacattttgtgaattcctgggtccagagagaattacctatggcatcagcttattgcaatgacagcatctttgcttacgaagaactacggctggactcttttaaggactggccccgggaatcagctgtgggagttgcagcactggccaaagcaggtcttttctacacaggtataaaggacatcgtccagtgcttttcctgtggagggtgtttagagaaatggcaggaaggtgatgacccattagacgatcacaccagatgttttcccaattgtccatttctccaaaatatgaagtcctctgcggaagtgactccagaccttcagagccgtggtgaactttgtgaattactggaaaccacaagtgaaagcaatcttgaagattcaatagcagttggtcctatagtgccagaaatggcacagggtgaagcccagtggtttcaagaggcaaagaatctgaatgagcagctgagagcagcttataccagcgccagtttccgccacatgtctttgcttgatatctcttccgatctggccacggaccacttgctgggctgtgatctgtctattgcttcaaaacacatcagcaaacctgtgcaagaacctctggtgctgcctgaggtctttggcaacttgaactctgtcatgtgtgtggagggtgaagctggaagtggaaagacggtcctcctgaagaaaatagcttttctgtgggcatctggatgctgtcccctgttaaacaggttccagctggttttctacctctcccttagttccaccagaccagacgaggggctggccagtatcatctgtgaccagctcctagagaaagaaggatctgttactgaaatgtgcgtgaggaacattatccagcagttaaagaatcaggtcttattccttttagatgactacaaagaaatatgttcaatccctcaagtcataggaaaactgattcaaaaaaaccacttatcccggacctgcctattgattgctgtccgtacaaacagggccagggacatccgccgatacctagagaccattctagagatcaaagcatttcccttttataatactgtctgtatattacggaagctcttttcacataatatgactcgtctgcgaaagtttatggtttactttggaaagaaccaaagtttgcagaagatacagaaaactcctctctttgtggcggcgatctgtgctcattggtttcagtatccttttgacccatcctttgatgatgtggctgttttcaagtcctatatggaacgcctttccttaaggaacaaagcgacagctgaaattctcaaagcaactgtgtcctcctgtggtgagctggccttgaaagggtttttttcatgttgctttgagtttaatgatgatgatctcgcagaagcaggggttgatgaagatgaagatctaaccatgtgcttgatgagcaaatttacagcccagagactaagaccattctaccggtttttaagtcctgccttccaagaatttcttgcggggatgaggctgattgaactcctggattcagataggcaggaacatcaagatttgggactgtatcatttgaaacaaatcaactcacccatgatgactgtaagcgcctacaacaattttttgaactatgtctccagcctcccttcaacaaaagcagggcccaaaattgtgtctcatttgctccatttagtggataacaaagagtcattggagaatatatctgaaaatgatgactacttaaagcaccagccagaaatttcactgcagatgcagttacttaggggattgtggcaaatttgtccacaagcttacttttcaatggtttcagaacatttactggttcttgccctgaaaactgcttatcaaagcaacactgttgctgcgtgttctccatttgttttgcaattccttcaagggagaacactgactttgggtgcgcttaacttacagtactttttcgaccacccagaaagcttgtcattgttgaggagcatccacttcccaatacgaggaaataagacatcacccagagcacatttttcagttctggaaacatgttttgacaaatcacaggtgccaactatagatcaggactatgcttctgcctttgaacctatgaatgaatgggagcgaaatttagctgaaaaagaggataatgtaaagagctatatggatatgcagcgcagggcatcaccagaccttagtactggctattggaaactttctccaaagcagtacaagattccctgtctagaagtcgatgtgaatgatattgatgttgtaggccaggatatgcttgagattctaatgacagttttctcagcttcacagcgcatcgaactccatttaaaccacagcagaggctttatagaaagcatccgcccagctcttgagctgtctaaggcctctgtcaccaagtgctccataagcaagttggaactcagcgcagccgaacaggaactgcttctcaccctgccttccctggaatctcttgaagtctcagggacaatccagtcacaagaccaaatctttcctaatctggataagttcctgtgcctgaaagaactgtctgtggatctggagggcaatataaatgttttttcagtcattcctgaagaatttccaaacttccaccatatggagaaattattgatccaaatttcagctgagtatgatccttccaaactagtaaaattaattcaaaattctccaaaccttcatgttttccatctgaagtgtaacttcttttcggattttgggtctctcatgactatgcttgtttcctgtaagaaactcacagaaattaagttttcggattcattttttcaagccgtcccatttgttgccagtttgccaaattttatttctctgaagatattaaatcttgaaggccagcaatttcctgatgaggaaacatcagaaaaatttgcctacattttaggttctcttagtaacctggaagaattgatccttcctactggggatggaatttatcgagtggccaaactgatcatccagcagtgtcagcagcttcattgtctccgagtcctctcatttttcaagactttgaatgatgacagcgtggtggaaattgccaaagtagcaatcagtggaggtttccagaaacttgagaacctaaagctttcaatcaatcacaagattacagaggaaggatacagaaatttctttcaagcactggacaacatgccaaacttgcaggagttggacatctccaggcatttcacagagtgtatcaaagctcaggccacaacagtcaagtctttgagtcaatgtgtgttacgactaccaaggctcattagactgaacatgttaagttggctcttggatgcagatgatattgcattgcttaatgtcatgaaagaaagacatcctcaatctaagtacttaactattctccagaaatggatactgccgttctctccaatcattcagaaataaaagattcagctaaaaactgctgaatcaataatttgtcttggggcatattgaggatgtaaaaaaagttgttgattaatgctaaaaaccaaattatccaaaattattttattaaatattgcatacaaaagaaaatgtgtaaggcttgctaaaaaacaaaacaaaacaaaacacagtcctgcatactcaccaccaagctcaagaaataaatcatcaccaatacctttgaggtccctgagtaatccaccccagctaaaggcaaacccttcaatcaagtttatacagcaaaccctccattgtccatggtcaacagggaaggggttggggacaggtctgccaatctatctaaaagccacaatatggaagaagtattcaatttatataataaatggctaacttaacggttgaatcactttcatacatggatgaaacgggtttaacacaggatccacatgaatcttctgtgggccaagagatgttccttaatccttgtagaacctgttttctatattgaactagctttggtacagtagagttaacttactttccatttatccactgccaatataaagaggaaacaggggttagggaaaaatgacttcattccagaggcttctcagagttcaacatatgctataatttagaattttcttatgaatccactctacttgggtagaaaatattttatctctagtgattgcatattatttccatatcatagtatttcatagtattatatttgatatgagtgtctatatcaatgtcagtgtccagaatttcgttcctaccagttaagtagttttctgaacggccagaagaccattcgaaattcatgatactactataagttggtaaacaaccatacttttatcctcatttttattctcactaagaaaaaagtcaactcccctccccttgcccaagtatgaaatatagggacagtatgtatggtgtggtctcatttgtttagaaaaccacttatgactgggtgcggtggctcacacctgtaatcccagcactttgggaggctgaggcgggcgaatcatttgaggtgaggaattcgagaccagcctggccagcatggtgaaaccccatctctactaaaaatacaaaaattagccaggtgtggtggcacatgcctgtagtcccagccactagggcggctgagacgcaagacttgcttgaacccgggaggcagaggttgcagtgagccaagatggcgccactgcattccagcctgggcaacagagcaagaccctgtctgtctcaaaacaaaaaacaaaaccacttatattgctagctacattaagaatttctgaatatgttactgagcttgcttgtggtaaccatttataatatcagaaagtatatgtacaccaaaacatgttgaacatccatgttgtacaactgaaatataaataattttgtcaattatacctaaataaaactggaaaaaaatttctggaagtttatatctaaaaatgttaatagtgcgtacctctaggaagtgggcctggaagccattcttacttttcagtctctcccattctgtactgttttttgttttactttcgtgcctgcattatttttctatttaaaacaaaaataaatctagtttagcact

SEQ ID NO: 159621 - DNA, 579 bp, Homo sapiens
  Payload ID: 11245
  Gene Symbol: NAIP
  Gene Name: NLR family, apoptosis inhibitory protein
  ENST ID: ENST00000514857
  CDS Start-End: 1-579
ttatttctctgaagatattaaatcttgaaggccagcaatttcctgatgaggaaacatcagaaaaatttgcctacattttaggttctcttagtaacctggaagaattgatccttcctactggggatggaatttatcgagtggccaaactgatcatccagcagtgtcagcagcttcattgtctccgagtcctctcatttttcaagactttgaatgatgacagcgtggtggaaattgacggagtcttgctctgtcacccaggctggagtgcagtggtgggattttggctcactgcaacctctacctcccaggttcaagctgattctcctgcctcagcctcccgagtagctgggattacagccaaagtagcaatcagtggaggtttccagaaacttgagaacctaaagctttcaatcaatcacaagattacagaggaaggatacagaaatttctttcaagcactggacaacatgccaaacttgcaggagttggacatctccaggcatttcacagagtgtatcaaagctcaggccacaacagtcaagtctttgagtcaatgtgtgttacgactaccaaggctca

SEQ ID NO: 159622 - DNA, 4543 bp, Homo sapiens
  Payload ID: 11245
  Gene Symbol: NAIP
  Gene Name: NLR family, apoptosis inhibitory protein
  Uniprot ID: Q13075
  ENST ID: ENST00000523981
  CDS Start-End: 534-4259
tggcacagatctccagaaacccttgtaatttcctgagtgacaggggtgatagaaacatcttttattagaatacttggtcttggttcctgacacaagagcttctaagacctttggaatctccaagtgataagagtgtatgacagtgagctaactggtggctgggatcctttagacaacttcaggatgggggctatcccctgaaagactaaggcatgattagaggtctgggatttgcagccccacgcctcgacctccagagagggtaaaagggctggagattgattaaccaccagttgccagtgatttaaccaatcatgcctaagtgatggcacctccattaaaaaataaaccacaggtttggagagctttcggtttggttaaccccaaccacataccaagaaggcgatgcacctcaaactgcatgaagacaaaaggtcctgtgctcacctgggacccttctggacgttgccctgtgtacctcttcgactgcctgttcatctacgacgaaccccgggtattgaccccagacaacaatgccacttcatattggggacttcgtctgggattccaaggtgcattcattgcaaagttccttaaatattttctcactgcttcctactaaaggacggacagagcatttgttcttcagccacatactttccttccactggccagcattctcctctattagactagaactgtggataaacctcagatgtgaatttcttcggagtaagaaatcctcagaggaaattacccagtatattcaaagctacaagggatttgttgacataacgggagaacattttgtgaattcctgggtccagagagaattacctatggcatcagcttattgcaatgacagcatctttgcttacgaagaactacggctggactcttttaaggactggccccgggaatcagctgtgggagttgcagcactggccaaagcaggtcttttctacacaggtataaaggacatcgtccagtgcttttcctgtggagggtgtttagagaaatggcaggaaggtgatgacccattagacgatcacaccagatgttttcccaattgtccatttctccaaaatatgaagtcctctgcggaagtgactccagaccttcagagccgtggtgaactttgtgaattactggaaaccacaagtgaaagcaatcttgaagattcaatagcagttggtcctatagtgccagaaatggcacagggtgaagcccagtggtttcaagaggcaaagaatctgaatgagcagctgagagcagcttataccagcgccagtttccgccacatgtctttgcttgatatctcttccgatctggccacggaccacttgctgggctgtgatctgtctattgcttcaaaacacatcagcaaacctgtgcaagaacctctggtgctgcctgaggtctttggcaacttgaactctgtcatgtgtgtggagggtgaagctggaagtggaaagacggtcctcctgaagaaaatagcttttctgtgggcatctggatgctgtcccctgttaaacaggttccagctggttttctacctctcccttagttccaccagaccagacgaggggctggccagtatcatctgtgaccagctcctagagaaagaaggatctgttactgaaatgtgcgtgaggaacattatccagcagttaaagaatcaggtcttattccttttagatgactacaaagaaatatgttcaatccctcaagtcataggaaaactgattcaaaaaaaccacttatcccggacctgcctattgattgctgtccgtacaaacagggccagggacatccgccgatacctagagaccattctagagatcaaagcatttcccttttataatactgtctgtatattacggaagctcttttcacataatatgactcgtctgcgaaagtttatggtttactttggaaagaaccaaagtttgcagaagatacagaaaactcctctctttgtggcggcgatctgtgctcattggtttcagtatccttttgacccatcctttgatgatgtggctgttttcaagtcctatatggaacgcctttccttaaggaacaaagcgacagctgaaattctcaaagcaactgtgtcctcctgtggtgagctggccttgaaagggtttttttcatgttgctttgagtttaatgatgatgatctcgcagaagcaggggttgatgaagatgaagatctaaccatgtgcttgatgagcaaatttacagcccagagactaagaccattctaccggtttttaagtcctgccttccaagaatttcttgcggggatgaggctgattgaactcctggattcagataggcaggaacatcaagatttgggactgtatcatttgaaacaaatcaactcacccatgatgactgtaagcgcctacaacaattttttgaactatgtctccagcctcccttcaacaaaagcagggcccaaaattgtgtctcatttgctccatttagtggataacaaagagtcattggagaatatatctgaaaatgatgactacttaaagcaccagccagaaatttcactgcagatgcagttacttaggggattgtggcaaatttgtccacaagcttacttttcaatggtttcagaacatttactggttcttgccctgaaaactgcttatcaaagcaacactgttgctgcgtgttctccatttgttttgcaattccttcaagggagaacactgactttgggtgcgcttaacttacagtactttttcgaccacccagaaagcttgtcattgttgaggagcatccacttcccaatacgaggaaataagacatcacccagagcacatttttcagttctggaaacatgttttgacaaatcacaggtgccaactatagatcaggactatgcttctgcctttgaacctatgaatgaatgggagcgaaatttagctgaaaaagaggataatgtaaagagctatatggatatgcagcgcagggcatcaccagaccttagtactggctattggaaactttctccaaagcagtacaagattccctgtctagaagtcgatgtgaatgatattgatgttgtaggccaggatatgcttgagattctaatgacagttttctcagcttcacagcgcatcgaactccatttaaaccacagcagaggctttatagaaagcatccgcccagctcttgagctgtctaaggcctctgtcaccaagtgctccataagcaagttggaactcagcgcagccgaacaggaactgcttctcaccctgccttccctggaatctcttgaagtctcagggacaatccagtcacaagaccaaatctttcctaatctggataagttcctgtgcctgaaagaactgtctgtggatctggagggcaatataaatgttttttcagtcattcctgaagaatttccaaacttccaccatatggagaaattattgatccaaatttcagctgagtatgatccttccaaactagtaaaattaattcaaaattctccaaaccttcatgttttccatctgaagtgtaacttcttttcggattttgggtctctcatgactatgcttgtttcctgtaagaaactcacagaaattaagttttcggattcattttttcaagccgtcccatttgttgccagtttgccaaattttatttctctgaagatattaaatcttgaaggccagcaatttcctgatgaggaaacatcagaaaaatttgcctacattttaggttctcttagtaacctggaagaattgatccttcctactggggatggaatttatcgagtggccaaactgatcatccagcagtgtcagcagcttcattgtctccgagtcctctcatttttcaagactttgaatgatgacagcgtggtggaaattgccaaagtagcaatcagtggaggtttccagaaacttgagaacctaaagctttcaatcaatcacaagattacagaggaaggatacagaaatttctttcaagcactggacaacatgccaaacttgcaggagttggacatctccaggcatttcacagagtgtatcaaagctcaggccacaacagtcaagtctttgagtcaatgtgtgttacgactaccaaggctcattagactgaacatgttaagttggctcttggatgcagatgatattgcattgcttaatgtcatgaaagaaagacatcctcaatctaagtacttaactattctccagaaatggatactgccgttctctccaatcattcagaaataaaagattcagctaaaaactgctgaatcaataatttgtcttggggcatattgaggatgtaaaaaaagttgttgattaatgctaaaaaccaaattatccaaaattattttattaaatattgcatacaaaagaaaatgtgtaaggcttgctaaaaaacaaaacaaaacaaaacacagtcctgcatactcaccaccaagctcaagaaataaatcatcaccaatacctttgaggtccctgagtaatccaccccagctaaaggcaaacccttcaatcaagtttatacagca

SEQ ID NO: 159623 - DNA, 6124 bp, Homo sapiens
  Payload ID: 11245
  Gene Symbol: NAIP
  Gene Name: NLR family, apoptosis inhibitory protein
  Uniprot ID: Q13075
  ENST ID: ENST00000517649
  CDS Start-End: 292-4503
acaaaaggtcctgtgctcacctgggacccttctggacgttgccctgtgtacctcttcgactgcctgttcatctacgacgaaccccgggtattgaccccagacaacaatgccacttcatattggggacttcgtctgggattccaaggtgcattcattgcaaagttccttaaatattttctcactgcttcctactaaaggacggacagagcatttgttcttcagccacatactttccttccactggccagcattctcctctattagactagaactgtggataaacctcagaaaatggccacccagcagaaagcctctgacgagaggatctcccagtttgatcacaatttgctgccagagctgtctgctcttctgggcctagatgcagttcagttggcaaaggaactagaagaagaggagcagaaggagcgagcaaaaatgcagaaaggctacaactctcaaatgcgcagtgaagcaaaaaggttaaagacttttgtgacttatgagccgtacagctcatggataccacaggagatggcggccgctgggttttacttcactggggtaaaatctgggattcagtgcttctgctgtagcctaatcctctttggtgccggcctcacgagactccccatagaagaccacaagaggtttcatccagattgtgggttccttttgaacaaggatgttggtaacattgccaagtacgacataagggtgaagaatctgaagagcaggctgagaggaggtaaaatgaggtaccaagaagaggaggctagacttgcgtccttcaggaactggccattttatgtccaagggatatccccttgtgtgctctcagaggctggctttgtctttacaggtaaacaggacacggtacagtgtttttcctgtggtggatgtttaggaaattgggaagaaggagatgatccttggaaggaacatgccaaatggttccccaaatgtgaatttcttcggagtaagaaatcctcagaggaaattacccagtatattcaaagctacaagggatttgttgacataacgggagaacattttgtgaattcctgggtccagagagaattacctatggcatcagcttattgcaatgacagcatctttgcttacgaagaactacggctggactcttttaaggactggccccgggaatcagctgtgggagttgcagcactggccaaagcaggtcttttctacacaggtataaaggacatcgtccagtgcttttcctgtggagggtgtttagagaaatggcaggaaggtgatgacccattagacgatcacaccagatgttttcccaattgtccatttctccaaaatatgaagtcctctgcggaagtgactccagaccttcagagccgtggtgaactttgtgaattactggaaaccacaagtgaaagcaatcttgaagattcaatagcagttggtcctatagtgccagaaatggcacagggtgaagcccagtggtttcaagaggcaaagaatctgaatgagcagctgagagcagcttataccagcgccagtttccgccacatgtctttgcttgatatctcttccgatctggccacggaccacttgctgggctgtgatctgtctattgcttcaaaacacatcagcaaacctgtgcaagaacctctggtgctgcctgaggtctttggcaacttgaactctgtcatgtgtgtggagggtgaagctggaagtggaaagacggtcctcctgaagaaaatagcttttctgtgggcatctggatgctgtcccctgttaaacaggttccagctggttttctacctctcccttagttccaccagaccagacgaggggctggccagtatcatctgtgaccagctcctagagaaagaaggatctgttactgaaatgtgcgtgaggaacattatccagcagttaaagaatcaggtcttattccttttagatgactacaaagaaatatgttcaatccctcaagtcataggaaaactgattcaaaaaaaccacttatcccggacctgcctattgattgctgtccgtacaaacagggccagggacatccgccgatacctagagaccattctagagatcaaagcatttcccttttataatactgtctgtatattacggaagctcttttcacataatatgactcgtctgcgaaagtttatggtttactttggaaagaaccaaagtttgcagaagatacagaaaactcctctctttgtggcggcgatctgtgctcattggtttcagtatccttttgacccatcctttgatgatgtggctgttttcaagtcctatatggaacgcctttccttaaggaacaaagcgacagctgaaattctcaaagcaactgtgtcctcctgtggtgagctggccttgaaagggtttttttcatgttgctttgagtttaatgatgatgatctcgcagaagcaggggttgatgaagatgaagatctaaccatgtgcttgatgagcaaatttacagcccagagactaagaccattctaccggtttttaagtcctgccttccaagaatttcttgcggggatgaggctgattgaactcctggattcagataggcaggaacatcaagatttgggactgtatcatttgaaacaaatcaactcacccatgatgactgtaagcgcctacaacaattttttgaactatgtctccagcctcccttcaacaaaagcagggcccaaaattgtgtctcatttgctccatttagtggataacaaagagtcattggagaatatatctgaaaatgatgactacttaaagcaccagccagaaatttcactgcagatgcagttacttaggggattgtggcaaatttgtccacaagcttacttttcaatggtttcagaacatttactggttcttgccctgaaaactgcttatcaaagcaacactgttgctgcgtgttctccatttgttttgcaattccttcaagggagaacactgactttgggtgcgcttaacttacagtactttttcgaccacccagaaagcttgtcattgttgaggagcatccacttcccaatacgaggaaataagacatcacccagagcacatttttcagttctggaaacatgttttgacaaatcacaggtgccaactatagatcaggactatgcttctgcctttgaacctatgaatgaatgggagcgaaatttagctgaaaaagaggataatgtaaagagctatatggatatgcagcgcagggcatcaccagaccttagtactggctattggaaactttctccaaagcagtacaagattccctgtctagaagtcgatgtgaatgatattgatgttgtaggccaggatatgcttgagattctaatgacagttttctcagcttcacagcgcatcgaactccatttaaaccacagcagaggctttatagaaagcatccgcccagctcttgagctgtctaaggcctctgtcaccaagtgctccataagcaagttggaactcagcgcagccgaacaggaactgcttctcaccctgccttccctggaatctcttgaagtctcagggacaatccagtcacaagaccaaatctttcctaatctggataagttcctgtgcctgaaagaactgtctgtggatctggagggcaatataaatgttttttcagtcattcctgaagaatttccaaacttccaccatatggagaaattattgatccaaatttcagctgagtatgatccttccaaactagtaaaattaattcaaaattctccaaaccttcatgttttccatctgaagtgtaacttcttttcggattttgggtctctcatgactatgcttgtttcctgtaagaaactcacagaaattaagttttcggattcattttttcaagccgtcccatttgttgccagtttgccaaattttatttctctgaagatattaaatcttgaaggccagcaatttcctgatgaggaaacatcagaaaaatttgcctacattttaggttctcttagtaacctggaagaattgatccttcctactggggatggaatttatcgagtggccaaactgatcatccagcagtgtcagcagcttcattgtctccgagtcctctcatttttcaagactttgaatgatgacagcgtggtggaaattgccaaagtagcaatcagtggaggtttccagaaacttgagaacctaaagctttcaatcaatcacaagattacagaggaaggatacagaaatttctttcaagcactggacaacatgccaaacttgcaggagttggacatctccaggcatttcacagagtgtatcaaagctcaggccacaacagtcaagtctttgagtcaatgtgtgttacgactaccaaggctcattagactgaacatgttaagttggctcttggatgcagatgatattgcattgcttaatgtcatgaaagaaagacatcctcaatctaagtacttaactattctccagaaatggatactgccgttctctccaatcattcagaaataaaagattcagctaaaaactgctgaatcaataatttgtcttggggcatattgaggatgtaaaaaaagttgttgattaatgctaaaaaccaaattatccaaaattattttattaaatattgcatacaaaagaaaatgtgtaaggcttgctaaaaaacaaaacaaaacaaaacacagtcctgcatactcaccaccaagctcaagaaataaatcatcaccaatacctttgaggtccctgagtaatccaccccagctaaaggcaaacccttcaatcaagtttatacagcaaaccctccattgtccatggtcaacagggaaggggttggggacaggtctgccaatctatctaaaagccacaatatggaagaagtattcaatttatataataaatggctaacttaacggttgaatcactttcatacatggatgaaacgggtttaacacaggatccacatgaatcttctgtgggccaagagatgttccttaatccttgtagaacctgttttctatattgaactagctttggtacagtagagttaacttactttccatttatccactgccaatataaagaggaaacaggggttagggaaaaatgacttcattccagaggcttctcagagttcaacatatgctataatttagaattttcttatgaatccactctacttgggtagaaaatattttatctctagtgattgcatattatttccatatcatagtatttcatagtattatatttgatatgagtgtctatatcaatgtcagtgtccagaatttcgttcctaccagttaagtagttttctgaacggccagaagaccattcgaaattcatgatactactataagttggtaaacaaccatacttttatcctcatttttattctcactaagaaaaaagtcaactcccctccccttgcccaagtatgaaatatagggacagtatgtatggtgtggtctcatttgtttagaaaaccacttatgactgggtgcggtggctcacacctgtaatcccagcactttgggaggctgaggcgggcgaatcatttgaggtgaggaattcgagaccagcctggccagcatggtgaaaccccatctctactaaaaatacaaaaattagccaggtgtggtggcacatgcctgtagtcccagccactagggcggctgagacgcaagacttgcttgaacccgggaggcagaggttgcagtgagccaagatggcgccactgcattccagcctgggcaacagagcaagaccctgtctgtctcaaaacaaaaaacaaaaccacttatattgctagctacattaagaatttctgaatatgttactgagcttgcttgtggtaaccatttataatatcagaaagtatatgtacaccaaaacatgttgaacatccatgttgtacaactgaaatataaataattttgtcaattatacctaaataaaactggaaaaaaatttctggaagtttatatctaaaaatgttaatagtgcgtacctctaggaagtgggcctggaagccattcttacttttcagtctctcccattctgtactgttttttgttttactttcgtgcctgcattatttttctatttaaaacaaaaataaatctagtttagcact

SEQ ID NO: 159624 - DNA, 1078 bp, Homo sapiens
  Payload ID: 11245
  Gene Symbol: NAIP
  Gene Name: NLR family, apoptosis inhibitory protein
  ENST ID: ENST00000519014
  CDS Start-End: 76-672
cttcagccacatactttccttccactggccagcattctcctctattagactagaactgtggataaacctcagaaaatggccacccagcagaaagcctctgacgagaggatctcccagtttgatcacaatttgctgccagagctgtctgctcttctgggcctagatgcagttcagttggcaaaggaactagaagaagaggagcagaaggagcgagcaaaaatgcagaaaggctacaactctcaaatgcgcagtgaagcaaaaaggttaaagacttttgtgacttatgagccgtacagctcatggataccacaggagatggcggccgctgggttttacttcactggggtaaaatctgggattcagtgcttctgctgtagcctaatcctctttggtgccggcctcacgagactccccatagaagaccacaagaggtttcatccagattgtgggttccttttgaacaaggatgttggtaacattgccaagtacgacataagggtgaagaatctgaagagcaggctgagaggaggtaaaatgaggtaccaagaagaggaggctagacttgcgtccttcaggaactggccattttatgtccaagggatatccccttgtgtgctctcagaggctggctttgtctttacagctgagttcatggaggctcagagactttaagaaacatgcctatgtttctaccgaaatgtcatggcaaggctaaaacgtaaacaggacacggtacagtgtttttcctgtggtggatgtttaggaaattgggaagaaggagatgatccttggaaggaacatgccaaatggttccccaaatgtgaatttcttcggagtaagaaatcctcagaggaaattacccagtatattcaaagctacaagggatttgttgacataacggtaatgtataacagcaatttttttctcaagtttttggattacctgtaagtgtctgactcagaagggcataggcattctttttatgtcatgggtttgatttctttcttcctttctcctttcattcccctggctcccatcttcaaagtgaaaaatatcacattcacttgctgacctagag

SEQ ID NO: 159625 - DNA, 4153 bp, Homo sapiens
  Payload ID: 11245
  Gene Symbol: NAIP
  Gene Name: NLR family, apoptosis inhibitory protein
  ENST ID: ENST00000508426
  CDS Start-End: 56-4099
tccactggccagcattctcctctattagactagaactgtggataaacctcagaaaatggccacccagcagaaagcctctgacgagaggatctcccagtttgatcacaatttgctgccagagctgtctgctcttctgggcctagatgcagttcagttggcaaaggaactagaagaagaggagcagaaggagcgagcaaaaatgcagaaaggctacaactctcaaatgcgcagtgaagcaaaaaggttaaagacttttgtgacttatgagccgtacagctcatggataccacaggagatggcggccgctgggttttacttcactggggtaaaatctgggattcagtgcttctgctgtagcctaatcctctttggtgccggcctcacgagactccccatagaagaccacaagaggtttcatccagattgtgggttccttttgaacaaggatgttggtaacattgccaagtacgacataagggtgaagaatctgaagagcaggctgagaggaggtaaaatgaggtaccaagaagaggaggctagacttgcgtccttcaggaactggccattttatgtccaagggatatccccttgtgtgctctcagaggctggctttgtctttacaggtaaacaggacacggtacagtgtttttcctgtggtggatgtttaggaaattgggaagaaggagatgatccttggaaggaacatgccaaatggttccccaaatgtgaatttcttcggagtaagaaatcctcagaggaaattacccagtatattcaaagctacaagggatttgttgacataacgggagaacattttgtgaattcctgggtccagagagaattacctatggcatcagcttattgcaatgacagcatctttgcttacgaagaactacggctggactcttttaaggactggccccgggaatcagctgtgggagttgcagcactggccaaagcaggtcttttctacacaggtataaaggacatcgtccagtgcttttcctgtggagggtgtttagagaaatggcaggaaggtgatgacccattagacgatcacaccagatgttttcccaattgtccatttctccaaaatatgaagtcctctgcggaagtgactccagaccttcagagccgtggtgaactttgtgaattactggaaaccacaagtgaaagcaatcttgaagattcaatagcagttggtcctatagtgccagaaatggcacagggtgaagcccagtggtttcaagaggcaaagaatctgaatgagcagctgagagcagcttataccagcgccagtttccgccacatgtctttgcttgatatctcttccgatctggccacggaccacttgctgggctgtgatctgtctattgcttcaaaacacatcagcaaacctgtgcaagaacctctggtgctgcctgaggtctttggcaacttgaactctgtcatgtgtgtggagggtgaagctggaagtggaaagacggtcctcctgaagaaaatagcttttctgtgggcatctggatgctgtcccctgttaaacaggttccagctggttttctacctctcccttagttccaccagaccagacgaggggctggccagtatcatctgtgaccagctcctagagaaagaaggatctgttactgaaatgtgcgtgaggaacattatccagcagttaaagaatcaggtcttattccttttagatgactacaaagaaatatgttcaatccctcaagtcataggaaaactgattcaaaaaaaccacttatcccggacctgcctattgattgctgtccgtacaaacagggccagggacatccgccgatacctagagaccattctagagatcaaagcatttcccttttataatactgtctgtatattacggaagctcttttcacataatatgactcgtctgcgaaagtttatggtttactttggaaagaaccaaagtttgcagaagatacagaaaactcctctctttgtggcggcgatctgtgctcattggtttcagtatccttttgacccatcctttgatgatgtggctgttttcaagtcctatatggaacgcctttccttaaggaacaaagcgacagctgaaattctcaaagcaactgtgtcctcctgtggtgagctggccttgaaagggtttttttcatgttgctttgagtttaatgatgatgatctcgcagaagcaggggttgatgaagatgaagatctaaccatgtgcttgatgagcaaatttacagcccagagactaagaccattctaccggtttttaagtcctgccttccaagaatttcttgcggggatgaggctgattgaactcctggattcagataggcaggaacatcaagatttgggactgtatcatttgaaacaaatcaactcacccatgatgactgtaagcgcctacaacaattttttgaactatgtctccagcctcccttcaacaaaagcagggcccaaaattgtgtctcatttgctccatttagtggataacaaagagtcattggagaatatatctgaaaatgatgactacttaaagcaccagccagaaatttcactgcagatgcagttacttaggggattgtggcaaatttgtccacaagcttacttttcaatggtttcagaacatttactggttcttgccctgaaaactgcttatcaaagcaacactgttgctgcgtgttctccatttgttttgcaattccttcaagggagaacactgactttgggtgcgcttaacttacagtactttttcgaccacccagaaagcttgtcattgttgaggagcatccacttcccaatacgaggaaataagacatcacccagagcacatttttcagttctggaaacatgttttgacaaatcacaggtgccaactatagatcaggactatgcttctgcctttgaacctatgaatgaatgggagcgaaatttagctgaaaaagaggataatgtaaagagctatatggatatgcagcgcagggcatcaccagaccttagtactggctattggaaactttctccaaagcagtacaagattccctgtctagaagtcgatgtgaatgatattgatgttgtaggccaggatatgcttgagattctaatgacagttttctcagcttcacagcgcatcgaactccatttaaaccacagcagaggctttatagaaagcatccgcccagctcttgagctgtctaaggcctctgtcaccaagtgctccataagcaagttggaactcagcgcagccgaacaggaactgcttctcaccctgccttccctggaatctcttgaagtctcagggacaatccagtcacaagtaaaattaattcaaaattctccaaaccttcatgttttccatctgaagtgtaacttcttttcggattttgggtctctcatgactatgcttgtttcctgtaagaaactcacagaaattaagttttcggattcattttttcaagccgtcccatttgttgccagtttgccaaattttatttctctgaagatattaaatcttgaaggccagcaatttcctgatgaggaaacatcagaaaaatttgcctacattttaggttctcttagtaacctggaagaattgatccttcctactggggatggaatttatcgagtggccaaactgatcatccagcagtgtcagcagcttcattgtctccgagtcctctcatttttcaagactttgaatgatgacagcgtggtggaaattgccaaagtagcaatcagtggaggtttccagaaacttgagaacctaaagctttcaatcaatcacaagattacagaggaaggatacagaaatttctttcaagcactggacaacatgccaaacttgcaggagttggacatctccaggcatttcacagagtgtatcaaagctcaggccacaacagtcaagtctttgagtcaatgtgtgttacgactaccaaggctcattagactgaacatgttaagttggctcttggatgcagatgatattgcattgcttaatgtcatgaaagaaagacatcctcaatctaagtacttaactattctccagaaatggatactgccgttctctccaatcattcagaaataaaagattcagctaaaaactgctgaatcaataatttgtcttggggcatattgagga

SEQ ID NO: 159626 - DNA, 894 bp, Homo sapiens
  Payload ID: 11245
  Gene Symbol: NAIP
  Gene Name: NLR family, apoptosis inhibitory protein
  ENST ID: ENST00000447012
  CDS Start-End: 1-15
gctcagagactttaagaaacatgcctatgtttctaccgaaatgtcatggcaaggctaaaacgtaaacaggacacggtacagtgtttttcctgtggtggatgtttaggaaattgggaagaaggagatgatccttggaaggaacatgccaaatggttccccaaatgtgaatttcttcggagtaagaaatcctcagaggaaattacccagtatattcaaagctacaagggatttgttgacataacgggctggcttctgacgggctctgcttgccttcctgatagtcttcccctttatgaatgaagccacttgccccagcttccctctgctgcccctatctgcaggcttgctaagatctcctgacctaggcgctgtcacccacagtgggctgcagagctggctcttcctagctggctaactatcctgaatcagtaaaaatttcctagtggagagtgatgggaaatcgaatccaaactggcttaaacaaaaatgagaatttattgattaacatgactcaggagaccagaactctatagagaacatggcctgacagtgggggaagagaggtgtttcctcaaaaagaaactgggtgcagctttcccagaagaatcagttgctcaatatataataccctgatgaatttagttaccattctatgtctcttacttcctcattcgtcaaagtacatctgtgatatttaaatgcaggtctgttttcaaggtcagtttccggaaacagtgaccctgagaaggcttcctcctgagtatgcataaacattcacagcttgcatgcgtgtgtgtgtgtgtgtgtgtgtgtgtgtgtgtgtgtgtgtgtatgtttgcttgcactgcataaaaacaattgcaacatcaacagaaataaaaattaaaggaataa

SEQ ID NO: 159627 - DNA, 6088 bp, Homo sapiens
  Payload ID: 11245
  Gene Symbol: NAIP
  Gene Name: NLR family, apoptosis inhibitory protein
  Uniprot ID: Q13075
  ENST ID: ENST00000194097
  CDS Start-End: 256-4467
cttctggtgtgagactctgtaggtttcattactccttttgggtcctgattaaatcctgttgactcaagaccttagagcatttactggtaaagtctctgactgcgcgattttttttttgcattttagttccttaaatattttctcactgcttcctactaaaggacggacagagcatttgttcttcagccacatactttccttccactggccagcattctcctctattagactagaactgtggataaacctcagaaaatggccacccagcagaaagcctctgacgagaggatctcccagtttgatcacaatttgctgccagagctgtctgctcttctgggcctagatgcagttcagttggcaaaggaactagaagaagaggagcagaaggagcgagcaaaaatgcagaaaggctacaactctcaaatgcgcagtgaagcaaaaaggttaaagacttttgtgacttatgagccgtacagctcatggataccacaggagatggcggccgctgggttttacttcactggggtaaaatctgggattcagtgcttctgctgtagcctaatcctctttggtgccggcctcacgagactccccatagaagaccacaagaggtttcatccagattgtgggttccttttgaacaaggatgttggtaacattgccaagtacgacataagggtgaagaatctgaagagcaggctgagaggaggtaaaatgaggtaccaagaagaggaggctagacttgcgtccttcaggaactggccattttatgtccaagggatatccccttgtgtgctctcagaggctggctttgtctttacaggtaaacaggacacggtacagtgtttttcctgtggtggatgtttaggaaattgggaagaaggagatgatccttggaaggaacatgccaaatggttccccaaatgtgaatttcttcggagtaagaaatcctcagaggaaattacccagtatattcaaagctacaagggatttgttgacataacgggagaacattttgtgaattcctgggtccagagagaattacctatggcatcagcttattgcaatgacagcatctttgcttacgaagaactacggctggactcttttaaggactggccccgggaatcagctgtgggagttgcagcactggccaaagcaggtcttttctacacaggtataaaggacatcgtccagtgcttttcctgtggagggtgtttagagaaatggcaggaaggtgatgacccattagacgatcacaccagatgttttcccaattgtccatttctccaaaatatgaagtcctctgcggaagtgactccagaccttcagagccgtggtgaactttgtgaattactggaaaccacaagtgaaagcaatcttgaagattcaatagcagttggtcctatagtgccagaaatggcacagggtgaagcccagtggtttcaagaggcaaagaatctgaatgagcagctgagagcagcttataccagcgccagtttccgccacatgtctttgcttgatatctcttccgatctggccacggaccacttgctgggctgtgatctgtctattgcttcaaaacacatcagcaaacctgtgcaagaacctctggtgctgcctgaggtctttggcaacttgaactctgtcatgtgtgtggagggtgaagctggaagtggaaagacggtcctcctgaagaaaatagcttttctgtgggcatctggatgctgtcccctgttaaacaggttccagctggttttctacctctcccttagttccaccagaccagacgaggggctggccagtatcatctgtgaccagctcctagagaaagaaggatctgttactgaaatgtgcgtgaggaacattatccagcagttaaagaatcaggtcttattccttttagatgactacaaagaaatatgttcaatccctcaagtcataggaaaactgattcaaaaaaaccacttatcccggacctgcctattgattgctgtccgtacaaacagggccagggacatccgccgatacctagagaccattctagagatcaaagcatttcccttttataatactgtctgtatattacggaagctcttttcacataatatgactcgtctgcgaaagtttatggtttactttggaaagaaccaaagtttgcagaagatacagaaaactcctctctttgtggcggcgatctgtgctcattggtttcagtatccttttgacccatcctttgatgatgtggctgttttcaagtcctatatggaacgcctttccttaaggaacaaagcgacagctgaaattctcaaagcaactgtgtcctcctgtggtgagctggccttgaaagggtttttttcatgttgctttgagtttaatgatgatgatctcgcagaagcaggggttgatgaagatgaagatctaaccatgtgcttgatgagcaaatttacagcccagagactaagaccattctaccggtttttaagtcctgccttccaagaatttcttgcggggatgaggctgattgaactcctggattcagataggcaggaacatcaagatttgggactgtatcatttgaaacaaatcaactcacccatgatgactgtaagcgcctacaacaattttttgaactatgtctccagcctcccttcaacaaaagcagggcccaaaattgtgtctcatttgctccatttagtggataacaaagagtcattggagaatatatctgaaaatgatgactacttaaagcaccagccagaaatttcactgcagatgcagttacttaggggattgtggcaaatttgtccacaagcttacttttcaatggtttcagaacatttactggttcttgccctgaaaactgcttatcaaagcaacactgttgctgcgtgttctccatttgttttgcaattccttcaagggagaacactgactttgggtgcgcttaacttacagtactttttcgaccacccagaaagcttgtcattgttgaggagcatccacttcccaatacgaggaaataagacatcacccagagcacatttttcagttctggaaacatgttttgacaaatcacaggtgccaactatagatcaggactatgcttctgcctttgaacctatgaatgaatgggagcgaaatttagctgaaaaagaggataatgtaaagagctatatggatatgcagcgcagggcatcaccagaccttagtactggctattggaaactttctccaaagcagtacaagattccctgtctagaagtcgatgtgaatgatattgatgttgtaggccaggatatgcttgagattctaatgacagttttctcagcttcacagcgcatcgaactccatttaaaccacagcagaggctttatagaaagcatccgcccagctcttgagctgtctaaggcctctgtcaccaagtgctccataagcaagttggaactcagcgcagccgaacaggaactgcttctcaccctgccttccctggaatctcttgaagtctcagggacaatccagtcacaagaccaaatctttcctaatctggataagttcctgtgcctgaaagaactgtctgtggatctggagggcaatataaatgttttttcagtcattcctgaagaatttccaaacttccaccatatggagaaattattgatccaaatttcagctgagtatgatccttccaaactagtaaaattaattcaaaattctccaaaccttcatgttttccatctgaagtgtaacttcttttcggattttgggtctctcatgactatgcttgtttcctgtaagaaactcacagaaattaagttttcggattcattttttcaagccgtcccatttgttgccagtttgccaaattttatttctctgaagatattaaatcttgaaggccagcaatttcctgatgaggaaacatcagaaaaatttgcctacattttaggttctcttagtaacctggaagaattgatccttcctactggggatggaatttatcgagtggccaaactgatcatccagcagtgtcagcagcttcattgtctccgagtcctctcatttttcaagactttgaatgatgacagcgtggtggaaattgccaaagtagcaatcagtggaggtttccagaaacttgagaacctaaagctttcaatcaatcacaagattacagaggaaggatacagaaatttctttcaagcactggacaacatgccaaacttgcaggagttggacatctccaggcatttcacagagtgtatcaaagctcaggccacaacagtcaagtctttgagtcaatgtgtgttacgactaccaaggctcattagactgaacatgttaagttggctcttggatgcagatgatattgcattgcttaatgtcatgaaagaaagacatcctcaatctaagtacttaactattctccagaaatggatactgccgttctctccaatcattcagaaataaaagattcagctaaaaactgctgaatcaataatttgtcttggggcatattgaggatgtaaaaaaagttgttgattaatgctaaaaaccaaattatccaaaattattttattaaatattgcatacaaaagaaaatgtgtaaggcttgctaaaaaacaaaacaaaacaaaacacagtcctgcatactcaccaccaagctcaagaaataaatcatcaccaatacctttgaggtccctgagtaatccaccccagctaaaggcaaacccttcaatcaagtttatacagcaaaccctccattgtccatggtcaacagggaaggggttggggacaggtctgccaatctatctaaaagccacaatatggaagaagtattcaatttatataataaatggctaacttaacggttgaatcactttcatacatggatgaaacgggtttaacacaggatccacatgaatcttctgtgggccaagagatgttccttaatccttgtagaacctgttttctatattgaactagctttggtacagtagagttaacttactttccatttatccactgccaatataaagaggaaacaggggttagggaaaaatgacttcattccagaggcttctcagagttcaacatatgctataatttagaattttcttatgaatccactctacttgggtagaaaatattttatctctagtgattgcatattatttccatatcatagtatttcatagtattatatttgatatgagtgtctatatcaatgtcagtgtccagaatttcgttcctaccagttaagtagttttctgaacggccagaagaccattcgaaattcatgatactactataagttggtaaacaaccatacttttatcctcatttttattctcactaagaaaaaagtcaactcccctccccttgcccaagtatgaaatatagggacagtatgtatggtgtggtctcatttgtttagaaaaccacttatgactgggtgcggtggctcacacctgtaatcccagcactttgggaggctgaggcgggcgaatcatttgaggtgaggaattcgagaccagcctggccagcatggtgaaaccccatctctactaaaaatacaaaaattagccaggtgtggtggcacatgcctgtagtcccagccactagggcggctgagacgcaagacttgcttgaacccgggaggcagaggttgcagtgagccaagatggcgccactgcattccagcctgggcaacagagcaagaccctgtctgtctcaaaacaaaaaacaaaaccacttatattgctagctacattaagaatttctgaatatgttactgagcttgcttgtggtaaccatttataatatcagaaagtatatgtacaccaaaacatgttgaacatccatgttgtacaactgaaatataaataattttgtcaattatacctaaataaaactggaaaaaaatttctggaagtttatatctaaaaatgttaatagtgcgtacctctaggaagtgggcctggaagccattcttacttttcagtctctcccattctgtactgttttttgttttactttcgtgcctgcattatttttctatttaaaacaaaaataaatctagtttagcact

SEQ ID NO: 159628 - DNA, 5347 bp, Homo sapiens
  Payload ID: 11245
  Gene Symbol: NAIP
  Gene Name: NLR family, apoptosis inhibitory protein
  ENST ID: ENST00000618877
  CDS Start-End: 1-3726
atgccacttcatattggggacttcgtctgggattccaaggtgcattcattgcaaagttccttaaatattttctcactgcttcctactaaaggacggacagagcatttgttcttcagccacatactttccttccactggccagcattctcctctattagactagaactgtggataaacctcagatgtgaatttcttcggagtaagaaatcctcagaggaaattacccagtatattcaaagctacaagggatttgttgacataacgggagaacattttgtgaattcctgggtccagagagaattacctatggcatcagcttattgcaatgacagcatctttgcttacgaagaactacggctggactcttttaaggactggccccgggaatcagctgtgggagttgcagcactggccaaagcaggtcttttctacacaggtataaaggacatcgtccagtgcttttcctgtggagggtgtttagagaaatggcaggaaggtgatgacccattagacgatcacaccagatgttttcccaattgtccatttctccaaaatatgaagtcctctgcggaagtgactccagaccttcagagccgtggtgaactttgtgaattactggaaaccacaagtgaaagcaatcttgaagattcaatagcagttggtcctatagtgccagaaatggcacagggtgaagcccagtggtttcaagaggcaaagaatctgaatgagcagctgagagcagcttataccagcgccagtttccgccacatgtctttgcttgatatctcttccgatctggccacggaccacttgctgggctgtgatctgtctattgcttcaaaacacatcagcaaacctgtgcaagaacctctggtgctgcctgaggtctttggcaacttgaactctgtcatgtgtgtggagggtgaagctggaagtggaaagacggtcctcctgaagaaaatagcttttctgtgggcatctggatgctgtcccctgttaaacaggttccagctggttttctacctctcccttagttccaccagaccagacgaggggctggccagtatcatctgtgaccagctcctagagaaagaaggatctgttactgaaatgtgcatgaggaacattatccagcagttaaagaatcaggtcttattccttttagatgactacaaagaaatatgttcaatccctcaagtcataggaaaactgattcaaaaaaaccacttatcccggacctgcctattgattgctgtccgtacaaacagggccagggacatccgccgatacctagagaccattctagagatcaaagcatttcccttttataatactgtctgtatattacggaagctcttttcacataatatgactcgtctgcgaaagtttatggtttactttggaaagaaccaaagtttgcagaagatacagaaaactcctctctttgtggcggcgatctgtgctcattggtttcagtatccttttgacccatcctttgatgatgtggctgttttcaagtcctatatggaacgcctttccttaaggaacaaagcgacagctgaaattctcaaagcaactgtgtcctcctgtggtgagctggccttgaaagggtttttttcatgttgctttgagtttaatgatgatgatctcgcagaagcaggggttgatgaagatgaagatctaaccatgtgcttgatgagcaaatttacagcccagagactaagaccattctaccggtttttaagtcctgccttccaagaatttcttgcggggatgaggctgattgaactcctggattcagataggcaggaacatcaagatttgggactgtatcatttgaaacaaatcaactcacccatgatgactgtaagcgcctacaacaattttttgaactatgtctccagcctcccttcaacaaaagcagggcccaaaattgtgtctcatttgctccatttagtggataacaaagagtcattggagaatatatctgaaaatgatgactacttaaagcaccagccagaaatttcactgcagatgcagttacttaggggattgtggcaaatttgtccacaagcttacttttcaatggtttcagaacatttactggttcttgccctgaaaactgcttatcaaagcaacactgttgctgcgtgttctccatttgttttgcaattccttcaagggagaacactgactttgggtgcgcttaacttacagtactttttcgaccacccagaaagcttgtcattgttgaggagcatccacttcccaatacgaggaaataagacatcacccagagcacatttttcagttctggaaacatgttttgacaaatcacaggtgccaactatagatcaggactatgcttctgcctttgaacctatgaatgaatgggagcgaaatttagctgaaaaagaggataatgtaaagagctatatggatatgcagcgcagggcatcaccagaccttagtactggctattggaaactttctccaaagcagtacaagattccctgtctagaagtcgatgtgaatgatattgatgttgtaggccaggatatgcttgagattctaatgacagttttctcagcttcacagcgcatcgaactccatttaaaccacagcagaggctttatagaaagcatccgcccagctcttgagctgtctaaggcctctgtcaccaagtgctccataagcaagttggaactcagcgcagccgaacaggaactgcttctcaccctgccttccctggaatctcttgaagtctcagggacaatccagtcacaagaccaaatctttcctaatctggataagttcctgtgcctgaaagaactgtctgtggatctggagggcaatataaatgttttttcagtcattcctgaagaatttccaaacttccaccatatggagaaattattgatccaaatttcagctgagtatgatccttccaaactagtaaaattaattcaaaattctccaaaccttcatgttttccatctgaagtgtaacttcttttcggattttgggtctctcatgactatgcttgtttcctgtaagaaactcacagaaattaagttttcggattcattttttcaagccgtcccatttgttgccagtttgccaaattttatttctctgaagatattaaatcttgaaggccagcaatttcctgatgaggaaacatcagaaaaatttgcctacattttaggttctcttagtaacctggaagaattgatccttcctactggggatggaatttatcgagtggccaaactgatcatccagcagtgtcagcagcttcattgtctccgagtcctctcatttttcaagactttgaatgatgacagcgtggtggaaattgccaaagtagcaatcagtggaggtttccagaaacttgagaacctaaagctttcaatcaatcacaagattacagaggaaggatacagaaatttctttcaagcactggacaacatgccaaacttgcaggagttggacatctccaggcatttcacagagtgtatcaaagctcaggccacaacagtcaagtctttgagtcaatgtgtgttacgactaccaaggctcattagactgaacatgttaagttggctcttggatgcagatgatattgcattgcttaatgtcatgaaagaaagacatcctcaatctaagtacttaactattctccagaaatggatactgccgttctctccaatcattcagaaataaaagattcagctaaaaactgctgaatcaataatttgtcttggggcatattgaggatgtaaaaaaagttgttgattaatgctaaaaaccaaattatccaaaattattttattaaatattgcatacaaaagaaaatgtgtaaggcttgctaaaaaacaaaacaaaacaaaacacagtcctgcatactcaccaccaagctcaagaaataaatcatcaccaatacctttgaggtccctgagtaatccaccccagctaaaggcaaacccttcaatcaagtttatacagcaaaccctccattgtccatggtcaacagggaaggggttggggacaggtctgccaatctatctaaaagccacaatatggaagaagtattcaatttatataataaatggctaacttaacggttgaatcactttcatacatggatgaaacgggtttaacacaggatccacatgaatcttctgtgggccaagagatgttccttaatccttgtagaacctgttttctatattgaactagctttggtacagtagagttaacttactttccatttatccactgccaatataaagaggaaacaggggttagggaaaaatgacttcattccagaggcttctcagagttcaacatatgctataatttagaattttcttatgaatccactctacttgggtagaaaatattttatctctagtgattgcatattatttccatatcatagtatttcatagtattatatttgatatgagtgtctatatcaatgtcagtgtccagaatttcgttcctaccagttaagtagttttctgaacggccagaagaccattcgaaattcatgatactactataagttggtaaacaaccatacttttatcctcatttttattctcactaagaaaaaagtcaactcccctccccttgcccaagtatgaaatatagggacagtatgtatggtgtggtctcatttgtttagaaaaccacttatgactgggtgcggtggctcacacctgtaatcccagcactttgggaggctgaggcgggcgaatcatttgaggtgaggaattcgagaccagcctggccagcatggtgaaaccccatctctactaaaaatacaaaaattagccaggtgtggtggcacatgcctgtagtcccagccactagggcggctgagacgcaagacttgcttgaacccgggaggcagaggttgcagtgagccaagatggcgccactgcattccagcctgggcaacagagcaagaccctgtctgtctcaaaacaaaaaacaaaaccacttatattgctagctacattaagaatttctgaatatgttactgagcttgcttgtggtaaccatttataatatcagaaagtatatgtacaccaaaacatgttgaacatccatgttgtacaactgaaatataaataattttgtcaattatacctaaataaaactggaaaaaaatttctggaagtttatatctaaaaatgttaatagtgcgtacctctaggaagtgggcctggaagccattcttacttttcagtctctcccattctgtactgttttttgttttactttcgtgcctgcattatttttctatttaaaacaaaaataaatctagtttagcact

SEQ ID NO: 159629 - DNA, 4153 bp, Homo sapiens
  Payload ID: 11245
  Gene Symbol: NAIP
  Gene Name: NLR family, apoptosis inhibitory protein
  ENST ID: ENST00000615009
  CDS Start-End: 56-4099
tccactggccagcattctcctctattagactagaactgtggataaacctcagaaaatggccacccagcagaaagcctctgacgagaggatctcccagtttgatcacaatttgctgccagagctgtctgctcttctgggcctagatgcagttcagttggcaaaggaactagaagaagaggagcagaaggagcgagcaaaaatgcagaaaggctacaactctcaaatgcgcagtgaagcaaaaaggttaaagacttttgtgacttatgagccgtacagctcatggataccacaggagatggcggccgctgggttttacttcactggggtaaaatctgggattcagtgcttctgctgtagcctaatcctctttggtgccggcctcacgagactccccatagaagaccacaagaggtttcatccagattgtgggttccttttgaacaaggatgttggtaacattgccaagtacgacataagggtgaagaatctgaagagcaggctgagaggaggtaaaatgaggtaccaagaagaggaggctagacttgcatccttcaggaactggccattttatgtccaagggatatccccttgtgtgctctcagaggctggctttgtctttacaggtaaacaggacacggtacagtgtttttcctgtggtggatgtttaggaaattgggaagaaggagatgatccttggaaggaacatgccaaatggttccccaaatgtgaatttcttcggagtaagaaatcctcagaggaaattacccagtatattcaaagctacaagggatttgttgacataacgggagaacattttgtgaattcctgggtccagagagaattacctatggcatcagcttattgcaatgacagcatctttgcttacgaagaactacggctggactcttttaaggactggccccgggaatcagctgtgggagttgcagcactggccaaagcaggtcttttctacacaggtataaaggacatcgtccagtgcttttcctgtggagggtgtttagagaaatggcaggaaggtgatgacccattagacgatcacaccagatgttttcccaattgtccatttctccaaaatatgaagtcctctgcggaagtgactccagaccttcagagccgtggtgaactttgtgaattactggaaaccacaagtgaaagcaatcttgaagattcaatagcagttggtcctatagtgccagaaatggcacagggtgaagcccagtggtttcaagaggcaaagaatctgaatgagcagctgagagcagcttataccagcgccagtttccgccacatgtctttgcttgatatctcttccgatctggccacggaccacttgctgggctgtgatctgtctattgcttcaaaacacatcagcaaacctgtgcaagaacctctggtgctgcctgaggtctttggcaacttgaactctgtcatgtgtgtggagggtgaagctggaagtggaaagacggtcctcctgaagaaaatagcttttctgtgggcatctggatgctgtcccctgttaaacaggttccagctggttttctacctctcccttagttccaccagaccagacgaggggctggccagtatcatctgtgaccagctcctagagaaagaaggatctgttactgaaatgtgcatgaggaacattatccagcagttaaagaatcaggtcttattccttttagatgactacaaagaaatatgttcaatccctcaagtcataggaaaactgattcaaaaaaaccacttatcccggacctgcctattgattgctgtccgtacaaacagggccagggacatccgccgatacctagagaccattctagagatcaaagcatttcccttttataatactgtctgtatattacggaagctcttttcacataatatgactcgtctgcgaaagtttatggtttactttggaaagaaccaaagtttgcagaagatacagaaaactcctctctttgtggcggcgatctgtgctcattggtttcagtatccttttgacccatcctttgatgatgtggctgttttcaagtcctatatggaacgcctttccttaaggaacaaagcgacagctgaaattctcaaagcaactgtgtcctcctgtggtgagctggccttgaaagggtttttttcatgttgctttgagtttaatgatgatgatctcgcagaagcaggggttgatgaagatgaagatctaaccatgtgcttgatgagcaaatttacagcccagagactaagaccattctaccggtttttaagtcctgccttccaagaatttcttgcggggatgaggctgattgaactcctggattcagataggcaggaacatcaagatttgggactgtatcatttgaaacaaatcaactcacccatgatgactgtaagcgcctacaacaattttttgaactatgtctccagcctcccttcaacaaaagcagggcccaaaattgtgtctcatttgctccatttagtggataacaaagagtcattggagaatatatctgaaaatgatgactacttaaagcaccagccagaaatttcactgcagatgcagttacttaggggattgtggcaaatttgtccacaagcttacttttcaatggtttcagaacatttactggttcttgccctgaaaactgcttatcaaagcaacactgttgctgcgtgttctccatttgttttgcaattccttcaagggagaacactgactttgggtgcgcttaacttacagtactttttcgaccacccagaaagcttgtcattgttgaggagcatccacttcccaatacgaggaaataagacatcacccagagcacatttttcagttctggaaacatgttttgacaaatcacaggtgccaactatagatcaggactatgcttctgcctttgaacctatgaatgaatgggagcgaaatttagctgaaaaagaggataatgtaaagagctatatggatatgcagcgcagggcatcaccagaccttagtactggctattggaaactttctccaaagcagtacaagattccctgtctagaagtcgatgtgaatgatattgatgttgtaggccaggatatgcttgagattctaatgacagttttctcagcttcacagcgcatcgaactccatttaaaccacagcagaggctttatagaaagcatccgcccagctcttgagctgtctaaggcctctgtcaccaagtgctccataagcaagttggaactcagcgcagccgaacaggaactgcttctcaccctgccttccctggaatctcttgaagtctcagggacaatccagtcacaagtaaaattaattcaaaattctccaaaccttcatgttttccatctgaagtgtaacttcttttcggattttgggtctctcatgactatgcttgtttcctgtaagaaactcacagaaattaagttttcggattcattttttcaagccgtcccatttgttgccagtttgccaaattttatttctctgaagatattaaatcttgaaggccagcaatttcctgatgaggaaacatcagaaaaatttgcctacattttaggttctcttagtaacctggaagaattgatccttcctactggggatggaatttatcgagtggccaaactgatcatccagcagtgtcagcagcttcattgtctccgagtcctctcatttttcaagactttgaatgatgacagcgtggtggaaattgccaaagtagcaatcagtggaggtttccagaaacttgagaacctaaagctttcaatcaatcacaagattacagaggaaggatacagaaatttctttcaagcactggacaacatgccaaacttgcaggagttggacatctccaggcatttcacagagtgtatcaaagctcaggccacaacagtcaagtctttgagtcaatgtgtgttacgactaccaaggctcattagactgaacatgttaagttggctcttggatgcagatgatattgcattgcttaatgtcatgaaagaaagacatcctcaatctaagtacttaactattctccagaaatggatactgccgttctctccaatcattcagaaataaaagattcagctaaaaactgctgaatcaataatttgtcttggggcatattgagga

SEQ ID NO: 159630 - DNA, 579 bp, Homo sapiens; identical to SEQ ID NO: 159621
  Payload ID: 11245
  Gene Symbol: NAIP
  Gene Name: NLR family, apoptosis inhibitory protein
  ENST ID: ENST00000616067
  CDS Start-End: 1-579

SEQ ID NO: 159631 - DNA, 3726 bp, Homo sapiens
  Payload ID: 11245
  Gene Symbol: NAIP
  Gene Name: NLR family, apoptosis inhibitory protein
  ENST ID: ENST00000616766
  CDS Start-End: 1-3726
atgccacttcatattggggacttcgtctgggattccaaggtgcattcattgcaaagttccttaaatattttctcactgcttcctactaaaggacggacagagcatttgttcttcagccacatactttccttccactggccagcattctcctctattagactagaactgtggataaacctcagatgtgaatttcttcggagtaagaaatcctcagaggaaattacccagtatattcaaagctacaagggatttgttgacataacgggagaacattttgtgaattcctgggtccagagagaattacctatggcatcagcttattgcaatgacagcatctttgcttacgaagaactacggctggactcttttaaggactggccccgggaatcagctgtgggagttgcagcactggccaaagcaggtcttttctacacaggtataaaggacatcgtccagtgcttttcctgtggagggtgtttagagaaatggcaggaaggtgatgacccattagacgatcacaccagatgttttcccaattgtccatttctccaaaatatgaagtcctctgcggaagtgactccagaccttcagagccgtggtgaactttgtgaattactggaaaccacaagtgaaagcaatcttgaagattcaatagcagttggtcctatagtgccagaaatggcacagggtgaagcccagtggtttcaagaggcaaagaatctgaatgagcagctgagagcagcttataccagcgccagtttccgccacatgtctttgcttgatatctcttccgatctggccacggaccacttgctgggctgtgatctgtctattgcttcaaaacacatcagcaaacctgtgcaagaacctctggtgctgcctgaggtctttggcaacttgaactctgtcatgtgtgtggagggtgaagctggaagtggaaagacggtcctcctgaagaaaatagcttttctgtgggcatctggatgctgtcccctgttaaacaggttccagctggttttctacctctcccttagttccaccagaccagacgaggggctggccagtatcatctgtgaccagctcctagagaaagaaggatctgttactgaaatgtgcatgaggaacattatccagcagttaaagaatcaggtcttattccttttagatgactacaaagaaatatgttcaatccctcaagtcataggaaaactgattcaaaaaaaccacttatcccggacctgcctattgattgctgtccgtacaaacagggccagggacatccgccgatacctagagaccattctagagatcaaagcatttcccttttataatactgtctgtatattacggaagctcttttcacataatatgactcgtctgcgaaagtttatggtttactttggaaagaaccaaagtttgcagaagatacagaaaactcctctctttgtggcggcgatctgtgctcattggtttcagtatccttttgacccatcctttgatgatgtggctgttttcaagtcctatatggaacgcctttccttaaggaacaaagcgacagctgaaattctcaaagcaactgtgtcctcctgtggtgagctggccttgaaagggtttttttcatgttgctttgagtttaatgatgatgatctcgcagaagcaggggttgatgaagatgaagatctaaccatgtgcttgatgagcaaatttacagcccagagactaagaccattctaccggtttttaagtcctgccttccaagaatttcttgcggggatgaggctgattgaactcctggattcagataggcaggaacatcaagatttgggactgtatcatttgaaacaaatcaactcacccatgatgactgtaagcgcctacaacaattttttgaactatgtctccagcctcccttcaacaaaagcagggcccaaaattgtgtctcatttgctccatttagtggataacaaagagtcattggagaatatatctgaaaatgatgactacttaaagcaccagccagaaatttcactgcagatgcagttacttaggggattgtggcaaatttgtccacaagcttacttttcaatggtttcagaacatttactggttcttgccctgaaaactgcttatcaaagcaacactgttgctgcgtgttctccatttgttttgcaattccttcaagggagaacactgactttgggtgcgcttaacttacagtactttttcgaccacccagaaagcttgtcattgttgaggagcatccacttcccaatacgaggaaataagacatcacccagagcacatttttcagttctggaaacatgttttgacaaatcacaggtgccaactatagatcaggactatgcttctgcctttgaacctatgaatgaatgggagcgaaatttagctgaaaaagaggataatgtaaagagctatatggatatgcagcgcagggcatcaccagaccttagtactggctattggaaactttctccaaagcagtacaagattccctgtctagaagtcgatgtgaatgatattgatgttgtaggccaggatatgcttgagattctaatgacagttttctcagcttcacagcgcatcgaactccatttaaaccacagcagaggctttatagaaagcatccgcccagctcttgagctgtctaaggcctctgtcaccaagtgctccataagcaagttggaactcagcgcagccgaacaggaactgcttctcaccctgccttccctggaatctcttgaagtctcagggacaatccagtcacaagaccaaatctttcctaatctggataagttcctgtgcctgaaagaactgtctgtggatctggagggcaatataaatgttttttcagtcattcctgaagaatttccaaacttccaccatatggagaaattattgatccaaatttcagctgagtatgatccttccaaactagtaaaattaattcaaaattctccaaaccttcatgttttccatctgaagtgtaacttcttttcggattttgggtctctcatgactatgcttgtttcctgtaagaaactcacagaaattaagttttcggattcattttttcaagccgtcccatttgttgccagtttgccaaattttatttctctgaagatattaaatcttgaaggccagcaatttcctgatgaggaaacatcagaaaaatttgcctacattttaggttctcttagtaacctggaagaattgatccttcctactggggatggaatttatcgagtggccaaactgatcatccagcagtgtcagcagcttcattgtctccgagtcctctcatttttcaagactttgaatgatgacagcgtggtggaaattgccaaagtagcaatcagtggaggtttccagaaacttgagaacctaaagctttcaatcaatcacaagattacagaggaaggatacagaaatttctttcaagcactggacaacatgccaaacttgcaggagttggacatctccaggcatttcacagagtgtatcaaagctcaggccacaacagtcaagtctttgagtcaatgtgtgttacgactaccaaggctcattagactgaacatgttaagttggctcttggatgcagatgatattgcattgcttaatgtcatgaaagaaagacatcctcaatctaagtacttaactattctccagaaatggatactgccgttctctccaatcattcagaaataa

SEQ ID NO: 159632 - DNA, 4153 bp, Homo sapiens; identical to SEQ ID NO: 159629
  Payload ID: 11245
  Gene Symbol: NAIP
  Gene Name: NLR family, apoptosis inhibitory protein
  ENST ID: ENST00000610590
  CDS Start-End: 56-4099

SEQ ID NO: 159633 - DNA, 4013 bp, Homo sapiens
  Payload ID: 11245
  Gene Symbol: NAIP
  Gene Name: NLR family, apoptosis inhibitory protein
  Uniprot ID: Q13075
  ENST ID: ENST00000612328
  CDS Start-End: 534-4013
tggcacagatctccagaaacccttgtaatttcctgagtgacaggggtgatagaaacatcttttattagaatacttggtcttggttcctgacacaagagcttctaagacctttggaatctccaagtgataagagtgtatgacagtgagctaactggtggctgggatcctttagacaacttcaggatgggggctatcccctgaaagactaaggcatgattagaggtctgggatttgcagccccacgcctcgacctccagagagggtaaaagggctggcgattgattaaccaccaattgccagtgatttagccaatcatgcctaagtgatggcacctccattaaaaaataaaccacaggtttggagagctttcggtttggttaaccccaaccacataccaagaaggcgatgcacctcaaactgcatgaagacaaaaggtcctgtgctcacctgggacccttctggacgttgccctgtgtacctcttcgactgcctgttcatctacgacgaaccccgggtattgaccccagacaacaatgccacttcatattggggacttcgtctgggattccaaggtgcattcattgcaaagttccttaaatattttctcactgcttcctactaaaggacggacagagcatttgttcttcagccacatactttccttccactggccagcattctcctctattagactagaactgtggataaacctcagatgtgaatttcttcggagtaagaaatcctcagaggaaattacccagtatattcaaagctacaagggatttgttgacataacgggagaacattttgtgaattcctgggtccagagagaattacctatggcatcagcttattgcaatgacagcatctttgcttacgaagaactacggctggactcttttaaggactggccccgggaatcagctgtgggagttgcagcactggccaaagcaggtcttttctacacaggtataaaggacatcgtccagtgcttttcctgtggagggtgtttagagaaatggcaggaaggtgatgacccattagacgatcacaccagatgttttcccaattgtccatttctccaaaatatgaagtcctctgcggaagtgactccagaccttcagagccgtggtgaactttgtgaattactggaaaccacaagtgaaagcaatcttgaagattcaatagcagttggtcctatagtgccagaaatggcacagggtgaagcccagtggtttcaagaggcaaagaatctgaatgagcagctgagagcagcttataccagcgccagtttccgccacatgtctttgcttgatatctcttccgatctggccacggaccacttgctgggctgtgatctgtctattgcttcaaaacacatcagcaaacctgtgcaagaacctctggtgctgcctgaggtctttggcaacttgaactctgtcatgtgtgtggagggtgaagctggaagtggaaagacggtcctcctgaagaaaatagcttttctgtgggcatctggatgctgtcccctgttaaacaggttccagctggttttctacctctcccttagttccaccagaccagacgaggggctggccagtatcatctgtgaccagctcctagagaaagaaggatctgttactgaaatgtgcatgaggaacattatccagcagttaaagaatcaggtcttattccttttagatgactacaaagaaatatgttcaatccctcaagtcataggaaaactgattcaaaaaaaccacttatcccggacctgcctattgattgctgtccgtacaaacagggccagggacatccgccgatacctagagaccattctagagatcaaagcatttcccttttataatactgtctgtatattacggaagctcttttcacataatatgactcgtctgcgaaagtttatggtttactttggaaagaaccaaagtttgcagaagatacagaaaactcctctctttgtggcggcgatctgtgctcattggtttcagtatccttttgacccatcctttgatgatgtggctgttttcaagtcctatatggaacgcctttccttaaggaacaaagcgacagctgaaattctcaaagcaactgtgtcctcctgtggtgagctggccttgaaagggtttttttcatgttgctttgagtttaatgatgatgatctcgcagaagcaggggttgatgaagatgaagatctaaccatgtgcttgatgagcaaatttacagcccagagactaagaccattctaccggtttttaagtcctgccttccaagaatttcttgcggggatgaggctgattgaactcctggattcagataggcaggaacatcaagatttgggactgtatcatttgaaacaaatcaactcacccatgatgactgtaagcgcctacaacaattttttgaactatgtctccagcctcccttcaacaaaagcagggcccaaaattgtgtctcatttgctccatttagtggataacaaagagtcattggagaatatatctgaaaatgatgactacttaaagcaccagccagaaatttcactgcagatgcagttacttaggggattgtggcaaatttgtccacaagcttacttttcaatggtttcagaacatttactggttcttgccctgaaaactgcttatcaaagcaacactgttgctgcgtgttctccatttgttttgcaattccttcaagggagaacactgactttgggtgcgcttaacttacagtactttttcgaccacccagaaagcttgtcattgttgaggagcatccacttcccaatacgaggaaataagacatcacccagagcacatttttcagttctggaaacatgttttgacaaatcacaggtgccaactatagatcaggactatgcttctgcctttgaacctatgaatgaatgggagcgaaatttagctgaaaaagaggataatgtaaagagctatatggatatgcagcgcagggcatcaccagaccttagtactggctattggaaactttctccaaagcagtacaagattccctgtctagaagtcgatgtgaatgatattgatgttgtaggccaggatatgcttgagattctaatgacagttttctcagcttcacagcgcatcgaactccatttaaaccacagcagaggctttatagaaagcatccgcccagctcttgagctgtctaaggcctctgtcaccaagtgctccataagcaagttggaactcagcgcagccgaacaggaactgcttctcaccctgccttccctggaatctcttgaagtctcagggacaatccagtcacaagaccaaatctttcctaatctggataagttcctgtgcctgaaagaactgtctgtggatctggagggcaatataaatgttttttcagtcattcctgaagaatttccaaacttccaccatatggagaaattattgatccaaatttcagctgagtatgatccttccaaactagtaaaattaattcaaaattctccaaaccttcatgttttccatctgaagtgtaacttcttttcggattttgggtctctcatgactatgcttgtttcctgtaagaaactcacagaaattaagttttcggattcattttttcaagccgtcccatttgttgccagtttgccaaattttatttctctgaagatattaaatcttgaaggccagcaatttcctgatgaggaaacatcagaaaaatttgcctacattttaggttctcttagtaacctggaagaattgatccttcctactggggatggaatttatcgagtggccaaactgatcatccagcagtgtcagcagcttcattgtctccgagtcctctcatttttcaagactttgaatgatgacagcgtggtggaaattgccaaagtagcaatcagtggaggtttccagaaacttgagaacctaaagctttcaatcaatcacaagattacagaggaaggatacagaaatttctttcaagcactggacaacatgccaaac

SEQ ID NO: 159634 - DNA, 4318 bp, Homo sapiens
  Payload ID: 11245
  Gene Symbol: NAIP
  Gene Name: NLR family, apoptosis inhibitory protein
  Uniprot ID: Q13075
  ENST ID: ENST00000620988
  CDS Start-End: 56-4267
tccactggccagcattctcctctattagactagaactgtggataaacctcagaaaatggccacccagcagaaagcctctgacgagaggatctcccagtttgatcacaatttgctgccagagctgtctgctcttctgggcctagatgcagttcagttggcaaaggaactagaagaagaggagcagaaggagcgagcaaaaatgcagaaaggctacaactctcaaatgcgcagtgaagcaaaaaggttaaagacttttgtgacttatgagccgtacagctcatggataccacaggagatggcggccgctgggttttacttcactggggtaaaatctgggattcagtgcttctgctgtagcctaatcctctttggtgccggcctcacgagactccccatagaagaccacaagaggtttcatccagattgtgggttccttttgaacaaggatgttggtaacattgccaagtacgacataagggtgaagaatctgaagagcaggctgagaggaggtaaaatgaggtaccaagaagaggaggctagacttgcatccttcaggaactggccattttatgtccaagggatatccccttgtgtgctctcagaggctggctttgtctttacaggtaaacaggacacggtacagtgtttttcctgtggtggatgtttaggaaattgggaagaaggagatgatccttggaaggaacatgccaaatggttccccaaatgtgaatttcttcggagtaagaaatcctcagaggaaattacccagtatattcaaagctacaagggatttgttgacataacgggagaacattttgtgaattcctgggtccagagagaattacctatggcatcagcttattgcaatgacagcatctttgcttacgaagaactacggctggactcttttaaggactggccccgggaatcagctgtgggagttgcagcactggccaaagcaggtcttttctacacaggtataaaggacatcgtccagtgcttttcctgtggagggtgtttagagaaatggcaggaaggtgatgacccattagacgatcacaccagatgttttcccaattgtccatttctccaaaatatgaagtcctctgcggaagtgactccagaccttcagagccgtggtgaactttgtgaattactggaaaccacaagtgaaagcaatcttgaagattcaatagcagttggtcctatagtgccagaaatggcacagggtgaagcccagtggtttcaagaggcaaagaatctgaatgagcagctgagagcagcttataccagcgccagtttccgccacatgtctttgcttgatatctcttccgatctggccacggaccacttgctgggctgtgatctgtctattgcttcaaaacacatcagcaaacctgtgcaagaacctctggtgctgcctgaggtctttggcaacttgaactctgtcatgtgtgtggagggtgaagctggaagtggaaagacggtcctcctgaagaaaatagcttttctgtgggcatctggatgctgtcccctgttaaacaggttccagctggttttctacctctcccttagttccaccagaccagacgaggggctggccagtatcatctgtgaccagctcctagagaaagaaggatctgttactgaaatgtgcatgaggaacattatccagcagttaaagaatcaggtcttattccttttagatgactacaaagaaatatgttcaatccctcaagtcataggaaaactgattcaaaaaaaccacttatcccggacctgcctattgattgctgtccgtacaaacagggccagggacatccgccgatacctagagaccattctagagatcaaagcatttcccttttataatactgtctgtatattacggaagctcttttcacataatatgactcgtctgcgaaagtttatggtttactttggaaagaaccaaagtttgcagaagatacagaaaactcctctctttgtggcggcgatctgtgctcattggtttcagtatccttttgacccatcctttgatgatgtggctgttttcaagtcctatatggaacgcctttccttaaggaacaaagcgacagctgaaattctcaaagcaactgtgtcctcctgtggtgagctggccttgaaagggtttttttcatgttgctttgagtttaatgatgatgatctcgcagaagcaggggttgatgaagatgaagatctaaccatgtgcttgatgagcaaatttacagcccagagactaagaccattctaccggtttttaagtcctgccttccaagaatttcttgcggggatgaggctgattgaactcctggattcagataggcaggaacatcaagatttgggactgtatcatttgaaacaaatcaactcacccatgatgactgtaagcgcctacaacaattttttgaactatgtctccagcctcccttcaacaaaagcagggcccaaaattgtgtctcatttgctccatttagtggataacaaagagtcattggagaatatatctgaaaatgatgactacttaaagcaccagccagaaatttcactgcagatgcagttacttaggggattgtggcaaatttgtccacaagcttacttttcaatggtttcagaacatttactggttcttgccctgaaaactgcttatcaaagcaacactgttgctgcgtgttctccatttgttttgcaattccttcaagggagaacactgactttgggtgcgcttaacttacagtactttttcgaccacccagaaagcttgtcattgttgaggagcatccacttcccaatacgaggaaataagacatcacccagagcacatttttcagttctggaaacatgttttgacaaatcacaggtgccaactatagatcaggactatgcttctgcctttgaacctatgaatgaatgggagcgaaatttagctgaaaaagaggataatgtaaagagctatatggatatgcagcgcagggcatcaccagaccttagtactggctattggaaactttctccaaagcagtacaagattccctgtctagaagtcgatgtgaatgatattgatgttgtaggccaggatatgcttgagattctaatgacagttttctcagcttcacagcgcatcgaactccatttaaaccacagcagaggctttatagaaagcatccgcccagctcttgagctgtctaaggcctctgtcaccaagtgctccataagcaagttggaactcagcgcagccgaacaggaactgcttctcaccctgccttccctggaatctcttgaagtctcagggacaatccagtcacaagaccaaatctttcctaatctggataagttcctgtgcctgaaagaactgtctgtggatctggagggcaatataaatgttttttcagtcattcctgaagaatttccaaacttccaccatatggagaaattattgatccaaatttcagctgagtatgatccttccaaactagtaaaattaattcaaaattctccaaaccttcatgttttccatctgaagtgtaacttcttttcggattttgggtctctcatgactatgcttgtttcctgtaagaaactcacagaaattaagttttcggattcattttttcaagccgtcccatttgttgccagtttgccaaattttatttctctgaagatattaaatcttgaaggccagcaatttcctgatgaggaaacatcagaaaaatttgcctacattttaggttctcttagtaacctggaagaattgatccttcctactggggatggaatttatcgagtggccaaactgatcatccagcagtgtcagcagcttcattgtctccgagtcctctcatttttcaagactttgaatgatgacagcgtggtggaaattgccaaagtagcaatcagtggaggtttccagaaacttgagaacctaaagctttcaatcaatcacaagattacagaggaaggatacagaaatttctttcaagcactggacaacatgccaaacttgcaggagttggacatctccaggcatttcacagagtgtatcaaagctcaggccacaacagtcaagtctttgagtcaatgtgtgttacgactaccaaggctcattagactgaacatgttaagttggctcttggatgcagatgatattgcattgcttaatgtcatgaaagaaagacatcctcaatctaagtacttaactattctccagaaatggatactgccgttctctccaatcattcagaaataaaagattcagctaaaaactgctgaatcaataatttgtcttggggcatattga

SEQ ID NO: 159635 - DNA, 6087 bp, Homo sapiens
  Payload ID: 11245
  Gene Symbol: NAIP
  Gene Name: NLR family, apoptosis inhibitory protein
  ENST ID: ENST00000619206
  CDS Start-End: 255-4466
cttctggtgtgagactctgtaggtttcattactccttttgggtcctgattaaatcctgttgactcaagaccttagagcatttactggtaaagtctctgactgcgcgatttttttttgcattttagttccttaaatattttctcactgcttcctactaaaggacggacagagcatttgttcttcagccacatactttccttccactggccagcattctcctctattagactagaactgtggataaacctcagaaaatggccacccagcagaaagcctctgacgagaggatctcccagtttgatcacaatttgctgccagagctgtctgctcttctgggcctagatgcagttcagttggcaaaggaactagaagaagaggagcagaaggagcgagcaaaaatgcagaaaggctacaactctcaaatgcgcagtgaagcaaaaaggttaaagacttttgtgacttatgagccgtacagctcatggataccacaggagatggcggccgctgggttttacttcactggggtaaaatctgggattcagtgcttctgctgtagcctaatcctctttggtgccggcctcacgagactccccatagaagaccacaagaggtttcatccagattgtgggttccttttgaacaaggatgttggtaacattgccaagtacgacataagggtgaagaatctgaagagcaggctgagaggaggtaaaatgaggtaccaagaagaggaggctagacttgcatccttcaggaactggccattttatgtccaagggatatccccttgtgtgctctcagaggctggctttgtctttacaggtaaacaggacacggtacagtgtttttcctgtggtggatgtttaggaaattgggaagaaggagatgatccttggaaggaacatgccaaatggttccccaaatgtgaatttcttcggagtaagaaatcctcagaggaaattacccagtatattcaaagctacaagggatttgttgacataacgggagaacattttgtgaattcctgggtccagagagaattacctatggcatcagcttattgcaatgacagcatctttgcttacgaagaactacggctggactcttttaaggactggccccgggaatcagctgtgggagttgcagcactggccaaagcaggtcttttctacacaggtataaaggacatcgtccagtgcttttcctgtggagggtgtttagagaaatggcaggaaggtgatgacccattagacgatcacaccagatgttttcccaattgtccatttctccaaaatatgaagtcctctgcggaagtgactccagaccttcagagccgtggtgaactttgtgaattactggaaaccacaagtgaaagcaatcttgaagattcaatagcagttggtcctatagtgccagaaatggcacagggtgaagcccagtggtttcaagaggcaaagaatctgaatgagcagctgagagcagcttataccagcgccagtttccgccacatgtctttgcttgatatctcttccgatctggccacggaccacttgctgggctgtgatctgtctattgcttcaaaacacatcagcaaacctgtgcaagaacctctggtgctgcctgaggtctttggcaacttgaactctgtcatgtgtgtggagggtgaagctggaagtggaaagacggtcctcctgaagaaaatagcttttctgtgggcatctggatgctgtcccctgttaaacaggttccagctggttttctacctctcccttagttccaccagaccagacgaggggctggccagtatcatctgtgaccagctcctagagaaagaaggatctgttactgaaatgtgcatgaggaacattatccagcagttaaagaatcaggtcttattccttttagatgactacaaagaaatatgttcaatccctcaagtcataggaaaactgattcaaaaaaaccacttatcccggacctgcctattgattgctgtccgtacaaacagggccagggacatccgccgatacctagagaccattctagagatcaaagcatttcccttttataatactgtctgtatattacggaagctcttttcacataatatgactcgtctgcgaaagtttatggtttactttggaaagaaccaaagtttgcagaagatacagaaaactcctctctttgtggcggcgatctgtgctcattggtttcagtatccttttgacccatcctttgatgatgtggctgttttcaagtcctatatggaacgcctttccttaaggaacaaagcgacagctgaaattctcaaagcaactgtgtcctcctgtggtgagctggccttgaaagggtttttttcatgttgctttgagtttaatgatgatgatctcgcagaagcaggggttgatgaagatgaagatctaaccatgtgcttgatgagcaaatttacagcccagagactaagaccattctaccggtttttaagtcctgccttccaagaatttcttgcggggatgaggctgattgaactcctggattcagataggcaggaacatcaagatttgggactgtatcatttgaaacaaatcaactcacccatgatgactgtaagcgcctacaacaattttttgaactatgtctccagcctcccttcaacaaaagcagggcccaaaattgtgtctcatttgctccatttagtggataacaaagagtcattggagaatatatctgaaaatgatgactacttaaagcaccagccagaaatttcactgcagatgcagttacttaggggattgtggcaaatttgtccacaagcttacttttcaatggtttcagaacatttactggttcttgccctgaaaactgcttatcaaagcaacactgttgctgcgtgttctccatttgttttgcaattccttcaagggagaacactgactttgggtgcgcttaacttacagtactttttcgaccacccagaaagcttgtcattgttgaggagcatccacttcccaatacgaggaaataagacatcacccagagcacatttttcagttctggaaacatgttttgacaaatcacaggtgccaactatagatcaggactatgcttctgcctttgaacctatgaatgaatgggagcgaaatttagctgaaaaagaggataatgtaaagagctatatggatatgcagcgcagggcatcaccagaccttagtactggctattggaaactttctccaaagcagtacaagattccctgtctagaagtcgatgtgaatgatattgatgttgtaggccaggatatgcttgagattctaatgacagttttctcagcttcacagcgcatcgaactccatttaaaccacagcagaggctttatagaaagcatccgcccagctcttgagctgtctaaggcctctgtcaccaagtgctccataagcaagttggaactcagcgcagccgaacaggaactgcttctcaccctgccttccctggaatctcttgaagtctcagggacaatccagtcacaagaccaaatctttcctaatctggataagttcctgtgcctgaaagaactgtctgtggatctggagggcaatataaatgttttttcagtcattcctgaagaatttccaaacttccaccatatggagaaattattgatccaaatttcagctgagtatgatccttccaaactagtaaaattaattcaaaattctccaaaccttcatgttttccatctgaagtgtaacttcttttcggattttgggtctctcatgactatgcttgtttcctgtaagaaactcacagaaattaagttttcggattcattttttcaagccgtcccatttgttgccagtttgccaaattttatttctctgaagatattaaatcttgaaggccagcaatttcctgatgaggaaacatcagaaaaatttgcctacattttaggttctcttagtaacctggaagaattgatccttcctactggggatggaatttatcgagtggccaaactgatcatccagcagtgtcagcagcttcattgtctccgagtcctctcatttttcaagactttgaatgatgacagcgtggtggaaattgccaaagtagcaatcagtggaggtttccagaaacttgagaacctaaagctttcaatcaatcacaagattacagaggaaggatacagaaatttctttcaagcactggacaacatgccaaacttgcaggagttggacatctccaggcatttcacagagtgtatcaaagctcaggccacaacagtcaagtctttgagtcaatgtgtgttacgactaccaaggctcattagactgaacatgttaagttggctcttggatgcagatgatattgcattgcttaatgtcatgaaagaaagacatcctcaatctaagtacttaactattctccagaaatggatactgccgttctctccaatcattcagaaataaaagattcagctaaaaactgctgaatcaataatttgtcttggggcatattgaggatgtaaaaaaagttgttgattaatgctaaaaaccaaattatccaaaattattttattaaatattgcatacaaaagaaaatgtgtaaggcttgctaaaaaacaaaacaaaacaaaacacagtcctgcatactcaccaccaagctcaagaaataaatcatcaccaatacctttgaggtccctgagtaatccaccccagctaaaggcaaacccttcaatcaagtttatacagcaaaccctccattgtccatggtcaacagggaaggggttggggacaggtctgccaatctatctaaaagccacaatatggaagaagtattcaatttatataataaatggctaacttaacggttgaatcactttcatacatggatgaaacgggtttaacacaggatccacatgaatcttctgtgggccaagagatgttccttaatccttgtagaacctgttttctatattgaactagctttggtacagtagagttaacttactttccatttatccactgccaatataaagaggaaacaggggttagggaaaaatgacttcattccagaggcttctcagagttcaacatatgctataatttagaattttcttatgaatccactctacttgggtagaaaatattttatctctagtgattgcatattatttccatatcatagtatttcatagtattatatttgatatgagtgtctatatcaatgtcagtgtccagaatttcgttcctaccagttaagtagttttctgaacggccagaagaccattcgaaattcatgatactactataagttggtaaacaaccatacttttatcctcatttttattctcactaagaaaaaagtcaactcccctccccttgcccaagtatgaaatatagggacagtatgtatggtgtggtctcatttgtttagaaaaccacttatgactgggtgcggtggctcacacctgtaatcccagcactttgggaggctgaggcgggcgaatcatttgaggtgaggaattcgagaccagcctggccagcatggtgaaaccccatctctactaaaaatacaaaaattagccaggtgtggtggcacatgcctgtagtcccagccactagggcggctgagacgcaagacttgcttgaacccgggaggcagaggttgcagtgagccaagatggcgccactgcattccagcctgggcaacagagcaagaccctgtctgtctcaaaacaaaaaacaaaaccacttatattgctagctacattaagaatttctgaatatgttactgagcttgcttgtggtaaccatttataatatcagaaagtatatgtacaccaaaacatgttgaacatccatgttgtacaactgaaatataaataattttgtcaattatacctaaataaaactggaaaaaaatttctggaagtttatatctaaaaatgttaatagtgcgtacctctaggaagtgggcctggaagccattcttacttttcagtctctcccattctgtactgttttttgttttactttcgtgcctgcattatttttctatttaaaacaaaaataaatctagtttagcact

SEQ ID NO: 159636 - DNA, 490 bp, Homo sapiens
  Payload ID: 11245
  Gene Symbol: NAIP
  Gene Name: NLR family, apoptosis inhibitory protein
  ENST ID: ENST00000613897
  CDS Start-End: 1-15
gctcagagactttaagaaacatgcctatgtttctaccgaaatgtcatggcaaggctaaaacgtaaacaggacacggtacagtgtttttcctgtggtggatgtttaggaaattgggaagaaggagatgatccttggaaggaacatgccaaatggttccccaaatgtgaatttcttcggagtaagaaatcctcagaggaaattacccagtatattcaaagctacaagggatttgttgacataacgggctggcttctgacgggctctgcttgccttcctgatagtcttcccctttatgaatgaagccacttgccccagcttccctctgctgcccctatctgcaggcttgctaagatctcctgacctaggcgctgtcacccacagtgggctgcagagctggctcttcctagctggctaactatcctgaatcagtaaaaatttcctagtggagagtgatgggaaatcgaatccaaactggcttaaacaaaaatga

SEQ ID NO: 159637 - DNA, 1078 bp, Homo sapiens
  Payload ID: 11245
  Gene Symbol: NAIP
  Gene Name: NLR family, apoptosis inhibitory protein
  ENST ID: ENST00000622005
  CDS Start-End: 76-672
cttcagccacatactttccttccactggccagcattctcctctattagactagaactgtggataaacctcagaaaatggccacccagcagaaagcctctgacgagaggatctcccagtttgatcacaatttgctgccagagctgtctgctcttctgggcctagatgcagttcagttggcaaaggaactagaagaagaggagcagaaggagcgagcaaaaatgcagaaaggctacaactctcaaatgcgcagtgaagcaaaaaggttaaagacttttgtgacttatgagccgtacagctcatggataccacaggagatggcggccgctgggttttacttcactggggtaaaatctgggattcagtgcttctgctgtagcctaatcctctttggtgccggcctcacgagactccccatagaagaccacaagaggtttcatccagattgtgggttccttttgaacaaggatgttggtaacattgccaagtacgacataagggtgaagaatctgaagagcaggctgagaggaggtaaaatgaggtaccaagaagaggaggctagacttgcatccttcaggaactggccattttatgtccaagggatatccccttgtgtgctctcagaggctggctttgtctttacagctgagttcatggaggctcagagactttaagaaacatgcctatgtttctaccgaaatgtcatggcaaggctaaaacgtaaacaggacacggtacagtgtttttcctgtggtggatgtttaggaaattgggaagaaggagatgatccttggaaggaacatgccaaatggttccccaaatgtgaatttcttcggagtaagaaatcctcagaggaaattacccagtatattcaaagctacaagggatttgttgacataacggtaatgtataacagcaatttttttctcaagtttttggattacctgtaagtgtctgactcagaagggcataggcattctttttatgtcatgggtttgatttctttcttcctttctcctttcattcccctggctcccatcttcaaagtgaaaaatatcacattcacttgctgacctagag

SEQ ID NO: 159638 - DNA, 4013 bp, Homo sapiens; identical to SEQ ID NO: 159633
  Payload ID: 11245
  Gene Symbol: NAIP
  Gene Name: NLR family, apoptosis inhibitory protein
  ENST ID: ENST00000628482
  CDS Start-End: 534-4013

SEQ ID NO: 159639 - DNA, 6124 bp, Homo sapiens
  Payload ID: 11245
  Gene Symbol: NAIP
  Gene Name: NLR family, apoptosis inhibitory protein
  ENST ID: ENST00000625431
  CDS Start-End: 292-4503
acaaaaggtcctgtgctcacctgggacccttctggacgttgccctgtgtacctcttcgactgcctgttcatctacgacgaaccccgggtattgaccccagacaacaatgccacttcatattggggacttcgtctgggattccaaggtgcattcattgcaaagttccttaaatattttctcactgcttcctactaaaggacggacagagcatttgttcttcagccacatactttccttccactggccagcattctcctctattagactagaactgtggataaacctcagaaaatggccacccagcagaaagcctctgacgagaggatctcccagtttgatcacaatttgctgccagagctgtctgctcttctgggcctagatgcagttcagttggcaaaggaactagaagaagaggagcagaaggagcgagcaaaaatgcagaaaggctacaactctcaaatgcgcagtgaagcaaaaaggttaaagacttttgtgacttatgagccgtacagctcatggataccacaggagatggcggccgctgggttttacttcactggggtaaaatctgggattcagtgcttctgctgtagcctaatcctctttggtgccggcctcacgagactccccatagaagaccacaagaggtttcatccagattgtgggttccttttgaacaaggatgttggtaacattgccaagtacgacataagggtgaagaatctgaagagcaggctgagaggaggtaaaatgaggtaccaagaagaggaggctagacttgcatccttcaggaactggccattttatgtccaagggatatccccttgtgtgctctcagaggctggctttgtctttacaggtaaacaggacacggtacagtgtttttcctgtggtggatgtttaggaaattgggaagaaggagatgatccttggaaggaacatgccaaatggttccccaaatgtgaatttcttcggagtaagaaatcctcagaggaaattacccagtatattcaaagctacaagggatttgttgacataacgggagaacattttgtgaattcctgggtccagagagaattacctatggcatcagcttattgcaatgacagcatctttgcttacgaagaactacggctggactcttttaaggactggccccgggaatcagctgtgggagttgcagcactggccaaagcaggtcttttctacacaggtataaaggacatcgtccagtgcttttcctgtggagggtgtttagagaaatggcaggaaggtgatgacccattagacgatcacaccagatgttttcccaattgtccatttctccaaaatatgaagtcctctgcggaagtgactccagaccttcagagccgtggtgaactttgtgaattactggaaaccacaagtgaaagcaatcttgaagattcaatagcagttggtcctatagtgccagaaatggcacagggtgaagcccagtggtttcaagaggcaaagaatctgaatgagcagctgagagcagcttataccagcgccagtttccgccacatgtctttgcttgatatctcttccgatctggccacggaccacttgctgggctgtgatctgtctattgcttcaaaacacatcagcaaacctgtgcaagaacctctggtgctgcctgaggtctttggcaacttgaactctgtcatgtgtgtggagggtgaagctggaagtggaaagacggtcctcctgaagaaaatagcttttctgtgggcatctggatgctgtcccctgttaaacaggttccagctggttttctacctctcccttagttccaccagaccagacgaggggctggccagtatcatctgtgaccagctcctagagaaagaaggatctgttactgaaatgtgcatgaggaacattatccagcagttaaagaatcaggtcttattccttttagatgactacaaagaaatatgttcaatccctcaagtcataggaaaactgattcaaaaaaaccacttatcccggacctgcctattgattgctgtccgtacaaacagggccagggacatccgccgatacctagagaccattctagagatcaaagcatttcccttttataatactgtctgtatattacggaagctcttttcacataatatgactcgtctgcgaaagtttatggtttactttggaaagaaccaaagtttgcagaagatacagaaaactcctctctttgtggcggcgatctgtgctcattggtttcagtatccttttgacccatcctttgatgatgtggctgttttcaagtcctatatggaacgcctttccttaaggaacaaagcgacagctgaaattctcaaagcaactgtgtcctcctgtggtgagctggccttgaaagggtttttttcatgttgctttgagtttaatgatgatgatctcgcagaagcaggggttgatgaagatgaagatctaaccatgtgcttgatgagcaaatttacagcccagagactaagaccattctaccggtttttaagtcctgccttccaagaatttcttgcggggatgaggctgattgaactcctggattcagataggcaggaacatcaagatttgggactgtatcatttgaaacaaatcaactcacccatgatgactgtaagcgcctacaacaattttttgaactatgtctccagcctcccttcaacaaaagcagggcccaaaattgtgtctcatttgctccatttagtggataacaaagagtcattggagaatatatctgaaaatgatgactacttaaagcaccagccagaaatttcactgcagatgcagttacttaggggattgtggcaaatttgtccacaagcttacttttcaatggtttcagaacatttactggttcttgccctgaaaactgcttatcaaagcaacactgttgctgcgtgttctccatttgttttgcaattccttcaagggagaacactgactttgggtgcgcttaacttacagtactttttcgaccacccagaaagcttgtcattgttgaggagcatccacttcccaatacgaggaaataagacatcacccagagcacatttttcagttctggaaacatgttttgacaaatcacaggtgccaactatagatcaggactatgcttctgcctttgaacctatgaatgaatgggagcgaaatttagctgaaaaagaggataatgtaaagagctatatggatatgcagcgcagggcatcaccagaccttagtactggctattggaaactttctccaaagcagtacaagattccctgtctagaagtcgatgtgaatgatattgatgttgtaggccaggatatgcttgagattctaatgacagttttctcagcttcacagcgcatcgaactccatttaaaccacagcagaggctttatagaaagcatccgcccagctcttgagctgtctaaggcctctgtcaccaagtgctccataagcaagttggaactcagcgcagccgaacaggaactgcttctcaccctgccttccctggaatctcttgaagtctcagggacaatccagtcacaagaccaaatctttcctaatctggataagttcctgtgcctgaaagaactgtctgtggatctggagggcaatataaatgttttttcagtcattcctgaagaatttccaaacttccaccatatggagaaattattgatccaaatttcagctgagtatgatccttccaaactagtaaaattaattcaaaattctccaaaccttcatgttttccatctgaagtgtaacttcttttcggattttgggtctctcatgactatgcttgtttcctgtaagaaactcacagaaattaagttttcggattcattttttcaagccgtcccatttgttgccagtttgccaaattttatttctctgaagatattaaatcttgaaggccagcaatttcctgatgaggaaacatcagaaaaatttgcctacattttaggttctcttagtaacctggaagaattgatccttcctactggggatggaatttatcgagtggccaaactgatcatccagcagtgtcagcagcttcattgtctccgagtcctctcatttttcaagactttgaatgatgacagcgtggtggaaattgccaaagtagcaatcagtggaggtttccagaaacttgagaacctaaagctttcaatcaatcacaagattacagaggaaggatacagaaatttctttcaagcactggacaacatgccaaacttgcaggagttggacatctccaggcatttcacagagtgtatcaaagctcaggccacaacagtcaagtctttgagtcaatgtgtgttacgactaccaaggctcattagactgaacatgttaagttggctcttggatgcagatgatattgcattgcttaatgtcatgaaagaaagacatcctcaatctaagtacttaactattctccagaaatggatactgccgttctctccaatcattcagaaataaaagattcagctaaaaactgctgaatcaataatttgtcttggggcatattgaggatgtaaaaaaagttgttgattaatgctaaaaaccaaattatccaaaattattttattaaatattgcatacaaaagaaaatgtgtaaggcttgctaaaaaacaaaacaaaacaaaacacagtcctgcatactcaccaccaagctcaagaaataaatcatcaccaatacctttgaggtccctgagtaatccaccccagctaaaggcaaacccttcaatcaagtttatacagcaaaccctccattgtccatggtcaacagggaaggggttggggacaggtctgccaatctatctaaaagccacaatatggaagaagtattcaatttatataataaatggctaacttaacggttgaatcactttcatacatggatgaaacgggtttaacacaggatccacatgaatcttctgtgggccaagagatgttccttaatccttgtagaacctgttttctatattgaactagctttggtacagtagagttaacttactttccatttatccactgccaatataaagaggaaacaggggttagggaaaaatgacttcattccagaggcttctcagagttcaacatatgctataatttagaattttcttatgaatccactctacttgggtagaaaatattttatctctagtgattgcatattatttccatatcatagtatttcatagtattatatttgatatgagtgtctatatcaatgtcagtgtccagaatttcgttcctaccagttaagtagttttctgaacggccagaagaccattcgaaattcatgatactactataagttggtaaacaaccatacttttatcctcatttttattctcactaagaaaaaagtcaactcccctccccttgcccaagtatgaaatatagggacagtatgtatggtgtggtctcatttgtttagaaaaccacttatgactgggtgcggtggctcacacctgtaatcccagcactttgggaggctgaggcgggcgaatcatttgaggtgaggaattcgagaccagcctggccagcatggtgaaaccccatctctactaaaaatacaaaaattagccaggtgtggtggcacatgcctgtagtcccagccactagggcggctgagacgcaagacttgcttgaacccgggaggcagaggttgcagtgagccaagatggcgccactgcattccagcctgggcaacagagcaagaccctgtctgtctcaaaacaaaaaacaaaaccacttatattgctagctacattaagaatttctgaatatgttactgagcttgcttgtggtaaccatttataatatcagaaagtatatgtacaccaaaacatgttgaacatccatgttgtacaactgaaatataaataattttgtcaattatacctaaataaaactggaaaaaaatttctggaagtttatatctaaaaatgttaatagtgcgtacctctaggaagtgggcctggaagccattcttacttttcagtctctcccattctgtactgttttttgttttactttcgtgcctgcattatttttctatttaaaacaaaaataaatctagtttagcact

SEQ ID NO: 159640 - DNA, 1078 bp, Homo sapiens; identical to SEQ ID NO: 159637
  Payload ID: 11245
  Gene Symbol: NAIP
  Gene Name: NLR family, apoptosis inhibitory protein
  ENST ID: ENST00000629198
  CDS Start-End: 76-672

SEQ ID NO: 159641 - DNA, 3414 bp, Homo sapiens
  Payload ID: 11246
  Gene Symbol: NLRC3
  Gene Name: NLR family, CARD domain containing 3
  ENST ID: ENST00000324659
  CDS Start-End: 76-3414
tgagaactcaggctggcacagggattcccagggcatctaccaccacgcagctggagcagggctgagcccaggagcatggagatggacgcccccaggccccccagtcttgctgtccctggagcagcatcgaggcccgggaggctgctggatggggggcacggcaggcagcaggttcaggccctctcttcacagctcctggaggtgatccccgactccatgaggaagcaagaggtgcggacgggcagggaggccggccagggccacggtacgggctccccagccgagcaggtgaaagccctcatggatctgctggctgggaagggcagtcaaggctcccaggccccgcaggccctggataggacaccggatgccccgctggggccctgcagcaatgactcaaggatacagaggcaccgcaaggccctgctgagcaaggtgggaggtggcccggagctgggcggaccctggcacaggctggcctccctcctgctggtggagggcctgacggacctgcagctgagggaacacgacttcacacaggtggaggccacccgcgggggcgggcaccccgccaggaccgtcgccctggaccggctcttcctgcctctctcccgggtgtctgtcccaccccgggtctccatcactatcggggtggccggcatgggcaagaccaccctggtgaggcacttcgtccgcctctgggcccatgggcaggtcggcaaggacttctcgctggtgctgcctctgaccttccgggatctcaacacccacgagaagctgtgtgccgaccgactcatctgctcggtcttcccgcacgtcggggagcccagcctggcggtggcagtcccagccagggccctcctgatcctggacggcttggatgagtgcaggacgcctctggacttctccaacaccgtggcctgcacggacccaaagaaggagatcccggtggaccacctgatcaccaacatcatccgtggcaacctctttccggaagtttccatctggatcacctcccgtcccagtgcatctggccagatcccagggggcctggtggaccggatgacggagatccggggctttaacgaggaggagatcaaggtgtgtttggagcagatgttccccgaggaccaggcccttctgggctggatgctgagccaagtgcaggctgacagggccctgtacctgatgtgcaccgtcccagccttctgcaggctcacggggatggcgctaggccacctgtggcgcagcaggacggggccccaggatgcagagctgtggcccccgaggaccctgtgcgagctctactcatggtactttaggatggccctcagcggggaggggcaggagaagggcaaggcaagccctcgcatcgagcaggtggcccatggtggccgcaagatggtggggacattgggccgtctggccttccatgggctgctcaagaagaaatacgtgttttacgagcaagacatgaaggcgtttggtgtagacctcgctctgctgcagggcgccccgtgcagctgcttcctgcagagagaggagacgttggcatcgtcagtggcctactgcttcacccacctgtccctgcaggagtttgtggcagccgcgtattactatggcgcatccaggagggccatcttcgacctcttcactgagagcggcgtatcctggcccaggctgggcttcctcacgcatttcaggagcgcagcccagcgggccatgcaggcagaggacgggaggctggacgtgttcctgcgcttcctctccggcctcttgtctccgagggtcaatgccctcctggccggctccctgctggcccaaggcgagcaccaggcctaccggacccaggtggctgagctcctgcagggctgcctgcgccccgatgccgcagtctgtgcacgggccatcaacgtgttgcactgcctgcatgagctgcagcacaccgagctggcccgcagcgtggaggaggccatggagagcggggccctggccaggctgactggtcccgcgcaccgcgctgccctggcctacctcctgcaggtgtccgacgcctgtgcccaggaggccaacctgtccctgagcctcagccagggcgtccttcagagcctgctgccccagctgctctactgccggaagctcaggctggacaccaaccagttccaggaccccgtgatggagctgctgggcagcgtgctgagtgggaaggactgtcgcattcagaagatcagcttggcggagaaccagatcagtaacaaaggggccaaagctctggccagatccctcttggtcaacagaagtctgacctctctggacctccgcggtaactccattggaccacaaggggccaaggcgctggcagacgctttgaagatcaaccgcaccctgacctccctgagcctccagggcaacaccgttagggatgatggtgccaggtccatggctgaggccttggcctccaaccggaccctctccatgctgcacctgcagaagaacagcatcgggcccatgggagcccagcggatggcagatgccttgaagcagaacaggagtctgaaagagctcatgttctccagtaatagtattggtgatggaggtgccaaggccctggctgaggccctgaaggtgaaccagggcctggagagcctggacctgcagagcaattccatcagtgacgcaggagtggcagcactgatgggggccctctgcaccaaccagaccctcctcagcctcagccttcgagaaaactccatcagtcccgagggagcccaggccatcgctcatgccctctgcgccaacagcaccctgaagaacctggacctgacagccaacctcctccacgaccagggtgcccgggccatcgcagtggcagtgagagaaaaccgcaccctcacctcccttcacctgcagtggaacttcatccaggccggcgctgcccaggccctgggacaagcactacagctcaacaggagcctcaccagcttagatttacaggagaacgccatcggggatgacggagcgtgtgcggtggcccgtgcactgaaggtcaacacagccctcactgctctctatctccaggtggcctcaattggtgcttcaggcgcccaggtgctaggggaagccttggctgtgaacagaaccttggagattctcgacttaagaggaaatgccattggggtggctggagccaaagccctggcaaatgctctgaaggtaaactcaagtctccggagactcaatcttcaagagaattctctggggatggacggggcgatatgcattgccacagcactgtctggaaaccacaggctccagcatatcaatctccagggaaaccacattggggactccggggccaggatgatctcagaggccatcaagacaaatgctcccacgtgcactgttgaaatgtga

SEQ ID NO: 159642 - DNA, 6401 bp, Homo sapiens
  Payload ID: 11246
  Gene Symbol: NLRC3
  Gene Name: NLR family, CARD domain containing 3
  Uniprot ID: Q7RTR2
  ENST ID: ENST00000359128
  CDS Start-End: 412-3609
acagccggtgggctcggtggggctgcagaaggtcggggctgcactgctctcggcccccacacggttggttggttggcgtggtaagtgccctgatccctggtcctgagaactcaggctggcacagggattcccagggcatctaccaccacgcagctggagcagggctgagcccaggagcatggagatggacgcccccaggccccccagtcttgctgtccctggagcagcatcgaggcccgggagaactgtggacaacggaaggctgagccccatccattgagttcctggggccccactggaggggctgctgtggccagggtgcacggtcacaaatgaagacaccaaggcgcagagaggtgactcagcctgccctcagtcacctatctgctcctggaggtgatccccgactccatgaggaagcaagaggtgcggacgggcagggaggccggccagggccacggtacgggctccccagccgagcaggtgaaagccctcatggatctgctggctgggaagggcagtcaaggctcccaggccccgcaggccctggataggacaccggatgccccgctggggccctgcagcaatgactcaaggatacagaggcaccgcaaggccctgctgagcaaggtgggaggtggcccggagctgggcggaccctggcacaggctggcctccctcctgctggtggagggcctgacggacctgcagctgagggaacacgacttcacacaggtggaggccacccgcgggggcgggcaccccgccaggaccgtcgccctggaccggctcttcctgcctctctcccgggtgtctgtcccaccccgggtctccatcactatcggggtggccggcatgggcaagaccaccctggtgaggcacttcgtccgcctctgggcccatgggcaggtcggcaaggacttctcgctggtgctgcctctgaccttccgggatctcaacacccacgagaagctgtgtgccgaccgactcatctgctcggtcttcccgcacgtcggggagcccagcctggcggtggcagtcccagccagggccctcctgatcctggacggcttggatgagtgcaggacgcctctggacttctccaacaccgtggcctgcacggacccaaagaaggagatcccggtggaccacctgatcaccaacatcatccgtggcaacctctttccggaagtttccatctggatcacctcccgtcccagtgcatctggccagatcccagggggcctggtggaccggatgacggagatccggggctttaacgaggaggagatcaaggtgtgtttggagcagatgttccccgaggaccaggcccttctgggctggatgctgagccaagtgcaggctgacagggccctgtacctgatgtgcaccgtcccagccttctgcaggctcacggggatggcgctaggccacctgtggcgcagcaggacggggccccaggatgcagagctgtggcccccgaggaccctgtgcgagctctactcatggtactttaggatggccctcagcggggaggggcaggagaagggcaaggcaagccctcgcatcgagcaggtggcccatggtggccgcaagatggtggggacattgggccgtctggccttccatgggctgctcaagaagaaatacgtgttttacgagcaagacatgaaggcgtttggtgtagacctcgctctgctgcagggcgccccgtgcagctgcttcctgcagagagaggagacgttggcatcgtcagtggcctactgcttcacccacctgtccctgcaggagtttgtggcagccgcgtattactatggcgcatccaggagggccatcttcgacctcttcactgagagcggcgtatcctggcccaggctgggcttcctcacgcatttcaggagcgcagcccagcgggccatgcaggcagaggacgggaggctggacgtgttcctgcgcttcctctccggcctcttgtctccgagggtcaatgccctcctggccggctccctgctggcccaaggcgagcaccaggcctaccggacccaggtggctgagctcctgcagggctgcctgcgccccgatgccgcagtctgtgcacgggccatcaacgtgttgcactgcctgcatgagctgcagcacaccgagctggcccgcagcgtggaggaggccatggagagcggggccctggccaggctgactggtcccgcgcaccgcgctgccctggcctacctcctgcaggtgtccgacgcctgtgcccaggaggccaacctgtccctgagcctcagccagggcgtccttcagagcctgctgccccagctgctctactgccggaagctcaggctggacaccaaccagttccaggaccccgtgatggagctgctgggcagcgtgctgagtgggaaggactgtcgcattcagaagatcagcttggcggagaaccagatcagtaacaaaggggccaaagctctggccagatccctcttggtcaacagaagtctgacctctctggacctccgcggtaactccattggaccacaaggggccaaggcgctggcagacgctttgaagatcaaccgcaccctgacctccctgagcctccagggcaacaccgttagggatgatggtgccaggtccatggctgaggccttggcctccaaccggaccctctccatgctgcacctgcagaagaacagcatcgggcccatgggagcccagcggatggcagatgccttgaagcagaacaggagtctgaaagagctcatgttctccagtaatagtattggtgatggaggtgccaaggccctggctgaggccctgaaggtgaaccagggcctggagagcctggacctgcagagcaattccatcagtgacgcaggagtggcagcactgatgggggccctctgcaccaaccagaccctcctcagcctcagccttcgagaaaactccatcagtcccgagggagcccaggccatcgctcatgccctctgcgccaacagcaccctgaagaacctggacctgacagccaacctcctccacgaccagggtgcccgggccatcgcagtggcagtgagagaaaaccgcaccctcacctcccttcacctgcagtggaacttcatccaggccggcgctgcccaggccctgggacaagcactacagctcaacaggagcctcaccagcttagatttacaggagaacgccatcggggatgacggagcgtgtgcggtggcccgtgcactgaaggtcaacacagccctcactgctctctatctccaggtggcctcaattggtgcttcaggcgcccaggtgctaggggaagccttggctgtgaacagaaccttggagattctcgacttaagaggaaatgccattggggtggctggagccaaagccctggcaaatgctctgaaggtaaactcaagtctccggagactcaatcttcaagagaattctctggggatggacggggcgatatgcattgccacagcactgtctggaaaccacaggctccagcatatcaatctccagggaaaccacattggggactccggggccaggatgatctcagaggccatcaagacaaatgctcccacgtgcactgttgaaatgtgatcctggtggacggatcaggagaatgggcagatgctcagctggaagcttttgaacagaaaggccgacttctggggggcctgtctgggagctgggaacgctgcttgctcagcacgagagccgggctctgcagggaggaaggagaggtgctgccggaggaggtcgtgagctcctcttctgctgcaggagtggtccaggcagggggtgacgggtactctgttatggcacagagaagggaggggccacccccaagggactaggggccaaaggcctgaaagctgagcagtacaggaggctggttccagctttacaccctgaggacttcatgtgtccccaacctttaaaaatgtttattactgcccctttccactcacctggttaaaaatcatcccatgctctgagatgagctgccacctcaagcccgtgaggagcatccgtttggtaggggtaacagaggggacccttctttatcttctcaagaagaagatttcagggtatcatccttacagacatgaaaaagctatgggaaaattgtgaagataaatgaaagttttaattctaggattctggaaacagagacagtaagagttctccaaggattttgccttttttgtttgtttttgagatggagtctcgctcttgtcgcccaggctggagtgcagtggcacgatctcagctccctgcaacctccgcctcccgggttcatgtgattctcctgcctcagcctccccagtagctgggaatacaggcacccgccaccatgcccggctaatttttgtagttttagtagagacggggtttcatcatgttggccaggctggtctcgaactcctgacctcaggtgatccatcagcctgggcctcccaaagtactgggattacaggcatgagccaccacacctggccccattttttatttattacaaaatcaaagacatgggtgatgcctggcacatgttgtctggagtctggcacactggttatcaatagcacattcagtgtattcagtgatgtcattctttatttatttttgagacagaatctgtcacccaggctggagtgcagtggcatgatctcagctcactgtaggctctacctcatgggttccagtgattctcctgcctcggcctcccaagtagttgggtctacaggcacgcaccaccacacccagctaatttttgtatttttagtagagatggggtttcaccatgttgatcaggctggtctttaactcctgacctcaagtgatccacccacctcagcctcccaaagtgctgggattacaggtgtgagccactgcacctggcagtgatgtcattccttactaggcttccaaagccactgctgtggccacagcttccatggagacaggcaagctgagcctctatgtggcaccaattcctgcagctgtttgtgttggagggaaaaaaatccaaatggacatcaacagctttcatcaactaaataaccacagaaaatatttatgaagactataaagcaatgattacttttgaattggaaaggaatcactattatttgaaatgtttcttcaaaagtgagcatccggacaggaaccatcatggatgctgaggccatggatgaaggcctactcgggaagatgatatccttgcagtctcaaaacggcaccccacaaaggtgatatcctaatttacaaagggaaaaaggtaccttaatctgaaatctggcaaatgcagcctcaacagaagtgacagaattgaacatcgccaataatgggacacacagacatcacatgcccccagtctgatgcaccacggagtcgtctctgatgtattcttgtcaaaaaatgtttgcctgattctaatcatgaaagaacaattagaaaaaatccaaattgacagatattctgcagaataaatggcctgacctcatcaaaaacatcaatgtcatgaaaaacacaaaacattgcagatagcgtgaaattaaagattacagagatataatttaatgcaagatctctgactggatcctagactgcaggaaaaagtctgctataaagaacatttggatcacttgtagtagctgggaaataaaacaaaacattatttgtaaaaggggggaaatctgaacatgggtcttgcagtatttatgacagtttttgcggggcagagatttctagattgacagctgttttagtactttcaaggtgatgctctgtctgctggtttgcattgtttctgtctgagttaagagactggcagaacacagagttgcagtagccaaacactggagaaagctgggccctacagaaacctaacgctgaagaaacctcaggagccaaactggtggagaaaacaaagagtcctccctctctcccttttcaaataatgatcatacatcttcaagctgtctgaaatggttaaggagttcagtctgtcgtcaggcacacaccagagccagctagcccacacagaccccatcagagcaaaacagacaagagaatttaattcatatccacatagaaaggacttctaggtaggaggtagaccctttagctcccttccaattaaaggagtccccaattctggcacctgagagtcccctgggtctaacagctatgatatttatgtagtgtgttgcttacctaaatgaatacaatttccttccagacacgtgacactgatattaaagtgctaatgagagggatctatttcttcttgtacgctaaaagagaaacagcagttcagatttcccatcagaagtccgaggactttgttcttgataactactaccaataaaaattgagtatttgaaaaa

SEQ ID NO: 159643 - DNA, 6041 bp, Homo sapiens
  Payload ID: 11246
  Gene Symbol: NLRC3
  Gene Name: NLR family, CARD domain containing 3
  Uniprot ID: Q7RTR2
  ENST ID: ENST00000448023
  CDS Start-End: 57-3254
gcaggcagcaggttcaggccctctcttcacagctcctggaggtgatccccgactccatgaggaagcaagaggtgcggacgggcagggaggccggccagggccacggtacgggctccccagccgagcaggtgaaagccctcatggatctgctggctgggaagggcagtcaaggctcccaggccccgcaggccctggataggacaccggatgccccgctggggccctgcagcaatgactcaaggatacagaggcaccgcaaggccctgctgagcaaggtgggaggtggcccggagctgggcggaccctggcacaggctggcctccctcctgctggtggagggcctgacggacctgcagctgagggaacacgacttcacacaggtggaggccacccgcgggggcgggcaccccgccaggaccgtcgccctggaccggctcttcctgcctctctcccgggtgtctgtcccaccccgggtctccatcactatcggggtggccggcatgggcaagaccaccctggtgaggcacttcgtccgcctctgggcccatgggcaggtcggcaaggacttctcgctggtgctgcctctgaccttccgggatctcaacacccacgagaagctgtgtgccgaccgactcatctgctcggtcttcccgcacgtcggggagcccagcctggcggtggcagtcccagccagggccctcctgatcctggacggcttggatgagtgcaggacgcctctggacttctccaacaccgtggcctgcacggacccaaagaaggagatcccggtggaccacctgatcaccaacatcatccgtggcaacctctttccggaagtttccatctggatcacctcccgtcccagtgcatctggccagatcccagggggcctggtggaccggatgacggagatccggggctttaacgaggaggagatcaaggtgtgtttggagcagatgttccccgaggaccaggcccttctgggctggatgctgagccaagtgcaggctgacagggccctgtacctgatgtgcaccgtcccagccttctgcaggctcacggggatggcgctaggccacctgtggcgcagcaggacggggccccaggatgcagagctgtggcccccgaggaccctgtgcgagctctactcatggtactttaggatggccctcagcggggaggggcaggagaagggcaaggcaagccctcgcatcgagcaggtggcccatggtggccgcaagatggtggggacattgggccgtctggccttccatgggctgctcaagaagaaatacgtgttttacgagcaagacatgaaggcgtttggtgtagacctcgctctgctgcagggcgccccgtgcagctgcttcctgcagagagaggagacgttggcatcgtcagtggcctactgcttcacccacctgtccctgcaggagtttgtggcagccgcgtattactatggcgcatccaggagggccatcttcgacctcttcactgagagcggcgtatcctggcccaggctgggcttcctcacgcatttcaggagcgcagcccagcgggccatgcaggcagaggacgggaggctggacgtgttcctgcgcttcctctccggcctcttgtctccgagggtcaatgccctcctggccggctccctgctggcccaaggcgagcaccaggcctaccggacccaggtggctgagctcctgcagggctgcctgcgccccgatgccgcagtctgtgcacgggccatcaacgtgttgcactgcctgcatgagctgcagcacaccgagctggcccgcagcgtggaggaggccatggagagcggggccctggccaggctgactggtcccgcgcaccgcgctgccctggcctacctcctgcaggtgtccgacgcctgtgcccaggaggccaacctgtccctgagcctcagccagggcgtccttcagagcctgctgccccagctgctctactgccggaagctcaggctggacaccaaccagttccaggaccccgtgatggagctgctgggcagcgtgctgagtgggaaggactgtcgcattcagaagatcagcttggcggagaaccagatcagtaacaaaggggccaaagctctggccagatccctcttggtcaacagaagtctgacctctctggacctccgcggtaactccattggaccacaaggggccaaggcgctggcagacgctttgaagatcaaccgcaccctgacctccctgagcctccagggcaacaccgttagggatgatggtgccaggtccatggctgaggccttggcctccaaccggaccctctccatgctgcacctgcagaagaacagcatcgggcccatgggagcccagcggatggcagatgccttgaagcagaacaggagtctgaaagagctcatgttctccagtaatagtattggtgatggaggtgccaaggccctggctgaggccctgaaggtgaaccagggcctggagagcctggacctgcagagcaattccatcagtgacgcaggagtggcagcactgatgggggccctctgcaccaaccagaccctcctcagcctcagccttcgagaaaactccatcagtcccgagggagcccaggccatcgctcatgccctctgcgccaacagcaccctgaagaacctggacctgacagccaacctcctccacgaccagggtgcccgggccatcgcagtggcagtgagagaaaaccgcaccctcacctcccttcacctgcagtggaacttcatccaggccggcgctgcccaggccctgggacaagcactacagctcaacaggagcctcaccagcttagatttacaggagaacgccatcggggatgacggagcgtgtgcggtggcccgtgcactgaaggtcaacacagccctcactgctctctatctccaggtggcctcaattggtgcttcaggcgcccaggtgctaggggaagccttggctgtgaacagaaccttggagattctcgacttaagaggaaatgccattggggtggctggagccaaagccctggcaaatgctctgaaggtaaactcaagtctccggagactcaatcttcaagagaattctctggggatggacggggcgatatgcattgccacagcactgtctggaaaccacaggctccagcatatcaatctccagggaaaccacattggggactccggggccaggatgatctcagaggccatcaagacaaatgctcccacgtgcactgttgaaatgtgatcctggtggacggatcaggagaatgggcagatgctcagctggaagcttttgaacagaaaggccgacttctggggggcctgtctgggagctgggaacgctgcttgctcagcacgagagccgggctctgcagggaggaaggagaggtgctgccggaggaggtcgtgagctcctcttctgctgcaggagtggtccaggcagggggtgacgggtactctgttatggcacagagaagggaggggccacccccaagggactaggggccaaaggcctgaaagctgagcagtacaggaggctggttccagctttacaccctgaggacttcatgtgtccccaacctttaaaaatgtttattactgcccctttccactcacctggttaaaaatcatcccatgctctgagatgagctgccacctcaagcccgtgaggagcatccgtttggtaggggtaacagaggggacccttctttatcttctcaagaagaagatttcagggtatcatccttacagacatgaaaaagctatgggaaaattgtgaagataaatgaaagttttaattctaggattctggaaacagagacagtaagagttctccaaggattttgccttttttgtttgtttttgagatggagtctcgctcttgtcgcccaggctggagtgcagtggcacgatctcagctccctgcaacctccgcctcccgggttcatgtgattctcctgcctcagcctccccagtagctgggaatacaggcacccgccaccatgcccggctaatttttgtagttttagtagagacggggtttcatcatgttggccaggctggtctcgaactcctgacctcaggtgatccatcagcctgggcctcccaaagtactgggattacaggcatgagccaccacacctggccccattttttatttattacaaaatcaaagacatgggtgatgcctggcacatgttgtctggagtctggcacactggttatcaatagcacattcagtgtattcagtgatgtcattctttatttatttttgagacagaatctgtcacccaggctggagtgcagtggcatgatctcagctcactgtaggctctacctcatgggttccagtgattctcctgcctcggcctcccaagtagttgggtctacaggcacgcaccaccacacccagctaatttttgtatttttagtagagatggggtttcaccatgttgatcaggctggtctttaactcctgacctcaagtgatccacccacctcagcctcccaaagtgctgggattacaggtgtgagccactgcacctggcagtgatgtcattccttactaggcttccaaagccactgctgtggccacagcttccatggagacaggcaagctgagcctctatgtggcaccaattcctgcagctgtttgtgttggagggaaaaaaatccaaatggacatcaacagctttcatcaactaaataaccacagaaaatatttatgaagactataaagcaatgattacttttgaattggaaaggaatcactattatttgaaatgtttcttcaaaagtgagcatccggacaggaaccatcatggatgctgaggccatggatgaaggcctactcgggaagatgatatccttgcagtctcaaaacggcaccccacaaaggtgatatcctaatttacaaagggaaaaaggtaccttaatctgaaatctggcaaatgcagcctcaacagaagtgacagaattgaacatcgccaataatgggacacacagacatcacatgcccccagtctgatgcaccacggagtcgtctctgatgtattcttgtcaaaaaatgtttgcctgattctaatcatgaaagaacaattagaaaaaatccaaattgacagatattctgcagaataaatggcctgacctcatcaaaaacatcaatgtcatgaaaaacacaaaacattgcagatagcgtgaaattaaagattacagagatataatttaatgcaagatctctgactggatcctagactgcaggaaaaagtctgctataaagaacatttggatcacttgtagtagctgggaaataaaacaaaacattatttgtaaaaggggggaaatctgaacatgggtcttgcagtatttatgacagtttttgcggggcagagatttctagattgacagctgttttagtactttcaaggtgatgctctgtctgctggtttgcattgtttctgtctgagttaagagactggcagaacacagagttgcagtagccaaacactggagaaagctgggccctacagaaacctaacgctgaagaaacctcaggagccaaactggtggagaaaacaaagagtcctccctctctcccttttcaaataatgatcatacatcttcaagctgtctgaaatggttaaggagttcagtctgtcgtcaggcacacaccagagccagctagcccacacagaccccatcagagcaaaacagacaagagaatttaattcatatccacatagaaaggacttctaggtaggaggtagaccctttagctcccttccaattaaaggagtccccaattctggcacctgagagtcccctgggtctaacagctatgatatttatgtagtgtgttgcttacctaaatgaatacaatttccttccagacacgtgacactgatattaaagtgctaatgagagggatctatttcttcttgtacgctaaaagagaaacagcagttcagatttcccatcagaagtccgaggactttgttcttgataactactaccaataaaaattgagtatttg

SEQ ID NO: 159644 - DNA, 588 bp, Homo sapiens
  Payload ID: 11246
  Gene Symbol: NLRC3
  Gene Name: NLR family, CARD domain containing 3
  ENST ID: ENST00000618137
  CDS Start-End: 1-588
cctccgcggtaactccattggaccacaaggggccaaggcgctggcagacgctttgaagatcaaccgcaccctgacctccctgagcctccagggcaacaccgttagggatgatggtgccaggtccatggctgaggccttggcctccaaccggaccctctccatgctgcacctgcagaagaacagcatcgggcccatgggagcccagcggatggcagatgccttgaagcagaacaggagtctgaaagagctcatgttctccagtaatagtattggtgatggaggtgccaaggccctggctgaggccctgaaggtgaaccagggcctggagagcctggacctgcagagcaattccatcagtgacgcaggagtggcagcactgatgggggccctctgcaccaaccagaccctcctcagcctcagccttcgagaaaactccatcagtcccgagggagcccaggccatcgctcatgccctctgcgccaacagcaccctgaagaacctggacctgcagtggaacttcatccaggccggcgctgcccaggccctgggacaagcactacagctcaacaggagcctcaccagcttaga

SEQ ID NO: 159645 - DNA, 6602 bp, Homo sapiens
  Payload ID: 11246
  Gene Symbol: NLRC3
  Gene Name: NLR family, CARD domain containing 3
  Uniprot ID: Q7RTR2
  ENST ID: ENST00000615877
  CDS Start-End: 482-2767
gccacagggacagccggtgggctcggtggggctgcagaaggtcggggctgcactgctctcggcccccacacggttggttggttggcgtggtaagtgccctgatccctggtcctgagaactcaggctggcacagggattcccagggcatctaccaccacgcagctggagcagggctgagcccaggagcatggagatggacgcccccaggccccccagtcttgctgtccctggagcagcatcgaggcccgggagggctgccatcagcagcagtgagccatcacctctgctggccacattgtgttttttctcctagaactgtggacaacggaaggctgagccccatccattgagttcctggggccccactggaggggctgctgtggccagggtgcacggtcacaaatgaagacaccaaggcgcagagaggtgactcagcctgccctcagtcacctatctgctcctggaggtgatccccgactccatgaggaagcaagaggtgcggacgggcagggaggccggccagggccacggtacgggctccccagccgagcaggtgaaagccctcatggatctgctggctgggaagggcagtcaaggctcccaggccccgcaggccctggataggacaccggatgccccgctggggccctgcagcaatgactcaaggatacagaggcaccgcaaggccctgctgagcaaggtgggaggtggcccggagctgggcggaccctggcacaggctggcctccctcctgctggtggagggcctgacggacctgcagctgagggaacacgacttcacacaggtggaggccacccgcgggggcgggcaccccgccaggaccgtcgccctggaccggctcttcctgcctctctcccgggtgtctgtcccaccccgggtctccatcactatcggggtggccggcatgggcaagaccaccctggtgaggcacttcgtccgcctctgggcccatgggcaggtcggcaaggacttctcgctggtgctgcctctgaccttccgggatctcaacacccacgagaagctgtgtgccgaccgactcatctgctcggtcttcccgcacgtcggggagcccagcctggcggtggcagtcccagccagggccctcctgatcctggacggcttggatgagtgcaggacgcctctggacttctccaacaccgtggcctgcacggacccaaagaaggagatcccggtggaccacctgatcaccaacatcatccgtggcaacctctttccggaagtttccatctggatcacctcccgtcccagtgcatctggccagatcccagggggcctggtggaccggatgacggagatccggggctttaacgaggaggagatcaaggtgtgtttggagcagatgttccccgaggaccaggcccttctgggctggatgctgagccaagtgcaggctgacagggccctgtacctgatgtgcaccgtcccagccttctgcaggctcacggggatggcgctaggccacctgtggcgcagcaggacggggccccaggatgcagagctgtggcccccgaggaccctgtgcgagctctactcatggtactttaggatggccctcagcggggaggggcaggagaagggcaaggcaagccctcgcatcgagcaggtggcccatggtggccgcaagatggtggggacattgggccgtctggccttccatgggctgctcaagaagaaatacgtgttttacgagcaagacatgaaggcgtttggtgtagacctcgctctgctgcagggcgccccgtgcagctgcttcctgcagagagaggagacgttggcatcgtcagtggcctactgcttcacccacctgtccctgcaggagtttgtggcagccgcgtattactatggcgcatccaggagggccatcttcgacctcttcactgagagcggcgtatcctggcccaggctgggcttcctcacgcatttcaggagcgcagcccagcgggccatgcaggcagaggacgggaggctggacgtgttcctgcgcttcctctccggcctcttgtctccgagggtcaatgccctcctggccggctccctgctggcccaaggcgagcaccaggcctaccggacccaggtggctgagctcctgcagggctgcctgcgccccgatgccgcagtctgtgcacgggccatcaacgtgttgcactgcctgcatgagctgcagcacaccgagctggcccgcagcgtggaggaggccatggagagcggggccctggccaggctgactggtcccgcgcaccgcgctgccctggcctacctcctgcaggtgtccgacgcctgtgcccaggaggccaacctgtccctgagcctcagccagggcgtccttcagagcctgctgccccagctgctctactgccggaagctcaggctggacaccaaccagttccaggaccccgtgatggagctgctgggcagcgtgctgagtgggaaggactgtcgcattcagaagatcagcttggcggagaaccagatcagtaacaaaggggccaaagctctggccagatccctcttggtcaacagaagtctgacctctctggacctccgcggtaactccattggaccacaaggggccaaggcgctggcagacgctttgaagatcaaccgcaccctgacctccctgagggtgaaattcatgtaccataaaattgactgttttaggcgggtcccagaggctgatgcctgtaatcccagcactttgggaggccaaggcaggtggatcacttgaggtcgggagttcgagaccagcctggccaacatgcctccagggcaacaccgttagggatgatggtgccaggtccatggctgaggccttggcctccaaccggaccctctccatgctgcacctgcagaagaacagcatcgggcccatgggagcccagcggatggcagatgccttgaagcagaacaggagtctgaaagagctcatgttctccagtaatagtattggtgatggaggtgccaaggccctggctgaggccctgaaggtgaaccagggcctggagagcctggacctgcagagcaattccatcagtgacgcaggagtggcagcactgatgggggccctctgcaccaaccagaccctcctcagcctcagccttcgagaaaactccatcagtcccgagggagcccaggccatcgctcatgccctctgcgccaacagcaccctgaagaacctggacctgacagccaacctcctccacgaccagggtgcccgggccatcgcagtggcagtgagagaaaaccgcaccctcacctcccttcacctgcagtggaacttcatccaggccggcgctgcccaggccctgggacaagcactacagctcaacaggagcctcaccagcttagatttacaggagaacgccatcggggatgacggagcgtgtgcggtggcccgtgcactgaaggtcaacacagccctcactgctctctatctccaggtggcctcaattggtgcttcaggcgcccaggtgctaggggaagccttggctgtgaacagaaccttggagattctcgacttaagaggaaatgccattggggtggctggagccaaagccctggcaaatgctctgaaggtaaactcaagtctccggagactcaatcttcaagagaattctctggggatggacggggcgatatgcattgccacagcactgtctggaaaccacaggctccagcatatcaatctccagggaaaccacattggggactccggggccaggatgatctcagaggccatcaagacaaatgctcccacgtgcactgttgaaatgtgatcctggtggacggatcaggagaatgggcagatgctcagctggaagcttttgaacagaaaggccgacttctggggggcctgtctgggagctgggaacgctgcttgctcagcacgagagccgggctctgcagggaggaaggagaggtgctgccggaggaggtcgtgagctcctcttctgctgcaggagtggtccaggcagggggtgacgggtactctgttatggcacagagaagggaggggccacccccaagggactaggggccaaaggcctgaaagctgagcagtacaggaggctggttccagctttacaccctgaggacttcatgtgtccccaacctttaaaaatgtttattactgcccctttccactcacctggttaaaaatcatcccatgctctgagatgagctgccacctcaagcccgtgaggagcatccgtttggtaggggtaacagaggggacccttctttatcttctcaagaagaagatttcagggtatcatccttacagacatgaaaaagctatgggaaaattgtgaagataaatgaaagttttaattctaggattctggaaacagagacagtaagagttctccaaggattttgccttttttgtttgtttttgagatggagtctcgctcttgtcgcccaggctggagtgcagtggcacgatctcagctccctgcaacctccgcctcccgggttcatgtgattctcctgcctcagcctccccagtagctgggaatacaggcacccgccaccatgcccggctaatttttgtagttttagtagagacggggtttcatcatgttggccaggctggtctcgaactcctgacctcaggtgatccatcagcctgggcctcccaaagtactgggattacaggcatgagccaccacacctggccccattttttatttattacaaaatcaaagacatgggtgatgcctggcacatgttgtctggagtctggcacactggttatcaatagcacattcagtgtattcagtgatgtcattctttatttatttttgagacagaatctgtcacccaggctggagtgcagtggcatgatctcagctcactgtaggctctacctcatgggttccagtgattctcctgcctcggcctcccaagtagttgggtctacaggcacgcaccaccacacccagctaatttttgtatttttagtagagatggggtttcaccatgttgatcaggctggtctttaactcctgacctcaagtgatccacccacctcagcctcccaaagtgctgggattacaggtgtgagccactgcacctggcagtgatgtcattccttactaggcttccaaagccactgctgtggccacagcttccatggagacaggcaagctgagcctctatgtggcaccaattcctgcagctgtttgtgttggagggaaaaaaatccaaatggacatcaacagctttcatcaactaaataaccacagaaaatatttatgaagactataaagcaatgattacttttgaattggaaaggaatcactattatttgaaatgtttcttcaaaagtgagcatccggacaggaaccatcatggatgctgaggccatggatgaaggcctactcgggaagatgatatccttgcagtctcaaaacggcaccccacaaaggtgatatcctaatttacaaagggaaaaaggtaccttaatctgaaatctggcaaatgcagcctcaacagaagtgacagaattgaacatcgccaataatgggacacacagacatcacatgcccccagtctgatgcaccacggagtcgtctctgatgtattcttgtcaaaaaatgtttgcctgattctaatcatgaaagaacaattagaaaaaatccaaattgacagatattctgcagaataaatggcctgacctcatcaaaaacatcaatgtcatgaaaaacacaaaacattgcagatagcgtgaaattaaagattacagagatataatttaatgcaagatctctgactggatcctagactgcaggaaaaagtctgctataaagaacatttggatcacttgtagtagctgggaaataaaacaaaacattatttgtaaaaggggggaaatctgaacatgggtcttgcagtatttatgacagtttttgcggggcagagatttctagattgacagctgttttagtactttcaaggtgatgctctgtctgctggtttgcattgtttctgtctgagttaagagactggcagaacacagagttgcagtagccaaacactggagaaagctgggccctacagaaacctaacgctgaagaaacctcaggagccaaactggtggagaaaacaaagagtcctccctctctcccttttcaaataatgatcatacatcttcaagctgtctgaaatggttaaggagttcagtctgtcgtcaggcacacaccagagccagctagcccacacagaccccatcagagcaaaacagacaagagaatttaattcatatccacatagaaaggacttctaggtaggaggtagaccctttagctcccttccaattaaaggagtccccaattctggcacctgagagtcccctgggtctaacagctatgatatttatgtagtgtgttgcttacctaaatgaatacaatttccttccagacacgtgacactgatattaaagtgctaatgagagggatctatttcttcttgtacgctaaaagagaaacagcagttcagatttcccatcagaagtccgaggactttgttcttgataactactaccaataaaaattgagtatttg

SEQ ID NO: 159646 - DNA, 1362 bp, Homo sapiens
  Payload ID: 11247
  Gene Symbol: NLRC4
  Gene Name: NLR family, CARD domain containing 4
  Uniprot ID: Q9NPP4
  ENST ID: ENST00000342905
  CDS Start-End: 265-1344
tgtttatactccggagggtgtccccgtgcgtcatcggtggagtggaccaaaactggtgatctgtttgccctgtgtgaccttgcccagaaccctgctgactgagagaacacatctgctggaagtcctctgggattcaaggtacagggaatgaagagtagttttacagaaaaaagaggacaatattgggatcacctttgacctttccatttggaaataatattttctattgtgttatagaaaggtgggaagctttcatccagaacaatgaatttcataaaggacaatagccgagcccttattcaaagaatgggaatgactgttataaagcaaatcacagatgacctatttgtatggaatgttctgaatcgcgaagaagtaaacatcatttgctgcgagaaggtggagcaggatgctgctagagggatcattcacatgattttgaaaaagggttcagagtcctgtaacctctttcttaaatcccttaaggagtggaactatcctctatttcaggacttgaatggacaaagtggtctgactgacagcttgggtaacttgaagaaccttacaaagctcataatggataacataaagatgaatgaagaagatgctataaaactagctgaaggcctgaaaaacctgaagaagatgtgtttatttcatttgacccacttgtctgacattggagagggaatggattacatagtcaagtctctgtcaagtgaaccctgtgaccttgaagaaattcaattagtctcctgctgcttgtctgcaaatgcagtgaaaatcctagctcagaatcttcacaatttggtcaaactgagcattcttgatttatcagaaaattacctggaaaaagatggaaatgaagctcttcatgaactgatcgacaggatgaacgtgctagaacagctcaccgcactgatgctgccctggggctgtgacgtgcaaggcagcctgagcagcctgttgaaacatttggaggaggtcccacaactcgtcaagcttgggttgaaaaactggagactcacagatacagagattagaattttaggtgcattttttggaaagaaccctctgaaaaacttccagcagttgaatttggcgggaaatcgtgtgagcagtgatggatggcttgccttcatgggtgtatttgagaatcttaagcaattagtgttttttgactttagtactaaagaatttctacctgatccagcattagtcagaaaacttagccaagtgttatccaagttaacttttctgcaagaagctaggcttgttgggtggcaatttgatgatgatgatctcagtgttattacaggtgcttttaaactagtaactgcttaaataaagtgtactcgaagc

SEQ ID NO: 159647 - DNA, 3359 bp, Homo sapiens
  Payload ID: 11247
  Gene Symbol: NLRC4
  Gene Name: NLR family, CARD domain containing 4
  Uniprot ID: Q9NPP4
  ENST ID: ENST00000360906
  CDS Start-End: 265-3339
tgtttatactccggagggtgtccccgtgcgtcatcggtggagtggaccaaaactggtgatctgtttgccctgtgtgaccttgcccagaaccctgctgactgagagaacacatctgctggaagtcctctgggattcaaggtacagggaatgaagagtagttttacagaaaaaagaggacaatattgggatcacctttgacctttccatttggaaataatattttctattgtgttatagaaaggtgggaagctttcatccagaacaatgaatttcataaaggacaatagccgagcccttattcaaagaatgggaatgactgttataaagcaaatcacagatgacctatttgtatggaatgttctgaatcgcgaagaagtaaacatcatttgctgcgagaaggtggagcaggatgctgctagagggatcattcacatgattttgaaaaagggttcagagtcctgtaacctctttcttaaatcccttaaggagtggaactatcctctatttcaggacttgaatggacaaagtctttttcatcagacatcagaaggagacttggacgatttggctcaggatttaaaggacttgtaccataccccatcttttctgaacttttatccccttggtgaagatattgacattatttttaacttgaaaagcaccttcacagaacctgtcctgtggaggaaggaccaacaccatcaccgcgtggagcagctgaccctgaatggcctcctgcaggctcttcagagcccctgcatcattgaaggggaatctggcaaaggcaagtccactctgctgcagcgaattgccatgctctggggctccggaaagtgcaaggctctgaccaagttcaaattcgtcttcttcctccgtctcagcagggcccagggtggactttttgaaaccctctgtgatcaactcctggatatacctggcacaatcaggaagcagacattcatggccatgctgctgaagctgcggcagagggttcttttccttcttgatggctacaatgaattcaagccccagaactgcccagaaatcgaagccctgataaaggaaaaccaccgcttcaagaacatggtcatcgtcaccactaccactgagtgcctgaggcacatacggcagtttggtgccctgactgctgaggtgggggatatgacagaagacagcgcccaggctctcatccgagaagtgctgatcaaggagcttgctgaaggcttgttgctccaaattcagaaatccaggtgcttgaggaatctcatgaagacccctctctttgtggtcatcacttgtgcaatccagatgggtgaaagtgagttccactctcacacacaaacaacgctgttccataccttctatgatctgttgatacagaaaaacaaacacaaacataaaggtgtggctgcaagtgacttcattcggagcctggaccactgtggagacctagctctggagggtgtgttctcccacaagtttgatttcgaactgcaggatgtgtccagcgtgaatgaggatgtcctgctgacaactgggctcctctgtaaatatacagctcaaaggttcaagccaaagtataaattctttcacaagtcattccaggagtacacagcaggacgaagactcagcagtttattgacgtctcatgagccagaggaggtgaccaaggggaatggttacttgcagaaaatggtttccatttcggacattacatccacttatagcagcctgctccggtacacctgtgggtcatctgtggaagccaccagggctgttatgaagcacctcgcagcagtgtatcaacacggctgccttctcggactttccatcgccaagaggcctctctggagacaggaatctttgcaaagtgtgaaaaacaccactgagcaagaaattctgaaagccataaacatcaattcctttgtagagtgtggcatccatttatatcaagagagtacatccaaatcagccctgagccaagaatttgaagctttctttcaaggtaaaagcttatatatcaactcagggaacatccccgattacttatttgacttctttgaacatttgcccaattgtgcaagtgccctggacttcattaaactggacttttatgggggagctatggcttcatgggaaaaggctgcagaagacacaggtggaatccacatggaagaggccccagaaacctacattcccagcagggctgtatctttgttcttcaactggaagcaggaattcaggactctggaggtcacactccgggatttcagcaagttgaataagcaagatatcagatatctggggaaaatattcagctctgccacaagcctcaggctgcaaataaagagatgtgctggtgtggctggaagcctcagtttggtcctcagcacctgtaagaacatttattctctcatggtggaagccagtcccctcaccatagaagatgagaggcacatcacatctgtaacaaacctgaaaaccttgagtattcatgacctacagaatcaacggctgccgggtggtctgactgacagcttgggtaacttgaagaaccttacaaagctcataatggataacataaagatgaatgaagaagatgctataaaactagctgaaggcctgaaaaacctgaagaagatgtgtttatttcatttgacccacttgtctgacattggagagggaatggattacatagtcaagtctctgtcaagtgaaccctgtgaccttgaagaaattcaattagtctcctgctgcttgtctgcaaatgcagtgaaaatcctagctcagaatcttcacaatttggtcaaactgagcattcttgatttatcagaaaattacctggaaaaagatggaaatgaagctcttcatgaactgatcgacaggatgaacgtgctagaacagctcaccgcactgatgctgccctggggctgtgacgtgcaaggcagcctgagcagcctgttgaaacatttggaggaggtcccacaactcgtcaagcttgggttgaaaaactggagactcacagatacagagattagaattttaggtgcattttttggaaagaaccctctgaaaaacttccagcagttgaatttggcgggaaatcgtgtgagcagtgatggatggcttgccttcatgggtgtatttgagaatcttaagcaattagtgttttttgactttagtactaaagaatttctacctgatccagcattagtcagaaaacttagccaagtgttatccaagttaacttttctgcaagaagctaggcttgttgggtggcaatttgatgatgatgatctcagtgttattacaggtgcttttaaactagtaactgcttaaataaagtgtactcgaagcca

SEQ ID NO: 159648 - DNA, 3581 bp, Homo sapiens
  Payload ID: 11247
  Gene Symbol: NLRC4
  Gene Name: NLR family, CARD domain containing 4
  Uniprot ID: Q9NPP4
  ENST ID: ENST00000404025
  CDS Start-End: 490-3564
agaatgtcatcctcaagggaagtgcagagagatttcttcagtcctcagctgagtataagctggcctcctggagtctgtgaacacaaacgtccaatgtgagtgtgcctgtgcaagcccctggctgtttatactccggagggtgtccccgtgcgtcatcggtggagtggaccaaaactggtgatctgtttgccctgtgtgaccttgcccagaaccctgctgactgagagaacacatctgctggaagtcctctgggattcaaggtacagggagaactcgaggcctcactgaaacggaaagcaaatacaaagaaactttattttaaaaacatgtcttggtctcccaagaagagggcaattggattgctcagccagaatgaagagtagttttacagaaaaaagaggacaatattgggatcacctttgacctttccatttggaaataatattttctattgtgttatagaaaggtgggaagctttcatccagaacaatgaatttcataaaggacaatagccgagcccttattcaaagaatgggaatgactgttataaagcaaatcacagatgacctatttgtatggaatgttctgaatcgcgaagaagtaaacatcatttgctgcgagaaggtggagcaggatgctgctagagggatcattcacatgattttgaaaaagggttcagagtcctgtaacctctttcttaaatcccttaaggagtggaactatcctctatttcaggacttgaatggacaaagtctttttcatcagacatcagaaggagacttggacgatttggctcaggatttaaaggacttgtaccataccccatcttttctgaacttttatccccttggtgaagatattgacattatttttaacttgaaaagcaccttcacagaacctgtcctgtggaggaaggaccaacaccatcaccgcgtggagcagctgaccctgaatggcctcctgcaggctcttcagagcccctgcatcattgaaggggaatctggcaaaggcaagtccactctgctgcagcgaattgccatgctctggggctccggaaagtgcaaggctctgaccaagttcaaattcgtcttcttcctccgtctcagcagggcccagggtggactttttgaaaccctctgtgatcaactcctggatatacctggcacaatcaggaagcagacattcatggccatgctgctgaagctgcggcagagggttcttttccttcttgatggctacaatgaattcaagccccagaactgcccagaaatcgaagccctgataaaggaaaaccaccgcttcaagaacatggtcatcgtcaccactaccactgagtgcctgaggcacatacggcagtttggtgccctgactgctgaggtgggggatatgacagaagacagcgcccaggctctcatccgagaagtgctgatcaaggagcttgctgaaggcttgttgctccaaattcagaaatccaggtgcttgaggaatctcatgaagacccctctctttgtggtcatcacttgtgcaatccagatgggtgaaagtgagttccactctcacacacaaacaacgctgttccataccttctatgatctgttgatacagaaaaacaaacacaaacataaaggtgtggctgcaagtgacttcattcggagcctggaccactgtggagacctagctctggagggtgtgttctcccacaagtttgatttcgaactgcaggatgtgtccagcgtgaatgaggatgtcctgctgacaactgggctcctctgtaaatatacagctcaaaggttcaagccaaagtataaattctttcacaagtcattccaggagtacacagcaggacgaagactcagcagtttattgacgtctcatgagccagaggaggtgaccaaggggaatggttacttgcagaaaatggtttccatttcggacattacatccacttatagcagcctgctccggtacacctgtgggtcatctgtggaagccaccagggctgttatgaagcacctcgcagcagtgtatcaacacggctgccttctcggactttccatcgccaagaggcctctctggagacaggaatctttgcaaagtgtgaaaaacaccactgagcaagaaattctgaaagccataaacatcaattcctttgtagagtgtggcatccatttatatcaagagagtacatccaaatcagccctgagccaagaatttgaagctttctttcaaggtaaaagcttatatatcaactcagggaacatccccgattacttatttgacttctttgaacatttgcccaattgtgcaagtgccctggacttcattaaactggacttttatgggggagctatggcttcatgggaaaaggctgcagaagacacaggtggaatccacatggaagaggccccagaaacctacattcccagcagggctgtatctttgttcttcaactggaagcaggaattcaggactctggaggtcacactccgggatttcagcaagttgaataagcaagatatcagatatctggggaaaatattcagctctgccacaagcctcaggctgcaaataaagagatgtgctggtgtggctggaagcctcagtttggtcctcagcacctgtaagaacatttattctctcatggtggaagccagtcccctcaccatagaagatgagaggcacatcacatctgtaacaaacctgaaaaccttgagtattcatgacctacagaatcaacggctgccgggtggtctgactgacagcttgggtaacttgaagaaccttacaaagctcataatggataacataaagatgaatgaagaagatgctataaaactagctgaaggcctgaaaaacctgaagaagatgtgtttatttcatttgacccacttgtctgacattggagagggaatggattacatagtcaagtctctgtcaagtgaaccctgtgaccttgaagaaattcaattagtctcctgctgcttgtctgcaaatgcagtgaaaatcctagctcagaatcttcacaatttggtcaaactgagcattcttgatttatcagaaaattacctggaaaaagatggaaatgaagctcttcatgaactgatcgacaggatgaacgtgctagaacagctcaccgcactgatgctgccctggggctgtgacgtgcaaggcagcctgagcagcctgttgaaacatttggaggaggtcccacaactcgtcaagcttgggttgaaaaactggagactcacagatacagagattagaattttaggtgcattttttggaaagaaccctctgaaaaacttccagcagttgaatttggcgggaaatcgtgtgagcagtgatggatggcttgccttcatgggtgtatttgagaatcttaagcaattagtgttttttgactttagtactaaagaatttctacctgatccagcattagtcagaaaacttagccaagtgttatccaagttaacttttctgcaagaagctaggcttgttgggtggcaatttgatgatgatgatctcagtgttattacaggtgcttttaaactagtaactgcttaaataaagtgtactcgaag

SEQ ID NO: 159649 - DNA, 3355 bp, Homo sapiens
  Payload ID: 11247
  Gene Symbol: NLRC4
  Gene Name: NLR family, CARD domain containing 4
  Uniprot ID: Q9NPP4
  ENST ID: ENST00000402280
  CDS Start-End: 262-3336
acactgtcctctcacagaacaagaaggtatctggtctacaagaactcgaggcctcactgaaacggaaagcaaatacaaagaaactttattttaaaaacatgtcttggtctcccaagaagagggcaattggattgctcagccagaatgaagagtagttttacagaaaaaagaggacaatattgggatcacctttgacctttccatttggaaataatattttctattgtgttatagaaaggtgggaagctttcatccagaacaatgaatttcataaaggacaatagccgagcccttattcaaagaatgggaatgactgttataaagcaaatcacagatgacctatttgtatggaatgttctgaatcgcgaagaagtaaacatcatttgctgcgagaaggtggagcaggatgctgctagagggatcattcacatgattttgaaaaagggttcagagtcctgtaacctctttcttaaatcccttaaggagtggaactatcctctatttcaggacttgaatggacaaagtctttttcatcagacatcagaaggagacttggacgatttggctcaggatttaaaggacttgtaccataccccatcttttctgaacttttatccccttggtgaagatattgacattatttttaacttgaaaagcaccttcacagaacctgtcctgtggaggaaggaccaacaccatcaccgcgtggagcagctgaccctgaatggcctcctgcaggctcttcagagcccctgcatcattgaaggggaatctggcaaaggcaagtccactctgctgcagcgaattgccatgctctggggctccggaaagtgcaaggctctgaccaagttcaaattcgtcttcttcctccgtctcagcagggcccagggtggactttttgaaaccctctgtgatcaactcctggatatacctggcacaatcaggaagcagacattcatggccatgctgctgaagctgcggcagagggttcttttccttcttgatggctacaatgaattcaagccccagaactgcccagaaatcgaagccctgataaaggaaaaccaccgcttcaagaacatggtcatcgtcaccactaccactgagtgcctgaggcacatacggcagtttggtgccctgactgctgaggtgggggatatgacagaagacagcgcccaggctctcatccgagaagtgctgatcaaggagcttgctgaaggcttgttgctccaaattcagaaatccaggtgcttgaggaatctcatgaagacccctctctttgtggtcatcacttgtgcaatccagatgggtgaaagtgagttccactctcacacacaaacaacgctgttccataccttctatgatctgttgatacagaaaaacaaacacaaacataaaggtgtggctgcaagtgacttcattcggagcctggaccactgtggagacctagctctggagggtgtgttctcccacaagtttgatttcgaactgcaggatgtgtccagcgtgaatgaggatgtcctgctgacaactgggctcctctgtaaatatacagctcaaaggttcaagccaaagtataaattctttcacaagtcattccaggagtacacagcaggacgaagactcagcagtttattgacgtctcatgagccagaggaggtgaccaaggggaatggttacttgcagaaaatggtttccatttcggacattacatccacttatagcagcctgctccggtacacctgtgggtcatctgtggaagccaccagggctgttatgaagcacctcgcagcagtgtatcaacacggctgccttctcggactttccatcgccaagaggcctctctggagacaggaatctttgcaaagtgtgaaaaacaccactgagcaagaaattctgaaagccataaacatcaattcctttgtagagtgtggcatccatttatatcaagagagtacatccaaatcagccctgagccaagaatttgaagctttctttcaaggtaaaagcttatatatcaactcagggaacatccccgattacttatttgacttctttgaacatttgcccaattgtgcaagtgccctggacttcattaaactggacttttatgggggagctatggcttcatgggaaaaggctgcagaagacacaggtggaatccacatggaagaggccccagaaacctacattcccagcagggctgtatctttgttcttcaactggaagcaggaattcaggactctggaggtcacactccgggatttcagcaagttgaataagcaagatatcagatatctggggaaaatattcagctctgccacaagcctcaggctgcaaataaagagatgtgctggtgtggctggaagcctcagtttggtcctcagcacctgtaagaacatttattctctcatggtggaagccagtcccctcaccatagaagatgagaggcacatcacatctgtaacaaacctgaaaaccttgagtattcatgacctacagaatcaacggctgccgggtggtctgactgacagcttgggtaacttgaagaaccttacaaagctcataatggataacataaagatgaatgaagaagatgctataaaactagctgaaggcctgaaaaacctgaagaagatgtgtttatttcatttgacccacttgtctgacattggagagggaatggattacatagtcaagtctctgtcaagtgaaccctgtgaccttgaagaaattcaattagtctcctgctgcttgtctgcaaatgcagtgaaaatcctagctcagaatcttcacaatttggtcaaactgagcattcttgatttatcagaaaattacctggaaaaagatggaaatgaagctcttcatgaactgatcgacaggatgaacgtgctagaacagctcaccgcactgatgctgccctggggctgtgacgtgcaaggcagcctgagcagcctgttgaaacatttggaggaggtcccacaactcgtcaagcttgggttgaaaaactggagactcacagatacagagattagaattttaggtgcattttttggaaagaaccctctgaaaaacttccagcagttgaatttggcgggaaatcgtgtgagcagtgatggatggcttgccttcatgggtgtatttgagaatcttaagcaattagtgttttttgactttagtactaaagaatttctacctgatccagcattagtcagaaaacttagccaagtgttatccaagttaacttttctgcaagaagctaggcttgttgggtggcaatttgatgatgatgatctcagtgttattacaggtgcttttaaactagtaactgcttaaataaagtgtactcgaagcc

SEQ ID NO: 159650 - DNA, 6822 bp, Homo sapiens
  Payload ID: 11248
  Gene Symbol: NLRC5
  Gene Name: NLR family, CARD domain containing 5
  Uniprot ID: Q86WI3
  ENST ID: ENST00000262510
  CDS Start-End: 226-5826
gcagcagccgccagttccatgcactggcggagcagctctaggcggcggcttctactttcagtttcgtgcagagcgcggaggagccgcgagcgctgagggagtctgcactatggaaacaacctgtcaatccagctcaaggcacacatagcccagacacccatgagaccctctccgtggggaccctagagcacctatcatgaacgaggagaccaaggctggctcctcatggaccccgttggcctccagctcggcaacaagaacctgtggagctgtcttgtgaggctgctcaccaaagacccagaatggctgaacgccaagatgaagttcttcctccccaacacggacctggattccaggaacgagaccttggaccctgaacagagagtcatcctgcaactcaacaagctgcatgtccagggttcggacacctggcagtctttcattcattgtgtgtgcatgcagctggaggtgcctctggacctggaggtgctgctgctgagtacttttggctatgatgatgggttcaccagccagctgggagctgaggggaaaagccaacctgaatctcagctccaccatggcctgaagcgcccacatcagagctgtgggtcctcaccccgccggaagcagtgcaagaagcagcagctagagttggccaagaagtacctgcagctcctgcggacctctgcccagcagcgctacaggagccaaatccctgggtcagggcagccccacgccttccaccaggtctatgtccctccaatcctgcgccgggccacagcatccttagacactccggagggggccattatgggggacgtcaaggtggaagatggtgctgacgtgagcatctcggacctcttcaacaccagggttaacaagggcccgagggtgaccgtgcttttggggaaggctggcatgggcaagaccacgctggcccaccggctctgccagaagtgggcagagggccatctgaactgtttccaggccctgttcctttttgaattccgccagctcaacttgatcacgaggttcctgacaccgtccgagctcctttttgatctgtacctgagccctgaatcggaccacgacactgtcttccagtacctggagaagaacgctgaccaagtcctgctgatctttgatgggctagatgaggccctccagcctatgggtcctgatggcccaggcccagtcctcacccttttctcccatctctgcaatgggaccctcctgcctggctgccgggtgatggctacctcccgtccagggaagctgcctgcctgcctgcctgcagaggcagccatggtccacatgttgggctttgatgggccacgggtggaagaatatgtgaatcacttcttcagcgcccagccatcgcgggagggggccctggtggagttacagacaaatggacgtctccgaagcctgtgtgcggtgcccgcactgtgccaagtcgcctgtctctgcctccaccatctgcttcctgaccacgccccaggccagtctgtggccctcctgcccaacatgactcagctctatatgcagatggtgctcgccctcagcccccctgggcacttgcccacctcgtccctactggacctgggggaggtggccctgaggggcctggagacagggaaggttatcttctatgcaaaagatattgctccacccttgatagcttttggggccactcacagcctgctgacttccttctgcgtctgcacaggccctgggcaccagcagacaggctatgctttcacccacctcagcctgcaggagtttcttgctgccctgcacctgatggccagccccaaggtgaacaaagacacacttacccagtatgttaccctccattcccgctgggtacagcggaccaaagctagactgggcctctcagaccacctccccaccttcctggcgggcctggcatcctgcacctgccgccccttccttagccacctggcgcagggcaatgaggactgtgtgggtgccaagcaggctgctgtagtgcaggtgttgaagaagttggccacccgcaagctcacagggccaaaggttgtagagctgtgtcactgtgtggatgagacacaggagcctgagctggccagtctcaccgcacaaagcctcccctatcaactgcccttccacaatttcccactgacctgcaccgacctggccaccctgaccaacatcctagagcacagggaggcccccatccacctggattttgatggctgtcccctggagccccactgccctgaggctctggtaggctgtgggcagatagagaatctcagctttaagagcaggaagtgtggggatgcctttgcagaagccctctccaggagcttgccgacaatggggaggctgcagatgctggggttagcaggaagtaaaatcactgcccgaggcatcagccacctggtgaaagctttgcctctctgtccacagctgaaagaagtcagttttcgggacaaccagctcagtgaccaggtggtgctgaacattgtggaggttctccctcacctaccacggctccggaagcttgacctgagcagcaacagcatctgcgtgtcaaccctactctgcttggcaagggtggcagtcacgtgtcctaccgtcaggatgcttcaggccagggaggcggacctcatcttccttctttccccgcccacagagacaactgcagagctacaaagagctccagacctgcaggaaagtgacggccagaggaaaggggctcagagcagaagcttgacgctcaggctgcagaagtgtcagctccaggtccacgatgcggaggccctcatagccctgctccaggaaggccctcacctggaggaagtggacctctcagggaaccagctggaagatgaaggctgtcggctgatggcagaggctgcatcccagctgcacatcgccaggaagctggacctcagtaacaacgggctttctgtggccggggtgcattgtgtgctgagggccgtgagtgcgtgctggaccctggcagagctgcacatcagcctgcagcacaaaactgtgatcttcatgtttgcccaggagccagaggagcagaaggggccccaggagagggctgcatttcttgacagcctcatgctccagatgccctctgagctgcctctgagctcccgaaggatgaggctgacacattgtggcctccaagaaaagcacctagagcagctctgcaaggctctgggaggaagctgccacctcggtcacctccacctcgacttctcaggcaatgctctgggggatgaaggtgcagcccggctggctcagctgctcccagggctgggagctctgcagtccttgaacctcagtgagaacggtttgtccctggatgccgtgttgggtttggttcggtgcttctccactctgcagtggctcttccgcttggacatcagctttgaaagccaacacatcctcctgagaggggacaagacaagcagggatatgtgggccactggatctttgccagacttcccagctgcagccaagttcttagggttccgtcagcgctgcatccccaggagcctctgcctcagtgagtgtcctctggagcccccaagcctcacccgcctctgtgccactctgaaggactgcccgggacccctggaactgcaattgtcctgtgagttcctgagtgaccagagcctggagactctactggactgcttacctcaactccctcagctgagcctgctgcagctgagccagacgggactgtccccgaaaagccccttcctgctggccaacaccttaagcctgtgtccacgggttaaaaaggtggatctcaggtccctgcaccatgcaactttgcacttcagatccaacgaggaggaggaaggcgtgtgctgtggcaggttcacaggctgcagcctcagccaggagcacgtagagtcactctgctggttgctgagcaagtgtaaagacctcagccaggtggatctctcagcaaacctgctgggcgacagcggactcagatgccttctggaatgtctgccgcaggtgcccatctccggtttgcttgatctgagtcacaacagcatttctcaggaaagtgccctgtacctgctggagacactgccctcctgcccacgtgtccgggaggcctcagtgaacctgggctctgagcagagcttccggattcacttctccagagaggaccaggctgggaagacactcaggctaagtgagtgcagcttccggccagagcacgtgtccaggctggccaccggcttgagcaagtccctgcagctgacggagctcacgctgacccagtgctgcctgggccagaagcagctggccatcctcctgagcttggtggggcgacccgcagggctgttcagcctcagggtgcaggagccgtgggcggacagagccagggttctctccctgttagaagtctgcgcccaggcctcaggcagtgtcactgaaatcagcatctccgagacccagcagcagctctgtgtccagctggaatttcctcgccaggaagagaatccagaagctgtggcactcaggttggctcactgtgaccttggagcccaccacagccttcttgtcgggcagctgatggagacatgtgccaggctgcagcagctcagcttgtctcaggttaacctctgtgaggacgatgatgccagttccctgctgctgcagagcctcctgctgtccctctctgagctgaagacatttcggctgacctccagctgtgtgagcaccgagggcctcgcccacctggcatctggtctgggccactgccaccacttggaggagctggacttgtctaacaatcaatttgatgaggagggcaccaaggcgctgatgagggcccttgaggggaaatggatgctaaagaggctggacctcagtcaccttctgctgaacagctccaccttggccttgcttactcacagactaagccagatgacctgcctgcagagcctcagactgaacaggaacagtatcggtgatgtcggttgctgccacctttctgaggctctcagggctgccaccagcctagaggagctggacttgagccacaaccagattggagacgctggtgtccagcacttagctaccatcctgcctgggctgccagagctcaggaagatagacctctcagggaatagcatcagctcagccgggggagtgcagttggcagagtctctcgttctttgcaggcgcctggaggagttgatgcttggctgcaatgccctgggggatcccacagccctggggctggctcaggagctgccccagcacctgagggtcctacacctaccattcagccatctgggcccaggtggggccctgagcctggcccaggccctggatggatccccccatttggaagagatcagcttggcggaaaacaacctggctggaggggtcctgcgtttctgtatggagctcccgctgctcagacagatagacctggtttcctgtaagattgacaaccagactgccaagctcctcacctccagcttcacgagctgccctgccctggaagtaatcttgctgtcctggaatctcctcggggatgaggcagctgccgagctggcccaggtgctgccgcagatgggccggctgaagagagtggacctggagaagaatcagatcacagctttgggggcctggctcctggctgaaggactggcccaggggtctagcatccaagtcatccgcctctggaataaccccattccctgcgacatggcccagcacctgaagagccaggagcccaggctggactttgccttctttgacaaccagccccaggccccttggggtacttgatggccccctcaagacctttggaatccagccaagtgatgcacccaaatgatccacctttcgcccactgggataattgactcaggaaagaagagcctcggcagggcgctctgcactccacccaggaggaaggatacgtgtgtcctgctgcagtcctcagggagaacttttttgggaaccaggagctgggtctggacaaaggagtaccctgcattacgtgggatatgtgtgatcaattggggacatgcgacacacaatgagggtgtcatgacaatgcatgacacgtacggttatatgtggcagtgtgaccccttgacatgtggcgttacatgaaagtcagtgtggcacgtgttctgtggcatgggtgctggcatcccaagtagcaggatacatgattgttggtctatatatgacacatgacaaatgtccatgtcacaggactcatggctggccagatgacctcaggctggcccaagatctaatttattaatttttaaagcaaatacatatttatagattgtgtgtatggagcagctaagtcaggaaaagtcttccgcccgagctgggaggggagagtgtccatgcactgaccagtccaggggctcaagggccagggctctggaacaagccagggactcagccattaagtcccctcctgcctcaatcctcagcctacccatctataaacttgatgactcctcccttacttacatactagcttccaaggacaggtggaggtagggccagcctggcgggagtggagaagcccagtctgtcctatgtaagggacaaagccaggtctaatggtactgggtagggggcactgccaagacaataagctaggctactgggtccagctactactttggtgggattcaggtgagtctccatgcacttcacatgttacccagtgttcttgttacttccaaggagaaccaagaatggctctgtcacactcgaagccaggcttgatcaataaacacaatggtattccacgtc

SEQ ID NO: 159651 - DNA, 6724 bp, Homo sapiens
  Payload ID: 11248
  Gene Symbol: NLRC5
  Gene Name: NLR family, CARD domain containing 5
  Uniprot ID: Q86WI3
  ENST ID: ENST00000436936
  CDS Start-End: 128-5728
gagtctgcactatggaaacaacctgtcaatccagctcaaggcacacatagcccagacacccatgagaccctctccgtggggaccctagagcacctatcatgaacgaggagaccaaggctggctcctcatggaccccgttggcctccagctcggcaacaagaacctgtggagctgtcttgtgaggctgctcaccaaagacccagaatggctgaacgccaagatgaagttcttcctccccaacacggacctggattccaggaacgagaccttggaccctgaacagagagtcatcctgcaactcaacaagctgcatgtccagggttcggacacctggcagtctttcattcattgtgtgtgcatgcagctggaggtgcctctggacctggaggtgctgctgctgagtacttttggctatgatgatgggttcaccagccagctgggagctgaggggaaaagccaacctgaatctcagctccaccatggcctgaagcgcccacatcagagctgtgggtcctcaccccgccggaagcagtgcaagaagcagcagctagagttggccaagaagtacctgcagctcctgcggacctctgcccagcagcgctacaggagccaaatccctgggtcagggcagccccacgccttccaccaggtctatgtccctccaatcctgcgccgggccacagcatccttagacactccggagggggccattatgggggacgtcaaggtggaagatggtgctgacgtgagcatctcggacctcttcaacaccagggttaacaagggcccgagggtgaccgtgcttttggggaaggctggcatgggcaagaccacgctggcccaccggctctgccagaagtgggcagagggccatctgaactgtttccaggccctgttcctttttgaattccgccagctcaacttgatcacgaggttcctgacaccgtccgagctcctttttgatctgtacctgagccctgaatcggaccacgacactgtcttccagtacctggagaagaacgctgaccaagtcctgctgatctttgatgggctagatgaggccctccagcctatgggtcctgatggcccaggcccagtcctcacccttttctcccatctctgcaatgggaccctcctgcctggctgccgggtgatggctacctcccgtccagggaagctgcctgcctgcctgcctgcagaggcagccatggtccacatgttgggctttgatgggccacgggtggaagaatatgtgaatcacttcttcagcgcccagccatcgcgggagggggccctggtggagttacagacaaatggacgtctccgaagcctgtgtgcggtgcccgcactgtgccaagtcgcctgtctctgcctccaccatctgcttcctgaccacgccccaggccagtctgtggccctcctgcccaacatgactcagctctatatgcagatggtgctcgccctcagcccccctgggcacttgcccacctcgtccctactggacctgggggaggtggccctgaggggcctggagacagggaaggttatcttctatgcaaaagatattgctccacccttgatagcttttggggccactcacagcctgctgacttccttctgcgtctgcacaggccctgggcaccagcagacaggctatgctttcacccacctcagcctgcaggagtttcttgctgccctgcacctgatggccagccccaaggtgaacaaagacacacttacccagtatgttaccctccattcccgctgggtacagcggaccaaagctagactgggcctctcagaccacctccccaccttcctggcgggcctggcatcctgcacctgccgccccttccttagccacctggcgcagggcaatgaggactgtgtgggtgccaagcaggctgctgtagtgcaggtgttgaagaagttggccacccgcaagctcacagggccaaaggttgtagagctgtgtcactgtgtggatgagacacaggagcctgagctggccagtctcaccgcacaaagcctcccctatcaactgcccttccacaatttcccactgacctgcaccgacctggccaccctgaccaacatcctagagcacagggaggcccccatccacctggattttgatggctgtcccctggagccccactgccctgaggctctggtaggctgtgggcagatagagaatctcagctttaagagcaggaagtgtggggatgcctttgcagaagccctctccaggagcttgccgacaatggggaggctgcagatgctggggttagcaggaagtaaaatcactgcccgaggcatcagccacctggtgaaagctttgcctctctgtccacagctgaaagaagtcagttttcgggacaaccagctcagtgaccaggtggtgctgaacattgtggaggttctccctcacctaccacggctccggaagcttgacctgagcagcaacagcatctgcgtgtcaaccctactctgcttggcaagggtggcagtcacgtgtcctaccgtcaggatgcttcaggccagggaggcggacctcatcttccttctttccccgcccacagagacaactgcagagctacaaagagctccagacctgcaggaaagtgacggccagaggaaaggggctcagagcagaagcttgacgctcaggctgcagaagtgtcagctccaggtccacgatgcggaggccctcatagccctgctccaggaaggccctcacctggaggaagtggacctctcagggaaccagctggaagatgaaggctgtcggctgatggcagaggctgcatcccagctgcacatcgccaggaagctggacctcagtaacaacgggctttctgtggccggggtgcattgtgtgctgagggccgtgagtgcgtgctggaccctggcagagctgcacatcagcctgcagcacaaaactgtgatcttcatgtttgcccaggagccagaggagcagaaggggccccaggagagggctgcatttcttgacagcctcatgctccagatgccctctgagctgcctctgagctcccgaaggatgaggctgacacattgtggcctccaagaaaagcacctagagcagctctgcaaggctctgggaggaagctgccacctcggtcacctccacctcgacttctcaggcaatgctctgggggatgaaggtgcagcccggctggctcagctgctcccagggctgggagctctgcagtccttgaacctcagtgagaacggtttgtccctggatgccgtgttgggtttggttcggtgcttctccactctgcagtggctcttccgcttggacatcagctttgaaagccaacacatcctcctgagaggggacaagacaagcagggatatgtgggccactggatctttgccagacttcccagctgcagccaagttcttagggttccgtcagcgctgcatccccaggagcctctgcctcagtgagtgtcctctggagcccccaagcctcacccgcctctgtgccactctgaaggactgcccgggacccctggaactgcaattgtcctgtgagttcctgagtgaccagagcctggagactctactggactgcttacctcaactccctcagctgagcctgctgcagctgagccagacgggactgtccccgaaaagccccttcctgctggccaacaccttaagcctgtgtccacgggttaaaaaggtggatctcaggtccctgcaccatgcaactttgcacttcagatccaacgaggaggaggaaggcgtgtgctgtggcaggttcacaggctgcagcctcagccaggagcacgtagagtcactctgctggttgctgagcaagtgtaaagacctcagccaggtggatctctcagcaaacctgctgggcgacagcggactcagatgccttctggaatgtctgccgcaggtgcccatctccggtttgcttgatctgagtcacaacagcatttctcaggaaagtgccctgtacctgctggagacactgccctcctgcccacgtgtccgggaggcctcagtgaacctgggctctgagcagagcttccggattcacttctccagagaggaccaggctgggaagacactcaggctaagtgagtgcagcttccggccagagcacgtgtccaggctggccaccggcttgagcaagtccctgcagctgacggagctcacgctgacccagtgctgcctgggccagaagcagctggccatcctcctgagcttggtggggcgacccgcagggctgttcagcctcagggtgcaggagccgtgggcggacagagccagggttctctccctgttagaagtctgcgcccaggcctcaggcagtgtcactgaaatcagcatctccgagacccagcagcagctctgtgtccagctggaatttcctcgccaggaagagaatccagaagctgtggcactcaggttggctcactgtgaccttggagcccaccacagccttcttgtcgggcagctgatggagacatgtgccaggctgcagcagctcagcttgtctcaggttaacctctgtgaggacgatgatgccagttccctgctgctgcagagcctcctgctgtccctctctgagctgaagacatttcggctgacctccagctgtgtgagcaccgagggcctcgcccacctggcatctggtctgggccactgccaccacttggaggagctggacttgtctaacaatcaatttgatgaggagggcaccaaggcgctgatgagggcccttgaggggaaatggatgctaaagaggctggacctcagtcaccttctgctgaacagctccaccttggccttgcttactcacagactaagccagatgacctgcctgcagagcctcagactgaacaggaacagtatcggtgatgtcggttgctgccacctttctgaggctctcagggctgccaccagcctagaggagctggacttgagccacaaccagattggagacgctggtgtccagcacttagctaccatcctgcctgggctgccagagctcaggaagatagacctctcagggaatagcatcagctcagccgggggagtgcagttggcagagtctctcgttctttgcaggcgcctggaggagttgatgcttggctgcaatgccctgggggatcccacagccctggggctggctcaggagctgccccagcacctgagggtcctacacctaccattcagccatctgggcccaggtggggccctgagcctggcccaggccctggatggatccccccatttggaagagatcagcttggcggaaaacaacctggctggaggggtcctgcgtttctgtatggagctcccgctgctcagacagatagacctggtttcctgtaagattgacaaccagactgccaagctcctcacctccagcttcacgagctgccctgccctggaagtaatcttgctgtcctggaatctcctcggggatgaggcagctgccgagctggcccaggtgctgccgcagatgggccggctgaagagagtggacctggagaagaatcagatcacagctttgggggcctggctcctggctgaaggactggcccaggggtctagcatccaagtcatccgcctctggaataaccccattccctgcgacatggcccagcacctgaagagccaggagcccaggctggactttgccttctttgacaaccagccccaggccccttggggtacttgatggccccctcaagacctttggaatccagccaagtgatgcacccaaatgatccacctttcgcccactgggataattgactcaggaaagaagagcctcggcagggcgctctgcactccacccaggaggaaggatacgtgtgtcctgctgcagtcctcagggagaacttttttgggaaccaggagctgggtctggacaaaggagtaccctgcattacgtgggatatgtgtgatcaattggggacatgcgacacacaatgagggtgtcatgacaatgcatgacacgtacggttatatgtggcagtgtgaccccttgacatgtggcgttacatgaaagtcagtgtggcacgtgttctgtggcatgggtgctggcatcccaagtagcaggatacatgattgttggtctatatatgacacatgacaaatgtccatgtcacaggactcatggctggccagatgacctcaggctggcccaagatctaatttattaatttttaaagcaaatacatatttatagattgtgtgtatggagcagctaagtcaggaaaagtcttccgcccgagctgggaggggagagtgtccatgcactgaccagtccaggggctcaagggccagggctctggaacaagccagggactcagccattaagtcccctcctgcctcaatcctcagcctacccatctataaacttgatgactcctcccttacttacatactagcttccaaggacaggtggaggtagggccagcctggcgggagtggagaagcccagtctgtcctatgtaagggacaaagccaggtctaatggtactgggtagggggcactgccaagacaataagctaggctactgggtccagctactactttggtgggattcaggtgagtctccatgcacttcacatgttacccagtgttcttgttacttccaaggagaaccaagaatggctctgtcacactcgaagccaggcttgatcaataaacacaatggtattccacgtc

SEQ ID NO: 159652 - DNA, 3430 bp, Homo sapiens
  Payload ID: 11248
  Gene Symbol: NLRC5
  Gene Name: NLR family, CARD domain containing 5
  ENST ID: ENST00000537056
  CDS Start-End: 1-976
gtggctcttccgcttggacatcagctttgaaagccaacacatcctcctgagaggggacaagacaagcagggatatgtgggccactggatctttgccagacttcccagctgcagccaagttcttagggttccgtcagcgctgcatccccaggagcctctgcctcagtgagtgtcctctggagcccccaagcctcacccgcctctgtgccactctgaaggactgcccgggacccctggaactgcaattgtcctgtgagttcctgagtgaccagagcctggagactctactggactgcttacctcaactccctcagctgagcctgctgcagctgagccagacgggactgtccccgaaaagccccttcctgctggccaacaccttaagcctgtgtccacgggttaaaaaggtggatctcaggtccctgcaccatgcaactttgcacttcagatccaacgaggaggaggaaggcgtgtgctgtgggttcacaggctgcagcctcagccaggagcacgtagagtcactctgctggttgctgagcaagtgtaaagacctcagccaggtggatctctcagcaaacctgctgggcgacagcggactcagatgccttctggaatgtctgccgcaggtgcccatctccggtttgcttgatctgagtcacaacagcatttctcaggaaagtgccctgtacctgctggagacactgccctcctgcccacgtgtccgggaggcctcagtgaacctgggctctgagcagagcttccggattcacttctccagagaggaccaggctgggaagacactcaggctaagtgagtgcagcttccggccagagcacgtgtccaggctggccaccggcttgagcaagtccctgcagctgacggagctcacgctgacccagtgctgcctgggccagaagcagctggccatcctcctgagcttggtggggcgacccgcagggctgttcagcctcagctgaagcggtttcaaggtgcaggagccgtgggcggacagagccagggttctctccctgttagaagtctgcgcccaggcctcaggcagtgtcactgaaatcagcatctccgagacccagcagcagctctgtgtccagctggaatttcctcgccaggaagagaatccagaagctgtggcactcaggttggctcactgtgaccttggagcccaccacagccttcttgtcgggcagctgatggagacatgtgccaggctgcagcagctcagcttgtctcaggttaacctctgtgaggacgatgatgccagttccctgctgctgcagagcctcctgctgtccctctctgagctgaagacatttcggctgacctccagctgtgtgagcaccgagggcctcgcccacctggcatctggtctgggccactgccaccacttggaggagctggacttgtctaacaatcaatttgatgaggagggcaccaaggcgctgatgagggcccttgaggggaaatggatgctaaagaggctggacctcagtcaccttctgctgaacagctccaccttggccttgcttactcacagactaagccagatgacctgcctgcagagcctcagactgaacaggaacagtatcggtgatgtcggttgctgccacctttctgaggctctcagggctgccaccagcctagaggagctggacttgagccacaaccagattggagacgctggtgtccagcacttagctaccatcctgcctgggctgccagagctcaggaagatagacctctcagggaatagcatcagctcagccgggggagtgcagttggcagagtctctcgttctttgcaggcgcctggaggagttgatgcttggctgcaatgccctgggggatcccacagccctggggctggctcaggagctgccccagcacctgagggtcctacacctaccattcagccatctgggcccaggtggggccctgagcctggcccaggccctggatggatccccccatttggaagagatcagcttggcggaaaacaacctggctggaggggtcctgcgtttctgtatggagctcccgctgctcagacagatagacctggtttcctgtaagattgacaaccagactgccaagctcctcacctccagcttcacgagctgccctgccctggaagtaatcttgctgtcctggaatctcctcggggatgaggcagctgccgagctggcccaggtgctgccgcagatgggccggctgaagagagtggacctggagaagaatcagatcacagctttgggggcctggctcctggctgaaggactggcccaggggtctagcatccaagtcatccgcctctggaataaccccattccctgcgacatggcccagcacctgaagagccaggagcccaggctggactttgccttctttgacaaccagccccaggccccttggggtacttgatggccccctcaagacctttggaatccagccaagtgatgcacccaaatgatccacctttcgcccactgggataattgactcaggaaagaagagcctcggcagggcgctctgcactccacccaggaggaaggatacgtgtgtcctgctgcagtcctcagggagaacttttttgggaaccaggagctgggtctggacaaaggagtaccctgcattacgtgggatatgtgtgatcaattggggacatgcgacacacaatgagggtgtcatgacaatgcatgacacgtacggttatatgtggcagtgtgaccccttgacatgtggcgttacatgaaagtcagtgtggcacgtgttctgtggcatgggtgctggcatcccaagtagcaggatacatgattgttggtctatatatgacacatgacaaatgtccatgtcacaggactcatggctggccagatgacctcaggctggcccaagatctaatttattaatttttaaagcaaatacatatttatagattgtgtgtatggagcagctaagtcaggaaaagtcttccgcccgagctgggaggggagagtgtccatgcactgaccagtccaggggctcaagggccagggctctggaacaagccagggactcagccattaagtcccctcctgcctcaatcctcagcctacccatctataaacttgatgactcctcccttacttacatactagcttccaaggacaggtggaggtagggccagcctggcgggagtggagaagcccagtctgtcctatgtaagggacaaagccaggtctaatggtactgggtagggggcactgccaagacaataagctaggctactgggtccagctactactttggtgggattcaggtgagtctccatgcacttcacatgttacccagtgttcttgttacttccaaggagaaccaagaatggctctgtcacactcgaagccaggcttgatcaataaacacaatggtattccacgtc

SEQ ID NO: 159653 - DNA, 3617 bp, Homo sapiens
  Payload ID: 11248
  Gene Symbol: NLRC5
  Gene Name: NLR family, CARD domain containing 5
  ENST ID: ENST00000540182
  CDS Start-End: 1-1163
ctgagctgcctctgagctcccgaaggatgaggctgacacattgtggcctccaagaaaagcacctagagcagctctgcaaggctctgggaggaagctgccacctcggtcacctccacctcgacttctcaggcaatgctctgggggatgaaggtgcagcccggctggctcagctgctcccagggctgggagctctgcagtccttgaacctcagtgagaacggtttgtccctggatgccgtgttgggtttggttcggtgcttctccactctgcagtggctcttccgcttggacatcagctttgaaagccaacacatcctcctgagaggggacaagacaagcagggatatgtgggccactggatctttgccagacttcccagctgcagccaagttcttagggttccgtcagcgctgcatccccaggagcctctgcctcagtgagtgtcctctggagcccccaagcctcacccgcctctgtgccactctgaaggactgcccgggacccctggaactgcaattgtcctgtgagttcctgagtgaccagagcctggagactctactggactgcttacctcaactccctcagctgagcctgctgcagctgagccagacgggactgtccccgaaaagccccttcctgctggccaacaccttaagcctgtgtccacgggttaaaaaggtggatctcaggtccctgcaccatgcaactttgcacttcagatccaacgaggaggaggaaggcgtgtgctgtggtctctcagcaaacctgctgggcgacagcggactcagatgccttctggaatgtctgccgcaggtgcccatctccggtttgcttgatctgagtcacaacagcatttctcaggaaagtgccctgtacctgctggagacactgccctcctgcccacgtgtccgggaggcctcagtgaacctgggctctgagcagagcttccggattcacttctccagagaggaccaggctgggaagacactcaggctaagtgagtgcagcttccggccagagcacgtgtccaggctggccaccggcttgagcaagtccctgcagctgacggagctcacgctgacccagtgctgcctgggccagaagcagctggccatcctcctgagcttggtggggcgacccgcagggctgttcagcctcagctgaagcggtttcaaggtgcaggagccgtgggcggacagagccagggttctctccctgttagaagtctgcgcccaggcctcaggcagtgtcactgaaatcagcatctccgagacccagcagcagctctgtgtccagctggaatttcctcgccaggaagagaatccagaagctgtggcactcaggttggctcactgtgaccttggagcccaccacagccttcttgtcgggcagctgatggagacatgtgccaggctgcagcagctcagcttgtctcaggttaacctctgtgaggacgatgatgccagttccctgctgctgcagagcctcctgctgtccctctctgagctgaagacatttcggctgacctccagctgtgtgagcaccgagggcctcgcccacctggcatctggtctgggccactgccaccacttggaggagctggacttgtctaacaatcaatttgatgaggagggcaccaaggcgctgatgagggcccttgaggggaaatggatgctaaagaggctggacctcagtcaccttctgctgaacagctccaccttggccttgcttactcacagactaagccagatgacctgcctgcagagcctcagactgaacaggaacagtatcggtgatgtcggttgctgccacctttctgaggctctcagggctgccaccagcctagaggagctggacttgagccacaaccagattggagacgctggtgtccagcacttagctaccatcctgcctgggctgccagagctcaggaagatagacctctcagggaatagcatcagctcagccgggggagtgcagttggcagagtctctcgttctttgcaggcgcctggaggagttgatgcttggctgcaatgccctgggggatcccacagccctggggctggctcaggagctgccccagcacctgagggtcctacacctaccattcagccatctgggcccaggtggggccctgagcctggcccaggccctggatggatccccccatttggaagagatcagcttggcggaaaacaacctggctggaggggtcctgcgtttctgtatggagctcccgctgctcagacagatagacctggtttcctgtaagattgacaaccagactgccaagctcctcacctccagcttcacgagctgccctgccctggaagtaatcttgctgtcctggaatctcctcggggatgaggcagctgccgagctggcccaggtgctgccgcagatgggccggctgaagagagtggacctggagaagaatcagatcacagctttgggggcctggctcctggctgaaggactggcccaggggtctagcatccaagtcatccgcctctggaataaccccattccctgcgacatggcccagcacctgaagagccaggagcccaggctggactttgccttctttgacaaccagccccaggccccttggggtacttgatggccccctcaagacctttggaatccagccaagtgatgcacccaaatgatccacctttcgcccactgggataattgactcaggaaagaagagcctcggcagggcgctctgcactccacccaggaggaaggatacgtgtgtcctgctgcagtcctcagggagaacttttttgggaaccaggagctgggtctggacaaaggagtaccctgcattacgtgggatatgtgtgatcaattggggacatgcgacacacaatgagggtgtcatgacaatgcatgacacgtacggttatatgtggcagtgtgaccccttgacatgtggcgttacatgaaagtcagtgtggcacgtgttctgtggcatgggtgctggcatcccaagtagcaggatacatgattgttggtctatatatgacacatgacaaatgtccatgtcacaggactcatggctggccagatgacctcaggctggcccaagatctaatttattaatttttaaagcaaatacatatttatagattgtgtgtatggagcagctaagtcaggaaaagtcttccgcccgagctgggaggggagagtgtccatgcactgaccagtccaggggctcaagggccagggctctggaacaagccagggactcagccattaagtcccctcctgcctcaatcctcagcctacccatctataaacttgatgactcctcccttacttacatactagcttccaaggacaggtggaggtagggccagcctggcgggagtggagaagcccagtctgtcctatgtaagggacaaagccaggtctaatggtactgggtagggggcactgccaagacaataagctaggctactgggtccagctactactttggtgggattcaggtgagtctccatgcacttcacatgttacccagtgttcttgttacttccaaggagaaccaagaatggctctgtcacactcgaagccaggcttgatcaataaacacaatggtattccacgtc

SEQ ID NO: 159654 - DNA, 594 bp, Homo sapiens
  Payload ID: 11248
  Gene Symbol: NLRC5
  Gene Name: NLR family, CARD domain containing 5
  ENST ID: ENST00000544641
  CDS Start-End: 371-594
acagatgaggacgctgaggtacgaagaggctgcgtaacctaccagggtcacacagctttggtgtggagtagggactcaaatccagggccctggtacggaggcatttgccctcaccaagattcaggcactgagagaagctgacgggcctagagaatggcaagacttgagatagcagaaggaaggagagagggtgagaaatggatccccgtgctgaggtctggtctggaaggagaagtctgcaaggagtctgcactatggaaacaacctgtcaatccagctcaaggcacacatagcccagacacccatgagaccctctccgtggggaccctagagcacctatcatgaacgaggagaccaaggctggctcctcatggaccccgttggcctccagctcggcaacaagaacctgtggagctgtcttgtgaggctgctcaccaaagacccagaatggctgaacgccaagatgaagttcttcctccccaacacggacctggattccaggaacgagaccttggaccctgaacagagagtcatcctgcaactcaacaagctgcatgtccagggttcggacacctggcagtctttcattcattg

SEQ ID NO: 159655 - DNA, 1894 bp, Homo sapiens
  Payload ID: 11248
  Gene Symbol: NLRC5
  Gene Name: NLR family, CARD domain containing 5
  ENST ID: ENST00000543030
  CDS Start-End: 1-1894
ctgacctgcaccgacctggccaccctgaccaacatcctagagcacagggaggcccccatccacctggattttgatggctgtcccctggagccccactgccctgaggctctggtaggctgtgggcagatagagaatctcagctttaagagcaggaagtgtggggatgcctttgcagaagccctctccaggagcttgccgacaatggggaggctgcagatgctgggcctgagcagcaacagcatctgcgtgtcaaccctactctgcttggcaagggtggcagtcacgtgtcctaccgtcaggatgcttcaggccagggaggcggacctcatcttccttctttccccgcccacagagacaactgcagagctacaaagagctccagacctgcaggaaagtgacggccagaggaaaggggctcagagcagaagcttgacgctcaggctgcagaagtgtcagctccaggtccacgatgcggaggccctcatagccctgctccaggaaggccctcacctggaggaagtggacctctcagggaaccagctggaagatgaaggctgtcggctgatggcagaggctgcatcccagctgcacatcgccaggaagctggacctcagtaacaacgggctttctgtggccggggtgcattgtgtgctgagggccgtgagtgcgtgctggaccctggcagagctgcacatcagcctgcagcacaaaactgtgatcttcatgtttgcccaggagccagaggagcagaaggggccccaggagagggctgcatttcttgacagcctcatgctccagatgccctctgagctgcctctgagctcccgaaggatgaggctgacacattgtggcctccaagaaaagcacctagagcagctctgcaaggctctgggaggaagctgccacctcggtcacctccacctcgacttctcaggcaatgctctgggggatgaaggtgcagcccggctggctcagctgctcccagggctgggagctctgcagtccttgaacctcagtgagaacggtttgtccctggatgccgtgttgggtttggttcggtgcttctccactctgcagtggctcttccgcttggacatcagctttgaaagccaacacatcctcctgagaggggacaagacaagcagcctcagtgagtgtcctctggagcccccaagcctcacccgcctctgtgccactctgaaggactgcccgggacccctggaactgcaattgtcctgtgagttcctgagtgaccagagcctggagactctactggactgcttacctcaactccctcagctgagcctgctgcagctgagccagacgggactgtccccgaaaagccccttcctgctggccaacaccttaagcctgtgtccacgggttaaaaaggtggatctcaggtccctgcaccatgcaactttgcacttcagatccaacgaggaggaggaaggcgtgtgctgtggcaggttcacaggctgcagcctcagccaggagcacgtagagtcactctgctggttgctgagcaagtgtaaagacctcagccaggtggacctgggctctgagcagagcttccggattcacttctccagagaggaccaggctgggaagacactcaggctaagtgagtgcagcttccggccagagcacgtgtccaggctggccaccggcttgagcaagtccctgcagctgacggagctcacgctgacccagtgctgcctgggccagaagcagctggccatcctcctgagcttggtggggcgacccgcagggctgttcagcctcagagactccacaaggcacacagagaaactgtccttccccacactggaggcctgtgctttgggatttaagaaaaaaagaaagaaagaaagaaagaaggtttcagaggata

SEQ ID NO: 159656 - DNA, 550 bp, Homo sapiens
  Payload ID: 11248
  Gene Symbol: NLRC5
  Gene Name: NLR family, CARD domain containing 5
  ENST ID: ENST00000399221
  CDS Start-End: 1-472
tctctcagcaaacctgctgggcgacagcggactcagatgccttctggaatgtctgccgcaggtgcccatctccggtttgcttgatctgagtcacaacagcatttctcaggaaagtgccctgtacctgctggagacactgccctcctgcccacgtgtccgggaggcctcagtgaacctgggctctgagcagagcttccggattcacttctccagagaggaccaggctgggaagacactcaggctaagtgagtgcagcttccggccagagcacgtgtccaggctggccaccggcttgagcaagtccctgcagctgacggagctcacgctgacccagtgctgcctgggccagaagcagctggccatcctcctgagcttggtggggcgacccgcagggctgttcagcctcagactccacaaggcacacagagaaactgtccttccccacactggaggcctgtgctttgggatttaagaaaaaaagaaagaaagaaagaaagaaggtttcagaggatactgaactgaggacaaaaataaactgaaacgaagttct

SEQ ID NO: 159657 - DNA, 282 bp, Homo sapiens
  Payload ID: 11248
  Gene Symbol: NLRC5
  Gene Name: NLR family, CARD domain containing 5
  ENST ID: ENST00000538059
  CDS Start-End: 226-282
gtgtgactttatcctggaggcagtgggatgctgatagcaagttcagacaggcatgaggccagaccagagctgagttttcaagataactccagccagaggagtctgcactatggaaacaacctgtcaatccagctcaaggcacacatagcccagacacccatgagaccctctccgtggggaccctagagcacctatcatgaacgaggagaccaaggctggctcctcatggaccccgttggcctccagctcggcaacaagaacctgtggagctgtcttgtgagg

SEQ ID NO: 159658 - DNA, 2656 bp, Homo sapiens
  Payload ID: 11248
  Gene Symbol: NLRC5
  Gene Name: NLR family, CARD domain containing 5
  ENST ID: ENST00000538110
  CDS Start-End: 1-2656
ctgacttccttctgcgtctgcacaggccctgggcaccagcagacaggctatgctttcacccacctcagcctgcaggagtttcttgctgccctgcacctgatggccagccccaaggtgaacaaagacacacttacccagtatgttaccctccattcccgctgggtacagcggaccaaagctagactgggcctctcagaccacctccccaccttcctggcgggcctggcatcctgcacctgccgccccttccttagccacctggcgcagggcaatgaggactgtgtgggtgccaagcaggctgctgtagtgcaggtgttgaagaagttggccacccgcaagctcacagggccaaaggttgtagagctgtgtcactgtgtggatgagacacaggagcctgagctggccagtctcaccgcacaaagcctcccctatcaactgcccttccacaatttcccactgacctgcaccgacctggccaccctgaccaacatcctagagcacagggaggcccccatccacctggattttgatggctgtcccctggagccccactgccctgaggctctggtaggctgtgggcagatagagaatctcagctttaagagcaggaagtgtggggatgcctttgcagaagccctctccaggagcttgccgacaatggggaggctgcagatgctggggttagcaggaagtaaaatcactgcccgaggcatcagccacctggtgaaagctttgcctctctgtccacagctgaaagaagtcagttttcgggacaaccagctcagtgaccaggtggtgctgaacattgtggaggttctccctcacctaccacggctccggaagcttgacctgagcagcaacagcatctgcgtgtcaaccctactctgcttggcaagggtggcagtcacgtgtcctaccgtcaggatgcttcaggccagggaggcggacctcatcttccttctttccccgcccacagagacaactgcagagctacaaagagctccagacctgcaggaaagtgacggccagaggaaaggggctcagagcagaagcttgacgctcaggctgcagaagtgtcagctccaggtccacgatgcggaggccctcatagccctgctccaggaaggccctcacctggaggaagtggacctctcagggaaccagctggaagatgaaggctgtcggctgatggcagaggctgcatcccagctgcacatcgccaggaagctggacctcagtaacaacgggctttctgtggccggggtgcattgtgtgctgagggccgtgagtgcgtgctggaccctggcagagctgcacatcagcctgcagcacaaaactgtgatcttcatgtttgcccaggagccagaggagcagaaggggccccaggagagggctgcatttcttgacagcctcatgctccagatgccctctgagctgcctctgagctcccgaaggatgaggctgacacattgtggcctccaagaaaagcacctagagcagctctgcaaggctctgggaggaagctgccacctcggtcacctccacctcgacttctcaggcaatgctctgggggatgaaggtgcagcccggctggctcagctgctcccagggctgggagctctgcagtccttgaacctcagtgagaacggtttgtccctggatgccgtgttgggtttggttcggtgcttctccactctgcagtggctcttccgcttggacatcagctttgaaagccaacacatcctcctgagaggggacaagacaagcagcctcagtgagtgtcctctggagcccccaagcctcacccgcctctgtgccactctgaaggactgcccgggacccctggaactgcaattgtcctgtgagttcctgagtgaccagagcctggagactctactggactgcttacctcaactccctcagctgagcctgctgcagctgagccagacgggactgtccccgaaaagccccttcctgctggccaacaccttaagcctgtgtccacgggttaaaaaggtggatctcaggtccctgcaccatgcaactttgcacttcagatccaacgaggaggaggaaggcgtgtgctgtgggttcacaggctgcagcctcagccaggagcacgtagagtcactctgctggttgctgagcaagtgtaaagacctcagccaggtggatctctcagcaaacctgctgggcgacagcggactcagatgccttctggaatgtctgccgcaggtgcccatctccggtttgcttgatctgagtcacaacagcatttctcaggaaagtgccctgtacctgctggagacactgccctcctgcccacgtgtccgggaggcctcagtgaacctgggctctgagcagagcttccggattcacttctccagagaggaccaggctgggaagacactcaggctaagtgagtgcagcttccggccagagcacgtgtccaggctggccaccggcttgagcaagtccctgcagctgacggagctcacgctgacccagtgctgcctgggccagaagcagctggccatcctcctgagcttggtggggcgacccgcagggctgttcagcctcagagactccacaaggcacacagagaaactgtccttccccacactggaggcctgtgctttgggatttaagaaaaaaa

SEQ ID NO: 159659 - DNA, 4777 bp, Homo sapiens
  Payload ID: 11248
  Gene Symbol: NLRC5
  Gene Name: NLR family, CARD domain containing 5
  Uniprot ID: Q86WI3
  ENST ID: ENST00000539881
  CDS Start-End: 261-2423
acgtgatttctcggcagcagccgccagttccatgcactggcggagcagctctaggcggcggcttctactttcagtttcgtgcagagcgcggaggagccgcgagcgctgagggtgagtgccgggagctctgagggagtctgcactatggaaacaacctgtcaatccagctcaaggcacacatagcccagacacccatgagaccctctccgtggggaccctagagcacctatcatgaacgaggagaccaaggctggctcctcatggaccccgttggcctccagctcggcaacaagaacctgtggagctgtcttgtgaggctgctcaccaaagacccagaatggctgaacgccaagatgaagttcttcctccccaacacggacctggattccaggaacgagaccttggaccctgaacagagagtcatcctgcaactcaacaagctgcatgtccagggttcggacacctggcagtctttcattcattgtgtgtgcatgcagctggaggtgcctctggacctggaggtgctgctgctgagtacttttggctatgatgatgggttcaccagccagctgggagctgaggggaaaagccaacctgaatctcagctccaccatggcctgaagcgcccacatcagagctgtgggtcctcaccccgccggaagcagtgcaagaagcagcagctagagttggccaagaagtacctgcagctcctgcggacctctgcccagcagcgctacaggagccaaatccctgggtcagggcagccccacgccttccaccaggtctatgtccctccaatcctgcgccgggccacagcatccttagacactccggagggggccattatgggggacgtcaaggtggaagatggtgctgacgtgagcatctcggacctcttcaacaccagggttaacaagggcccgagggtgaccgtgcttttggggaaggctggcatgggcaagaccacgctggcccaccggctctgccagaagtgggcagagggccatctgaactgtttccaggccctgttcctttttgaattccgccagctcaacttgatcacgaggttcctgacaccgtccgagctcctttttgatctgtacctgagccctgaatcggaccacgacactgtcttccagtacctggagaagaacgctgaccaagtcctgctgatctttgatgggctagatgaggccctccagcctatgggtcctgatggcccaggcccagtcctcacccttttctcccatctctgcaatgggaccctcctgcctggctgccgggtgatggctacctcccgtccagggaagctgcctgcctgcctgcctgcagaggcagccatggtccacatgttgggctttgatgggccacgggtggaagaatatgtgaatcacttcttcagcgcccagccatcgcgggagggggccctggtggagttacagacaaatggacgtctccgaagcctgtgtgcggtgcccgcactgtgccaagtcgcctgtctctgcctccaccatctgcttcctgaccacgccccaggccagtctgtggccctcctgcccaacatgactcagctctatatgcagatggtgctcgccctcagcccccctgggcacttgcccacctcgtccctactggacctgggggaggtggccctgaggggcctggagacagggaaggttatcttctatgcaaaagatattgctccacccttgatagcttttggggccactcacagcctgctgacttccttctgcgtctgcacaggccctgggcaccagcagacaggctatgctttcacccacctcagcctgcaggagtttcttgctgccctgcacctgatggccagccccaaggtgaacaaagacacacttacccagtatgttaccctccattcccgctgggtacagcggaccaaagctagactgggcctctcagaccacctccccaccttcctggcgggcctggcatcctgcacctgccgccccttccttagccacctggcgcagggcaatgaggactgtgtgggtgccaagcaggctgctgtagtgcaggtgttgaagaagttggccacccgcaagctcacagggccaaaggttgtagagctgtgtcactgtgtggatgagacacaggagcctgagctggccagtctcaccgcacaaagcctcccctatcaactgcccttccacaatttcccactgacctgcaccgacctggccaccctgaccaacatcctagagcacagggaggcccccatccacctggattttgatggctgtcccctggagccccactgccctgaggctctggtaggctgtgggcagatagagaatctcagctttaagagcaggaagtgtggggatgcctttgcagaagccctctccaggagcttgccgacaatggggaggctgcagatgctggggtgagccaggccttggagctgagaagggtcttcagctggggatgcctggttagcaggaagtaaaatcactgcccgaggcatcagccacctggtgaaagctttgcctctctgtccacagctgaaagaagtcagttttcgggacaaccagctcagtgaccaggtggtgctgaacattgtggaggttctccctcacctaccacggctccggaagcttgacctgagcagcaacagcatctgcgtgtcaaccctactctgcttggcaagggtggcagtcacgtgtcctaccgtcaggatgcttcaggccagggaggcggacctcatcttccttctttccccgcccacagagacaactgcagagctacaaagagctccagacctgcaggaaagtgacggccagaggaaaggggctcagagcagaagcttgacgctcaggctgcagaagtgtcagctccaggtccacgatgcggaggccctcatagccctgctccaggaaggccctcacctggaggaagtggaaggaggaagttaagctgcagaaagataaacttgctcaaggccacacaggtaggaagagtctaggctagggttcaagcccagacagtctggctcgcagcctcatcctcataaccactgctacctctcttgctgagatctgccaagtagaaaccccaccacacctgggtctgccttccaaaccacagtccctcagggctccccccacccccttcatccttctcccagagtagagtgggataaccttctcttttcgggatggagaaattcccatggcgtccagcccctggctgaagccaataagagtagtgcttggggatggacggaggctctgtcacgaccctaggaggggcgcccctccaggaaacctccaagtgaacatgaaggcagatgatggaacgccaggatgtgttctgggtcgagtggccccacctcaggcctctcagggaaccagctggaagatgaaggctgtcggctgatggcagaggctgcatcccagctgcacatcgccaggaagctggacctcagtaacaacgggctttctgtggccggggtgcattgtgtgctgagggccgtgagtgcgtgctggaccctggcagagctgcacatcagcctgcagcacaaaactgtgatcttcatgtttgcccaggagccagaggagcagaaggggccccaggagagggctgcatttcttgacagcctcatgctccagatgccctctgagctgcctctgagctcccgaaggatgaggctgacacattgtggcctccaagaaaagcacctagagcagctctgcaaggctctgggaggaagctgccacctcggtcacctccacctcgacttctcaggcaatgctctgggggatgaaggtgcagcccggctggctcagctgctcccagggctgggagctctgcagtccttgaacctcagtgagaacggtttgtccctggatgccgtgttgggtttggttcggtgcttctccactctgcagtggctcttccgcttggacatcagctttgaaagccaacacatcctcctgagaggggacaagacaagcagggatatgtgggccactggatctttgccagacttcccagctgcagccaagttcttagggttccgtcagcgctgcatccccaggagcctctgcctcagtgagtgtcctctggagcccccaagcctcacccgcctctgtgccactctgaaggactgcccgggacccctggaactgcaccctgccccatgagagtcccctggcctttggtagaaacttggctgtctctcggcagcccccagccttaggcagcgcatgtctcccactgggagatgctgtgctggactggggaagccttcacctgcaccatccactcaactcagggcacctgggagccctgtccacctccaaccccacccctggagcctcaccagggcacccacttgaacctgcctgcatggctggagcgtagcacttctgaaagcccttcctcaaggcacccccactctccttggggttaccacctcactcgccccagaacatctgggtctgtaaccagagactggacctggaatcaggactcttggctcaaaagggatttaactccccgggcctcagcttcttcatctgcacagtggatggtcagcctttccttttattgtcattgtggtgattctattatagtaattaccttaaaataaagaaatccaagacaaaacctgcctcacctaaacaacctcttctctcatcaaatccatgttgtcatgtgtccacaggactgtctactccttgcctatttgcatattcagtttctacctgtttgcagtcataaactagtttcatgcactgtg

SEQ ID NO: 159660 - DNA, 6505 bp, Homo sapiens
  Payload ID: 11248
  Gene Symbol: NLRC5
  Gene Name: NLR family, CARD domain containing 5
  Uniprot ID: Q86WI3
  ENST ID: ENST00000539144
  CDS Start-End: 1-5514
atggaccccgttggcctccagctcggcaacaagaacctgtggagctgtcttgtgaggctgctcaccaaagacccagaatggctgaacgccaagatgaagttcttcctccccaacacggacctggattccaggaacgagaccttggaccctgaacagagagtcatcctgcaactcaacaagctgcatgtccagggttcggacacctggcagtctttcattcattgtgtgtgcatgcagctggaggtgcctctggacctggaggtgctgctgctgagtacttttggctatgatgatgggttcaccagccagctgggagctgaggggaaaagccaacctgaatctcagctccaccatggcctgaagcgcccacatcagagctgtgggtcctcaccccgccggaagcagtgcaagaagcagcagctagagttggccaagaagtacctgcagctcctgcggacctctgcccagcagcgctacaggagccaaatccctgggtcagggcagccccacgccttccaccaggtctatgtccctccaatcctgcgccgggccacagcatccttagacactccggagggggccattatgggggacgtcaaggtggaagatggtgctgacgtgagcatctcggacctcttcaacaccagggttaacaagggcccgagggtgaccgtgcttttggggaaggctggcatgggcaagaccacgctggcccaccggctctgccagaagtgggcagagggccatctgaactgtttccaggccctgttcctttttgaattccgccagctcaacttgatcacgaggttcctgacaccgtccgagctcctttttgatctgtacctgagccctgaatcggaccacgacactgtcttccagtacctggagaagaacgctgaccaagtcctgctgatctttgatgggctagatgaggccctccagcctatgggtcctgatggcccaggcccagtcctcacccttttctcccatctctgcaatgggaccctcctgcctggctgccgggtgatggctacctcccgtccagggaagctgcctgcctgcctgcctgcagaggcagccatggtccacatgttgggctttgatgggccacgggtggaagaatatgtgaatcacttcttcagcgcccagccatcgcgggagggggccctggtggagttacagacaaatggacgtctccgaagcctgtgtgcggtgcccgcactgtgccaagtcgcctgtctctgcctccaccatctgcttcctgaccacgccccaggccagtctgtggccctcctgcccaacatgactcagctctatatgcagatggtgctcgccctcagcccccctgggcacttgcccacctcgtccctactggacctgggggaggtggccctgaggggcctggagacagggaaggttatcttctatgcaaaagatattgctccacccttgatagcttttggggccactcacagcctgctgacttccttctgcgtctgcacaggccctgggcaccagcagacaggctatgctttcacccacctcagcctgcaggagtttcttgctgccctgcacctgatggccagccccaaggtgaacaaagacacacttacccagtatgttaccctccattcccgctgggtacagcggaccaaagctagactgggcctctcagaccacctccccaccttcctggcgggcctggcatcctgcacctgccgccccttccttagccacctggcgcagggcaatgaggactgtgtgggtgccaagcaggctgctgtagtgcaggtgttgaagaagttggccacccgcaagctcacagggccaaaggttgtagagctgtgtcactgtgtggatgagacacaggagcctgagctggccagtctcaccgcacaaagcctcccctatcaactgcccttccacaatttcccactgacctgcaccgacctggccaccctgaccaacatcctagagcacagggaggcccccatccacctggattttgatggctgtcccctggagccccactgccctgaggctctggtaggctgtgggcagatagagaatctcagctttaagagcaggaagtgtggggatgcctttgcagaagccctctccaggagcttgccgacaatggggaggctgcagatgctggggttagcaggaagtaaaatcactgcccgaggcatcagccacctggtgaaagctttgcctctctgtccacagctgaaagaagtcagttttcgggacaaccagctcagtgaccaggtggtgctgaacattgtggaggttctccctcacctaccacggctccggaagcttgacctgagcagcaacagcatctgcgtgtcaaccctactctgcttggcaagggtggcagtcacgtgtcctaccgtcaggatgcttcaggccagggaggcggacctcatcttccttctttccccgcccacagagacaactgcagagctacaaagagctccagacctgcaggaaagtgacggccagaggaaaggggctcagagcagaagcttgacgctcaggctgcagaagtgtcagctccaggtccacgatgcggaggccctcatagccctgctccaggaaggccctcacctggaggaagtggacctctcagggaaccagctggaagatgaaggctgtcggctgatggcagaggctgcatcccagctgcacatcgccaggaagctggacctcagtaacaacgggctttctgtggccggggtgcattgtgtgctgagggccgtgagtgcgtgctggaccctggcagagctgcacatcagcctgcagcacaaaactgtgatcttcatgtttgcccaggagccagaggagcagaaggggccccaggagagggctgcatttcttgacagcctcatgctccagatgccctctgagctgcctctgagctcccgaaggatgaggctgacacattgtggcctccaagaaaagcacctagagcagctctgcaaggctctgggaggaagctgccacctcggtcacctccacctcgacttctcaggcaatgctctgggggatgaaggtgcagcccggctggctcagctgctcccagggctgggagctctgcagtccttgaacctcagtgagaacggtttgtccctggatgccgtgttgggtttggttcggtgcttctccactctgcagtggctcttccgcttggacatcagctttgaaagccaacacatcctcctgagaggggacaagacaagcagggatatgtgggccactggatctttgccagacttcccagctgcagccaagttcttagggttccgtcagcgctgcatccccaggagcctctgcctcagtgagtgtcctctggagcccccaagcctcacccgcctctgtgccactctgaaggactgcccgggacccctggaactgcaattgtcctgtgagttcctgagtgaccagagcctggagactctactggactgcttacctcaactccctcagctgagcctgctgcagctgagccagacgggactgtccccgaaaagccccttcctgctggccaacaccttaagcctgtgtccacgggttaaaaaggtggatctcaggtccctgcaccatgcaactttgcacttcagatccaacgaggaggaggaaggcgtgtgctgtggtctctcagcaaacctgctgggcgacagcggactcagatgccttctggaatgtctgccgcaggtgcccatctccggtttgcttgatctgagtcacaacagcatttctcaggaaagtgccctgtacctgctggagacactgccctcctgcccacgtgtccgggaggcctcagtgaacctgggctctgagcagagcttccggattcacttctccagagaggaccaggctgggaagacactcaggctaagtgagtgcagcttccggccagagcacgtgtccaggctggccaccggcttgagcaagtccctgcagctgacggagctcacgctgacccagtgctgcctgggccagaagcagctggccatcctcctgagcttggtggggcgacccgcagggctgttcagcctcagggtgcaggagccgtgggcggacagagccagggttctctccctgttagaagtctgcgcccaggcctcaggcagtgtcactgaaatcagcatctccgagacccagcagcagctctgtgtccagctggaatttcctcgccaggaagagaatccagaagctgtggcactcaggttggctcactgtgaccttggagcccaccacagccttcttgtcgggcagctgatggagacatgtgccaggctgcagcagctcagcttgtctcaggttaacctctgtgaggacgatgatgccagttccctgctgctgcagagcctcctgctgtccctctctgagctgaagacatttcggctgacctccagctgtgtgagcaccgagggcctcgcccacctggcatctggtctgggccactgccaccacttggaggagctggacttgtctaacaatcaatttgatgaggagggcaccaaggcgctgatgagggcccttgaggggaaatggatgctaaagaggctggacctcagtcaccttctgctgaacagctccaccttggccttgcttactcacagactaagccagatgacctgcctgcagagcctcagactgaacaggaacagtatcggtgatgtcggttgctgccacctttctgaggctctcagggctgccaccagcctagaggagctggacttgagccacaaccagattggagacgctggtgtccagcacttagctaccatcctgcctgggctgccagagctcaggaagatagacctctcagggaatagcatcagctcagccgggggagtgcagttggcagagtctctcgttctttgcaggcgcctggaggagttgatgcttggctgcaatgccctgggggatcccacagccctggggctggctcaggagctgccccagcacctgagggtcctacacctaccattcagccatctgggcccaggtggggccctgagcctggcccaggccctggatggatccccccatttggaagagatcagcttggcggaaaacaacctggctggaggggtcctgcgtttctgtatggagctcccgctgctcagacagatagacctggtttcctgtaagattgacaaccagactgccaagctcctcacctccagcttcacgagctgccctgccctggaagtaatcttgctgtcctggaatctcctcggggatgaggcagctgccgagctggcccaggtgctgccgcagatgggccggctgaagagagtggacctggagaagaatcagatcacagctttgggggcctggctcctggctgaaggactggcccaggggtctagcatccaagtcatccgcctctggaataaccccattccctgcgacatggcccagcacctgaagagccaggagcccaggctggactttgccttctttgacaaccagccccaggccccttggggtacttgatggccccctcaagacctttggaatccagccaagtgatgcacccaaatgatccacctttcgcccactgggataattgactcaggaaagaagagcctcggcagggcgctctgcactccacccaggaggaaggatacgtgtgtcctgctgcagtcctcagggagaacttttttgggaaccaggagctgggtctggacaaaggagtaccctgcattacgtgggatatgtgtgatcaattggggacatgcgacacacaatgagggtgtcatgacaatgcatgacacgtacggttatatgtggcagtgtgaccccttgacatgtggcgttacatgaaagtcagtgtggcacgtgttctgtggcatgggtgctggcatcccaagtagcaggatacatgattgttggtctatatatgacacatgacaaatgtccatgtcacaggactcatggctggccagatgacctcaggctggcccaagatctaatttattaatttttaaagcaaatacatatttatagattgtgtgtatggagcagctaagtcaggaaaagtcttccgcccgagctgggaggggagagtgtccatgcactgaccagtccaggggctcaagggccagggctctggaacaagccagggactcagccattaagtcccctcctgcctcaatcctcagcctacccatctataaacttgatgactcctcccttacttacatactagcttccaaggacaggtggaggtagggccagcctggcgggagtggagaagcccagtctgtcctatgtaagggacaaagccaggtctaatggtactgggtagggggcactgccaagacaataagctaggctactgggtccagctactactttggtgggattcaggtgagtctccatgcacttcacatgttacccagtgttcttgttacttccaaggagaaccaagaatggctctgtcacactcgaagccaggcttgatcaataaacacaatggtattcc

SEQ ID NO: 159661 - DNA, 3552 bp, Homo sapiens
  Payload ID: 11248
  Gene Symbol: NLRC5
  Gene Name: NLR family, CARD domain containing 5
  ENST ID: ENST00000538805
  CDS Start-End: 1-3541
ccatctgaactgtttccaggccctgttcctttttgaattccgccagctcaacttgatcacgaggttcctgacaccgtccgagctcctttttgatctgtacctgagccctgaatcggaccacgacactgtcttccagtacctggagaagaacgctgaccaagtcctgctgatctttgatgggctagatgaggccctccagcctatgggtcctgatggcccaggcccagtcctcacccttttctcccatctctgcaatgggaccctcctgcctggctgccgggtgatggctacctcccgtccagggaagctgcctgcctgcctgcctgcagaggcagccatggtccacatgttgggctttgatgggccacgggtggaagaatatgtgaatcacttcttcagcgcccagccatcgcgggagggggccctggtggagttacagacaaatggacgtctccgaagcctgtgtgcggtgcccgcactgtgccaagtcgcctgtctctgcctccaccatctgcttcctgaccacgccccaggccagtctgtggccctcctgcccaacatgactcagctctatatgcagatggtgctcgccctcagcccccctgggcacttgcccacctcgtccctactggacctgggggaggtggccctgaggggcctggagacagggaaggttatcttctatgcaaaagatattgctccacccttgatagcttttggggccactcacagcctgctgacttccttctgcgtctgcacaggccctgggcaccagcagacaggctatgctttcacccacctcagcctgcaggagtttcttgctgccctgcacctgatggccagccccaaggtgaacaaagacacacttacccagtatgttaccctccattcccgctgggtacagcggaccaaagctagactgggcctctcagaccacctccccaccttcctggcgggcctggcatcctgcacctgccgccccttccttagccacctggcgcagggcaatgaggactgtgtgggtgccaagcaggctgctgtagtgcaggtgttgaagaagttggccacccgcaagctcacagggccaaaggttgtagagctgtgtcactgtgtggatgagacacaggagcctgagctggccagtctcaccgcacaaagcctcccctatcaactgcccttccacaatttcccactgacctgcaccgacctggccaccctgaccaacatcctagagcacagggaggcccccatccacctggattttgatggctgtcccctggagccccactgccctgaggctctggtaggctgtgggcagatagagaatctcagctttaagagcaggaagtgtggggatgcctttgcagaagccctctccaggagcttgccgacaatggggaggctgcagatgctggggttagcaggaagtaaaatcactgcccgaggcatcagccacctggtgaaagctttgcctctctgtccacagctgaaagaagtcagttttcgggacaaccagctcagtgaccaggtggtgctgaacattgtggaggttctccctcacctaccacggctccggaagcttgacctgagcagcaacagcatctgcgtgtcaaccctactctgcttggcaagggtggcagtcacgtgtcctaccgtcaggatgcttcaggccagggaggcggacctcatcttccttctttccccgcccacagagacaactgcagagctacaaagagctccagacctgcaggaaagtgacggccagaggaaaggggctcagagcagaagcttgacgctcaggctgcagaagtgtcagctccaggtccacgatgcggaggccctcatagccctgctccaggaaggccctcacctggaggaagtggacctctcagggaaccagctggaagatgaaggctgtcggctgatggcagaggctgcatcccagctgcacatcgccaggaagctggacctcagtaacaacgggctttctgtggccggggtgcattgtgtgctgagggccgtgagtgcgtgctggaccctggcagagctgcacatcagcctgcagcacaaaactgtgatcttcatgtttgcccaggagccagaggagcagaaggggccccaggagagggctgcatttcttgacagcctcatgctccagatgccctctgagctgcctctgagctcccgaaggatgaggctgacacattgtggcctccaagaaaagcacctagagcagctctgcaaggctctgggaggaagctgccacctcggtcacctccacctcgacttctcaggcaatgctctgggggatgaaggtgcagcccggctggctcagctgctcccagggctgggagctctgcagtccttgaacctcagtgagaacggtttgtccctggatgccgtgttgggtttggttcggtgcttctccactctgcagtggctcttccgcttggacatcagctttgaaagccaacacatcctcctgagaggggacaagacaagcagggatatgtgggccactggatctttgccagacttcccagctgcagccaagttcttagggttccgtcagcgctgcatccccaggagcctctgcctcagtgagtgtcctctggagcccccaagcctcacccgcctctgtgccactctgaaggactgcccgggacccctggaactgcaattgtcctgtgagttcctgagtgaccagagcctggagactctactggactgcttacctcaactccctcagctgagcctgctgcagctgagccagacgggactgtccccgaaaagccccttcctgctggccaacaccttaagcctgtgtccacgggttaaaaaggtggatctcaggtccctgcaccatgcaactttgcacttcagatccaacgaggaggaggaaggcgtgtgctgtgggttcacaggctgcagcctcagccaggagcacgtagagtcactctgctggttgctgagcaagtgtaaagacctcagccaggtggatctctcagcaaacctgctgggcgacagcggactcagatgccttctggaatgtctgccgcaggtgcccatctccggtttgcttgatctgagtcacaacagcatttctcaggaaagtgccctgtacctgctggagacactgccctcctgcccacgtgtccgggaggcctcagtgaacctgggctctgagcagagcttccggattcacttctccagagaggaccaggctgggaagacactcaggctaagtgagtgcagcttccggccagagcacgtgtccaggctggccaccggcttgagcaagtccctgcagctgacggagctcacgctgacccagtgctgcctgggccagaagcagctggccatcctcctgagcttggtggggcgacccgcagggctgttcagcctcagagactccacaaggcacacagagaaactgtccttccccacactggaggcctgtgctttgggatttaagaaaaaaagaaagaaagaaagaaagaaggtttcagaggatactgaactgaggacaaaaataaactgaaacgaagttct

SEQ ID NO: 159662 - DNA, 5832 bp, Homo sapiens
  Payload ID: 11248
  Gene Symbol: NLRC5
  Gene Name: NLR family, CARD domain containing 5
  ENST ID: ENST00000545081
  CDS Start-End: 1-3172
gtccgagctcctttttgatctgtacctgagccctgaatcggaccacgacactgtcttccagtacctggagaagaacgctgaccaagtcctgctgatctttgatgggctagatgaggccctccagcctatgggtcctgatggcccaggcccagtcctcacccttttctcccatctctgcaatgggaccctcctgcctggctgccgggtgatggctacctcccgtccagggaagctgcctgcctgcctgcctgcagaggcagccatggtccacatgttgggctttgatgggccacgggtggaagaatatgtgaatcacttcttcagcgcccagccatcgcgggagggggccctggtggagttacagacaaatggacgtctccgaagcctgtgtgcggtgcccgcactgtgccaagtcgcctgtctctgcctccaccatctgcttcctgaccacgccccaggccagtctgtggccctcctgcccaacatgactcagctctatatgcagatggtgctcgccctcagcccccctgggcacttgcccacctcgtccctactggacctgggggaggtggccctgaggggcctggagacagggaaggttatcttctatgcaaaagatattgctccacccttgatagcttttggggccactcacagcctgctgacttccttctgcgtctgcacaggccctgggcaccagcagacaggctatgctttcacccacctcagcctgcaggagtttcttgctgccctgcacctgatggccagccccaaggtgaacaaagacacacttacccagtatgttaccctccattcccgctgggtacagcggaccaaagctagactgggcctctcagaccacctccccaccttcctggcgggcctggcatcctgcacctgccgccccttccttagccacctggcgcagggcaatgaggactgtgtgggtgccaagcaggctgctgtagtgcaggtgttgaagaagttggccacccgcaagctcacagggccaaaggttgtagagctgtgtcactgtgtggatgagacacaggagcctgagctggccagtctcaccgcacaaagcctcccctatcaactgcccttccacaatttcccactgacctgcaccgacctggccaccctgaccaacatcctagagcacagggaggcccccatccacctggattttgatggctgtcccctggagccccactgccctgaggctctggtaggctgtgggcagatagagaatctcagctttaagagcaggaagtgtggggatgcctttgcagaagccctctccaggagcttgccgacaatggggaggctgcagatgctggggttagcaggaagtaaaatcactgcccgaggcatcagccacctggtgaaagctttgcctctctgtccacagctgaaagaagtcagttttcgggacaaccagctcagtgaccaggtggtgctgaacattgtggaggttctccctcacctaccacggctccggaagcttgacctgagcagcaacagcatctgcgtgtcaaccctactctgcttggcaagggtggcagtcacgtgtcctaccgtcaggatgcttcaggccagggaggcggacctcatcttccttctttccccgcccacagagacaactgcagagctacaaagagctccagacctgcaggaaagtgacggccagaggaaaggggctcagagcagaagcttgacgctcaggctgcagaagtgtcagctccaggtccacgatgcggaggccctcatagccctgctccaggaaggccctcacctggaggaagtggacctctcagggaaccagctggaagatgaaggctgtcggctgatggcagaggctgcatcccagctgcacatcgccaggaagctggacctcagtaacaacgggctttctgtggccggggtgcattgtgtgctgagggccgtgagtgcgtgctggaccctggcagagctgcacatcagcctgcagcacaaaactgtgatcttcatgtttgcccaggagccagaggagcagaaggggccccaggagagggctgcatttcttgacagcctcatgctccagatgccctctgagctgcctctgagctcccgaaggatgaggctgacacattgtggcctccaagaaaagcacctagagcagctctgcaaggctctgggaggaagctgccacctcggtcacctccacctcgacttctcaggcaatgctctgggggatgaaggtgcagcccggctggctcagctgctcccagggctgggagctctgcagtccttgaacctcagtgagaacggtttgtccctggatgccgtgttgggtttggttcggtgcttctccactctgcagtggctcttccgcttggacatcagctttgaaagccaacacatcctcctgagaggggacaagacaagcagggatatgtgggccactggatctttgccagacttcccagctgcagccaagttcttagggttccgtcagcgctgcatccccaggagcctctgcctcagtgagtgtcctctggagcccccaagcctcacccgcctctgtgccactctgaaggactgcccgggacccctggaactgcaattgtcctgtgagttcctgagtgaccagagcctggagactctactggactgcttacctcaactccctcagctgagcctgctgcagctgagccagacgggactgtccccgaaaagccccttcctgctggccaacaccttaagcctgtgtccacgggttaaaaaggtggatctcaggtccctgcaccatgcaactttgcacttcagatccaacgaggaggaggaaggcgtgtgctgtggcaggttcacaggctgcagcctcagccaggagcacgtagagtcactctgctggttgctgagcaagtgtaaagacctcagccaggtggatctctcagcaaacctgctgggcgacagcggactcagatgccttctggaatgtctgccgcaggtgcccatctccggtttgcttgatctgagtcacaacagcatttctcaggaaagtgccctgtacctgctggagacactgccctcctgcccacgtgtccgggaggcctcagtgaagtgcctaggaagctggcatgtctgggcaccgtgcttccccaggcccttctctctgcagcctgggctctgagcagagcttccggattcacttctccagagaggaccaggctgggaagacactcaggctaagtgagtgcagcttccggccagagcacgtgtccaggctggccaccggcttgagcaagtccctgcagctgacggagctcacgctgacccagtgctgcctgggccagaagcagctggccatcctcctgagcttggtggggcgacccgcagggctgttcagcctcagggtgcaggagccgtgggcggacagagccagggttctctccctgttagaagtctgcgcccaggcctcaggcagtgtcactgaaatcagcatctccgagacccagcagcagctctgtgtccagctggaatttcctcgccaggaagagaatccagaagctgtggcactcaggttggctcactgtgaccttggagcccaccacagccttcttgtcgggcagctgatggagacatgtgccaggctgcagcagctcagcttgtctcaggttaacctctgtgaggacgatgatgccagttccctgctgctgcagagcctcctgctgtccctctctgagctgaagacatttcggctgacctccagctgtgtgagcaccgagggcctcgcccacctggcatctggtctgggccactgccaccacttggaggagctggacttgtctaacaatcaatttgatgaggagggcaccaaggcgctgatgagggcccttgaggggaaatggatgctaaagaggctggacctcagtcaccttctgctgaacagctccaccttggccttgcttactcacagactaagccagatgacctgcctgcagagcctcagactgaacaggaacagtatcggtgatgtcggttgctgccacctttctgaggctctcagggctgccaccagcctagaggagctggacttgagccacaaccagattggagacgctggtgtccagcacttagctaccatcctgcctgggctgccagagctcaggaagatagacctctcagggaatagcatcagctcagccgggggagtgcagttggcagagtctctcgttctttgcaggcgcctggaggagttgatgcttggctgcaatgccctgggggatcccacagccctggggctggctcaggagctgccccagcacctgagggtcctacacctaccattcagccatctgggcccaggtggggccctgagcctggcccaggccctggatggatccccccatttggaagagatcagcttggcggaaaacaacctggctggaggggtcctgcgtttctgtatggagctcccgctgctcagacagatagacctggtttcctgtaagattgacaaccagactgccaagctcctcacctccagcttcacgagctgccctgccctggaagtaatcttgctgtcctggaatctcctcggggatgaggcagctgccgagctggcccaggtgctgccgcagatgggccggctgaagagagtggacctggagaagaatcagatcacagctttgggggcctggctcctggctgaaggactggcccaggggtctagcatccaagtcatccgcctctggaataaccccattccctgcgacatggcccagcacctgaagagccaggagcccaggctggactttgccttctttgacaaccagccccaggccccttggggtacttgatggccccctcaagacctttggaatccagccaagtgatgcacccaaatgatccacctttcgcccactgggataattgactcaggaaagaagagcctcggcagggcgctctgcactccacccaggaggaaggatacgtgtgtcctgctgcagtcctcagggagaacttttttgggaaccaggagctgggtctggacaaaggagtaccctgcattacgtgggatatgtgtgatcaattggggacatgcgacacacaatgagggtgtcatgacaatgcatgacacgtacggttatatgtggcagtgtgaccccttgacatgtggcgttacatgaaagtcagtgtggcacgtgttctgtggcatgggtgctggcatcccaagtagcaggatacatgattgttggtctatatatgacacatgacaaatgtccatgtcacaggactcatggctggccagatgacctcaggctggcccaagatctaatttattaatttttaaagcaaatacatatttatagattgtgtgtatggagcagctaagtcaggaaaagtcttccgcccgagctgggaggggagagtgtccatgcactgaccagtccaggggctcaagggccagggctctggaacaagccagggactcagccattaagtcccctcctgcctcaatcctcagcctacccatctataaacttgatgactcctcccttacttacatactagcttccaaggacaggtggaggtagggccagcctggcgggagtggagaagcccagtctgtcctatgtaagggacaaagccaggtctaatggtactgggtagggggcactgccaagacaataagctaggctactgggtccagctactactttggtgggattcaggtgagtctccatgcacttcacatgttacccagtgttcttgttacttccaaggagaaccaagaatggctctgtcacactcgaagccaggcttgatcaataaacacaatggtattcc

SEQ ID NO: 159663 - DNA, 4121 bp, Homo sapiens
  Payload ID: 11248
  Gene Symbol: NLRC5
  Gene Name: NLR family, CARD domain containing 5
  ENST ID: ENST00000538453
  CDS Start-End: 1-2109
cagaagtgtcagctccaggtccacgatgcggaggccctcatagccctgctccaggaaggccctcacctggaggaagtggacctctcagggaaccagctggaagatgaaggctgtcggctgatggcagaggctgcatcccagctgcacatcgccaggaagctggacctcagtaacaacgggctttctgtggccggggtgcattgtgtgctgagggccgtgagtgcgtgctggaccctggcagagctgcacatcagcctgcagcacaaaactgtgatcttcatgtttgcccaggagccagaggagcagaaggggccccaggagagggctgcatttcttgacagcctcatgctccagatgccctctgagctgcctctgagctcccgaaggatgaggctgacacattgtggcctccaagaaaagcacctagagcagctctgcaaggctctgggaggaagctgccacctcggtcacctccacctcgacttctcaggcaatgctctgggggatgaaggtgcagcccggctggctcagctgctcccagggctgggagctctgcagtccttgaacctcagtgagaacggtttgtccctggatgccgtgttgggtttggttcggtgcttctccactctgcagtggctcttccgcttggacatcagctttgaaagccaacacatcctcctgagaggggacaagacaagcagggatatgtgggccactggatctttgccagacttcccagctgcagccaagttcttagggttccgtcagcgctgcatccccaggagcctctgcctcagtgagtgtcctctggagcccccaagcctcacccgcctctgtgccactctgaaggactgcccgggacccctggaactgcaattgtcctgtgagttcctgagtgaccagagcctggagactctactggactgcttacctcaactccctcagctgagcctgctgcagctgagccagacgggactgtccccgaaaagccccttcctgctggccaacaccttaagcctgtgtccacgggttaaaaaggtggatctcaggtccctgcaccatgcaactttgcacttcagatccaacgaggaggaggaaggcgtgtgctgtggcaggttcacaggctgcagcctcagccaggagcacgtagagtcactctgctggttgctgagcaagtgtaaagacctcagccaggtggatctctcagcaaacctgctgggcgacagcggactcagatgccttctggaatgtctgccgcaggtgcccatctccggtttgcttgatctgagtcacaacagcatttctcaggaaagtgccctgtacctgctggagacactgccctcctgcccacgtgtccgggaggcctcagtgaacctgggctctgagcagagcttccggattcacttctccagagaggaccaggctgggaagacactcaggctaagtgagtgcagcttccggccagagcacgtgtccaggctggccaccggcttgagcaagtccctgcagctgacggagctcacgctgacccagtgctgcctgggccagaagcagctggccatcctcctgagcttggtggggcgacccgcagggctgttcagcctcagggtgcaggagccgtgggcggacagagccagggttctctccctgttagaagtctgcgcccaggcctcaggcagtgtcactgaaatcagcatctccgagacccagcagcagctctgtgtccagctggaatttcctcgccaggaagagaatccagaagctgtggcactcaggttggctcactgtgaccttggagcccaccacagccttcttgtcgggcagctgatggagacatgtgccaggctgcagcagctcagcttgtctcaggttaacctctgtgaggacgatgatgccagttccctgctgctgcagagcctcctgctgtccctctctgagctgaagacatttcgcattcagagctcccaagacccagggcggctcctgcctgacctgttgccctttgacccccaccaggctgacctccagctgtgtgagcaccgagggcctcgcccacctggcatctggtctgggccactgccaccacttggaggagctggacttgtctaacaatcaatttgatgaggagggcaccaaggcgctgatgagggcccttgaggggaaatggatgctaaagaggctggacctcagtcaccttctgctgaacagctccaccttggccttgcttactcacagactaagccagatgacctgcctgcagagcctcagactgaacaggaacagtatcggtgatgtcggttgctgccacctttctgaggctctcagggctgccaccagcctagaggagctggacttgagccacaaccagattggagacgctggtgtccagcacttagctaccatcctgcctgggctgccagagctcaggaagatagacctctcagggaatagcatcagctcagccgggggagtgcagttggcagagtctctcgttctttgcaggcgcctggaggagttgatgcttggctgcaatgccctgggggatcccacagccctggggctggctcaggagctgccccagcacctgagggtcctacacctaccattcagccatctgggcccaggtggggccctgagcctggcccaggccctggatggatccccccatttggaagagatcagcttggcggaaaacaacctggctggaggggtcctgcgtttctgtatggagctcccgctgctcagacagatagacctggtttcctgtaagattgacaaccagactgccaagctcctcacctccagcttcacgagctgccctgccctggaagtaatcttgctgtcctggaatctcctcggggatgaggcagctgccgagctggcccaggtgctgccgcagatgggccggctgaagagagtggacctggagaagaatcagatcacagctttgggggcctggctcctggctgaaggactggcccaggggtctagcatccaagtcatccgcctctggaataaccccattccctgcgacatggcccagcacctgaagagccaggagcccaggctggactttgccttctttgacaaccagccccaggccccttggggtacttgatggccccctcaagacctttggaatccagccaagtgatgcacccaaatgatccacctttcgcccactgggataattgactcaggaaagaagagcctcggcagggcgctctgcactccacccaggaggaaggatacgtgtgtcctgctgcagtcctcagggagaacttttttgggaaccaggagctgggtctggacaaaggagtaccctgcattacgtgggatatgtgtgatcaattggggacatgcgacacacaatgagggtgtcatgacaatgcatgacacgtacggttatatgtggcagtgtgaccccttgacatgtggcgttacatgaaagtcagtgtggcacgtgttctgtggcatgggtgctggcatcccaagtagcaggatacatgattgttggtctatatatgacacatgacaaatgtccatgtcacaggactcatggctggccagatgacctcaggctggcccaagatctaatttattaatttttaaagcaaatacatatttatagattgtgtgtatggagcagctaagtcaggaaaagtcttccgcccgagctgggaggggagagtgtccatgcactgaccagtccaggggctcaagggccagggctctggaacaagccagggactcagccattaagtcccctcctgcctcaatcctcagcctacccatctataaacttgatgactcctcccttacttacatactagcttccaaggacaggtggaggtagggccagcctggcgggagtggagaagcccagtctgtcctatgtaagggacaaagccaggtctaatggtactgggtagggggcactgccaagacaataagctaggctactgggtccagctactactttggtgggattcaggtgagtctccatgcacttcacatgttacccagtgttcttgttacttccaaggagaaccaagaatggctctgtcacactcgaagccaggcttgatcaataaacacaatggtattccacgtctagcgtg

SEQ ID NO: 159664 - DNA, 485 bp, Homo sapiens
  Payload ID: 11248
  Gene Symbol: NLRC5
  Gene Name: NLR family, CARD domain containing 5
  ENST ID: ENST00000545349
  CDS Start-End: 1-332
tggcatctggtctgggccactgccaccacttggaggagctggacttgtctaacaatcaatttgatgaggagggcaccaaggcgctgatgagggcccttgaggggaaatggatgctaaagaggctggacctcagtcaccttctgctgaacagctccaccttggccttgcttactcacagactaagccagatgacctgcctgcagagcctcagtctcactctgtcgcccaggctggagtgcagtggcatgatctcacttcactgcaacctctgcctcctgggttcaagcgattctggtgcctcagccgcccaagtagctgggattacagactgaacaggaacagtatcggtgatgtcggttgctgccacctttctgaggctctcagggctgccaccagcctagaggagctggacttgagccacaaccagattggagacgctggtgtccagcacttagctaccatcctgcctgggctgccagagctca

SEQ ID NO: 159665 - DNA, 5131 bp, Homo sapiens
  Payload ID: 11249
  Gene Symbol: NLRP1
  Gene Name: NLR family, pyrin domain containing 1
  Uniprot ID: Q9C000
  ENST ID: ENST00000262467
  CDS Start-End: 575-4702
gtgacgtttccttcctgctcttgttgactaggcgctgttcttgctggctggtgccccagggcctggagaggtctgaagaaacctgggagccagcagcccggggctccactctgggttctgaaagcccattccctgctctgcggctcctcccaccccacctcttctcagccttgcagctcaagggttgatctcaggagtccaggacccaggagagggaagaatctgaggaacacagaacagtgagcgttgcccacaccccatctcccgtcaccacatctcccctcaccctcaccctccctgcctggccctggaccccatcccaggacctccctatcagctgacttcttccagtgtcttgcaggcccctctgggctcctccctcccctggcttttcctaccactccccctctatcggcgtctatctgtaggtgccctgggatttataaaactgggttccgaatgctgaataagagacggtaagagccaaggcaaaggacagcactgttctctgcctgcctgataccctcaccacctgggaacatcccccagacaccctcttaactccgggacagagatggctggcggagcctggggccgcctggcctgttacttggagttcctgaagaaggaggagctgaaggagttccagcttctgctcgccaataaagcgcactccaggagctcttcgggtgagacacccgctcagccagagaagacgagtggcatggaggtggcctcgtacctggtggctcagtatggggagcagcgggcctgggacctagccctccatacctgggagcagatggggctgaggtcactgtgcgcccaagcccaggaaggggcaggccactctccctcattcccctacagcccaagtgaaccccacctggggtctcccagccaacccacctccaccgcagtgctaatgccctggatccatgaattgccggcggggtgcacccagggctcagagagaagggttttgagacagctgcctgacacatctggacgccgctggagagaaatctctgcctcactcctctaccaagctcttccaagctccccagaccatgagtctccaagccaggagtcacccaacgcccccacatccacagcagtgctggggagctggggatccccacctcagcccagcctagcacccagagagcaggaggctcctgggacccaatggcctctggatgaaacgtcaggaatttactacacagaaatcagagaaagagagagagagaaatcagagaaaggcaggcccccatgggcagcggtggtaggaacgcccccacaggcgcacaccagcctacagccccaccaccacccatgggagccttctgtgagagagagcctctgttccacatggccctggaaaaatgaggattttaaccaaaaattcacacagctgctacttctacaaagacctcaccccagaagccaagatcccctggtcaagagaagctggcctgattatgtggaggagaatcgaggacatttaattgagatcagagacttatttggcccaggcctggatacccaagaacctcgcatagtcatactgcagggggctgctggaattgggaagtcaacactggccaggcaggtgaaggaagcctgggggagaggccagctgtatggggaccgcttccagcatgtcttctacttcagctgcagagagctggcccagtccaaggtggtgagtctcgctgagctcatcggaaaagatgggacagccactccggctcccattagacagatcctgtctaggccagagcggctgctcttcatcctcgatggtgtagatgagccaggatgggtcttgcaggagccgagttctgagctctgtctgcactggagccagccacagccggcggatgcactgctgggcagtttgctggggaaaactatacttcccgaggcatccttcctgatcacggctcggaccacagctctgcagaacctcattccttctttggagcaggcacgttgggtagaggtcctggggttctctgagtccagcaggaaggaatatttctacagatatttcacagatgaaaggcaagcaattagagcctttaggttggtcaaatcaaacaaagagctctgggccctgtgtcttgtgccctgggtgtcctggctggcctgcacttgcctgatgcagcagatgaagcggaaggaaaaactcacactgacttccaagaccaccacaaccctctgtctacattaccttgcccaggctctccaagctcagccattgggaccccagctcagagacctctgctctctggctgctgagggcatctggcaaaaaaagacccttttcagtccagatgacctcaggaagcatgggttagatggggccatcatctccaccttcttgaagatgggtattcttcaagagcaccccatccctctgagctacagcttcattcacctctgtttccaagagttctttgcagcaatgtcctatgtcttggaggatgagaaggggagaggtaaacattctaattgcatcatagatttggaaaagacgctagaagcatatggaatacatggcctgtttggggcatcaaccacacgtttcctattgggcctgttaagtgatgagggggagagagagatggagaacatctttcactgccggctgtctcaggggaggaacctgatgcagtgggtcccgtccctgcagctgctgctgcagccacactctctggagtccctccactgcttgtacgagactcggaacaaaacgttcctgacacaagtgatggcccatttcgaagaaatgggcatgtgtgtagaaacagacatggagctcttagtgtgcactttctgcattaaattcagccgccacgtgaagaagcttcagctgattgagggcaggcagcacagatcaacatggagccccaccatggtagtcctgttcaggtgggtcccagtcacagatgcctattggcagattctcttctccgtcctcaaggtcaccagaaacctgaaggagctggacctaagtggaaactcgctgagccactctgcagtgaagagtctttgtaagaccctgagacgccctcgctgcctcctggagaccctgcggttggctggctgtggcctcacagctgaggactgcaaggaccttgcctttgggctgagagccaaccagaccctgaccgagctggacctgagcttcaatgtgctcacggatgctggagccaaacacctttgccagagactgagacagccgagctgcaagctacagcgactgcagctggtcagctgtggcctcacgtctgactgctgccaggacctggcctctgtgcttagtgccagccccagcctgaaggagctagacctgcagcagaacaacctggatgacgttggcgtgcgactgctctgtgaggggctcaggcatcctgcctgcaaactcatacgcctggggctggaccagacaactctgagtgatgagatgaggcaggaactgagggccctggagcaggagaaacctcagctgctcatcttcagcagacggaaaccaagtgtgatgacccctactgagggcctggatacgggagagatgagtaatagcacatcctcactcaagcggcagagactcggatcagagagggcggcttcccatgttgctcaggctaatctcaaactcctggacgtgagcaagatcttcccaattgctgagattgcaggcaagagccacgaggaaagctccccagaggtagtaccggtggaactcttgtgcgtgccttctcctgcctctcaaggggacctgcatacgaagcctttggggactgacgatgacttctggggccccacggggcctgtggctactgaggtagttgacaaagaaaagaacttgtaccgagttcacttccctgtagctggctcctaccgctggcccaacacgggtctctgctttgtgatgagagaagcggtgaccgttgagattgaattctgtgtgtgggaccagttcctgggtgagatcaacccacagcacagctggatggtggcagggcctctgctggacatcaaggctgagcctggagctgtggaagctgtgcacctccctcactttgtggctctccaagggggccatgtggacacatccctgttccaaatggcccactttaaagaggaggggatgctcctggagaagccagccagggtggagctgcatcacatagttctggaaaaccccagcttctcccccttgggagtcctcctgaaaatgatccataatgccctgcgcttcattcccgtcacctctgtggtgttgctttaccaccgcgtccatcctgaggaagtcaccttccacctctacctgatcccaagtgactgctccattcggaaggccatagatgatctagaaatgaaattccagtttgtgcgaatccacaagccacccccgctgaccccactttatatgggctgtcgttacactgtgtctgggtctggttcagggatgctggaaatactccccaaggaactggagctctgctatcgaagccctggagaagaccagctgttctcggagttctacgttggccacttgggatcagggatcaggctgcaagtgaaagacaagaaagatgagactctggtgtgggaggccttggtgaaaccaggaaggaacaccagccagccgtggaacctcaggtgcaacagagacgccaggagatactagtgcccagcagcctgcggcagtaccaatgaagccagagagggcttggtggatgacaaggaggcctgagtagaccgcaggtgggtctgagaaatgggcttaggtgaggcaggtctttgaaggatttgttcttaatcatatgcgagatgctcaaaaggctggatgcctgcttttgtgggtgaagagcaagaagagaaaacaggttgtacacatacagatgcagatggagagacagagaaaaaaaaggaagaaggcagagaaatgcaccaattcttgagctgtattatctctggaccttgggattgtgggaggctttattttactactgattttgcctacactgttttctcaatttctagttttctacaaagatgatgtgttagctttttcacgcattaagattaaaatttaaaacagaccacacaataaata

SEQ ID NO: 159666 - DNA, 5075 bp, Homo sapiens
  Payload ID: 11249
  Gene Symbol: NLRP1
  Gene Name: NLR family, pyrin domain containing 1
  Uniprot ID: Q9C000
  ENST ID: ENST00000269280
  CDS Start-End: 159-4448
tgggagccagcagcccggggctccactctgggttctgaaagcccattccctgctctgcggctcctcccaccccacctcttctcagccttgcagctcaagggttgatctcaggagtccaggacccaggagagggaagaatctgaggaacacagaacaagatggctggcggagcctggggccgcctggcctgttacttggagttcctgaagaaggaggagctgaaggagttccagcttctgctcgccaataaagcgcactccaggagctcttcgggtgagacacccgctcagccagagaagacgagtggcatggaggtggcctcgtacctggtggctcagtatggggagcagcgggcctgggacctagccctccatacctgggagcagatggggctgaggtcactgtgcgcccaagcccaggaaggggcaggccactctccctcattcccctacagcccaagtgaaccccacctggggtctcccagccaacccacctccaccgcagtgctaatgccctggatccatgaattgccggcggggtgcacccagggctcagagagaagggttttgagacagctgcctgacacatctggacgccgctggagagaaatctctgcctcactcctctaccaagctcttccaagctccccagaccatgagtctccaagccaggagtcacccaacgcccccacatccacagcagtgctggggagctggggatccccacctcagcccagcctagcacccagagagcaggaggctcctgggacccaatggcctctggatgaaacgtcaggaatttactacacagaaatcagagaaagagagagagagaaatcagagaaaggcaggcccccatgggcagcggtggtaggaacgcccccacaggcgcacaccagcctacagccccaccaccacccatgggagccttctgtgagagagagcctctgttccacatggccctggaaaaatgaggattttaaccaaaaattcacacagctgctacttctacaaagacctcaccccagaagccaagatcccctggtcaagagaagctggcctgattatgtggaggagaatcgaggacatttaattgagatcagagacttatttggcccaggcctggatacccaagaacctcgcatagtcatactgcagggggctgctggaattgggaagtcaacactggccaggcaggtgaaggaagcctgggggagaggccagctgtatggggaccgcttccagcatgtcttctacttcagctgcagagagctggcccagtccaaggtggtgagtctcgctgagctcatcggaaaagatgggacagccactccggctcccattagacagatcctgtctaggccagagcggctgctcttcatcctcgatggtgtagatgagccaggatgggtcttgcaggagccgagttctgagctctgtctgcactggagccagccacagccggcggatgcactgctgggcagtttgctggggaaaactatacttcccgaggcatccttcctgatcacggctcggaccacagctctgcagaacctcattccttctttggagcaggcacgttgggtagaggtcctggggttctctgagtccagcaggaaggaatatttctacagatatttcacagatgaaaggcaagcaattagagcctttaggttggtcaaatcaaacaaagagctctgggccctgtgtcttgtgccctgggtgtcctggctggcctgcacttgcctgatgcagcagatgaagcggaaggaaaaactcacactgacttccaagaccaccacaaccctctgtctacattaccttgcccaggctctccaagctcagccattgggaccccagctcagagacctctgctctctggctgctgagggcatctggcaaaaaaagacccttttcagtccagatgacctcaggaagcatgggttagatggggccatcatctccaccttcttgaagatgggtattcttcaagagcaccccatccctctgagctacagcttcattcacctctgtttccaagagttctttgcagcaatgtcctatgtcttggaggatgagaaggggagaggtaaacattctaattgcatcatagatttggaaaagacgctagaagcatatggaatacatggcctgtttggggcatcaaccacacgtttcctattgggcctgttaagtgatgagggggagagagagatggagaacatctttcactgccggctgtctcaggggaggaacctgatgcagtgggtcccgtccctgcagctgctgctgcagccacactctctggagtccctccactgcttgtacgagactcggaacaaaacgttcctgacacaagtgatggcccatttcgaagaaatgggcatgtgtgtagaaacagacatggagctcttagtgtgcactttctgcattaaattcagccgccacgtgaagaagcttcagctgattgagggcaggcagcacagatcaacatggagccccaccatggtagtcctgttcaggtgggtcccagtcacagatgcctattggcagattctcttctccgtcctcaaggtcaccagaaacctgaaggagctggacctaagtggaaactcgctgagccactctgcagtgaagagtctttgtaagaccctgagacgccctcgctgcctcctggagaccctgcggttggctggctgtggcctcacagctgaggactgcaaggaccttgcctttgggctgagagccaaccagaccctgaccgagctggacctgagcttcaatgtgctcacggatgctggagccaaacacctttgccagagactgagacagccgagctgcaagctacagcgactgcagctggtcagctgtggcctcacgtctgactgctgccaggacctggcctctgtgcttagtgccagccccagcctgaaggagctagacctgcagcagaacaacctggatgacgttggcgtgcgactgctctgtgaggggctcaggcatcctgcctgcaaactcatacgcctggggctggaccagacaactctgagtgatgagatgaggcaggaactgagggccctggagcaggagaaacctcagctgctcatcttcagcagacggaaaccaagtgtgatgacccctactgagggcctggatacgggagagatgagtaatagcacatcctcactcaagcggcagagactcggatcagagagggcggcttcccatgttgctcaggctaatctcaaactcctggacgtgagcaagatcttcccaattgctgagattgcagaggaaagctccccagaggtagtaccggtggaactcttgtgcgtgccttctcctgcctctcaaggggacctgcatacgaagcctttggggactgacgatgacttctggggccccacggggcctgtggctactgaggtagttgacaaagaaaagaacttgtaccgagttcacttccctgtagctggctcctaccgctggcccaacacgggtctctgctttgtgatgagagaagcggtgaccgttgagattgaattctgtgtgtgggaccagttcctgggtgagatcaacccacagcacagctggatggtggcagggcctctgctggacatcaaggctgagcctggagctgtggaagctgtgcacctccctcactttgtggctctccaagggggccatgtggacacatccctgttccaaatggcccactttaaagaggaggggatgctcctggagaagccagccagggtggagctgcatcacatagttctggaaaaccccagcttctcccccttgggagtcctcctgaaaatgatccataatgccctgcgcttcattcccgtcacctctgtggtgttgctttaccaccgcgtccatcctgaggaagtcaccttccacctctacctgatcccaagtgactgctccattcggaaggaactggagctctgctatcgaagccctggagaagaccagctgttctcggagttctacgttggccacttgggatcagggatcaggctgcaagtgaaagacaagaaagatgagactctggtgtgggaggccttggtgaaaccaggagatctcatgcctgcaactactctgatccctccagcccgcatagccgtaccttcacctctggatgccccgcagttgctgcactttgtggaccagtatcgagagcagctgatagcccgagtgacatcggtggaggttgtcttggacaaactgcatggacaggtgctgagccaggagcagtacgagagggtgctggctgagaacacgaggcccagccagatgcggaagctgttcagcttgagccagtcctgggaccggaagtgcaaagatggactctaccaagccctgaaggagacccatcctcacctcattatggaactctgggagaagggcagcaaaaagggactcctgccactcagcagctgaagtatcaacaccagcccttgacccttgagtcctggctttggctgacccttctttgggtctcagtttctttctctgcaaacaagttgccatctggtttgccttccagcactaaagtaatggaactttgatgatgcctttgctgggcattatgtgtccatgccagggatgccacagggggccccagtccaggtggcctaacagcatctcagggaatgtccatctggagctggcaagacccctgcagacctcatagagcctcatctggtggccacagcagccaagcctagagccctccggatcccatccaggcgcaaagaggaataggagggacatggaaccatttgcctctggctgtgtcacagggtgagccccaaaattggggttcagcgtgggaggccacgtggattcttggctttgtacaggaagatctacaagagcaagccaacagagtaaagtggaaggaagtttattcagaaaataaaggagtatcacagctcttttagaatttgtctagcaggctttccagtttttaccagaaaacccctataaattaaaaattttttacttaaatttaagaattaaaaaaatacaaaaaagaaaaaatgaaaataaaggaataagaagtta

SEQ ID NO: 159667 - DNA, 4656 bp, Homo sapiens
  Payload ID: 11249
  Gene Symbol: NLRP1
  Gene Name: NLR family, pyrin domain containing 1
  Uniprot ID: Q9C000
  ENST ID: ENST00000345221
  CDS Start-End: 367-4656
cttgttgactaggcgctgttcttgctggctggtgccccagggcctggagaggtctgaagaaacctgggagccagcagcccggggctccactctgggttctgaaagcccattccctgctctgcggctcctcccaccccacctcttctcagccttgcagctcaagggttgatctcaggagtccaggacccaggagagggaagaatctgaggaacacagaacagtgccctgggatttataaaactgggttccgaatgctgaataagagacggtaagagccaaggcaaaggacagcactgttctctgcctgcctgataccctcaccacctgggaacatcccccagacaccctcttaactccgggacagagatggctggcggagcctggggccgcctggcctgttacttggagttcctgaagaaggaggagctgaaggagttccagcttctgctcgccaataaagcgcactccaggagctcttcgggtgagacacccgctcagccagagaagacgagtggcatggaggtggcctcgtacctggtggctcagtatggggagcagcgggcctgggacctagccctccatacctgggagcagatggggctgaggtcactgtgcgcccaagcccaggaaggggcaggccactctccctcattcccctacagcccaagtgaaccccacctggggtctcccagccaacccacctccaccgcagtgctaatgccctggatccatgaattgccggcggggtgcacccagggctcagagagaagggttttgagacagctgcctgacacatctggacgccgctggagagaaatctctgcctcactcctctaccaagctcttccaagctccccagaccatgagtctccaagccaggagtcacccaacgcccccacatccacagcagtgctggggagctggggatccccacctcagcccagcctagcacccagagagcaggaggctcctgggacccaatggcctctggatgaaacgtcaggaatttactacacagaaatcagagaaagagagagagagaaatcagagaaaggcaggcccccatgggcagcggtggtaggaacgcccccacaggcgcacaccagcctacagccccaccaccacccatgggagccttctgtgagagagagcctctgttccacatggccctggaaaaatgaggattttaaccaaaaattcacacagctgctacttctacaaagacctcaccccagaagccaagatcccctggtcaagagaagctggcctgattatgtggaggagaatcgaggacatttaattgagatcagagacttatttggcccaggcctggatacccaagaacctcgcatagtcatactgcagggggctgctggaattgggaagtcaacactggccaggcaggtgaaggaagcctgggggagaggccagctgtatggggaccgcttccagcatgtcttctacttcagctgcagagagctggcccagtccaaggtggtgagtctcgctgagctcatcggaaaagatgggacagccactccggctcccattagacagatcctgtctaggccagagcggctgctcttcatcctcgatggtgtagatgagccaggatgggtcttgcaggagccgagttctgagctctgtctgcactggagccagccacagccggcggatgcactgctgggcagtttgctggggaaaactatacttcccgaggcatccttcctgatcacggctcggaccacagctctgcagaacctcattccttctttggagcaggcacgttgggtagaggtcctggggttctctgagtccagcaggaaggaatatttctacagatatttcacagatgaaaggcaagcaattagagcctttaggttggtcaaatcaaacaaagagctctgggccctgtgtcttgtgccctgggtgtcctggctggcctgcacttgcctgatgcagcagatgaagcggaaggaaaaactcacactgacttccaagaccaccacaaccctctgtctacattaccttgcccaggctctccaagctcagccattgggaccccagctcagagacctctgctctctggctgctgagggcatctggcaaaaaaagacccttttcagtccagatgacctcaggaagcatgggttagatggggccatcatctccaccttcttgaagatgggtattcttcaagagcaccccatccctctgagctacagcttcattcacctctgtttccaagagttctttgcagcaatgtcctatgtcttggaggatgagaaggggagaggtaaacattctaattgcatcatagatttggaaaagacgctagaagcatatggaatacatggcctgtttggggcatcaaccacacgtttcctattgggcctgttaagtgatgagggggagagagagatggagaacatctttcactgccggctgtctcaggggaggaacctgatgcagtgggtcccgtccctgcagctgctgctgcagccacactctctggagtccctccactgcttgtacgagactcggaacaaaacgttcctgacacaagtgatggcccatttcgaagaaatgggcatgtgtgtagaaacagacatggagctcttagtgtgcactttctgcattaaattcagccgccacgtgaagaagcttcagctgattgagggcaggcagcacagatcaacatggagccccaccatggtagtcctgttcaggtgggtcccagtcacagatgcctattggcagattctcttctccgtcctcaaggtcaccagaaacctgaaggagctggacctaagtggaaactcgctgagccactctgcagtgaagagtctttgtaagaccctgagacgccctcgctgcctcctggagaccctgcggttggctggctgtggcctcacagctgaggactgcaaggaccttgcctttgggctgagagccaaccagaccctgaccgagctggacctgagcttcaatgtgctcacggatgctggagccaaacacctttgccagagactgagacagccgagctgcaagctacagcgactgcagctggtcagctgtggcctcacgtctgactgctgccaggacctggcctctgtgcttagtgccagccccagcctgaaggagctagacctgcagcagaacaacctggatgacgttggcgtgcgactgctctgtgaggggctcaggcatcctgcctgcaaactcatacgcctggggctggaccagacaactctgagtgatgagatgaggcaggaactgagggccctggagcaggagaaacctcagctgctcatcttcagcagacggaaaccaagtgtgatgacccctactgagggcctggatacgggagagatgagtaatagcacatcctcactcaagcggcagagactcggatcagagagggcggcttcccatgttgctcaggctaatctcaaactcctggacgtgagcaagatcttcccaattgctgagattgcagaggaaagctccccagaggtagtaccggtggaactcttgtgcgtgccttctcctgcctctcaaggggacctgcatacgaagcctttggggactgacgatgacttctggggccccacggggcctgtggctactgaggtagttgacaaagaaaagaacttgtaccgagttcacttccctgtagctggctcctaccgctggcccaacacgggtctctgctttgtgatgagagaagcggtgaccgttgagattgaattctgtgtgtgggaccagttcctgggtgagatcaacccacagcacagctggatggtggcagggcctctgctggacatcaaggctgagcctggagctgtggaagctgtgcacctccctcactttgtggctctccaagggggccatgtggacacatccctgttccaaatggcccactttaaagaggaggggatgctcctggagaagccagccagggtggagctgcatcacatagttctggaaaaccccagcttctcccccttgggagtcctcctgaaaatgatccataatgccctgcgcttcattcccgtcacctctgtggtgttgctttaccaccgcgtccatcctgaggaagtcaccttccacctctacctgatcccaagtgactgctccattcggaaggaactggagctctgctatcgaagccctggagaagaccagctgttctcggagttctacgttggccacttgggatcagggatcaggctgcaagtgaaagacaagaaagatgagactctggtgtgggaggccttggtgaaaccaggagatctcatgcctgcaactactctgatccctccagcccgcatagccgtaccttcacctctggatgccccgcagttgctgcactttgtggaccagtatcgagagcagctgatagcccgagtgacatcggtggaggttgtcttggacaaactgcatggacaggtgctgagccaggagcagtacgagagggtgctggctgagaacacgaggcccagccagatgcggaagctgttcagcttgagccagtcctgggaccggaagtgcaaagatggactctaccaagccctgaaggagacccatcctcacctcattatggaactctgggagaagggcagcaaaaagggactcctgccactcagcagctga

SEQ ID NO: 159668 - DNA, 4332 bp, Homo sapiens
  Payload ID: 11249
  Gene Symbol: NLRP1
  Gene Name: NLR family, pyrin domain containing 1
  Uniprot ID: Q9C000
  ENST ID: ENST00000354411
  CDS Start-End: 1-4332
atggctggcggagcctggggccgcctggcctgttacttggagttcctgaagaaggaggagctgaaggagttccagcttctgctcgccaataaagcgcactccaggagctcttcgggtgagacacccgctcagccagagaagacgagtggcatggaggtggcctcgtacctggtggctcagtatggggagcagcgggcctgggacctagccctccatacctgggagcagatggggctgaggtcactgtgcgcccaagcccaggaaggggcaggccactctccctcattcccctacagcccaagtgaaccccacctggggtctcccagccaacccacctccaccgcagtgctaatgccctggatccatgaattgccggcggggtgcacccagggctcagagagaagggttttgagacagctgcctgacacatctggacgccgctggagagaaatctctgcctcactcctctaccaagctcttccaagctccccagaccatgagtctccaagccaggagtcacccaacgcccccacatccacagcagtgctggggagctggggatccccacctcagcccagcctagcacccagagagcaggaggctcctgggacccaatggcctctggatgaaacgtcaggaatttactacacagaaatcagagaaagagagagagagaaatcagagaaaggcaggcccccatgggcagcggtggtaggaacgcccccacaggcgcacaccagcctacagccccaccaccacccatgggagccttctgtgagagagagcctctgttccacatggccctggaaaaatgaggattttaaccaaaaattcacacagctgctacttctacaaagacctcaccccagaagccaagatcccctggtcaagagaagctggcctgattatgtggaggagaatcgaggacatttaattgagatcagagacttatttggcccaggcctggatacccaagaacctcgcatagtcatactgcagggggctgctggaattgggaagtcaacactggccaggcaggtgaaggaagcctgggggagaggccagctgtatggggaccgcttccagcatgtcttctacttcagctgcagagagctggcccagtccaaggtggtgagtctcgctgagctcatcggaaaagatgggacagccactccggctcccattagacagatcctgtctaggccagagcggctgctcttcatcctcgatggtgtagatgagccaggatgggtcttgcaggagccgagttctgagctctgtctgcactggagccagccacagccggcggatgcactgctgggcagtttgctggggaaaactatacttcccgaggcatccttcctgatcacggctcggaccacagctctgcagaacctcattccttctttggagcaggcacgttgggtagaggtcctggggttctctgagtccagcaggaaggaatatttctacagatatttcacagatgaaaggcaagcaattagagcctttaggttggtcaaatcaaacaaagagctctgggccctgtgtcttgtgccctgggtgtcctggctggcctgcacttgcctgatgcagcagatgaagcggaaggaaaaactcacactgacttccaagaccaccacaaccctctgtctacattaccttgcccaggctctccaagctcagccattgggaccccagctcagagacctctgctctctggctgctgagggcatctggcaaaaaaagacccttttcagtccagatgacctcaggaagcatgggttagatggggccatcatctccaccttcttgaagatgggtattcttcaagagcaccccatccctctgagctacagcttcattcacctctgtttccaagagttctttgcagcaatgtcctatgtcttggaggatgagaaggggagaggtaaacattctaattgcatcatagatttggaaaagacgctagaagcatatggaatacatggcctgtttggggcatcaaccacacgtttcctattgggcctgttaagtgatgagggggagagagagatggagaacatctttcactgccggctgtctcaggggaggaacctgatgcagtgggtcccgtccctgcagctgctgctgcagccacactctctggagtccctccactgcttgtacgagactcggaacaaaacgttcctgacacaagtgatggcccatttcgaagaaatgggcatgtgtgtagaaacagacatggagctcttagtgtgcactttctgcattaaattcagccgccacgtgaagaagcttcagctgattgagggcaggcagcacagatcaacatggagccccaccatggtagtcctgttcaggtgggtcccagtcacagatgcctattggcagattctcttctccgtcctcaaggtcaccagaaacctgaaggagctggacctaagtggaaactcgctgagccactctgcagtgaagagtctttgtaagaccctgagacgccctcgctgcctcctggagaccctgcggttggctggctgtggcctcacagctgaggactgcaaggaccttgcctttgggctgagagccaaccagaccctgaccgagctggacctgagcttcaatgtgctcacggatgctggagccaaacacctttgccagagactgagacagccgagctgcaagctacagcgactgcagctggtcagctgtggcctcacgtctgactgctgccaggacctggcctctgtgcttagtgccagccccagcctgaaggagctagacctgcagcagaacaacctggatgacgttggcgtgcgactgctctgtgaggggctcaggcatcctgcctgcaaactcatacgcctggggaaaccaagtgtgatgacccctactgagggcctggatacgggagagatgagtaatagcacatcctcactcaagcggcagagactcggatcagagagggcggcttcccatgttgctcaggctaatctcaaactcctggacgtgagcaagatcttcccaattgctgagattgcagaggaaagctccccagaggtagtaccggtggaactcttgtgcgtgccttctcctgcctctcaaggggacctgcatacgaagcctttggggactgacgatgacttctggggccccacggggcctgtggctactgaggtagttgacaaagaaaagaacttgtaccgagttcacttccctgtagctggctcctaccgctggcccaacacgggtctctgctttgtgatgagagaagcggtgaccgttgagattgaattctgtgtgtgggaccagttcctgggtgagatcaacccacagcacagctggatggtggcagggcctctgctggacatcaaggctgagcctggagctgtggaagctgtgcacctccctcactttgtggctctccaagggggccatgtggacacatccctgttccaaatggcccactttaaagaggaggggatgctcctggagaagccagccagggtggagctgcatcacatagttctggaaaaccccagcttctcccccttgggagtcctcctgaaaatgatccataatgccctgcgcttcattcccgtcacctctgtggtgttgctttaccaccgcgtccatcctgaggaagtcaccttccacctctacctgatcccaagtgactgctccattcggaaggccatagatgatctagaaatgaaattccagtttgtgcgaatccacaagccacccccgctgaccccactttatatgggctgtcgttacactgtgtctgggtctggttcagggatgctggaaatactccccaaggaactggagctctgctatcgaagccctggagaagaccagctgttctcggagttctacgttggccacttgggatcagggatcaggctgcaagtgaaagacaagaaagatgagactctggtgtgggaggccttggtgaaaccaggagatctcatgcctgcaactactctgatccctccagcccgcatagccgtaccttcacctctggatgccccgcagttgctgcactttgtggaccagtatcgagagcagctgatagcccgagtgacatcggtggaggttgtcttggacaaactgcatggacaggtgctgagccaggagcagtacgagagggtgctggctgagaacacgaggcccagccagatgcggaagctgttcagcttgagccagtcctgggaccggaagtgcaaagatggactctaccaagccctgaaggagacccatcctcacctcattatggaactctgggagaagggcagcaaaaagggactcctgccactcagcagctga

SEQ ID NO: 159669 - DNA, 5281 bp, Homo sapiens
  Payload ID: 11249
  Gene Symbol: NLRP1
  Gene Name: NLR family, pyrin domain containing 1
  Uniprot ID: Q9C000
  ENST ID: ENST00000544378
  CDS Start-End: 553-4680
gttgactaggcgctgttcttgctggctggtgccccagggcctggagaggtctgaagaaacctgggagccagcagcccggggctccactctgggttctgaaagcccattccctgctctgcggctcctcccaccccacctcttctcagccttgcagctcaagggttgatctcaggagtccaggacccaggagagggaagaatctgaggaacacagaacagtgagcgttgcccacaccccatctcccgtcaccacatctcccctcaccctcaccctccctgcctggccctggaccccatcccaggacctccctatcagctgacttcttccagtgtcttgcaggcccctctgggctcctccctcccctggcttttcctaccactccccctctatcggcgtctatctgtaggtgccctgggatttataaaactgggttccgaatgctgaataagagacggtaagagccaaggcaaaggacagcactgttctctgcctgcctgataccctcaccacctgggaacatcccccagacaccctcttaactccgggacagagatggctggcggagcctggggccgcctggcctgttacttggagttcctgaagaaggaggagctgaaggagttccagcttctgctcgccaataaagcgcactccaggagctcttcgggtgagacacccgctcagccagagaagacgagtggcatggaggtggcctcgtacctggtggctcagtatggggagcagcgggcctgggacctagccctccatacctgggagcagatggggctgaggtcactgtgcgcccaagcccaggaaggggcaggccactctccctcattcccctacagcccaagtgaaccccacctggggtctcccagccaacccacctccaccgcagtgctaatgccctggatccatgaattgccggcggggtgcacccagggctcagagagaagggttttgagacagctgcctgacacatctggacgccgctggagagaaatctctgcctcactcctctaccaagctcttccaagctccccagaccatgagtctccaagccaggagtcacccaacgcccccacatccacagcagtgctggggagctggggatccccacctcagcccagcctagcacccagagagcaggaggctcctgggacccaatggcctctggatgaaacgtcaggaatttactacacagaaatcagagaaagagagagagagaaatcagagaaaggcaggcccccatgggcagcggtggtaggaacgcccccacaggcgcacaccagcctacagccccaccaccacccatgggagccttctgtgagagagagcctctgttccacatggccctggaaaaatgaggattttaaccaaaaattcacacagctgctacttctacaaagacctcaccccagaagccaagatcccctggtcaagagaagctggcctgattatgtggaggagaatcgaggacatttaattgagatcagagacttatttggcccaggcctggatacccaagaacctcgcatagtcatactgcagggggctgctggaattgggaagtcaacactggccaggcaggtgaaggaagcctgggggagaggccagctgtatggggaccgcttccagcatgtcttctacttcagctgcagagagctggcccagtccaaggtggtgagtctcgctgagctcatcggaaaagatgggacagccactccggctcccattagacagatcctgtctaggccagagcggctgctcttcatcctcgatggtgtagatgagccaggatgggtcttgcaggagccgagttctgagctctgtctgcactggagccagccacagccggcggatgcactgctgggcagtttgctggggaaaactatacttcccgaggcatccttcctgatcacggctcggaccacagctctgcagaacctcattccttctttggagcaggcacgttgggtagaggtcctggggttctctgagtccagcaggaaggaatatttctacagatatttcacagatgaaaggcaagcaattagagcctttaggttggtcaaatcaaacaaagagctctgggccctgtgtcttgtgccctgggtgtcctggctggcctgcacttgcctgatgcagcagatgaagcggaaggaaaaactcacactgacttccaagaccaccacaaccctctgtctacattaccttgcccaggctctccaagctcagccattgggaccccagctcagagacctctgctctctggctgctgagggcatctggcaaaaaaagacccttttcagtccagatgacctcaggaagcatgggttagatggggccatcatctccaccttcttgaagatgggtattcttcaagagcaccccatccctctgagctacagcttcattcacctctgtttccaagagttctttgcagcaatgtcctatgtcttggaggatgagaaggggagaggtaaacattctaattgcatcatagatttggaaaagacgctagaagcatatggaatacatggcctgtttggggcatcaaccacacgtttcctattgggcctgttaagtgatgagggggagagagagatggagaacatctttcactgccggctgtctcaggggaggaacctgatgcagtgggtcccgtccctgcagctgctgctgcagccacactctctggagtccctccactgcttgtacgagactcggaacaaaacgttcctgacacaagtgatggcccatttcgaagaaatgggcatgtgtgtagaaacagacatggagctcttagtgtgcactttctgcattaaattcagccgccacgtgaagaagcttcagctgattgagggcaggcagcacagatcaacatggagccccaccatggtagtcctgttcaggtgggtcccagtcacagatgcctattggcagattctcttctccgtcctcaaggtcaccagaaacctgaaggagctggacctaagtggaaactcgctgagccactctgcagtgaagagtctttgtaagaccctgagacgccctcgctgcctcctggagaccctgcggttggctggctgtggcctcacagctgaggactgcaaggaccttgcctttgggctgagagccaaccagaccctgaccgagctggacctgagcttcaatgtgctcacggatgctggagccaaacacctttgccagagactgagacagccgagctgcaagctacagcgactgcagctggtcagctgtggcctcacgtctgactgctgccaggacctggcctctgtgcttagtgccagccccagcctgaaggagctagacctgcagcagaacaacctggatgacgttggcgtgcgactgctctgtgaggggctcaggcatcctgcctgcaaactcatacgcctggggctggaccagacaactctgagtgatgagatgaggcaggaactgagggccctggagcaggagaaacctcagctgctcatcttcagcagacggaaaccaagtgtgatgacccctactgagggcctggatacgggagagatgagtaatagcacatcctcactcaagcggcagagactcggatcagagagggcggcttcccatgttgctcaggctaatctcaaactcctggacgtgagcaagatcttcccaattgctgagattgcaggcaagagccacgaggaaagctccccagaggtagtaccggtggaactcttgtgcgtgccttctcctgcctctcaaggggacctgcatacgaagcctttggggactgacgatgacttctggggccccacggggcctgtggctactgaggtagttgacaaagaaaagaacttgtaccgagttcacttccctgtagctggctcctaccgctggcccaacacgggtctctgctttgtgatgagagaagcggtgaccgttgagattgaattctgtgtgtgggaccagttcctgggtgagatcaacccacagcacagctggatggtggcagggcctctgctggacatcaaggctgagcctggagctgtggaagctgtgcacctccctcactttgtggctctccaagggggccatgtggacacatccctgttccaaatggcccactttaaagaggaggggatgctcctggagaagccagccagggtggagctgcatcacatagttctggaaaaccccagcttctcccccttgggagtcctcctgaaaatgatccataatgccctgcgcttcattcccgtcacctctgtggtgttgctttaccaccgcgtccatcctgaggaagtcaccttccacctctacctgatcccaagtgactgctccattcggaaggccatagatgatctagaaatgaaattccagtttgtgcgaatccacaagccacccccgctgaccccactttatatgggctgtcgttacactgtgtctgggtctggttcagggatgctggaaatactccccaaggaactggagctctgctatcgaagccctggagaagaccagctgttctcggagttctacgttggccacttgggatcagggatcaggctgcaagtgaaagacaagaaagatgagactctggtgtgggaggccttggtgaaaccaggaaggaacaccagccagccgtggaacctcaggtgcaacagagacgccaggagatactagtgcccagcagcctgcggcagtaccaatgaagccagagagggcttggtggatgacaaggaggcctgagtagaccgcagactttgttgtcgctgcccggaggagtcgagactggtacccggaggagctgtctcaccaggagaccacgtcctggaagtgtccgggactcgcgggacctgtggctgcagaccccgccggcacgcaggcccagagctggcgcactcctgaggatgagactctgggggccctagccggggtccacgggagggctgtccttggggactctaggatggcttcgttctggcccggctcacttctggagctgtgagacccaagacaaaaggggctgagggatttctcattgacaagagttcgtgcgggaaaaccacctgatccctagggatttgtcatcttaagactcaaaaggcttaataccaggaaccaccttggcaagatatttacccaccggccatctctgtttactcatgaatgttaaatgttaaaacgcagcgctctaaccctgcatattatttacttgcaaatgtctgtaatctgtaattgtgatgcctctgatggaataaattatctttttcagtctcctcta

SEQ ID NO: 159670 - DNA, 555 bp, Homo sapiens
  Payload ID: 11249
  Gene Symbol: NLRP1
  Gene Name: NLR family, pyrin domain containing 1
  ENST ID: ENST00000576905
  CDS Start-End: 449-555
acttcttctctcctgccgccatttgaaggacgtgtctgcttccactcctgccgtgattgtcagcttcctgaggtctcctcagccatgctgaactgcgctgttcttgctggctggtgccccagggcctggagaggtctgaagaaacctgggagccagcagcccggggctccactctgggttctgaaagcccattccctgctctgcggctcctcccaccccacctcttctcagccttgcagctcaagggttgatctcaggagtccaggacccaggagagggaagaatctgaggaacacagaacagtgccctgggatttataaaactgggttccgaatgctgaataagagacggtaagagccaaggcaaaggacagcactgttctctgcctgcctgataccctcaccacctgggaacatcccccagacaccctcttaactccgggacagagatggctggcggagcctggggccgcctggcctgttacttggagttcctgaagaaggaggagctgaaggagttccagcttctgctcgccaataaagcgcactccaggag

SEQ ID NO: 159671 - DNA, 5444 bp, Homo sapiens
  Payload ID: 11249
  Gene Symbol: NLRP1
  Gene Name: NLR family, pyrin domain containing 1
  ENST ID: ENST00000571451
  CDS Start-End: 523-3676
gccccagggcctggagaggtctgaagaaacctgggagccagcagcccggggctccactctgggttctgaaagcccattccctgctctgcggctcctcccaccccacctcttctcagccttgcagctcaagggttgatctcaggagtccaggacccaggagagggaagaatctgaggaacacagaacagtgagcgttgcccacaccccatctcccgtcaccacatctcccctcaccctcaccctccctgcctggccctggaccccatcccaggacctccctatcagctgacttcttccagtgtcttgcaggcccctctgggctcctccctcccctggcttttcctaccactccccctctatcggcgtctatctgtaggtgccctgggatttataaaactgggttccgaatgctgaataagagacggtaagagccaaggcaaaggacagcactgttctctgcctgcctgataccctcaccacctgggaacatcccccagacaccctcttaactccgggacagagatggctggcggagcctggggccgcctggcctgttacttggagttcctgaagaaggaggagctgaaggagttccagcttctgctcgccaataaagcgcactccaggagctcttcgggtgagacacccgctcagccagagaagacgagtggcatggaggtggcctcgtacctggtggctcagtatggggagcagcgggcctgggacctagccctccatacctgggagcagatggggctgaggtcactgtgcgcccaagcccaggaaggggcaggccactctccctcattcccctacagcccaagtgaaccccacctggggtctcccagccaacccacctccaccgcagtgctaatgccctggatccatgaattgccggcggggtgcacccagggctcagagagaagggttttgagacagctgcctgacacatctggacgccgctggagagaaatctctgcctcactcctctaccaagctcttccaagctccccagaccatgagtctccaagccaggagtcacccaacgcccccacatccacagcagtgctggggagctggggatccccacctcagcccagcctagcacccagagagcaggaggctcctgggacccaatggcctctggatgaaacgtcaggaatttactacacagaaatcagagaaagagagagagagaaatcagagaaaggcaggcccccatgggcagcggtggtaggaacgcccccacaggcgcacaccagcctacagccccaccaccacccatgggagccttctgtgagagagagcctctgttccacatggccctggaaaaatgaggattttaaccaaaaattcacacagctgctacttctacaaagacctcaccccagaagccaagatcccctggtcaagagaagctggcctgattatgtggaggagaatcgaggacatttaattgagatcagagacttatttggcccaggcctggatacccaagaacctcgcatagtcatactgcagggggctgctggaattgggaagtcaacactggccaggcaggtgaaggaagcctgggggagaggccagctgtatggggaccgcttccagcatgtcttctacttcagctgcagagagctggcccagtccaaggtggtgagtctcgctgagctcatcggaaaagatgggacagccactccggctcccattagacagatcctgtctaggccagagcggctgctcttcatcctcgatggtgtagatgagccaggatgggtcttgcaggagccgagttctgagctctgtctgcactggagccagccacagccggcggatgcactgctgggcagtttgctggggaaaactatacttcccgaggcatccttcctgatcacggctcggaccacagctctgcagaacctcattccttctttggagcaggcacgttgggtagaggtcctggggttctctgagtccagcaggaaggaatatttctacagatatttcacagatgaaaggcaagcaattagagcctttaggttggtcaaatcaaacaaagagctctgggccctgtgtcttgtgccctgggtgtcctggctggcctgcacttgcctgatgcagcagatgaagcggaaggaaaaactcacactgacttccaagaccaccacaaccctctgtctacattaccttgcccaggctctccaagctcagccattgggaccccagctcagagacctctgctctctggctgctgagggcatctggcaaaaaaagacccttttcagtccagatgacctcaggaagcatgggttagatggggccatcatctccaccttcttgaagatgggtattcttcaagagcaccccatccctctgagctacagcttcattcacctctgtttccaagagttctttgcagcaatgtcctatgtcttggaggatgagaaggggagaggtaaacattctaattgcatcatagatttggaaaagacgctagaagcatatggaatacatggcctgtttggggcatcaaccacacgtttcctattgggcctgttaagtgatgagggggagagagagatggagaacatctttcactgccggctgtctcaggggaggaacctgatgcagtgggtcccgtccctgcagctgctgctgcagccacactctctggagtccctccactgcttgtacgagactcggaacaaaacgttcctgacacaagtgatggcccatttcgaagaaatgggcatgtgtgtagaaacagacatggagctcttagtgtgcactttctgcattaaattcagccgccacgtgaagaagcttcagctgattgagggcaggcagcacagatcaacatggagccccaccatggtagtcctgttcaggtgggtcccagtcacagatgcctattggcagattctcttctccgtcctcaaggtcaccagaaacctgaaggagctggacctaagtggaaactcgctgagccactctgcagtgaagagtctttgtaagaccctgagacgccctcgctgcctcctggagaccctgcggttggctggctgtggcctcacagctgaggactgcaaggaccttgcctttgggctgagagccaaccagaccctgaccgagctggacctgagcttcaatgtgctcacggatgctggagccaaacacctttgccagagactgagacagccgagctgcaagctacagcgactgcagctggtcagctgtggcctcacgtctgactgctgccaggacctggcctctgtgcttagtgccagccccagcctgaaggagctagacctgcagcagaacaacctggatgacgttggcgtgcgactgctctgtgaggggctcaggcatcctgcctgcaaactcatacgcctggggctggaccagacaactctgagtgatgagatgaggcaggaactgagggccctggagcaggagaaacctcagctgctcatcttcagcagacggaaaccaagtgtgatgacccctactgagggcctggatacgggagagatgagtaatagcacatcctcactcaagcggcagagactcggatcagagagggcggcttcccatgttgctcaggctaatctcaaactcctggacgtgagcaagatcttcccaattgctgagattgcagaggaaagctccccagaggtagtaccggtggaactcttgtgcgtgccttctcctgcctctcaaggggacctgcatacgaagcctttggggactgacgatgacttctggggccccacggggcctgtggctactgaggtagttgacaaagaaaagaacttgtaccgagttcacttccctgtagctggctcctaccgctggcccaacacgggtctctgctttgtgatgagagaagcggtgaccgttgagattgaattctgtgtgtgggaccagttcctgggtgagatcaacccacagcacagctggatggtggcagggcctctgctggacatcaaggctgagcctggagctgtggaagctgtgcacctccctcactttgtggctctccaagggggccatgtggacacatccctgttccaaatggcccactttaaagaggaggggatgctcctggagaagccagccagggtggagctgcatcacatagttctggaaaaccccagcttctcccccttgggagtcctcctgaaaatgatccataatgccctgcgcttcattcccgtcacctctgtggtgttgctttaccaccgcgtccatcctgaggaagtcaccttccacctctacctgatcccaagtgactgctccattcggaaggaactggagctctgctatcgaagccctggagaagaccagctgttctcggagttctacgttggccacttgggatcagggatcaggctgcaagtgaaagacaagaaagatgagactctggtgtgggaggccttggtgaaaccaggagatctcatgcctgcaactactctgatccctccagcccgcatagccgtaccttcacctctggatgccccgcagttgctgcactttgtggaccagtatcgagagcagctgatagcccgagtgacatcggtggaggttgtcttggacaaactgcatggacaggtgctgagccaggagcagtacgagagggtgctggctgagaacacgaggcccagccagatgcggaagctgttcagcttgagccagtcctgggaccggaagtgcaaagatggactctaccaagccctgaaggagacccatcctcacctcattatggaactctgggagaagggcagcaaaaagggactcctgccactcagcagctgaagtatcaacaccagcccttgacccttgagtcctggctttggctgacccttctttgggtctcagtttctttctctgcaaacaagttgccatctggtttgccttccagcactaaagtaatggaactttgatgatgcctttgctgggcattatgtgtccatgccagggatgccacagggggccccagtccaggtggcctaacagcatctcagggaatgtccatctggagctggcaagacccctgcagacctcatagagcctcatctggtggccacagcagccaagcctagagccctccggatcccatccaggcgcaaagaggaataggagggacatggaaccatttgcctctggctgtgtcacagggtgagccccaaaattggggttcagcgtgggaggccacgtggattcttggctttgtacaggaagatctacaagagcaagccaacagagtaaagtggaaggaagtttattcagaaaataaaggagtatcacagctcttttagaatttgtctagcaggctttccagtttttaccagaaaacccctataaattaaaaattttttacttaaatttaagaattaaaaaaatacaaaaaagaaaaaatgaaaataaaggaataagaagttacctac

SEQ ID NO: 159672 - DNA, 4200 bp, Homo sapiens
  Payload ID: 11249
  Gene Symbol: NLRP1
  Gene Name: NLR family, pyrin domain containing 1
  Uniprot ID: Q9C000
  ENST ID: ENST00000577119
  CDS Start-End: 1-4200
atggctggcggagcctggggccgcctggcctgttacttggagttcctgaagaaggaggagctgaaggagttccagcttctgctcgccaataaagcgcactccaggagctcttcgggtgagacacccgctcagccagagaagacgagtggcatggaggtggcctcgtacctggtggctcagtatggggagcagcgggcctgggacctagccctccatacctgggagcagatggggctgaggtcactgtgcgcccaagcccaggaaggggcaggccactctccctcattcccctacagcccaagtgaaccccacctggggtctcccagccaacccacctccaccgcagtgctaatgccctggatccatgaattgccggcggggtgcacccagggctcagagagaagggttttgagacagctgcctgacacatctggacgccgctggagagaaatctctgcctcactcctctaccaagctcttccaagctccccagaccatgagtctccaagccaggagtcacccaacgcccccacatccacagcagtgctggggagctggggatccccacctcagcccagcctagcacccagagagcaggaggctcctgggacccaatggcctctggatgaaacgtcaggaatttactacacagaaatcagagaaagagagagagagaaatcagagaaaggcaggcccccatgggcagcggtggtaggaacgcccccacaggcgcacaccagcctacagccccaccaccacccatgggagccttctgtgagagagagcctctgttccacatggccctggaaaaatgaggattttaaccaaaaattcacacagctgctacttctacaaagacctcaccccagaagccaagatcccctggtcaagagaagctggcctgattatgtggaggagaatcgaggacatttaattgagatcagagacttatttggcccaggcctggatacccaagaacctcgcatagtcatactgcagggggctgctggaattgggaagtcaacactggccaggcaggtgaaggaagcctgggggagaggccagctgtatggggaccgcttccagcatgtcttctacttcagctgcagagagctggcccagtccaaggtggtgagtctcgctgagctcatcggaaaagatgggacagccactccggctcccattagacagatcctgtctaggccagagcggctgctcttcatcctcgatggtgtagatgagccaggatgggtcttgcaggagccgagttctgagctctgtctgcactggagccagccacagccggcggatgcactgctgggcagtttgctggggaaaactatacttcccgaggcatccttcctgatcacggctcggaccacagctctgcagaacctcattccttctttggagcaggcacgttgggtagaggtcctggggttctctgagtccagcaggaaggaatatttctacagatatttcacagatgaaaggcaagcaattagagcctttaggttggtcaaatcaaacaaagagctctgggccctgtgtcttgtgccctgggtgtcctggctggcctgcacttgcctgatgcagcagatgaagcggaaggaaaaactcacactgacttccaagaccaccacaaccctctgtctacattaccttgcccaggctctccaagctcagccattgggaccccagctcagagacctctgctctctggctgctgagggcatctggcaaaaaaagacccttttcagtccagatgacctcaggaagcatgggttagatggggccatcatctccaccttcttgaagatgggtattcttcaagagcaccccatccctctgagctacagcttcattcacctctgtttccaagagttctttgcagcaatgtcctatgtcttggaggatgagaaggggagaggtaaacattctaattgcatcatagatttggaaaagacgctagaagcatatggaatacatggcctgtttggggcatcaaccacacgtttcctattgggcctgttaagtgatgagggggagagagagatggagaacatctttcactgccggctgtctcaggggaggaacctgatgcagtgggtcccgtccctgcagctgctgctgcagccacactctctggagtccctccactgcttgtacgagactcggaacaaaacgttcctgacacaagtgatggcccatttcgaagaaatgggcatgtgtgtagaaacagacatggagctcttagtgtgcactttctgcattaaattcagccgccacgtgaagaagcttcagctgattgagggcaggcagcacagatcaacatggagccccaccatggtagtcctgttcaggtgggtcccagtcacagatgcctattggcagattctcttctccgtcctcaaggtcaccagaaacctgaaggagctggacctaagtggaaactcgctgagccactctgcagtgaagagtctttgtaagaccctgagacgccctcgctgcctcctggagaccctgcggttggctggctgtggcctcacagctgaggactgcaaggaccttgcctttgggctgagagccaaccagaccctgaccgagctggacctgagcttcaatgtgctcacggatgctggagccaaacacctttgccagagactgagacagccgagctgcaagctacagcgactgcagctggtcagctgtggcctcacgtctgactgctgccaggacctggcctctgtgcttagtgccagccccagcctgaaggagctagacctgcagcagaacaacctggatgacgttggcgtgcgactgctctgtgaggggctcaggcatcctgcctgcaaactcatacgcctggggaaaccaagtgtgatgacccctactgagggcctggatacgggagagatgagtaatagcacatcctcactcaagcggcagagactcggatcagagagggcggcttcccatgttgctcaggctaatctcaaactcctggacgtgagcaagatcttcccaattgctgagattgcagaggaaagctccccagaggtagtaccggtggaactcttgtgcgtgccttctcctgcctctcaaggggacctgcatacgaagcctttggggactgacgatgacttctggggccccacggggcctgtggctactgaggtagttgacaaagaaaagaacttgtaccgagttcacttccctgtagctggctcctaccgctggcccaacacgggtctctgctttgtgatgagagaagcggtgaccgttgagattgaattctgtgtgtgggaccagttcctgggtgagatcaacccacagcacagctggatggtggcagggcctctgctggacatcaaggctgagcctggagctgtggaagctgtgcacctccctcactttgtggctctccaagggggccatgtggacacatccctgttccaaatggcccactttaaagaggaggggatgctcctggagaagccagccagggtggagctgcatcacatagttctggaaaaccccagcttctcccccttgggagtcctcctgaaaatgatccataatgccctgcgcttcattcccgtcacctctgtggtgttgctttaccaccgcgtccatcctgaggaagtcaccttccacctctacctgatcccaagtgactgctccattcggaaggaactggagctctgctatcgaagccctggagaagaccagctgttctcggagttctacgttggccacttgggatcagggatcaggctgcaagtgaaagacaagaaagatgagactctggtgtgggaggccttggtgaaaccaggagatctcatgcctgcaactactctgatccctccagcccgcatagccgtaccttcacctctggatgccccgcagttgctgcactttgtggaccagtatcgagagcagctgatagcccgagtgacatcggtggaggttgtcttggacaaactgcatggacaggtgctgagccaggagcagtacgagagggtgctggctgagaacacgaggcccagccagatgcggaagctgttcagcttgagccagtcctgggaccggaagtgcaaagatggactctaccaagccctgaaggagacccatcctcacctcattatggaactctgggagaagggcagcaaaaagggactcctgccactcagcagctga

SEQ ID NO: 159673 - DNA, 4422 bp, Homo sapiens
  Payload ID: 11249
  Gene Symbol: NLRP1
  Gene Name: NLR family, pyrin domain containing 1
  Uniprot ID: Q9C000
  ENST ID: ENST00000572272
  CDS Start-End: 1-4422
atggctggcggagcctggggccgcctggcctgttacttggagttcctgaagaaggaggagctgaaggagttccagcttctgctcgccaataaagcgcactccaggagctcttcgggtgagacacccgctcagccagagaagacgagtggcatggaggtggcctcgtacctggtggctcagtatggggagcagcgggcctgggacctagccctccatacctgggagcagatggggctgaggtcactgtgcgcccaagcccaggaaggggcaggccactctccctcattcccctacagcccaagtgaaccccacctggggtctcccagccaacccacctccaccgcagtgctaatgccctggatccatgaattgccggcggggtgcacccagggctcagagagaagggttttgagacagctgcctgacacatctggacgccgctggagagaaatctctgcctcactcctctaccaagctcttccaagctccccagaccatgagtctccaagccaggagtcacccaacgcccccacatccacagcagtgctggggagctggggatccccacctcagcccagcctagcacccagagagcaggaggctcctgggacccaatggcctctggatgaaacgtcaggaatttactacacagaaatcagagaaagagagagagagaaatcagagaaaggcaggcccccatgggcagcggtggtaggaacgcccccacaggcgcacaccagcctacagccccaccaccacccatgggagccttctgtgagagagagcctctgttccacatggccctggaaaaatgaggattttaaccaaaaattcacacagctgctacttctacaaagacctcaccccagaagccaagatcccctggtcaagagaagctggcctgattatgtggaggagaatcgaggacatttaattgagatcagagacttatttggcccaggcctggatacccaagaacctcgcatagtcatactgcagggggctgctggaattgggaagtcaacactggccaggcaggtgaaggaagcctgggggagaggccagctgtatggggaccgcttccagcatgtcttctacttcagctgcagagagctggcccagtccaaggtggtgagtctcgctgagctcatcggaaaagatgggacagccactccggctcccattagacagatcctgtctaggccagagcggctgctcttcatcctcgatggtgtagatgagccaggatgggtcttgcaggagccgagttctgagctctgtctgcactggagccagccacagccggcggatgcactgctgggcagtttgctggggaaaactatacttcccgaggcatccttcctgatcacggctcggaccacagctctgcagaacctcattccttctttggagcaggcacgttgggtagaggtcctggggttctctgagtccagcaggaaggaatatttctacagatatttcacagatgaaaggcaagcaattagagcctttaggttggtcaaatcaaacaaagagctctgggccctgtgtcttgtgccctgggtgtcctggctggcctgcacttgcctgatgcagcagatgaagcggaaggaaaaactcacactgacttccaagaccaccacaaccctctgtctacattaccttgcccaggctctccaagctcagccattgggaccccagctcagagacctctgctctctggctgctgagggcatctggcaaaaaaagacccttttcagtccagatgacctcaggaagcatgggttagatggggccatcatctccaccttcttgaagatgggtattcttcaagagcaccccatccctctgagctacagcttcattcacctctgtttccaagagttctttgcagcaatgtcctatgtcttggaggatgagaaggggagaggtaaacattctaattgcatcatagatttggaaaagacgctagaagcatatggaatacatggcctgtttggggcatcaaccacacgtttcctattgggcctgttaagtgatgagggggagagagagatggagaacatctttcactgccggctgtctcaggggaggaacctgatgcagtgggtcccgtccctgcagctgctgctgcagccacactctctggagtccctccactgcttgtacgagactcggaacaaaacgttcctgacacaagtgatggcccatttcgaagaaatgggcatgtgtgtagaaacagacatggagctcttagtgtgcactttctgcattaaattcagccgccacgtgaagaagcttcagctgattgagggcaggcagcacagatcaacatggagccccaccatggtagtcctgttcaggtgggtcccagtcacagatgcctattggcagattctcttctccgtcctcaaggtcaccagaaacctgaaggagctggacctaagtggaaactcgctgagccactctgcagtgaagagtctttgtaagaccctgagacgccctcgctgcctcctggagaccctgcggttggctggctgtggcctcacagctgaggactgcaaggaccttgcctttgggctgagagccaaccagaccctgaccgagctggacctgagcttcaatgtgctcacggatgctggagccaaacacctttgccagagactgagacagccgagctgcaagctacagcgactgcagctggtcagctgtggcctcacgtctgactgctgccaggacctggcctctgtgcttagtgccagccccagcctgaaggagctagacctgcagcagaacaacctggatgacgttggcgtgcgactgctctgtgaggggctcaggcatcctgcctgcaaactcatacgcctggggctggaccagacaactctgagtgatgagatgaggcaggaactgagggccctggagcaggagaaacctcagctgctcatcttcagcagacggaaaccaagtgtgatgacccctactgagggcctggatacgggagagatgagtaatagcacatcctcactcaagcggcagagactcggatcagagagggcggcttcccatgttgctcaggctaatctcaaactcctggacgtgagcaagatcttcccaattgctgagattgcagaggaaagctccccagaggtagtaccggtggaactcttgtgcgtgccttctcctgcctctcaaggggacctgcatacgaagcctttggggactgacgatgacttctggggccccacggggcctgtggctactgaggtagttgacaaagaaaagaacttgtaccgagttcacttccctgtagctggctcctaccgctggcccaacacgggtctctgctttgtgatgagagaagcggtgaccgttgagattgaattctgtgtgtgggaccagttcctgggtgagatcaacccacagcacagctggatggtggcagggcctctgctggacatcaaggctgagcctggagctgtggaagctgtgcacctccctcactttgtggctctccaagggggccatgtggacacatccctgttccaaatggcccactttaaagaggaggggatgctcctggagaagccagccagggtggagctgcatcacatagttctggaaaaccccagcttctcccccttgggagtcctcctgaaaatgatccataatgccctgcgcttcattcccgtcacctctgtggtgttgctttaccaccgcgtccatcctgaggaagtcaccttccacctctacctgatcccaagtgactgctccattcggaaggccatagatgatctagaaatgaaattccagtttgtgcgaatccacaagccacccccgctgaccccactttatatgggctgtcgttacactgtgtctgggtctggttcagggatgctggaaatactccccaaggaactggagctctgctatcgaagccctggagaagaccagctgttctcggagttctacgttggccacttgggatcagggatcaggctgcaagtgaaagacaagaaagatgagactctggtgtgggaggccttggtgaaaccaggagatctcatgcctgcaactactctgatccctccagcccgcatagccgtaccttcacctctggatgccccgcagttgctgcactttgtggaccagtatcgagagcagctgatagcccgagtgacatcggtggaggttgtcttggacaaactgcatggacaggtgctgagccaggagcagtacgagagggtgctggctgagaacacgaggcccagccagatgcggaagctgttcagcttgagccagtcctgggaccggaagtgcaaagatggactctaccaagccctgaaggagacccatcctcacctcattatggaactctgggagaagggcagcaaaaagggactcctgccactcagcagctga

SEQ ID NO: 159674 - DNA, 4788 bp, Homo sapiens
  Payload ID: 11249
  Gene Symbol: NLRP1
  Gene Name: NLR family, pyrin domain containing 1
  Uniprot ID: Q9C000
  ENST ID: ENST00000617618
  CDS Start-End: 367-4788
cttgttgactaggcgctgttcttgctggctggtgccccagggcctggagaggtctgaagaaacctgggagccagcagcccggggctccactctgggttctgaaagcccattccctgctctgcggctcctcccaccccacctcttctcagccttgcagctcaagggttgatctcaggagtccaggacccaggagagggaagaatctgaggaacacagaacagtgccctgggatttataaaactgggttccgaatgctgaataagagacggtaagagccaaggcaaaggacagcactgttctctgcctgcctgataccctcaccacctgggaacatcccccagacaccctcttaactccgggacagagatggctggcggagcctggggccgcctggcctgttacttggagttcctgaagaaggaggagctgaaggagttccagcttctgctcgccaataaagcgcactccaggagctcttcgggtgagacacccgctcagccagagaagacgagtggcatggaggtggcctcgtacctggtggctcagtatggggagcagcgggcctgggacctagccctccatacctgggagcagatggggctgaggtcactgtgcgcccaagcccaggaaggggcaggccactctccctcattcccctacagcccaagtgaaccccacctggggtctcccagccaacccacctccaccgcagtgctaatgccctggatccatgaattgccggcggggtgcacccagggctcagagagaagggttttgagacagctgcctgacacatctggacgccgctggagagaaatctctgcctcactcctctaccaagctcttccaagctccccagaccatgagtctccaagccaggagtcacccaacgcccccacatccacagcagtgctggggagctggggatccccacctcagcccagcctagcacccagagagcaggaggctcctgggacccaatggcctctggatgaaacgtcaggaatttactacacagaaatcagagaaagagagagagagaaatcagagaaaggcaggcccccatgggcagcggtggtaggaacgcccccacaggcgcacaccagcctacagccccaccaccacccatgggagccttctgtgagagagagcctctgttccacatggccctggaaaaatgaggattttaaccaaaaattcacacagctgctacttctacaaagacctcaccccagaagccaagatcccctggtcaagagaagctggcctgattatgtggaggagaatcgaggacatttaattgagatcagagacttatttggcccaggcctggatacccaagaacctcgcatagtcatactgcagggggctgctggaattgggaagtcaacactggccaggcaggtgaaggaagcctgggggagaggccagctgtatggggaccgcttccagcatgtcttctacttcagctgcagagagctggcccagtccaaggtggtgagtctcgctgagctcatcggaaaagatgggacagccactccggctcccattagacagatcctgtctaggccagagcggctgctcttcatcctcgatggtgtagatgagccaggatgggtcttgcaggagccgagttctgagctctgtctgcactggagccagccacagccggcggatgcactgctgggcagtttgctggggaaaactatacttcccgaggcatccttcctgatcacggctcggaccacagctctgcagaacctcattccttctttggagcaggcacgttgggtagaggtcctggggttctctgagtccagcaggaaggaatatttctacagatatttcacagatgaaaggcaagcaattagagcctttaggttggtcaaatcaaacaaagagctctgggccctgtgtcttgtgccctgggtgtcctggctggcctgcacttgcctgatgcagcagatgaagcggaaggaaaaactcacactgacttccaagaccaccacaaccctctgtctacattaccttgcccaggctctccaagctcagccattgggaccccagctcagagacctctgctctctggctgctgagggcatctggcaaaaaaagacccttttcagtccagatgacctcaggaagcatgggttagatggggccatcatctccaccttcttgaagatgggtattcttcaagagcaccccatccctctgagctacagcttcattcacctctgtttccaagagttctttgcagcaatgtcctatgtcttggaggatgagaaggggagaggtaaacattctaattgcatcatagatttggaaaagacgctagaagcatatggaatacatggcctgtttggggcatcaaccacacgtttcctattgggcctgttaagtgatgagggggagagagagatggagaacatctttcactgccggctgtctcaggggaggaacctgatgcagtgggtcccgtccctgcagctgctgctgcagccacactctctggagtccctccactgcttgtacgagactcggaacaaaacgttcctgacacaagtgatggcccatttcgaagaaatgggcatgtgtgtagaaacagacatggagctcttagtgtgcactttctgcattaaattcagccgccacgtgaagaagcttcagctgattgagggcaggcagcacagatcaacatggagccccaccatggtagtcctgttcaggtgggtcccagtcacagatgcctattggcagattctcttctccgtcctcaaggtcaccagaaacctgaaggagctggacctaagtggaaactcgctgagccactctgcagtgaagagtctttgtaagaccctgagacgccctcgctgcctcctggagaccctgcggttggctggctgtggcctcacagctgaggactgcaaggaccttgcctttgggctgagagccaaccagaccctgaccgagctggacctgagcttcaatgtgctcacggatgctggagccaaacacctttgccagagactgagacagccgagctgcaagctacagcgactgcagctggtcagctgtggcctcacgtctgactgctgccaggacctggcctctgtgcttagtgccagccccagcctgaaggagctagacctgcagcagaacaacctggatgacgttggcgtgcgactgctctgtgaggggctcaggcatcctgcctgcaaactcatacgcctggggctggaccagacaactctgagtgatgagatgaggcaggaactgagggccctggagcaggagaaacctcagctgctcatcttcagcagacggaaaccaagtgtgatgacccctactgagggcctggatacgggagagatgagtaatagcacatcctcactcaagcggcagagactcggatcagagagggcggcttcccatgttgctcaggctaatctcaaactcctggacgtgagcaagatcttcccaattgctgagattgcagaggaaagctccccagaggtagtaccggtggaactcttgtgcgtgccttctcctgcctctcaaggggacctgcatacgaagcctttggggactgacgatgacttctggggccccacggggcctgtggctactgaggtagttgacaaagaaaagaacttgtaccgagttcacttccctgtagctggctcctaccgctggcccaacacgggtctctgctttgtgatgagagaagcggtgaccgttgagattgaattctgtgtgtgggaccagttcctgggtgagatcaacccacagcacagctggatggtggcagggcctctgctggacatcaaggctgagcctggagctgtggaagctgtgcacctccctcactttgtggctctccaagggggccatgtggacacatccctgttccaaatggcccactttaaagaggaggggatgctcctggagaagccagccagggtggagctgcatcacatagttctggaaaaccccagcttctcccccttgggagtcctcctgaaaatgatccataatgccctgcgcttcattcccgtcacctctgtggtgttgctttaccaccgcgtccatcctgaggaagtcaccttccacctctacctgatcccaagtgactgctccattcggaaggccatagatgatctagaaatgaaattccagtttgtgcgaatccacaagccacccccgctgaccccactttatatgggctgtcgttacactgtgtctgggtctggttcagggatgctggaaatactccccaaggaactggagctctgctatcgaagccctggagaagaccagctgttctcggagttctacgttggccacttgggatcagggatcaggctgcaagtgaaagacaagaaagatgagactctggtgtgggaggccttggtgaaaccaggagatctcatgcctgcaactactctgatccctccagcccgcatagccgtaccttcacctctggatgccccgcagttgctgcactttgtggaccagtatcgagagcagctgatagcccgagtgacatcggtggaggttgtcttggacaaactgcatggacaggtgctgagccaggagcagtacgagagggtgctggctgagaacacgaggcccagccagatgcggaagctgttcagcttgagccagtcctgggaccggaagtgcaaagatggactctaccaagccctgaaggagacccatcctcacctcattatggaactctgggagaagggcagcaaaaagggactcctgccactcagcagctga

SEQ ID NO: 159675 - DNA, 4494 bp, Homo sapiens
  Payload ID: 11249
  Gene Symbol: NLRP1
  Gene Name: NLR family, pyrin domain containing 1
  Uniprot ID: Q9C000
  ENST ID: ENST00000613500
  CDS Start-End: 367-4494
cttgttgactaggcgctgttcttgctggctggtgccccagggcctggagaggtctgaagaaacctgggagccagcagcccggggctccactctgggttctgaaagcccattccctgctctgcggctcctcccaccccacctcttctcagccttgcagctcaagggttgatctcaggagtccaggacccaggagagggaagaatctgaggaacacagaacagtgccctgggatttataaaactgggttccgaatgctgaataagagacggtaagagccaaggcaaaggacagcactgttctctgcctgcctgataccctcaccacctgggaacatcccccagacaccctcttaactccgggacagagatggctggcggagcctggggccgcctggcctgttacttggagttcctgaagaaggaggagctgaaggagttccagcttctgctcgccaataaagcgcactccaggagctcttcgggtgagacacccgctcagccagagaagacgagtggcatggaggtggcctcgtacctggtggctcagtatggggagcagcgggcctgggacctagccctccatacctgggagcagatggggctgaggtcactgtgcgcccaagcccaggaaggggcaggccactctccctcattcccctacagcccaagtgaaccccacctggggtctcccagccaacccacctccaccgcagtgctaatgccctggatccatgaattgccggcggggtgcacccagggctcagagagaagggttttgagacagctgcctgacacatctggacgccgctggagagaaatctctgcctcactcctctaccaagctcttccaagctccccagaccatgagtctccaagccaggagtcacccaacgcccccacatccacagcagtgctggggagctggggatccccacctcagcccagcctagcacccagagagcaggaggctcctgggacccaatggcctctggatgaaacgtcaggaatttactacacagaaatcagagaaagagagagagagaaatcagagaaaggcaggcccccatgggcagcggtggtaggaacgcccccacaggcgcacaccagcctacagccccaccaccacccatgggagccttctgtgagagagagcctctgttccacatggccctggaaaaatgaggattttaaccaaaaattcacacagctgctacttctacaaagacctcaccccagaagccaagatcccctggtcaagagaagctggcctgattatgtggaggagaatcgaggacatttaattgagatcagagacttatttggcccaggcctggatacccaagaacctcgcatagtcatactgcagggggctgctggaattgggaagtcaacactggccaggcaggtgaaggaagcctgggggagaggccagctgtatggggaccgcttccagcatgtcttctacttcagctgcagagagctggcccagtccaaggtggtgagtctcgctgagctcatcggaaaagatgggacagccactccggctcccattagacagatcctgtctaggccagagcggctgctcttcatcctcgatggtgtagatgagccaggatgggtcttgcaggagccgagttctgagctctgtctgcactggagccagccacagccggcggatgcactgctgggcagtttgctggggaaaactatacttcccgaggcatccttcctgatcacggctcggaccacagctctgcagaacctcattccttctttggagcaggcacgttgggtagaggtcctggggttctctgagtccagcaggaaggaatatttctacagatatttcacagatgaaaggcaagcaattagagcctttaggttggtcaaatcaaacaaagagctctgggccctgtgtcttgtgccctgggtgtcctggctggcctgcacttgcctgatgcagcagatgaagcggaaggaaaaactcacactgacttccaagaccaccacaaccctctgtctacattaccttgcccaggctctccaagctcagccattgggaccccagctcagagacctctgctctctggctgctgagggcatctggcaaaaaaagacccttttcagtccagatgacctcaggaagcatgggttagatggggccatcatctccaccttcttgaagatgggtattcttcaagagcaccccatccctctgagctacagcttcattcacctctgtttccaagagttctttgcagcaatgtcctatgtcttggaggatgagaaggggagaggtaaacattctaattgcatcatagatttggaaaagacgctagaagcatatggaatacatggcctgtttggggcatcaaccacacgtttcctattgggcctgttaagtgatgagggggagagagagatggagaacatctttcactgccggctgtctcaggggaggaacctgatgcagtgggtcccgtccctgcagctgctgctgcagccacactctctggagtccctccactgcttgtacgagactcggaacaaaacgttcctgacacaagtgatggcccatttcgaagaaatgggcatgtgtgtagaaacagacatggagctcttagtgtgcactttctgcattaaattcagccgccacgtgaagaagcttcagctgattgagggcaggcagcacagatcaacatggagccccaccatggtagtcctgttcaggtgggtcccagtcacagatgcctattggcagattctcttctccgtcctcaaggtcaccagaaacctgaaggagctggacctaagtggaaactcgctgagccactctgcagtgaagagtctttgtaagaccctgagacgccctcgctgcctcctggagaccctgcggttggctggctgtggcctcacagctgaggactgcaaggaccttgcctttgggctgagagccaaccagaccctgaccgagctggacctgagcttcaatgtgctcacggatgctggagccaaacacctttgccagagactgagacagccgagctgcaagctacagcgactgcagctggtcagctgtggcctcacgtctgactgctgccaggacctggcctctgtgcttagtgccagccccagcctgaaggagctagacctgcagcagaacaacctggatgacgttggcgtgcgactgctctgtgaggggctcaggcatcctgcctgcaaactcatacgcctggggctggaccagacaactctgagtgatgagatgaggcaggaactgagggccctggagcaggagaaacctcagctgctcatcttcagcagacggaaaccaagtgtgatgacccctactgagggcctggatacgggagagatgagtaatagcacatcctcactcaagcggcagagactcggatcagagagggcggcttcccatgttgctcaggctaatctcaaactcctggacgtgagcaagatcttcccaattgctgagattgcaggcaagagccacgaggaaagctccccagaggtagtaccggtggaactcttgtgcgtgccttctcctgcctctcaaggggacctgcatacgaagcctttggggactgacgatgacttctggggccccacggggcctgtggctactgaggtagttgacaaagaaaagaacttgtaccgagttcacttccctgtagctggctcctaccgctggcccaacacgggtctctgctttgtgatgagagaagcggtgaccgttgagattgaattctgtgtgtgggaccagttcctgggtgagatcaacccacagcacagctggatggtggcagggcctctgctggacatcaaggctgagcctggagctgtggaagctgtgcacctccctcactttgtggctctccaagggggccatgtggacacatccctgttccaaatggcccactttaaagaggaggggatgctcctggagaagccagccagggtggagctgcatcacatagttctggaaaaccccagcttctcccccttgggagtcctcctgaaaatgatccataatgccctgcgcttcattcccgtcacctctgtggtgttgctttaccaccgcgtccatcctgaggaagtcaccttccacctctacctgatcccaagtgactgctccattcggaaggccatagatgatctagaaatgaaattccagtttgtgcgaatccacaagccacccccgctgaccccactttatatgggctgtcgttacactgtgtctgggtctggttcagggatgctggaaatactccccaaggaactggagctctgctatcgaagccctggagaagaccagctgttctcggagttctacgttggccacttgggatcagggatcaggctgcaagtgaaagacaagaaagatgagactctggtgtgggaggccttggtgaaaccaggaaggaacaccagccagccgtggaacctcaggtgcaacagagacgccaggagatactag

SEQ ID NO: 159676 - DNA, 4698 bp, Homo sapiens
  Payload ID: 11249
  Gene Symbol: NLRP1
  Gene Name: NLR family, pyrin domain containing 1
  Uniprot ID: Q9C000
  ENST ID: ENST00000619223
  CDS Start-End: 367-4698
cttgttgactaggcgctgttcttgctggctggtgccccagggcctggagaggtctgaagaaacctgggagccagcagcccggggctccactctgggttctgaaagcccattccctgctctgcggctcctcccaccccacctcttctcagccttgcagctcaagggttgatctcaggagtccaggacccaggagagggaagaatctgaggaacacagaacagtgccctgggatttataaaactgggttccgaatgctgaataagagacggtaagagccaaggcaaaggacagcactgttctctgcctgcctgataccctcaccacctgggaacatcccccagacaccctcttaactccgggacagagatggctggcggagcctggggccgcctggcctgttacttggagttcctgaagaaggaggagctgaaggagttccagcttctgctcgccaataaagcgcactccaggagctcttcgggtgagacacccgctcagccagagaagacgagtggcatggaggtggcctcgtacctggtggctcagtatggggagcagcgggcctgggacctagccctccatacctgggagcagatggggctgaggtcactgtgcgcccaagcccaggaaggggcaggccactctccctcattcccctacagcccaagtgaaccccacctggggtctcccagccaacccacctccaccgcagtgctaatgccctggatccatgaattgccggcggggtgcacccagggctcagagagaagggttttgagacagctgcctgacacatctggacgccgctggagagaaatctctgcctcactcctctaccaagctcttccaagctccccagaccatgagtctccaagccaggagtcacccaacgcccccacatccacagcagtgctggggagctggggatccccacctcagcccagcctagcacccagagagcaggaggctcctgggacccaatggcctctggatgaaacgtcaggaatttactacacagaaatcagagaaagagagagagagaaatcagagaaaggcaggcccccatgggcagcggtggtaggaacgcccccacaggcgcacaccagcctacagccccaccaccacccatgggagccttctgtgagagagagcctctgttccacatggccctggaaaaatgaggattttaaccaaaaattcacacagctgctacttctacaaagacctcaccccagaagccaagatcccctggtcaagagaagctggcctgattatgtggaggagaatcgaggacatttaattgagatcagagacttatttggcccaggcctggatacccaagaacctcgcatagtcatactgcagggggctgctggaattgggaagtcaacactggccaggcaggtgaaggaagcctgggggagaggccagctgtatggggaccgcttccagcatgtcttctacttcagctgcagagagctggcccagtccaaggtggtgagtctcgctgagctcatcggaaaagatgggacagccactccggctcccattagacagatcctgtctaggccagagcggctgctcttcatcctcgatggtgtagatgagccaggatgggtcttgcaggagccgagttctgagctctgtctgcactggagccagccacagccggcggatgcactgctgggcagtttgctggggaaaactatacttcccgaggcatccttcctgatcacggctcggaccacagctctgcagaacctcattccttctttggagcaggcacgttgggtagaggtcctggggttctctgagtccagcaggaaggaatatttctacagatatttcacagatgaaaggcaagcaattagagcctttaggttggtcaaatcaaacaaagagctctgggccctgtgtcttgtgccctgggtgtcctggctggcctgcacttgcctgatgcagcagatgaagcggaaggaaaaactcacactgacttccaagaccaccacaaccctctgtctacattaccttgcccaggctctccaagctcagccattgggaccccagctcagagacctctgctctctggctgctgagggcatctggcaaaaaaagacccttttcagtccagatgacctcaggaagcatgggttagatggggccatcatctccaccttcttgaagatgggtattcttcaagagcaccccatccctctgagctacagcttcattcacctctgtttccaagagttctttgcagcaatgtcctatgtcttggaggatgagaaggggagaggtaaacattctaattgcatcatagatttggaaaagacgctagaagcatatggaatacatggcctgtttggggcatcaaccacacgtttcctattgggcctgttaagtgatgagggggagagagagatggagaacatctttcactgccggctgtctcaggggaggaacctgatgcagtgggtcccgtccctgcagctgctgctgcagccacactctctggagtccctccactgcttgtacgagactcggaacaaaacgttcctgacacaagtgatggcccatttcgaagaaatgggcatgtgtgtagaaacagacatggagctcttagtgtgcactttctgcattaaattcagccgccacgtgaagaagcttcagctgattgagggcaggcagcacagatcaacatggagccccaccatggtagtcctgttcaggtgggtcccagtcacagatgcctattggcagattctcttctccgtcctcaaggtcaccagaaacctgaaggagctggacctaagtggaaactcgctgagccactctgcagtgaagagtctttgtaagaccctgagacgccctcgctgcctcctggagaccctgcggttggctggctgtggcctcacagctgaggactgcaaggaccttgcctttgggctgagagccaaccagaccctgaccgagctggacctgagcttcaatgtgctcacggatgctggagccaaacacctttgccagagactgagacagccgagctgcaagctacagcgactgcagctggtcagctgtggcctcacgtctgactgctgccaggacctggcctctgtgcttagtgccagccccagcctgaaggagctagacctgcagcagaacaacctggatgacgttggcgtgcgactgctctgtgaggggctcaggcatcctgcctgcaaactcatacgcctggggaaaccaagtgtgatgacccctactgagggcctggatacgggagagatgagtaatagcacatcctcactcaagcggcagagactcggatcagagagggcggcttcccatgttgctcaggctaatctcaaactcctggacgtgagcaagatcttcccaattgctgagattgcagaggaaagctccccagaggtagtaccggtggaactcttgtgcgtgccttctcctgcctctcaaggggacctgcatacgaagcctttggggactgacgatgacttctggggccccacggggcctgtggctactgaggtagttgacaaagaaaagaacttgtaccgagttcacttccctgtagctggctcctaccgctggcccaacacgggtctctgctttgtgatgagagaagcggtgaccgttgagattgaattctgtgtgtgggaccagttcctgggtgagatcaacccacagcacagctggatggtggcagggcctctgctggacatcaaggctgagcctggagctgtggaagctgtgcacctccctcactttgtggctctccaagggggccatgtggacacatccctgttccaaatggcccactttaaagaggaggggatgctcctggagaagccagccagggtggagctgcatcacatagttctggaaaaccccagcttctcccccttgggagtcctcctgaaaatgatccataatgccctgcgcttcattcccgtcacctctgtggtgttgctttaccaccgcgtccatcctgaggaagtcaccttccacctctacctgatcccaagtgactgctccattcggaaggccatagatgatctagaaatgaaattccagtttgtgcgaatccacaagccacccccgctgaccccactttatatgggctgtcgttacactgtgtctgggtctggttcagggatgctggaaatactccccaaggaactggagctctgctatcgaagccctggagaagaccagctgttctcggagttctacgttggccacttgggatcagggatcaggctgcaagtgaaagacaagaaagatgagactctggtgtgggaggccttggtgaaaccaggagatctcatgcctgcaactactctgatccctccagcccgcatagccgtaccttcacctctggatgccccgcagttgctgcactttgtggaccagtatcgagagcagctgatagcccgagtgacatcggtggaggttgtcttggacaaactgcatggacaggtgctgagccaggagcagtacgagagggtgctggctgagaacacgaggcccagccagatgcggaagctgttcagcttgagccagtcctgggaccggaagtgcaaagatggactctaccaagccctgaaggagacccatcctcacctcattatggaactctgggagaagggcagcaaaaagggactcctgccactcagcagctga

SEQ ID NO: 159677 - DNA, 2350 bp, Homo sapiens
  Payload ID: 11250
  Gene Symbol: NLRP10
  Gene Name: NLR family, pyrin domain containing 10
  Uniprot ID: Q86W26
  ENST ID: ENST00000328600
  CDS Start-End: 163-2130
ggagctttgcacatgtatctcgtctctccctggcctccgctctataacttggccaagcccccagaaagcagggtgggcctctcagcagtggacctctccttttgcctctttctccaggtcactggtcttctggtctggacttgatccttcccccagatcaccatggccatggccaaggccagaaagccccgggaggcattgctctgggccttgagtgaccttgaggagaacgatttcaagaagttaaagttctacttacgggatatgaccctgtctgagggccagcccccactggccagaggggagttggagggcctgattccggtggacctggcagaattactgatttcaaagtatggagaaaaggaggctgtgaaagttgtcctcaagggcttgaaggtcatgaacctgttggaacttgtggaccagctcagccatatttgtctgcatgattacagagaagtataccgagagcatgtgcgctgcctagaggaatggcaggaagcaggagtcaatggcagatacaaccaggtgctcctggtggccaagcccagctcagagagcccagaatcacttgcctgccccttcccggagcaggagctggagtctgtcacggtggaggctctatttgattcaggggaaaagccctcactggccccatccttagttgtgctacaggggtcggctggcactggaaagacaactctcgccagaaaaatggtgttggactgggccaccggtactctgtacccaggccggtttgattatgtcttttatgtaagctgcaaagaagtggtcctgctgctggagagcaaactggagcagctccttttctggtgctgcggggacaatcaagcccctgtcacagagattctgaggcagccagagcggctcctgttcatcctggatggctttgatgagctgcagaggccctttgaagaaaagttgaagaagaggggtttgagtcccaaggagagcctgctgcaccttctaattaggagacatacactccccacgtgctcccttctcatcaccacccggcccctggctttgaggaatctggagcccttgctgaaacaagcacgtcatgtccatatcctaggcttctctgaggaggagagggcgaggtacttcagctcctatttcacggatgagaagcaagctgaccgtgccttcgacattgtacagaaaaatgacattctctacaaagcgtgtcaggttccaggcatttgctgggtggtctgctcctggctgcaggggcagatggagagaggcaaagttgtcttagagacacctagaaacagcactgacatcttcatggcttacgtctccacctttctgccgcccgatgatgatgggggctgctccgagctttcccggcacagggtcctgaggagtctgtgctccctagcagctgaagggattcagcaccagaggttcctatttgaagaagctgagctcaggaaacataatttagatggccccaggcttgccgctttcctgagtagtaacgactaccaattgggacttgccatcaagaagttctacagcttccgccacatcagcttccaggacttttttcatgccatgtcttacctggtgaaagaggaccaaagccggctggggaaggagtcccgcagagaagtgcaaaggctgctggaggtaaaggagcaggaagggaatgatgagatgaccctcactatgcagtttttactggacatctcgaaaaaagacagcttctcgaacttggagctcaagttctgcttcagaatttctccctgtttagcgcaggatctgaagcattttaaagaacagatggaatctatgaagcacaacaggacctgggatttggaattctccctgtatgaagctaaaataaagaatctggtaaaaggtattcagatgaacaatgtatcattcaagataaaacattcaaatgaaaagaaatcacagagccagaatttattttctgtcaaaagcagcttgagtcatggacctaaggaggagcaaaaatgtccttctgtccatggacagaaggagggcaaagataatatagcaggaacacaaaaggaagcttctactggaaaaggcagagggacagaggaaacaccaaaaaatacttacatataaacctaattaaatatgtacaagatctctatgaggaaaatgacaacactctgaggaaagaaatcaaagaagctgtaaatgaatgggaagattttccatgttcatgaatagaaagactcaatattgttaagatgttagttttccccagtttgatctgtagattcaatgcaatcccaatcaagatcccagcaaataactttgtggacattgataagatgattct

SEQ ID NO: 159678 - DNA, 423 bp, Homo sapiens
  Payload ID: 11250
  Gene Symbol: NLRP10
  Gene Name: NLR family, pyrin domain containing 10
  ENST ID: ENST00000526590
  CDS Start-End: 227-423
caccaaacagaagtgaactagtgagtatgggctaagagagcccaaacttggacctgtagagctgtcggaccaggaaaggggatctgtttcgtctcagtccccaggctttgcttactgggctcctggatcagggagctgagttctcgctgcctcacctccagctccccaagtctgaactgtggtcactggtcttctggtctggacttgatccttcccccagatcaccatggccatggccaaggccagaaagccccgggaggcattgctctgggccttgagtgaccttgaggagaacgatttcaagaagttaaagttctacttacgggatatgaccctgtctgagggccagcccccactggccagaggggagttggagggcctgattccggtggacctggcagaattactgatttcaaagtatgg

SEQ ID NO: 159679 - DNA, 2350 bp, Homo sapiens; identical to SEQ ID NO: 159677
  Payload ID: 11250
  Gene Symbol: NLRP10
  Gene Name: NLR family, pyrin domain containing 10
  Uniprot ID: Q86W26
  ENST ID: ENST00000612291
  CDS Start-End: 163-2130

SEQ ID NO: 159680 - DNA, 423 bp, Homo sapiens; identical to SEQ ID NO: 159678
  Payload ID: 11250
  Gene Symbol: NLRP10
  Gene Name: NLR family, pyrin domain containing 10
  ENST ID: ENST00000629228
  CDS Start-End: 227-423

SEQ ID NO: 159681 - DNA, 2350 bp, Homo sapiens; identical to SEQ ID NO: 159677
  Payload ID: 11250
  Gene Symbol: NLRP10
  Gene Name: NLR family, pyrin domain containing 10
  Uniprot ID: Q86W26
  ENST ID: ENST00000625327
  CDS Start-End: 163-2130

SEQ ID NO: 159682 - DNA, 423 bp, Homo sapiens; identical to SEQ ID NO: 159678
  Payload ID: 11250
  Gene Symbol: NLRP10
  Gene Name: NLR family, pyrin domain containing 10
  ENST ID: ENST00000625936
  CDS Start-End: 227-423

SEQ ID NO: 159683 - DNA, 3417 bp, Homo sapiens
  Payload ID: 11251
  Gene Symbol: NLRP11
  Gene Name: NLR family, pyrin domain containing 11
  Uniprot ID: P59045
  ENST ID: ENST00000589093
  CDS Start-End: 95-3196
cgaccagccaaggagacctggtggcagggttgatctcatatttcttgtgcctcaaaatcccttctctgaagtctgccttccctggagaagcaagatggcagaatcggattctactgactttgacctgctgtggtatctagagaatctcagtgacaaggaatttcagagttttaagaagtatctggcacgcaagattcttgatttcaaactgccacagtttccactgatacagatgacaaaagaagaactggctaacgtgttgccaatctcttatgagggacagtatatatggaatatgctcttcagcatattttcaatgatgcgtaaggaagatctttgtaggaagatcattggcagacgaaaccgcaatcaggaggcatgcaaagctgtcatgaggagaaaattcatgctgcaatgggaaagtcacacttttggaaaatttcattataaattttttcgtgacgtttcgtcagatgtgttctacatacttcaattagcctatgattctaccagctattattcagcaaacaatctcaatgtgttcctgatgggagagagagcatctggaaaaactattgttataaatctggctgtgttgaggtggatcaagggtgagatgtggcagaacatgatctcgtacgtcgttcacctcactgctcacgaaataaaccagatgaccaacagcagcttggctgagctaatcgccaaggactggcctgacggccaggctcccattgcagacatcctgtctgatcccaagaaactccttttcatcctcgaggacttggacaacataagattcgagttaaatgtcaatgaaagtgctttgtgtagtaacagcacccagaaagttcccattccagttctcctggtcagtttgctgaagagaaaaatggctccaggctgctggttcctcatctcctcaaggcccacacgtgggaataatgtaaaaacgttcttgaaagaggtagattgctgcacgaccttgcagctgtcgaatgggaagagggagatatattttaactctttctttaaagaccgccagagggcgtcggcagccctccagcttgtacatgaggatgaaatactcgtgggtctgtgccgagtcgccatcttatgctggatcacgtgtactgtcctgaagcggcagatggacaaggggcgtgacttccagctctgctgccaaacacccactgatctacatgcccactttcttgctgatgcgttgacatcagaggctggacttactgccaatcagtatcacctaggtctcctaaaacgtctgtgtttgctggctgcaggaggactgtttctgagcaccctgaatttcagtggtgaagacctcagatgtgttgggtttactgaggctgatgtctctgtgttgcaggccgcgaatattcttttgccgagcaacactcataaagaccgttacaagttcatacacttgaacgtccaggagttttgtacagccattgcatttctgatggcagtacccaactatctgatcccctcaggcagcagagagtataaagagaagagagaacaatactctgactttaatcaagtgtttactttcatttttggtcttctaaatgcaaacaggagaaagattcttgagacatcctttggataccagctaccgatggtagacagcttcaagtggtactcggtgggatacatgaaacatttggaccgtgacccggaaaagttgacgcaccatatgcctttgttttactgtctctatgagaatcgggaagaagaatttgtgaagacgattgtggatgctctcatggaggttacagtttaccttcaatcagacaaggatatgatggtctcattatactgtctggattactgctgtcacctgaggacacttaagttgagtgttcagcgcatctttcaaaacaaagagccacttataaggccaactgctagtcaaatgaagagccttgtctactggagagagatctgctctcttttttatacaatggagagcctccgggagctgcatatctttgacaatgaccttaatggtatttcagaaaggattctgtctaaagccctggagcattctagctgtaaacttcgcacactcaagttgtcctatgtctcgactgcttctggttttgaagacttactcaaggctttggctcgtaatcggagcctgacatacctgagtatcaactgtacgtccatttccctaaatatgttttcacttctgcatgacatcctgcacgagcccacatgccaaataagtcatctgagcttgatgaaatgtgatttgcgagccagcgaatgtgaagaaatcgcctctctcctcatcagtggcgggagtctgagaaaactgaccttatccagcaatccgctgaggagcgacgggatgaacatactgtgtgatgccttgcttcatcccaactgcactcttatatcactggtgttagtcttctgctgtctcactgaaaattgctgcagcgcccttggaagagtgcttctgttcagcccaactctaagacaactagacctgtgtgtgaatcgcttaaaaaattacggagtgttgcatgtgacgtttcccttgctgtttccaacctgtcagttagaggagcttcatctgtctggctgtttctttagcagcgatatctgtcaatatattgccatagttattgctactaatgaaaaactgaggagcctggagattgggagcaacaaaatagaagatgcaggaatgcagctgctatgtggtggtttgagacatcccaactgcatgttggtgaatattgggctagaagagtgcatgttaaccagtgcctgctgtcgatctcttgcctctgttcttaccaccaacaaaacactagaaagactcaacttgcttcaaaatcacttgggcaatgatggagttgcaaaacttcttgagagcttgatcagcccagattgtgtacttaaggtagttgggcttccattaactggcctgaacacacaaacccagcagttgctgatgactgtaaaggaaagaaaacccagtttgatctttctgtctgaaacttggtctttaaaggaaggcagagaaattggtgtgacacctgcttctcagccaggttcaataatacctaattctaatttggattacatgtttttcaaatttcccagaatgtctgcagccatgagaacgtcaaatacagcatctaggcaacccctttgatcatgttgtacgtaaacagtatttattataaattactaccgtgactgggatgcaagagaattaggactataattttcctatttgatgtgtgtgtgtgtgtgtgtgtgtgtgtgtgtgtgtgtgtgtgtgtgaccttgatccagtcaaccacttcaaattcctacactgtctcaagagtattaaaaggattatatgaagtaataaaggataaaatgcattgg

SEQ ID NO: 159684 - DNA, 3777 bp, Homo sapiens
  Payload ID: 11251
  Gene Symbol: NLRP11
  Gene Name: NLR family, pyrin domain containing 11
  ENST ID: ENST00000590409
  CDS Start-End: 676-2640
ataaacacagggcgttcatctaccccactaactggagagaaggaaaacgctgggtaaatagaatggagaggcctggctgtgatcgatcagcctcaagaaaggagacagggtaaaagggagaaagaaaaggaagacccaaagtaacccaggaaatcagcacatagaagagacgaacagcccagcacgaagcgctgactcaccgctccacgccttcctggtccttaatgattggcggctggaagcgggaagaaaagatccgtggtgccatttgattggccaacgaattgctcccttgccattggctcagagggcttttgatgaacagatccagaaaatatgtgaagcgaaacgcccaccgccccttgaggggctgttctagacctttgctcctggtgtcgtatagagcgggggatatttcaagctggagatccgttttcttgtcccagtgaacaggtgcactatgttgaaataagagtggtgacggaggccttgtttatcttgtatcttattgtaaaaggtcatcaagaacccaccttggccaatcaagagaggagtcagctggctaatcaccgggcaggcaccgcctttttcttcccgctgcctagcttgtttgctttcgaccagccaaggagacctggtggcagggttggcaatcaggaggcatgcaaagctgtcatgaggagaaaattcatgctgcaatgggaaagtcacacttttggaaaatttcattataaattttttcgtgacgtttcgtcagatgtgttctacatacttcaattagcctatgattctaccagctattattcagcaaacaatctcaatgtgttcctgatgggagagagagcatctggaaaaactattgttataaatctggctgtgttgaggtggatcaagggtgagatgtggcagaacatgatctcgtacgtcgttcacctcactgctcacgaaataaaccagatgaccaacagcagcttggctgagctaatcgccaaggactggcctgacggccaggctcccattgcagacatcctgtctgatcccaagaaactccttttcatcctcgaggacttggacaacataagattcgagttaaatgtcaatgaaagtgctttgtgtagtaacagcacccagaaagttcccattccagttctcctggtcagtttgctgaagagaaaaatggctccaggctgctggttcctcatctcctcaaggcccacacgtgggaataatgtaaaaacgttcttgaaagaggtagattgctgcacgaccttgcagctgtcgaatgggaagagggagatatattttaactctttctttaaagaccgccagagggcgtcggcagccctccagcttgtacatgaggatgaaatactcgtgggtctgtgccgagtcgccatcttatgctggatcacgtgtactgtcctgaagcggcagatggacaaggggcgtgacttccagctctgctgccaaacacccactgatctacatgcccactttcttgctgatgcgttgacatcagaggctggacttactgccaatcagtatcacctaggtctcctaaaacgtctgtgtttgctggctgcaggaggactgtttctgagcaccctgaatttcagtggtgaagacctcagatgtgttgggtttactgaggctgatgtctctgtgttgcaggccgcgaatattcttttgccgagcaacactcataaagaccgttacaagttcatacacttgaacgtccaggagttttgtacagccattgcatttctgatggcagtacccaactatctgatcccctcaggcagcagagagtataaagagaagagagaacaatactctgactttaatcaagtgtttactttcatttttggtcttctaaatgcaaacaggagaaagattcttgagacatcctttggataccagctaccgatggtagacagcttcaagtggtactcggtgggatacatgaaacatttggaccgtgacccggaaaagttgacgcaccatatgcctttgttttactgtctctatgagaatcgggaagaagaatttgtgaagacgattgtggatgctctcatggaggttacagtttaccttcaatcagacaaggatatgatggtctcattatactgtctggattactgctgtcacctgaggacacttaagttgagtgttcagcgcatctttcaaaacaaagagccacttataaggccaactgctagtcaaatgaagagccttgtctactggagagagatctgctctcttttttatacaatggagagcctccgggagctgcatatctttgacaatgaccttaatggtatttcagaaaggattctgtctaaagccctggagcattctagctgtaaacttcgcacactcaagttgtcctatgtctcgactgcttctggttttgaagacttactcaaggctttggctcgtaatcggagcctgacatacctgagtatcaactgtacgtccatttccctaaatatgttttcacttctgcatgacatcctgcacgagcccacatgccaaataagtcatctgagaatacacaggccaacgcgacggctcacgcctggaatcccaacactttgggaggccgaggcgggcagatcacctgagcttgatgaaatgtgatttgcgagccagcgaatgtgaagaaatcgcctctctcctcatcagtggcgggagtctgagaaaactgaccttatccagcaatccgctgaggagcgacgggatgaacatactgtgtgatgccttgcttcatcccaactgcactcttatatcactggtgttagtcttctgctgtctcactgaaaattgctgcagcgcccttggaagagtgcttctgttcagcccaactctaagacaactagacctgtgtgtgaatcgcttaaaaaattacggagtgttgcatgtgacgtttcccttgctgtttccaacctgtcagttagaggagcttcatctgtctggctgtttctttagcagcgatatctgtcaatatattgccatagttattgctactaatgaaaaactgaggagcctggagattgggagcaacaaaatagaagatgcaggaatgcagctgctatgtggtggtttgagacatcccaactgcatgttggtgaatattgggctagaagagtgcatgttaaccagtgcctgctgtcgatctcttgcctctgttcttaccaccaacaaaacactagaaagactcaacttgcttcaaaatcacttgggcaatgatggagttgcaaaacttcttgagagcttgatcagcccagattgtgtacttaaggtagttgggcttccattaactggcctgaacacacaaacccagcagttgctgatgactgtaaaggaaagaaaacccagtttgatctttctgtctgaaacttggtctttaaaggaaggcagagaaattggtgtgacacctgcttctcagccaggttcaataatacctaattctaatttggattacatgtttttcaaatttcccagaatgtctgcagccatgagaacgtcaaatacagcatctaggcaacccctttgatcatgttgtacgtaaacagtatttattataaattactaccgtgactgggatgcaagagaattaggactataattttcctatttgatgtgtgtgtgtgtgtgtgtgtgtgtgtgtgtgtgtgtgtgtgtgtgaccttgatccagtcaaccacttcaaattcctacactgtctcaagagtattaaaaggattatatgaagtaataaaggataaaatgcattgg

SEQ ID NO: 159685 - DNA, 3064 bp, Homo sapiens
  Payload ID: 11251
  Gene Symbol: NLRP11
  Gene Name: NLR family, pyrin domain containing 11
  ENST ID: ENST00000593244
  CDS Start-End: 389-2644
agatccagaaaatatgtgaagcgaaacgcccaccgccccttgaggggctgttctagacctttgctcctggtgtcgtatagagcgggggatatttcaagctggagatccgttttcttgtcccagtgaacaggtgcactatgttgaaataagagtggtgacggaggccttgtttatcttgtatcttattgtaaaaggtcatcaagaacccaccttggccaatcaagagaggagtcagctggctaatcaccgggcaggcaccgcctttttcttcccgctgcctagcttgtttgctttcgaccagccaaggagacctggtggcagggttgatctcatatttcttgtgcctcaaaatcccttctctgaagtctgccttccctggagaagcaagatggcagaatcggattctactgactttgacctgctgtggtatctagagaatctcagtgacaaggaatttcagagttttaagaagtatctggcacgcaagattcttgatttcaaactgccacagtttccactgatacagatgacaaaagaagaactggctaacgtgttgccaatctcttatgagggacagtatatatggaatatgctcttcagcatattttcaatgatgcgtaaggaagatctttgtaggaagatcattggcagacgaaaccgcaatcaggaggcatgcaaagctgtcatgaggagaaaattcatgctgcaatgggaaagtcacacttttggaaaatttcattataaattttttcgtgacgtttcgtcagatgtgttctacatacttcaattagcctatgattctaccagctattattcagcaaacaatctcaatgtgttcctgatgggagagagagcatctggaaaaactattgttataaatctggctgtgttgaggtggatcaagggtgagatgtggcagaacatgatctcgtacgtcgttcacctcactgctcacgaaataaaccagatgaccaacagcagcttggctgagctaatcgccaaggactggcctgacggccaggctcccattgcagacatcctgtctgatcccaagaaactccttttcatcctcgaggacttggacaacataagattcgagttaaatgtcaatgaaagtgctttgtgtagtaacagcacccagaaagttcccattccagttctcctggtcagtttgctgaagagaaaaatggctccaggctgctggttcctcatctcctcaaggcccacacgtgggaataatgtaaaaacgttcttgaaagaggtagattgctgcacgaccttgcagctgtcgaatgggaagagggagatatattttaactctttctttaaagaccgccagagggcgtcggcagccctccagcttgtacatgaggatgaaatactcgtgggtctgtgccgagtcgccatcttatgctggatcacgtgtactgtcctgaagcggcagatggacaaggggcgtgacttccagctctgctgccaaacacccactgatctacatgcccactttcttgctgatgcgttgacatcagaggctggacttactgccaatcagtatcacctaggtctcctaaaacgtctgtgtttgctggctgcaggaggactgtttctgagcaccctgaatttcagtggtgaagacctcagatgtgttgggtttactgaggctgatgtctctgtgttgcaggccgcgaatattcttttgccgagcaacactcataaagaccgttacaagttcatacacttgaacgtccaggagttttgtacagccattgcatttctgatggcagtacccaactatctgatcccctcaggcagcagagagtataaagagaagagagaacaatactctgactttaatcaagtgtttactttcatttttggtcttctaaatgcaaacaggagaaagattcttgagacatcctttggataccagctaccgatggtagacagcttcaagtggtactcggtgggatacatgaaacatttggaccgtgacccggaaaagttgacgcaccatatgcctttgttttactgtctctatgagaatcgggaagaagaatttgtgaagacgattgtggatgctctcatggaggttacagtttaccttcaatcagacaaggatatgatggtctcattatactgtctggattactgctgtcacctgaggacacttaagttgagtgttcagcgcatctttcaaaacaaagagccacttataaggccaactgctagtcaaatgaagagccttgtctactggagagagatctgctctcttttttatacaatggagagcctccgggagctgcatatctttgacaatgaccttaatggtatttcagaaaggattctgtctaaagccctggagcattctagctgtaaacttcgcacactcaagttgtcctatgtctcgactgcttctggttttgaagacttactcaaggctttggctcgtaatcggagcctgacatacctgagtatcaactgtacgtccatttccctaaatatgttttcacttctgcatgacatcctgcacgagcccacatgccaaataagtcatctgagatggagtttcgcccttgttgcccaggctagagtgcagtggcacagtctcagctcaccgcaacctctgacttccaggttcaagtgattcttttgcctcagcctcccaagtagctgggatttcaggccctcaacggctttcactttcattccaaatagaatacacaggccaacgcgacggctcacgcctggaatcccaacactttgggaggccgaggcgggcagatcacctgagcttgatgaaatgtgatttgcgagccagcgaatgtgaagaaatcgcctctctcctcatcagtggcgggagtctgagaaaactgaccttatccagcaatccgctgaggagcgacgggatgaacatactgtgtgatgccttgcttcatcccaactgcactcttatatcactggtgttagtcttctgctgtctcactgaaaattgctgcagcgcccttggaagagtgcttctgttcagcccaactctaagacaactagacctgtgtgtgaatcgctt

SEQ ID NO: 159686 - DNA, 3231 bp, Homo sapiens
  Payload ID: 11251
  Gene Symbol: NLRP11
  Gene Name: NLR family, pyrin domain containing 11
  Uniprot ID: P59045
  ENST ID: ENST00000589824
  CDS Start-End: 64-3003
gatctcatatttcttgtgcctcaaaatcccttctctgaagtctgccttccctggagaagcaagatggcagaatcggattctactgactttgacctgctgtggtatctagagaatctcagtgacaaggaatttcagagttttaagaagtatctggcacgcaagattcttgatttcaaactgccacagtttccactgatacagatgacaaaagaagaactggctaacgtgttgccaatctcttatgagggacagtatatatggaatatgctcttcagcatattttcaatgatgcgtaaggaagatctttgtaggaagatcattggcagacgaaaccgcaatcaggaggcatgcaaagctgtcatgaggagaaaattcatgctgcaatgggaaagtcacacttttggaaaatttcattataaattttttcgtgacgtttcgtcagatgtgttctacatacttcaattagcctatgattctaccagctattattcagcaaacaatctcaatgtgttcctgatgggagagagagcatctggaaaaactattgttataaatctggctgtgttgaggtggatcaagggtgagatgtggcagaacatgatctcgtacgtcgttcacctcactgctcacgaaataaaccagatgaccaacagcagcttggctgagctaatcgccaaggactggcctgacggccaggctcccattgcagacatcctgtctgatcccaagaaactccttttcatcctcgaggacttggacaacataagattcgagttaaatgtcaatgaaagtgctttgtgtagtaacagcacccagaaagttcccattccagttctcctggtcagtttgctgaagagaaaaatggctccaggctgctggttcctcatctcctcaaggcccacacgtgggaataatgtaaaaacgttcttgaaagaggtagattgctgcacgaccttgcagctgtcgaatgggaagagggagatatattttaactctttctttaaagaccgccagagggcgtcggcagccctccagcttgtacatgaggatgaaatactcgtgggtctgtgccgagtcgccatcttatgctggatcacgtgtactgtcctgaagcggcagatggacaaggggcgtgacttccagctctgctgccaaacacccactgatctacatgcccactttcttgctgatgcgttgacatcagaggctggacttactgccaatcagtatcacctaggtctcctaaaacgtctgtgtttgctggctgcaggaggactgtttctgagcaccctgaatttcagtggtgaagacctcagatgtgttgggtttactgaggctgatgtctctgtgttgcaggccgcgaatattcttttgccgagcaacactcataaagaccgttacaagttcatacacttgaacgtccaggagttttgtacagccattgcatttctgatggcagtacccaactatctgatcccctcaggcagcagagagtataaagagaagagagaacaatactctgactttaatcaagtgtttactttcatttttggtcttctaaatgcaaacaggagaaagattcttgagacatcctttggataccagctaccgatggtagacagcttcaagtggtactcggtgggatacatgaaacatttggaccgtgacccggaaaagttgacgcaccatatgcctttgttttactgtctctatgagaatcgggaagaagaatttgtgaagacgattgtggatgctctcatggaggttacagtttaccttcaatcagacaaggatatgatggtctcattatactgtctggattactgctgtcacctgaggacacttaagttgagtgttcagcgcatctttcaaaacaaagagccacttataaggccaactgctaggttgtcctatgtctcgactgcttctggttttgaagacttactcaaggctttggctcgtaatcggagcctgacatacctgagtatcaactgtacgtccatttccctaaatatgttttcacttctgcatgacatcctgcacgagcccacatgccaaataagtcatctgagcttgatgaaatgtgatttgcgagccagcgaatgtgaagaaatcgcctctctcctcatcagtggcgggagtctgagaaaactgaccttatccagcaatccgctgaggagcgacgggatgaacatactgtgtgatgccttgcttcatcccaactgcactcttatatcactggtgttagtcttctgctgtctcactgaaaattgctgcagcgcccttggaagagtgcttctgttcagcccaactctaagacaactagacctgtgtgtgaatcgcttaaaaaattacggagtgttgcatgtgacgtttcccttgctgtttccaacctgtcagttagaggagcttcatctgtctggctgtttctttagcagcgatatctgtcaatatattgccatagttattgctactaatgaaaaactgaggagcctggagattgggagcaacaaaatagaagatgcaggaatgcagctgctatgtggtggtttgagacatcccaactgcatgttggtgaatattgggctagaagagtgcatgttaaccagtgcctgctgtcgatctcttgcctctgttcttaccaccaacaaaacactagaaagactcaacttgcttcaaaatcacttgggcaatgatggagttgcaaaacttcttgagagcttgatcagcccagattgtgtacttaaggtagttgggcttccattaactggcctgaacacacaaacccagcagttgctgatgactgtaaaggaaagaaaacccagtttgatctttctgtctgaaacttggtctttaaaggaaggcagagaaattggtgtgacacctgcttctcagccaggttcaataatacctaattctaatttggattacatgtttttcaaatttcccagaatgtctgcagccatgagaacgtcaaatacagcatctaggcaacccctttgatcatgttgtacgtaaacagtatttattataaattactaccgtgactgggatgcaagagaattaggactataattttcctatttgatgtgtgtgtgtgtgtgtgtgtgtgtgtgtgtgtgtgtgtgtgtgtgaccttgatccagtcaaccacttcaaattcctacactgtctcaagagtattaaaaggattatatgaagtaataaaggataaaatgcattggaaaaagc

SEQ ID NO: 159687 - DNA, 3077 bp, Homo sapiens
  Payload ID: 11251
  Gene Symbol: NLRP11
  Gene Name: NLR family, pyrin domain containing 11
  Uniprot ID: P59045
  ENST ID: ENST00000592953
  CDS Start-End: 52-2856
ccaaggagacctggtggcagggttggcaatcaggaggcatgcaaagctgtcatgaggagaaaattcatgctgcaatgggaaagtcacacttttggaaaatttcattataaattttttcgtgacgtttcgtcagatgtgttctacatacttcaattagcctatgattctaccagctattattcagcaaacaatctcaatgtgttcctgatgggagagagagcatctggaaaaactattgttataaatctggctgtgttgaggtggatcaagggtgagatgtggcagaacatgatctcgtacgtcgttcacctcactgctcacgaaataaaccagatgaccaacagcagcttggctgagctaatcgccaaggactggcctgacggccaggctcccattgcagacatcctgtctgatcccaagaaactccttttcatcctcgaggacttggacaacataagattcgagttaaatgtcaatgaaagtgctttgtgtagtaacagcacccagaaagttcccattccagttctcctggtcagtttgctgaagagaaaaatggctccaggctgctggttcctcatctcctcaaggcccacacgtgggaataatgtaaaaacgttcttgaaagaggtagattgctgcacgaccttgcagctgtcgaatgggaagagggagatatattttaactctttctttaaagaccgccagagggcgtcggcagccctccagcttgtacatgaggatgaaatactcgtgggtctgtgccgagtcgccatcttatgctggatcacgtgtactgtcctgaagcggcagatggacaaggggcgtgacttccagctctgctgccaaacacccactgatctacatgcccactttcttgctgatgcgttgacatcagaggctggacttactgccaatcagtatcacctaggtctcctaaaacgtctgtgtttgctggctgcaggaggactgtttctgagcaccctgaatttcagtggtgaagacctcagatgtgttgggtttactgaggctgatgtctctgtgttgcaggccgcgaatattcttttgccgagcaacactcataaagaccgttacaagttcatacacttgaacgtccaggagttttgtacagccattgcatttctgatggcagtacccaactatctgatcccctcaggcagcagagagtataaagagaagagagaacaatactctgactttaatcaagtgtttactttcatttttggtcttctaaatgcaaacaggagaaagattcttgagacatcctttggataccagctaccgatggtagacagcttcaagtggtactcggtgggatacatgaaacatttggaccgtgacccggaaaagttgacgcaccatatgcctttgttttactgtctctatgagaatcgggaagaagaatttgtgaagacgattgtggatgctctcatggaggttacagtttaccttcaatcagacaaggatatgatggtctcattatactgtctggattactgctgtcacctgaggacacttaagttgagtgttcagcgcatctttcaaaacaaagagccacttataaggccaactgctagtcaaatgaagagccttgtctactggagagagatctgctctcttttttatacaatggagagcctccgggagctgcatatctttgacaatgaccttaatggtatttcagaaaggattctgtctaaagccctggagcattctagctgtaaacttcgcacactcaagttgtcctatgtctcgactgcttctggttttgaagacttactcaaggctttggctcgtaatcggagcctgacatacctgagtatcaactgtacgtccatttccctaaatatgttttcacttctgcatgacatcctgcacgagcccacatgccaaataagtcatctgagcttgatgaaatgtgatttgcgagccagcgaatgtgaagaaatcgcctctctcctcatcagtggcgggagtctgagaaaactgaccttatccagcaatccgctgaggagcgacgggatgaacatactgtgtgatgccttgcttcatcccaactgcactcttatatcactggtgttagtcttctgctgtctcactgaaaattgctgcagcgcccttggaagagtgcttctgttcagcccaactctaagacaactagacctgtgtgtgaatcgcttaaaaaattacggagtgttgcatgtgacgtttcccttgctgtttccaacctgtcagttagaggagcttcatctgtctggctgtttctttagcagcgatatctgtcaatatattgccatagttattgctactaatgaaaaactgaggagcctggagattgggagcaacaaaatagaagatgcaggaatgcagctgctatgtggtggtttgagacatcccaactgcatgttggtgaatattgggctagaagagtgcatgttaaccagtgcctgctgtcgatctcttgcctctgttcttaccaccaacaaaacactagaaagactcaacttgcttcaaaatcacttgggcaatgatggagttgcaaaacttcttgagagcttgatcagcccagattgtgtacttaaggtagttgggcttccattaactggcctgaacacacaaacccagcagttgctgatgactgtaaaggaaagaaaacccagtttgatctttctgtctgaaacttggtctttaaaggaaggcagagaaattggtgtgacacctgcttctcagccaggttcaataatacctaattctaatttggattacatgtttttcaaatttcccagaatgtctgcagccatgagaacgtcaaatacagcatctaggcaacccctttgatcatgttgtacgtaaacagtatttattataaattactaccgtgactgggatgcaagagaattaggactataattttcctatttgatgtgtgtgtgtgtgtgtgtgtgtgtgtgtgtgtgtgtgtgtgtgtgaccttgatccagtcaaccacttcaaattcctacactgtctcaagagtattaaaaggattatatgaagtaataaaggataaaatgcattgg

SEQ ID NO: 159688 - DNA, 416 bp, Homo sapiens
  Payload ID: 11251
  Gene Symbol: NLRP11
  Gene Name: NLR family, pyrin domain containing 11
  ENST ID: ENST00000593208
  CDS Start-End: 340-416
attcttctcacaggtctcaggctcctgggaggcaccttataaacacagggcgttcatctaccccactaactggagagaaggaaaacgctggatccgttttcttgtcccagtgaacaggtgcactatgttgaaataagagtggtgacggaggccttgtttatcttgtatcttattgtaaaaggtcatcaagaacccaccttggccaatcaagagaggagtcagctggctaatcaccgggcaggcaccgcctttttcttcccgctgcctagcttgtttgctttcgaccagccaaggagacctggtggcagggttggcaatcaggaggcatgcaaagctgtcatgaggagaaaattcatgctgcaatgggaaagtcacacttttggaaaatttcattataaattttttcgtgacgtttc

SEQ ID NO: 159689 - DNA, 3801 bp, Homo sapiens
  Payload ID: 11252
  Gene Symbol: NLRP12
  Gene Name: NLR family, pyrin domain containing 12
  Uniprot ID: P59046
  ENST ID: ENST00000324134
  CDS Start-End: 170-3355
ttcagcaaaaggtctttcctcccttgctctctcctccaaccactggctcagcctctccgcccgctgcctgtgaatgatgcaatggaaggtgtgctggggtcgccctgtgtcccgtgcataggagcatctcagcctccaggtcctctcctttggggctcacggcacccccatgctacgaaccgcaggcagggacggcctctgtcgcctgtccacctacttggaagaactcgaggctgtggaactgaagaagttcaagttatacctggggaccgcgacagagctgggagaaggcaagatcccctggggaagcatggagaaggccggtcccctggaaatggcccagctgctcatcacccacttcgggccagaggaggcctggaggttggctctcagcacctttgagcggataaacaggaaggacctgtgggagagaggacagagagaggacctggtgagggataccccacctggtggcccgtcctcacttgggaaccagtcaacatgccttctggaagtctctcttgtcactccaagaaaagatccccaggaaacctacagggactatgtccgcaggaaattccggctcatggaagaccgcaatgcgcgcctaggggaatgtgtcaacctcagccaccggtacacccggctcctgctggtgaaggagcactcaaaccccatgcaggtccagcagcagcttctggacacaggccggggacacgcgaggaccgtgggacaccaggctagccccatcaagatagagaccctctttgagccagacgaggagcgccccgagccaccgcgcaccgtggtcatgcaaggcgcggcagggataggcaagtccatgctggcacacaaggtgatgctggactgggcggacgggaagctcttccaaggcagatttgattatctcttctacatcaactgcagggagatgaaccagagtgccacggaatgcagcatgcaagacctcatcttcagctgctggcctgagcccagcgcgcctctccaggagctcatccgagttcccgagcgcctccttttcatcatcgacggcttcgatgagctcaagccttctttccacgatcctcagggaccctggtgcctctgctgggaggagaaacggcccacggagctgcttcttaacagcttaattcggaagaagctgctccctgagctatctttgctcatcaccacacggcccacggctttggagaagctccaccgtctgctggagcaccccaggcatgtggagatcctgggcttctctgaggcagaaaggaaggaatacttctacaagtatttccacaatgcagagcaggcgggccaagtcttcaattacgtgagggacaacgagcctctcttcaccatgtgcttcgtccccctggtgtgctgggtggtgtgtacctgcctccagcagcagctggagggtggggggctgttgagacagacgtccaggaccaccactgcagtgtacatgctctacctgctgagtctgatgcaacccaagccgggggccccgcgcctccagcccccacccaaccagagagggttgtgctccttggcggcagatgggctctggaatcagaaaatcctatttgaggagcaggacctccggaagcacggcctagacggggaagacgtctctgccttcctcaacatgaacatcttccagaaggacatcaactgtgagaggtactacagcttcatccacttgagtttccaggaattctttgcagctatgtactatatcctggacgagggggagggcggggcaggcccagaccaggacgtgaccaggctgttgaccgagtacgcgttttctgaaaggagcttcctggcactcaccagccgcttcctgtttggactcctgaacgaggagaccaggagccacctggagaagagtctctgctggaaggtctcgccgcacatcaagatggacctgttgcagtggatccaaagcaaagctcagagcgacggctccaccctgcagcagggctccttggagttcttcagctgcttgtacgagatccaggaggaggagtttatccagcaggccctgagccacttccaggtgatcgtggtcagcaacattgcctccaagatggagcacatggtctcctcgttctgtctgaagcgctgcaggagcgcccaggtgctgcacttgtatggcgccacctacagcgcggacggggaagaccgcgcgaggtgctccgcaggagcgcacacgctgttggtgcagctaccagagaggaccgttctgctggacgcctacagtgaacatctggcagcggccctgtgcaccaatccaaacctgatagagctgtctctgtaccgaaatgccctgggcagccggggggtgaagctgctctgtcaaggactcagacaccccaactgcaaacttcagaacctgaggctgaagaggtgccgcatctccagctcagcctgcgaggacctctctgcagctctcatagccaataagaatttgacaaggatggatctcagtggcaacggcgttggattcccaggcatgatgctgctttgcgagggcctgcggcatccccagtgcaggctgcagatgattcagttgaggaagtgtcagctggagtccggggcttgtcaggagatggcttctgtgctcggcaccaacccacatctggttgagttggacctgacaggaaatgcactggaggatttgggcctgaggttactatgccagggactgaggcacccagtctgcagactacggactttgtggctgaagatctgccgcctcactgctgctgcctgtgacgagctggcctcaactctcagtgtgaaccagagcctgagagagctggacctgagcctgaatgagctgggggacctcggggtgctgctgctgtgtgagggcctcaggcatcccacgtgcaagctccagaccctgcggttgggcatctgccggctgggctctgccgcctgtgagggtctttctgtggtgctccaggccaaccacaacctccgggagctggacttgagtttcaacgacctgggagactggggcctgtggttgctggctgaggggctgcaacatcccgcctgcagactccagaaactgtggctggatagctgtggcctcacagccaaggcttgtgagaatctttacttcaccctggggatcaaccagaccttgaccgacctttacctgaccaacaacgccctaggggacacaggtgtccgactgctttgcaagcggctgagccatcctggctgcaaactccgagtcctctggttatttgggatggacctgaataaaatgacccacagtaggttggcagcgcttcgagtaacaaaaccttatttggacattggctgctgaatggtcctatctgctggctctcccctgagatctggacagaggaagatgggagggtgctcatcacccccccagcataatgatcagcctccttcctagagacagactcatgcagattgagatcaaaagtccctctgcttgggatcaaattaatgtttgacagagctggccaggcgtggtggctcatgtatgtaatcctagcacttcgagaggccgaggcaggtggatcacgaggtcaggagtttgagattagcctggccaagatggtgaaaccctgtctctactaaaaataaaaaaaaattagccaggcatggtggcgggcacctgtagtcccagctactcaggaggctgaggcaggagaatcgcttgaacccgggaggtggaggttgcagtgagccgagatcgcgccactgcactccagcctgggcgacagagtgggactccatctc

SEQ ID NO: 159690 - DNA, 3547 bp, Homo sapiens
  Payload ID: 11252
  Gene Symbol: NLRP12
  Gene Name: NLR family, pyrin domain containing 12
  ENST ID: ENST00000345770
  CDS Start-End: 221-3241
attggtgagtggggcagggcaggagggaactgaagagtgagaaagcattatttcagcaaaaggtctttcctcccttgctctctcctccaaccactggctcagcctctccgcccgctgcctgtgaatgatgcaatggaaggtgtgctggggtcgccctgtgtcccgtgcataggagcatctcagcctccaggtcctctcctttggggctcacggcacccccatgctacgaaccgcaggcagggacggcctctgtcgcctgtccacctacttggaagaactcgaggctgtggaactgaagaagttcaagttatacctggggaccgcgacagagctgggagaaggcaagatcccctggggaagcatggagaaggccggtcccctggaaatggcccagctgctcatcacccacttcgggccagaggaggcctggaggttggctctcagcacctttgagcggataaacaggaaggacctgtgggagagaggacagagagaggacctggtgagggataccccacctggtggcccgtcctcacttgggaaccagtcaacatgccttctggaagtctctcttgtcactccaagaaaagatccccaggaaacctacagggactatgtccgcaggaaattccggctcatggaagaccgcaatgcgcgcctaggggaatgtgtcaacctcagccaccggtacacccggctcctgctggtgaaggagcactcaaaccccatgcaggtccagcagcagcttctggacacaggccggggacacgcgaggaccgtgggacaccaggctagccccatcaagatagagaccctctttgagccagacgaggagcgccccgagccaccgcgcaccgtggtcatgcaaggcgcggcagggataggcaagtccatgctggcacacaaggtgatgctggactgggcggacgggaagctcttccaaggcagatttgattatctcttctacatcaactgcagggagatgaaccagagtgccacggaatgcagcatgcaagacctcatcttcagctgctggcctgagcccagcgcgcctctccaggagctcatccgagttcccgagcgcctccttttcatcatcgacggcttcgatgagctcaagccttctttccacgatcctcagggaccctggtgcctctgctgggaggagaaacggcccacggagctgcttcttaacagcttaattcggaagaagctgctccctgagctatctttgctcatcaccacacggcccacggctttggagaagctccaccgtctgctggagcaccccaggcatgtggagatcctgggcttctctgaggcagaaaggaaggaatacttctacaagtatttccacaatgcagagcaggcgggccaagtcttcaattacgtgagggacaacgagcctctcttcaccatgtgcttcgtccccctggtgtgctgggtggtgtgtacctgcctccagcagcagctggagggtggggggctgttgagacagacgtccaggaccaccactgcagtgtacatgctctacctgctgagtctgatgcaacccaagccgggggccccgcgcctccagcccccacccaaccagagagggttgtgctccttggcggcagatgggctctggaatcagaaaatcctatttgaggagcaggacctccggaagcacggcctagacggggaagacgtctctgccttcctcaacatgaacatcttccagaaggacatcaactgtgagaggtactacagcttcatccacttgagtttccaggaattctttgcagctatgtactatatcctggacgagggggagggcggggcaggcccagaccaggacgtgaccaggctgttgaccgagtacgcgttttctgaaaggagcttcctggcactcaccagccgcttcctgtttggactcctgaacgaggagaccaggagccacctggagaagagtctctgctggaaggtctcgccgcacatcaagatggacctgttgcagtggatccaaagcaaagctcagagcgacggctccaccctgcagcagggctccttggagttcttcagctgcttgtacgagatccaggaggaggagtttatccagcaggccctgagccacttccaggtgatcgtggtcagcaacattgcctccaagatggagcacatggtctcctcgttctgtctgaagcgctgcaggagcgcccaggtgctgcacttgtatggcgccacctacagcgcggacggggaagaccgcgcgaggtgctccgcaggagcgcacacgctgttggtgcagctcagaccagagaggaccgttctgctggacgcctacagtgaacatctggcagcggccctgtgcaccaatccaaacctgatagagctgtctctgtaccgaaatgccctgggcagccggggggtgaagctgctctgtcaaggactcagacaccccaactgcaaacttcagaacctgaggctgaagaggtgccgcatctccagctcagcctgcgaggacctctctgcagctctcatagccaataagaatttgacaaggatggatctcagtggcaacggcgttggattcccaggcatgatgctgctttgcgagggcctgcggcatccccagtgcaggctgcagatgattcagttgaggaagtgtcagctggagtccggggcttgtcaggagatggcttctgtgctcggcaccaacccacatctggttgagttggacctgacaggaaatgcactggaggatttgggcctgaggttactatgccagggactgaggcacccagtctgcagactacggactttgtggctgaagatctgccgcctcactgctgctgcctgtgacgagctggcctcaactctcagtgtgaaccagagcctgagagagctggacctgagcctgaatgagctgggggacctcggggtgctgctgctgtgtgagggcctcaggcatcccacgtgcaagctccagaccctgcggttgggcatctgccggctgggctctgccgcctgtgagggtctttctgtggtgctccaggccaaccacaacctccgggagctggacttgagtttcaacgacctgggagactggggcctgtggttgctggctgaggggctgcaacatcccgcctgcagactccagaaactgtggtggttatttgggatggacctgaataaaatgacccacagtaggttggcagcgcttcgagtaacaaaaccttatttggacattggctgctgaatggtcctatctgctggctctcccctgagatctggacagaggaagatgggagggtgctcatcacccccccagcataatgatcagcctccttcctagagacagactcatgcagattgagatcaaaagtccctctgcttgggatcaaattaatgtttgacagagctggccaggcgtggtggctcatgtatgtaatcctagcacttcgagaggccgaggcaggtggatcacgaggtcaggagtttgagattagcctggccaagatggtgaaaccctgtctctactaaaaataaaaaaaaattagccagg

SEQ ID NO: 159691 - DNA, 3205 bp, Homo sapiens
  Payload ID: 11252
  Gene Symbol: NLRP12
  Gene Name: NLR family, pyrin domain containing 12
  ENST ID: ENST00000391772
  CDS Start-End: 221-2899
attggtgagtggggcagggcaggagggaactgaagagtgagaaagcattatttcagcaaaaggtctttcctcccttgctctctcctccaaccactggctcagcctctccgcccgctgcctgtgaatgatgcaatggaaggtgtgctggggtcgccctgtgtcccgtgcataggagcatctcagcctccaggtcctctcctttggggctcacggcacccccatgctacgaaccgcaggcagggacggcctctgtcgcctgtccacctacttggaagaactcgaggctgtggaactgaagaagttcaagttatacctggggaccgcgacagagctgggagaaggcaagatcccctggggaagcatggagaaggccggtcccctggaaatggcccagctgctcatcacccacttcgggccagaggaggcctggaggttggctctcagcacctttgagcggataaacaggaaggacctgtgggagagaggacagagagaggacctggtgagggataccccacctggtggcccgtcctcacttgggaaccagtcaacatgccttctggaagtctctcttgtcactccaagaaaagatccccaggaaacctacagggactatgtccgcaggaaattccggctcatggaagaccgcaatgcgcgcctaggggaatgtgtcaacctcagccaccggtacacccggctcctgctggtgaaggagcactcaaaccccatgcaggtccagcagcagcttctggacacaggccggggacacgcgaggaccgtgggacaccaggctagccccatcaagatagagaccctctttgagccagacgaggagcgccccgagccaccgcgcaccgtggtcatgcaaggcgcggcagggataggcaagtccatgctggcacacaaggtgatgctggactgggcggacgggaagctcttccaaggcagatttgattatctcttctacatcaactgcagggagatgaaccagagtgccacggaatgcagcatgcaagacctcatcttcagctgctggcctgagcccagcgcgcctctccaggagctcatccgagttcccgagcgcctccttttcatcatcgacggcttcgatgagctcaagccttctttccacgatcctcagggaccctggtgcctctgctgggaggagaaacggcccacggagctgcttcttaacagcttaattcggaagaagctgctccctgagctatctttgctcatcaccacacggcccacggctttggagaagctccaccgtctgctggagcaccccaggcatgtggagatcctgggcttctctgaggcagaaaggaaggaatacttctacaagtatttccacaatgcagagcaggcgggccaagtcttcaattacgtgagggacaacgagcctctcttcaccatgtgcttcgtccccctggtgtgctgggtggtgtgtacctgcctccagcagcagctggagggtggggggctgttgagacagacgtccaggaccaccactgcagtgtacatgctctacctgctgagtctgatgcaacccaagccgggggccccgcgcctccagcccccacccaaccagagagggttgtgctccttggcggcagatgggctctggaatcagaaaatcctatttgaggagcaggacctccggaagcacggcctagacggggaagacgtctctgccttcctcaacatgaacatcttccagaaggacatcaactgtgagaggtactacagcttcatccacttgagtttccaggaattctttgcagctatgtactatatcctggacgagggggagggcggggcaggcccagaccaggacgtgaccaggctgttgaccgagtacgcgttttctgaaaggagcttcctggcactcaccagccgcttcctgtttggactcctgaacgaggagaccaggagccacctggagaagagtctctgctggaaggtctcgccgcacatcaagatggacctgttgcagtggatccaaagcaaagctcagagcgacggctccaccctgcagcagggctccttggagttcttcagctgcttgtacgagatccaggaggaggagtttatccagcaggccctgagccacttccaggtgatcgtggtcagcaacattgcctccaagatggagcacatggtctcctcgttctgtctgaagcgctgcaggagcgcccaggtgctgcacttgtatggcgccacctacagcgcggacggggaagaccgcgcgaggtgctccgcaggagcgcacacgctgttggtgcagctcagaccagagaggaccgttctgctggacgcctacagtgaacatctggcagcggccctgtgcaccaatccaaacctgatagagctgtctctgtaccgaaatgccctgggcagccggggggtgaagctgctctgtcaaggactcagacaccccaactgcaaacttcagaacctgaggctgaagaggtgccgcatctccagctcagcctgcgaggacctctctgcagctctcatagccaataagaatttgacaaggatggatctcagtggcaacggcgttggattcccaggcatgatgctgctttgcgagggcctgcggcatccccagtgcaggctgcagatgattcagttgaggaagtgtcagctggagtccggggcttgtcaggagatggcttctgtgctcggcaccaacccacatctggttgagttggacctgacaggaaatgcactggaggatttgggcctgaggttactatgccagggactgaggcacccagtctgcagactacggactttgtggtggttatttgggatggacctgaataaaatgacccacagtaggttggcagcgcttcgagtaacaaaaccttatttggacattggctgctgaatggtcctatctgctggctctcccctgagatctggacagaggaagatgggagggtgctcatcacccccccagcataatgatcagcctccttcctagagacagactcatgcagattgagatcaaaagtccctctgcttgggatcaaattaatgtttgacagagctggccaggcgtggtggctcatgtatgtaatcctagcacttcgagaggccgaggcaggtggatcacgaggtcaggagtttgagattagcctggccaagatggtgaaaccctgtctctactaaaaataaaaaaaaattagccagg

SEQ ID NO: 159692 - DNA, 3715 bp, Homo sapiens
  Payload ID: 11252
  Gene Symbol: NLRP12
  Gene Name: NLR family, pyrin domain containing 12
  Uniprot ID: P59046
  ENST ID: ENST00000391773
  CDS Start-End: 221-3409
attggtgagtggggcagggcaggagggaactgaagagtgagaaagcattatttcagcaaaaggtctttcctcccttgctctctcctccaaccactggctcagcctctccgcccgctgcctgtgaatgatgcaatggaaggtgtgctggggtcgccctgtgtcccgtgcataggagcatctcagcctccaggtcctctcctttggggctcacggcacccccatgctacgaaccgcaggcagggacggcctctgtcgcctgtccacctacttggaagaactcgaggctgtggaactgaagaagttcaagttatacctggggaccgcgacagagctgggagaaggcaagatcccctggggaagcatggagaaggccggtcccctggaaatggcccagctgctcatcacccacttcgggccagaggaggcctggaggttggctctcagcacctttgagcggataaacaggaaggacctgtgggagagaggacagagagaggacctggtgagggataccccacctggtggcccgtcctcacttgggaaccagtcaacatgccttctggaagtctctcttgtcactccaagaaaagatccccaggaaacctacagggactatgtccgcaggaaattccggctcatggaagaccgcaatgcgcgcctaggggaatgtgtcaacctcagccaccggtacacccggctcctgctggtgaaggagcactcaaaccccatgcaggtccagcagcagcttctggacacaggccggggacacgcgaggaccgtgggacaccaggctagccccatcaagatagagaccctctttgagccagacgaggagcgccccgagccaccgcgcaccgtggtcatgcaaggcgcggcagggataggcaagtccatgctggcacacaaggtgatgctggactgggcggacgggaagctcttccaaggcagatttgattatctcttctacatcaactgcagggagatgaaccagagtgccacggaatgcagcatgcaagacctcatcttcagctgctggcctgagcccagcgcgcctctccaggagctcatccgagttcccgagcgcctccttttcatcatcgacggcttcgatgagctcaagccttctttccacgatcctcagggaccctggtgcctctgctgggaggagaaacggcccacggagctgcttcttaacagcttaattcggaagaagctgctccctgagctatctttgctcatcaccacacggcccacggctttggagaagctccaccgtctgctggagcaccccaggcatgtggagatcctgggcttctctgaggcagaaaggaaggaatacttctacaagtatttccacaatgcagagcaggcgggccaagtcttcaattacgtgagggacaacgagcctctcttcaccatgtgcttcgtccccctggtgtgctgggtggtgtgtacctgcctccagcagcagctggagggtggggggctgttgagacagacgtccaggaccaccactgcagtgtacatgctctacctgctgagtctgatgcaacccaagccgggggccccgcgcctccagcccccacccaaccagagagggttgtgctccttggcggcagatgggctctggaatcagaaaatcctatttgaggagcaggacctccggaagcacggcctagacggggaagacgtctctgccttcctcaacatgaacatcttccagaaggacatcaactgtgagaggtactacagcttcatccacttgagtttccaggaattctttgcagctatgtactatatcctggacgagggggagggcggggcaggcccagaccaggacgtgaccaggctgttgaccgagtacgcgttttctgaaaggagcttcctggcactcaccagccgcttcctgtttggactcctgaacgaggagaccaggagccacctggagaagagtctctgctggaaggtctcgccgcacatcaagatggacctgttgcagtggatccaaagcaaagctcagagcgacggctccaccctgcagcagggctccttggagttcttcagctgcttgtacgagatccaggaggaggagtttatccagcaggccctgagccacttccaggtgatcgtggtcagcaacattgcctccaagatggagcacatggtctcctcgttctgtctgaagcgctgcaggagcgcccaggtgctgcacttgtatggcgccacctacagcgcggacggggaagaccgcgcgaggtgctccgcaggagcgcacacgctgttggtgcagctcagaccagagaggaccgttctgctggacgcctacagtgaacatctggcagcggccctgtgcaccaatccaaacctgatagagctgtctctgtaccgaaatgccctgggcagccggggggtgaagctgctctgtcaaggactcagacaccccaactgcaaacttcagaacctgaggctgaagaggtgccgcatctccagctcagcctgcgaggacctctctgcagctctcatagccaataagaatttgacaaggatggatctcagtggcaacggcgttggattcccaggcatgatgctgctttgcgagggcctgcggcatccccagtgcaggctgcagatgattcagttgaggaagtgtcagctggagtccggggcttgtcaggagatggcttctgtgctcggcaccaacccacatctggttgagttggacctgacaggaaatgcactggaggatttgggcctgaggttactatgccagggactgaggcacccagtctgcagactacggactttgtggctgaagatctgccgcctcactgctgctgcctgtgacgagctggcctcaactctcagtgtgaaccagagcctgagagagctggacctgagcctgaatgagctgggggacctcggggtgctgctgctgtgtgagggcctcaggcatcccacgtgcaagctccagaccctgcggttgggcatctgccggctgggctctgccgcctgtgagggtctttctgtggtgctccaggccaaccacaacctccgggagctggacttgagtttcaacgacctgggagactggggcctgtggttgctggctgaggggctgcaacatcccgcctgcagactccagaaactgtggctggatagctgtggcctcacagccaaggcttgtgagaatctttacttcaccctggggatcaaccagaccttgaccgacctttacctgaccaacaacgccctaggggacacaggtgtccgactgctttgcaagcggctgagccatcctggctgcaaactccgagtcctctggttatttgggatggacctgaataaaatgacccacagtaggttggcagcgcttcgagtaacaaaaccttatttggacattggctgctgaatggtcctatctgctggctctcccctgagatctggacagaggaagatgggagggtgctcatcacccccccagcataatgatcagcctccttcctagagacagactcatgcagattgagatcaaaagtccctctgcttgggatcaaattaatgtttgacagagctggccaggcgtggtggctcatgtatgtaatcctagcacttcgagaggccgaggcaggtggatcacgaggtcaggagtttgagattagcctggccaagatggtgaaaccctgtctctactaaaaataaaaaaaaattagccagg

SEQ ID NO: 159693 - DNA, 3465 bp, Homo sapiens
  Payload ID: 11252
  Gene Symbol: NLRP12
  Gene Name: NLR family, pyrin domain containing 12
  Uniprot ID: P59046
  ENST ID: ENST00000391775
  CDS Start-End: 144-3158
ctctctcctccaaccactggctcagcctctccgcccgctgcctgtgaatgatgcaatggaaggtgtgctggggtcgccctgtgtcccgtgcataggagcatctcagcctccaggtcctctcctttggggctcacggcacccccatgctacgaaccgcaggcagggacggcctctgtcgcctgtccacctacttggaagaactcgaggctgtggaactgaagaagttcaagttatacctggggaccgcgacagagctgggagaaggcaagatcccctggggaagcatggagaaggccggtcccctggaaatggcccagctgctcatcacccacttcgggccagaggaggcctggaggttggctctcagcacctttgagcggataaacaggaaggacctgtgggagagaggacagagagaggacctggtgagggataccccacctggtggcccgtcctcacttgggaaccagtcaacatgccttctggaagtctctcttgtcactccaagaaaagatccccaggaaacctacagggactatgtccgcaggaaattccggctcatggaagaccgcaatgcgcgcctaggggaatgtgtcaacctcagccaccggtacacccggctcctgctggtgaaggagcactcaaaccccatgcaggtccagcagcagcttctggacacaggccggggacacgcgaggaccgtgggacaccaggctagccccatcaagatagagaccctctttgagccagacgaggagcgccccgagccaccgcgcaccgtggtcatgcaaggcgcggcagggataggcaagtccatgctggcacacaaggtgatgctggactgggcggacgggaagctcttccaaggcagatttgattatctcttctacatcaactgcagggagatgaaccagagtgccacggaatgcagcatgcaagacctcatcttcagctgctggcctgagcccagcgcgcctctccaggagctcatccgagttcccgagcgcctccttttcatcatcgacggcttcgatgagctcaagccttctttccacgatcctcagggaccctggtgcctctgctgggaggagaaacggcccacggagctgcttcttaacagcttaattcggaagaagctgctccctgagctatctttgctcatcaccacacggcccacggctttggagaagctccaccgtctgctggagcaccccaggcatgtggagatcctgggcttctctgaggcagaaaggaaggaatacttctacaagtatttccacaatgcagagcaggcgggccaagtcttcaattacgtgagggacaacgagcctctcttcaccatgtgcttcgtccccctggtgtgctgggtggtgtgtacctgcctccagcagcagctggagggtggggggctgttgagacagacgtccaggaccaccactgcagtgtacatgctctacctgctgagtctgatgcaacccaagccgggggccccgcgcctccagcccccacccaaccagagagggttgtgctccttggcggcagatgggctctggaatcagaaaatcctatttgaggagcaggacctccggaagcacggcctagacggggaagacgtctctgccttcctcaacatgaacatcttccagaaggacatcaactgtgagaggtactacagcttcatccacttgagtttccaggaattctttgcagctatgtactatatcctggacgagggggagggcggggcaggcccagaccaggacgtgaccaggctgttgaccgagtacgcgttttctgaaaggagcttcctggcactcaccagccgcttcctgtttggactcctgaacgaggagaccaggagccacctggagaagagtctctgctggaaggtctcgccgcacatcaagatggacctgttgcagtggatccaaagcaaagctcagagcgacggctccaccctgcagcagggctccttggagttcttcagctgcttgtacgagatccaggaggaggagtttatccagcaggccctgagccacttccaggtgatcgtggtcagcaacattgcctccaagatggagcacatggtctcctcgttctgtctgaagcgctgcaggagcgcccaggtgctgcacttgtatggcgccacctacagcgcggacggggaagaccgcgcgaggtgctccgcaggagcgcacacgctgttggtgcagctaccagagaggaccgttctgctggacgcctacagtgaacatctggcagcggccctgtgcaccaatccaaacctgatagagctgtctctgtaccgaaatgccctgggcagccggggggtgaagctgctctgtcaaggactcagacaccccaactgcaaacttcagaacctgaggctgaagaggtgccgcatctccagctcagcctgcgaggacctctctgcagctctcatagccaataagaatttgacaaggatggatctcagtggcaacggcgttggattcccaggcatgatgctgctttgcgagggcctgcggcatccccagtgcaggctgcagatgattcagttgaggaagtgtcagctggagtccggggcttgtcaggagatggcttctgtgctcggcaccaacccacatctggttgagttggacctgacaggaaatgcactggaggatttgggcctgaggttactatgccagggactgaggcacccagtctgcagactacggactttgtggctgaagatctgccgcctcactgctgctgcctgtgacgagctggcctcaactctcagtgtgaaccagagcctgagagagctggacctgagcctgaatgagctgggggacctcggggtgctgctgctgtgtgagggcctcaggcatcccacgtgcaagctccagaccctgcggctggatagctgtggcctcacagccaaggcttgtgagaatctttacttcaccctggggatcaaccagaccttgaccgacctttacctgaccaacaacgccctaggggacacaggtgtccgactgctttgcaagcggctgagccatcctggctgcaaactccgagtcctctggttatttgggatggacctgaataaaatgacccacagtaggttggcagcgcttcgagtaacaaaaccttatttggacattggctgctgaatggtcctatctgctggctctcccctgagatctggacagaggaagatgggagggtgctcatcacccccccagcataatgatcagcctccttcctagagacagactcatgcagattgagatcaaaagtccctctgcttgggatcaaattaatgtttgacagagctggccaggcgtggtggctcatgtatgtaatcctagcacttcgagaggccgaggcaggtggatcacgaggtcaggagtttgagattagcctggccaagatggtgaaaccctgtctctactaaaaataaaaaaaaattagccaggc

SEQ ID NO: 159694 - DNA, 3132 bp, Homo sapiens
  Payload ID: 11253
  Gene Symbol: NLRP13
  Gene Name: NLR family, pyrin domain containing 13
  Uniprot ID: Q86W25
  ENST ID: ENST00000342929
  CDS Start-End: 1-3132
atgaacttttctgtaatcacctgccccaacggtggtaccaaccaagggcttctgccttacctgatggccctggatcagtatcagctggaggaattcaagctttgcttggaaccccagcagctgatggacttctggtcggccccccaggggcacttcccgcgtatcccctgggcaaacttgagagctgccgaccctttgaatctgtcctttcttttggatgaacacttcccaaaaggtcaggcatggaaagtggtcctcggcatcttccagacaatgaatctgacctcactgtgtgagaaagttagagccgagatgaaagagaatgtgcagacccaagagctgcaagatccaacccaggaagatctagagatgctagaagcagcagcagggaatatgcagacccagggatgccaagatccaaaccaagaagaactagacgagctagaagaagaaacagggaatgtacaggcccagggatgccaagatccaaaccaagaagaaccagagatgctagaggaagcagaccacagaagaaaatacagagagaacatgaaggctgaactactggagacatgggacaacatcagttggcctaaagaccacgtatatatccgtaatacatcaaaggacgaacatgaggaactgcagcgcctactggatcctaataggactagagcccaggcccagacgatagtcttggtggggagggcaggggttgggaagaccaccttggcaatgcaggctatgctgcactgggcaaatggagttctctttcagcaaaggttctcctatgttttctatctcagctgccataaaataaggtacatgaaggaaactacctttgctgaattgatttctttggattggcccgattttgatgcccccattgaagagttcatgtctcaaccagagaagctcctgtttattattgatggctttgaggaaataatcatatctgagtcacgctctgagagcttggatgatggctcgccatgtacagactggtaccaggagctcccagtgaccaaaatcctacacagcttgttgaagaaagaattggttcccctggctaccttactgatcacgatcaagacctggtttgtgagagatcttaaggcctcattagtgaatccatgctttgtacaaattacagggttcacaggggacgacctacgggtatatttcatgagacactttgatgactcaagtgaagttgagaaaatcctgcagcagctaagaaaaaacgaaactctctttcattcctgcagtgcccccatggtgtgttggaccgtatgttcctgtctgaagcagccgaaggtgaggtattacgatctccagtcaatcactcagactaccaccagtctgtatgcctattttttctccaacttgttctccacagcagaggtagatttggcagatgacagctggccaggacaatggagggccctctgcagtctggccatagaagggctgtggtctatgaacttcacgtttaacaaagaagacactgagatcgagggcctggaagtgcctttcattgattctctctacgagttcaatattcttcaaaagatcaatgactgtgggggttgcactactttcacccacctaagtttccaggagttttttgcagccatgtcctttgtgctagaggaacctagagaattccctccccattccacaaagccacaagagatgaagatgttactgcaacacgtcttgcttgacaaagaagcctactggactccagtggttctgttcttctttggtcttttaaataaaaacatagcaagagaactggaagatactttgcattgtaaaatatctcccagggtaatggaggaattattaaagtggggagaagagttaggtaaggctgaaagtgcctctctccaatttcacattctacgactttttcactgcctacacgagtcccaggaggaagacttcacaaagaagatgttgggtcgtatctttgaagttgaccttaatattttggaggacgaagaactccaagcttcttcattttgcctaaagcactgtaaaaggttaaataagctaaggctttctgttagcagtcacatccttgaaagggacttggaaattctggagacaagcaagtttgattccaggatgcacgcatggaacagcatttgctctacgttggtcacaaatgagaatctgcatgagctagacctgagtaacagcaaacttcatgcttcctctgtgaagggtctctgtcttgcactgaaaaatccaagatgcaaagtccagaaactgacgtgcaaatcggtaactcctgagtgggttctgcaggacctcattattgcccttcagggtaacagcaagctgacccatctgaacttcagctctaacaagctgggaatgactgtccccctgattcttaaagctttgagacactcagcttgcaacctcaagtatctgtgcctggagaaatgcaacttgtcggcagccagctgtcaggacctagccttgtttctcaccagcatccaacacgtaactcgattgtgcctgggatttaatcggctccaagatgatggcataaagctattgtgtgcggccctgactcaccccaagtgtgccttagagagactggagctctggttttgccagctggcagcacccgcttgcaagcacttgtcagatgctctcctgcagaacaggagcctgacacacctgaatctgagcaagaacagcctgagagacgagggagtcaagttcctgtgtgaggccttgggtcgcccagatggtaacctgcagagcctgaatttgtcaggttgttctttcacaagagagggctgtggagagctggctaatgccctcagccataatcataatgtgaaaatcttggatttgggagaaaatgatcttcaggatgatggagtgaagctactgtgtgaggctctgaaaccacatcgtgcattgcacacacttgggttggcgaaatgcaatctgacaactgcttgctgccagcatctcttctctgttctcagcagcagtaagagcctggtcaatctgaaccttctaggcaatgaattggatactgatggtgtcaagatgctatgtaaggctttgaaaaagtcgacatgcaggctgcagaaactcgggtaa

SEQ ID NO: 159695 - DNA, 3533 bp, Homo sapiens
  Payload ID: 11253
  Gene Symbol: NLRP13
  Gene Name: NLR family, pyrin domain containing 13
  ENST ID: ENST00000588751
  CDS Start-End: 26-3136
tgagaaactgcatgtgttgggcaagatgaacttttctgtaatcacctgccccaacggtggtaccaaccaagggcttctgccttacctgatggccctggatcagtatcagctggaggaattcaagctttgcttggaaccccagcagctgatggacttctggtcggccccccaggggcacttcccgcgtatcccctgggcaaacttgagagctgccgaccctttgaatctgtcctttcttttggatgaacacttcccaaaaggtcaggcatggaaagtggtcctcggcatcttccagacaatgaatctgacctcactgtgtgagaaagttagagccgagatgaaagagaatgtgcagacccaagagctgcaagatccaacccaggaagatctagagatgctagaagcagcagcagggaatatgcagacccagggatgccaagatccaaaccaagaagaactagacgagctagaagaagaaacagggaatgtacaggcccagggatgccaagatccaaaccaagaagaaccagagatgctagaggaagcagaccacagaagaaaatacagagagaacatgaaggctgaactactggagacatgggacaacatcagttggcctaaagaccacgtatatatccgtaatacatcaaaggacgaacatgaggaactgcagcgcctactggatcctaataggactagagcccaggcccagacgatagtcttggtggggagggcaggggttgggaagaccaccttggcaatgcaggctatgctgcactgggcaaatggagttctctttcagcaaaggttctcctatgttttctatctcagctgccataaaataaggtacatgaaggaaactacctttgctgaattgatttctttggattggcccgattttgatgcccccattgaagagttcatgtctcaaccagagaagctcctgtttattattgatggctttgaggaaataatcatatctgagtcacgctctgagagcttggatgatggctcgccatgtacagactggtaccaggagctcccagtgaccaaaatcctacacagcttgttgaagaaagaattggttcccctggctaccttactgatcacgatcaagacctggtttgtgagagatcttaaggcctcattagtgaatccatgctttgtacaaattacagggttcacaggggacgacctacgggtatatttcatgagacactttgatgactcaagtgaagttgagaaaatcctgcagcagctaagaaaaaacgaaactctctttcattcctgcagtgcccccatggtgtgttggaccgtatgttcctgtctgaagcagccgaaggtgaggtattacgatctccagtcaatcactcagactaccaccagtctgtatgcctattttttctccaacttgttctccacagcagaggtagatttggcagatgacagctggccaggacaatggagggccctctgcagtctggccatagaagggctgtggtctatgaacttcacgtttaacaaagaagacactgagatcgagggcctggaagtgcctttcattgattctctctacgagttcaatattcttcaaaagatcaatgactgtgggggttgcactactttcacccacctaagtttccaggagttttttgcagccatgtcctttgtgctagaggaacctagagaattccctccccattccacaaagccacaagagatgaagatgttactgcaacacgtcttgcttgacaaagaagcctactggactccagtggttctgttcttctttggtcttttaaataaaaacatagcaagagaactggaagatactttgcattgtaaaatatctcccagggtaatggaggaattattaaagtggggagaagagttaggtaaggctgaaagtgcctctctccaatttcacattctacgactttttcactgcctacacgagtcccaggaggaagacttcacaaagaagatgttgggtcgtatctttgaagttgaccttaatattttggaggacgaagaactccaagcttcttcattttgcctaaagcactgtaaaaggttaaataagctaaggctttctgttagcagtcacatccttgaaagggacttggaaattctggagacaagcaagtttgattccaggatgcacgcatggaacagcatttgctctacgttggtcacaaatgagaatctgcatgagctagacctgagtaacagcaaacttcatgcttcctctgtgaagggtctctgtcttgcactgaaaaatccaagatgcaaagtccagaaactgacgtgcaaatcggtaactcctgagtgggttctgcaggacctcattattgcccttcagggtaacagcaagctgacccatctgaacttcagctctaacaagctgggaatgactgtccccctgattcttaaagctttgagacactcagcttgcaacctcaagtatctgtgcctggagaaatgcaacttgtcggcagccagctgtcaggacctagccttgtttctcaccagcatccaacacgtaactcgattgtgcctgggatttaatcggctccaagatgatggcataaagctattgtgtgcggccctgactcaccccaagtgtgccttagagagactggagctctggttttgccagctggcagcacccgcttgcaagcacttgtcagatgctctcctgcagaacaggagcctgacacacctgaatctgagcaagaacagcctgagagacgagggagtcaagttcctgtgtgaggccttgggtcgcccagatggtaacctgcagagcctgaatttgtcaggttgttctttcacaagagagggctgtggagagctggctaatgccctcagccataatcataatgtgaaaatcttggatttgggagaaaatgatcttcaggatgatggagtgaagctactgtgtgaggctctgaaaccacatcgtgcattgcacacacttgggttggcgaaatgcaatctgacaactgcttgctgccagcatctcttctctgttctcagcagcagtaagagcctggtcaatctgaaccttctaggcaatgaattggatactgatggtgtcaagatgctatgcttcaaaaagacctgcacaatgtagtgagagaggagatacagacctcacagaaggagctctgtctgaaactcaagtgtgcgtgggattttaatgaccttgaagacaagtggtggtggtgatcccacggattagatgccacgtggcttgaccatggatcttgggggaaagccaccaggacatcctggcctgtgtgtcgctccaatgtcaccatttgtggggacaaatgagctgttccctgcaggaggctttgtcacggttgttggaggccgcccattgcacgcccaggtctggaatcctagtgtaatactgtgtctggtaccaagatcataagttggctgtgccttcagtcttgtctatgtcctccttggtgtaatgtttttaattcttggaggtgttgagagaattcaataaagcaaagcat

SEQ ID NO: 159696 - DNA, 3628 bp, Homo sapiens
  Payload ID: 11254
  Gene Symbol: NLRP14
  Gene Name: NLR family, pyrin domain containing 14
  Uniprot ID: Q86W24
  ENST ID: ENST00000299481
  CDS Start-End: 347-3628
gtatcccgcgcctcccgacctttggccgctggcattcctgcgcgggcgggagctgcgggcgctcgggggataaggcgaggacgcaccagcattaatggaataggagaactcccgaagcttttagggccctgggaaagggggcgtggctggaaacggagctactggcttcggagaattctgtgaccctcaccaccgcgacgaccccgaggaaacgctgtcaggtcgcctttggttggcaaggcgtggttgtcctcgctgtcccgcgccttggcggaatgggcacctcactagccctggcactagctagcatcgctctaaactcaagaggcctgaatatttggacaagatggcagattcatcatcatcttctttctttcctgattttgggctgctattgtatttggaggagctaaacaaagaggaattaaatacattcaagttattcctaaaggagaccatggaacctgagcatggcctgacaccctggaatgaagtgaagaaggccaggcgggaggacctggccaatttgatgaagaaatattatccaggagagaaagcctggagtgtgtctctcaaaatctttggcaagatgaacctgaaggatctgtgtgagagagcgaaagaagagatcaactggtcggcccagactataggaccagatgatgccaaggctggagagacacaagaagatcaggaggcagtgctgggtgatggaacagaatacagaaatagaataaaggaaaaattttgcatcacttgggacaagaagtctttggctggaaagcctgaagatttccatcatggaattgcagagaaagatagaaaactgttggaacacttgttcgatgtggatgtcaaaaccggtgcacagccacagatcgtggtgcttcagggagctgctggagttgggaaaacaaccttggtgagaaaggcaatgttagattgggcagagggcagtctctaccagcagaggtttaagtatgttttttatctcaatgggagagaaattaaccagctgaaagagagaagctttgctcaattgatatcaaaggactggcccagcacagaaggccccattgaagaaatcatgtaccagccaagtagcctcttgtttattattgacagtttcgatgaactgaactttgcctttgaagaacctgagtttgcactgtgcgaagactggacccaagaacacccagtgtccttcctcatgagtagtttgctgaggaaagtgatgctccctgaggcatccttattggtgacaacaagactcacaacttctaagagactaaagcagttgttgaagaatcaccattatgtagagctactaggaatgtctgaggatgcaagagaggagtatatttaccagttttttgaagataagaggtgggccatgaaagtattcagttcactaaaaagcaatgagatgctgtttagcatgtgccaagtccccctagtgtgctgggccgcttgtacttgtctgaagcagcaaatggagaagggtggtgatgtcacattgacctgccaaacaaccacagctctgtttacctgctatatttctagcttgttcacaccagtagatggaggctctcctagtctacccaaccaagcccagctgagaagactgtgccaagtcgctgccaaaggaatatggactatgacttacgtgttttacagagaaaatctcagaaggcttgggttaactcaatctgatgtctctagttttatggacagcaatattattcagaaggacgcagagtatgaaaactgctatgtgttcacccaccttcatgttcaggagttttttgcagctatgttctatatgttgaaaggcagttgggaagctgggaacccttcctgccagccttttgaagatttgaagtcattacttcaaagcacaagttataaagacccccatttgacacagatgaagtgctttttgtttggccttttgaatgaagatcgagtaaaacaactggagaggacttttaactgtaaaatgtcactgaagataaaatcaaagttacttcagtgtatggaagtattaggaaacagtgactattctccatcacagctgggatttctggagttgtttcactgtctgtatgagactcaagataaagcgtttataagccaggcaatgagatgtttcccaaaggttgccattaatatttgtgagaaaatacatttgcttgtatcttctttctgccttaagcactgccggtgtttgcggaccatcaggctgtctgtaactgtggtatttgagaagaagatattaaaaacaagcctcccaactaacacttgggatggtgatcgcattactcactgttggcaagatctctgttctgtgcttcatacaaatgaacacttgagagaattggacctgtaccatagcaaccttgataaatcagcaatgaatatcctgcatcatgaactaaggcacccaaactgtaaactacaaaagctactgttgaaatttatcactttccctgatggttgtcaggatatctctacttctttgattcataacaagaatctgatgcatcttgacctaaaagggagtgatataggggataatggagtaaagtcattgtgtgaggccttgaaacacccagagtgtaaactacagactctcaggctggaatcttgcaacctaactgtattttgttgtctaaatatatctaatgctctcatcagaagccagagcctgatatttctgaatctgtcaaccaataatctgttggatgatggagtgcagcttttgtgtgaggccttaagacatccaaagtgttatctagagagactgtccttagaaagctgtggtctcacagaggctggctgtgagtatctttctttggctctcatcagcaataaaagactgacacatttgtgcttggcagacaatgtcttgggtgatggtggagtaaagcttatgagtgatgccctgcaacatgcacaatgtactctgaagagccttgtgctgaggcgttgccatttcacttcacttagcagtgaatatctgtcaacttctcttctacacaacaagagcctgacgcatctggatctaggatcaaactggctacaagacaatggagtgaagcttctgtgtgatgtctttcggcatccaagctgtaatcttcaggacttggaattgatgggctgtgttctcactaatgcatgttgtctggatctggcttctgttattttgaataacccaaacctgaggagcctggaccttgggaacaacgatttgcaggatgatggagtgaaaattctgtgtgatgctttgagatatccaaactgtaacattcagaggctcgggttggaatactgtggtttgacatctctctgctgtcaagatctctcctctgctcttatctgcaacaaaagactgataaaaatgaatctgacacagaataccttaggatatgaaggaattgtgaagttatataaagtcttgaagtctcctaagtgtaaactacaagttctagggttgtgcaaagaggcatttgatgaggaagcccagaagctgctggaagctgtgggagttagcaatccacacttaatcattaagccagattgtaactatcataatgaagaagatgtgtcttggtggtggtgtttctga

SEQ ID NO: 159697 - DNA, 3496 bp, Homo sapiens
  Payload ID: 11255
  Gene Symbol: NLRP2
  Gene Name: NLR family, pyrin domain containing 2
  ENST ID: ENST00000263437
  CDS Start-End: 80-3259
attagagctttctcaacctgcagccctcatctccgccggcgagtagggccaggtgttgggagctcccacgtgggacaagatggtgtcttcggcgcagatgggcttcaacctgcaggctctcctggagcagctcagccaggatgagttgagcaagttcaagtatctgatcacgaccttctccctggcacacgagctccagaagatcccccacaaggaggtagacaaggctgatgggaagcaactggtagaaatcctcaccacccattgtgacagctactgggtggagatggcgagcctccaggtctttgaaaagatgcaccgaatggatctgtctgagagagcaaaggatgaagtcagagaagcagctttgaaatcctttaataaaaggaagcctctatcattagggataacacggaaagaacgaccacctctagacgtggacgaaatgctggagcgcttcaaaacagaagcacaagaaacgaaaggaaatgtcatctgcctgggtaaagaagtctttaaaggaaaaaagccagacaaagacaataggtgcaggtatatattgaagacgaagttccgggagatgtggaagagctggcctggagatagcaaagaggtccaggttatggctgagagatacaagatgctgatcccattcagcaaccccagggtgcttcccgggcccttctcatacacggtggtgctgtatggtcctgcaggccttgggaaaaccacgctggcccagaaactaatgctagactgggcagaggacaacctcatccacaaattcaaatatgcgttctacctcagctgcagggagctcagccgcctgggcccgtgcagttttgcagagctggtcttcagggactggcctgaattgcaggatgacattccacacatcctagcccaagcacggaaaatcttgttcgtgattgacggctttgatgagctgggagccgcacctggggcgctgatcgaggacatctgcggggactgggagaagaagaagccggtgcccgtcctcctggggagtttgctgaacagggtgatgttacccaaggccgccctgctggtcaccacgcggcccagggccctgagggacctccggatcctggcggaggagccgatctacataagggtggagggcttcctggaggaggacaggagggcctatttcctgagacactttggagacgaggaccaagccatgcgtgcctttgagctaatgaggagcaacgcggccctgttccagctgggctcggcccccgcggtgtgctggatcgtgtgcacgactctgaagctgcagatggagaagggggaggacccggtccccacctgcctcacccgcacggggctgttcctgcgtttcctctgcagccggttcccgcagggcgcacagctgcggggcgcgctgcggacgctgagcctcctggccgcgcagggcctgtgggcgcagacgtccgtgcttcaccgagaggatctggaaaggctcggggtgcaggagtccgacctccgtctgttcctggacggagacatcctccgccaggacagagtctccaaaggctgctactccttcatccacctcagcttccagcagtttctcactgccctgttctacaccctggagaaggaggaggaagaggatagggacggccacacctgggacattggggacgtacagaagctgctttccggagtagaaagactcaggaaccccgacctgatccaagcaggctactactcctttggcctcgctaacgagaagagagccaaggagttggaggccacttttggctgccggatgtcaccggacatcaaacaggaattgctgcgatgcgacataagttgtaagggtggacattcaacggtgacagacctgcaggagctcctcggctgtctgtacgagtctcaggaggaggagctggtgaaggaggtgatggctcagttcaaagaaatatccctgcacttaaatgcagtagacgttgtgccatcttcattctgcgtcaagcactgtcgaaacctgcagaaaatgtcactgcaggtaataaaggagaatctcccggagaatgtcactgcgtctgaatcagacgccgaggttgagagatcccaggatgatcagcacatgcttcctttctggacggacctttgttccatatttggatcaaataaggatctgatgggtctagcaatcaatgatagctttctcagtgcctccctagtaaggatcctgtgtgaacaaatagcctctgacacctgtcatctccagagagtggtgttcaaaaacatttccccagctgatgctcatcggaacctctgcctagctcttcgaggtcacaagactgtaacgtatctgacccttcaaggcaatgaccaggatgatatgtttcccgcattgtgtgaggtcttgagacatccagaatgtaacctgcgatatctcgggttggtgtcttgttccgctaccactcagcagtgggctgatctctccttggcccttgaagtcaaccagtccctgacgtgcgtaaacctctccgacaatgagcttctggatgagggtgctaagttgctgtacacaactttgagacaccccaagtgctttctgcagaggttgtcgttggaaaactgtcaccttacagaagccaattgcaaggaccttgctgctgtgttggttgtcagccgggagctgacacacctgtgcttggccaagaaccccattgggaatacaggggtgaagtttctgtgtgagggcttgaggtaccccgagtgtaaactgcagaccttggtgctttggaactgcgacataactagcgatggctgctgcgatctcacaaagcttctccaagaaaaatcaagcctgttgtgtttggatctggggctgaatcacataggagttaagggaatgaagttcctgtgtgaggctttgaggaaaccactgtgcaacttgagatgtctgtggttgtggggatgttccatccctccgttcagttgtgaagacctctgctctgccctcagctgcaaccagagcctcgtcactctggacctgggtcagaatcccttggggtctagtggagtgaagatgctgtttgaaaccttgacatgttccagtggcaccctccggacactcaggttgaaaatcgatgactttaatgatgaactcaataagctgctggaagaaatagaagaaaaaaacccacaactgattattgatactgagaaacatcatccctgggcagaaaggccttcttctcatgacttcatgatctgaatccccccgagtcattcattctccatgaagtcatcgattttccaggtgttggtgaactgcctgtgactcctctcctccccggcccctacccctcagggataatgagttcattgctgggctagatgttttagccatgattctgcctctgttttatacctgcacacatccttatctttgttacatatgaaatatctgtatcacgggtatattgagagaaataaaggtgagagcattcac

SEQ ID NO: 159698 - DNA, 3422 bp, Homo sapiens
  Payload ID: 11255
  Gene Symbol: NLRP2
  Gene Name: NLR family, pyrin domain containing 2
  Uniprot ID: Q9NX02
  ENST ID: ENST00000339757
  CDS Start-End: 60-3182
cagccctcatctccgccggcgagtagggccaggtgttgggagctcccacgtgggacaagatggtgtcttcggcgcagatgggcttcaacctgcaggctctcctggagcagctcagccaggatgagttgagcaagttcaagtatctgatcacgaccttctccctggcacacgagctccagaagatcccccacaaggaggtagacaaggctgatgggaagcaactggtagaaatcctcaccacccattgtgacagctactgggtggagatggcgagcctccaggtctttgaaaagatgcaccgaatggatctgtctgagagagcaaaggatgaagtcagagaagcagctttgaaatcctttaataaaaggaagcctctatcattagggataacacggaaagaacgaccacctctagacgtggacgaaatgctggagcgcttcaaaacagaagcacaagacaaagacaataggtgcaggtatatattgaagacgaagttccgggagatgtggaagagctggcctggagatagcaaagaggtccaggttatggctgagagatacaagatgctgatcccattcagcaaccccagggtgcttcccgggcccttctcatacacggtggtgctgtatggtcctgcaggccttgggaaaaccacgctggcccagaaactaatgctagactgggcagaggacaacctcatccacaaattcaaatatgcgttctacctcagctgcagggagctcagccgcctgggcccgtgcagttttgcagagctggtcttcagggactggcctgaattgcaggatgacattccacacatcctagcccaagcacggaaaatcttgttcgtgattgacggctttgatgagctgggagccgcacctggggcgctgatcgaggacatctgcggggactgggagaagaagaagccggtgcccgtcctcctggggagtttgctgaacagggtgatgttacccaaggccgccctgctggtcaccacgcggcccagggccctgagggacctccggatcctggcggaggagccgatctacataagggtggagggcttcctggaggaggacaggagggcctatttcctgagacactttggagacgaggaccaagccatgcgtgcctttgagctaatgaggagcaacgcggccctgttccagctgggctcggcccccgcggtgtgctggatcgtgtgcacgactctgaagctgcagatggagaagggggaggacccggtccccacctgcctcacccgcacggggctgttcctgcgtttcctctgcagccggttcccgcagggcgcacagctgcggggcgcgctgcggacgctgagcctcctggccgcgcagggcctgtgggcgcagacgtccgtgcttcaccgagaggatctggaaaggctcggggtgcaggagtccgacctccgtctgttcctggacggagacatcctccgccaggacagagtctccaaaggctgctactccttcatccacctcagcttccagcagtttctcactgccctgttctacaccctggagaaggaggaggaagaggatagggacggccacacctgggacattggggacgtacagaagctgctttccggagtagaaagactcaggaaccccgacctgatccaagcaggctactactcctttggcctcgctaacgagaagagagccaaggagttggaggccacttttggctgccggatgtcaccggacatcaaacaggaattgctgcgatgcgacataagttgtaagggtggacattcaacggtgacagacctgcaggagctcctcggctgtctgtacgagtctcaggaggaggagctggtgaaggaggtgatggctcagttcaaagaaatatccctgcacttaaatgcagtagacgttgtgccatcttcattctgcgtcaagcactgtcgaaacctgcagaaaatgtcactgcaggtaataaaggagaatctcccggagaatgtcactgcgtctgaatcagacgccgaggttgagagatcccaggatgatcagcacatgcttcctttctggacggacctttgttccatatttggatcaaataaggatctgatgggtctagcaatcaatgatagctttctcagtgcctccctagtaaggatcctgtgtgaacaaatagcctctgacacctgtcatctccagagagtggtgttcaaaaacatttccccagctgatgctcatcggaacctctgcctagctcttcgaggtcacaagactgtaacgtatctgacccttcaaggcaatgaccaggatgatatgtttcccgcattgtgtgaggtcttgagacatccagaatgtaacctgcgatatctcgggttggtgtcttgttccgctaccactcagcagtgggctgatctctccttggcccttgaagtcaaccagtccctgacgtgcgtaaacctctccgacaatgagcttctggatgagggtgctaagttgctgtacacaactttgagacaccccaagtgctttctgcagaggttgtcgttggaaaactgtcaccttacagaagccaattgcaaggaccttgctgctgtgttggttgtcagccgggagctgacacacctgtgcttggccaagaaccccattgggaatacaggggtgaagtttctgtgtgagggcttgaggtaccccgagtgtaaactgcagaccttggtgctttggaactgcgacataactagcgatggctgctgcgatctcacaaagcttctccaagaaaaatcaagcctgttgtgtttggatctggggctgaatcacataggagttaagggaatgaagttcctgtgtgaggctttgaggaaaccactgtgcaacttgagatgtctgtggttgtggggatgttccatccctccgttcagttgtgaagacctctgctctgccctcagctgcaaccagagcctcgtcactctggacctgggtcagaatcccttggggtctagtggagtgaagatgctgtttgaaaccttgacatgttccagtggcaccctccggacactcaggttgaaaatcgatgactttaatgatgaactcaataagctgctggaagaaatagaagaaaaaaacccacaactgattattgatactgagaaacatcatccctgggcagaaaggccttcttctcatgacttcatgatctgaatccccccgagtcattcattctccatgaagtcatcgattttccaggtgttggtgaactgcctgtgactcctctcctccccggcccctacccctcagggataatgagttcattgctgggctagatgttttagccatgattctgcctctgttttatacctgcacacatccttatctttgttacatatgaaatatctgtatcacgggtatattgagagaaataaaggtgagagcattcacaaa

SEQ ID NO: 159699 - DNA, 3420 bp, Homo sapiens
  Payload ID: 11255
  Gene Symbol: NLRP2
  Gene Name: NLR family, pyrin domain containing 2
  Uniprot ID: Q9NX02
  ENST ID: ENST00000391721
  CDS Start-End: 67-3183
caacctgcagccctcatctccgccggcgagtagggccaggtgttgggagctcccacgtgggacaagatggtgtcttcggcgcagatgggcttcaacctgcaggctctcctggagcagctcagccaggatgagttgagcaagttcaagtatctgatcacgaccttctccctggcacacgagctccagaagatcccccacaaggaggtagacaaggctgatgggaagcaactggtagaaatcctcaccacccattgtgacagctactgggtggagatggcgagcctccaggtctttgaaaagatgcaccgaatggatctgtctgagagagcaaaggatgaagtcagagaagcagctttgaaatcctttaataaaaggaagcctctatcattagcgtttacagaaacgaaaggaaatgtcatctgcctgggtaaagaagtctttaaaggaaaaaagccagacaaagacaataggtgcaggtatatattgaagacgaagttccgggagatgtggaagagctggcctggagatagcaaagaggtccaggttatggctgagagatacaagatgctgatcccattcagcaaccccagggtgcttcccgggcccttctcatacacggtggtgctgtatggtcctgcaggccttgggaaaaccacgctggcccagaaactaatgctagactgggcagaggacaacctcatccacaaattcaaatatgcgttctacctcagctgcagggagctcagccgcctgggcccgtgcagttttgcagagctggtcttcagggactggcctgaattgcaggatgacattccacacatcctagcccaagcacggaaaatcttgttcgtgattgacggctttgatgagctgggagccgcacctggggcgctgatcgaggacatctgcggggactgggagaagaagaagccggtgcccgtcctcctggggagtttgctgaacagggtgatgttacccaaggccgccctgctggtcaccacgcggcccagggccctgagggacctccggatcctggcggaggagccgatctacataagggtggagggcttcctggaggaggacaggagggcctatttcctgagacactttggagacgaggaccaagccatgcgtgcctttgagctaatgaggagcaacgcggccctgttccagctgggctcggcccccgcggtgtgctggatcgtgtgcacgactctgaagctgcagatggagaagggggaggacccggtccccacctgcctcacccgcacggggctgttcctgcgtttcctctgcagccggttcccgcagggcgcacagctgcggggcgcgctgcggacgctgagcctcctggccgcgcagggcctgtgggcgcagacgtccgtgcttcaccgagaggatctggaaaggctcggggtgcaggagtccgacctccgtctgttcctggacggagacatcctccgccaggacagagtctccaaaggctgctactccttcatccacctcagcttccagcagtttctcactgccctgttctacaccctggagaaggaggaggaagaggatagggacggccacacctgggacattggggacgtacagaagctgctttccggagtagaaagactcaggaaccccgacctgatccaagcaggctactactcctttggcctcgctaacgagaagagagccaaggagttggaggccacttttggctgccggatgtcaccggacatcaaacaggaattgctgcgatgcgacataagttgtaagggtggacattcaacggtgacagacctgcaggagctcctcggctgtctgtacgagtctcaggaggaggagctggtgaaggaggtgatggctcagttcaaagaaatatccctgcacttaaatgcagtagacgttgtgccatcttcattctgcgtcaagcactgtcgaaacctgcagaaaatgtcactgcaggtaataaaggagaatctcccggagaatgtcactgcgtctgaatcagacgccgaggttgagagatcccaggatgatcagcacatgcttcctttctggacggacctttgttccatatttggatcaaataaggatctgatgggtctagcaatcaatgatagctttctcagtgcctccctagtaaggatcctgtgtgaacaaatagcctctgacacctgtcatctccagagagtggtgttcaaaaacatttccccagctgatgctcatcggaacctctgcctagctcttcgaggtcacaagactgtaacgtatctgacccttcaaggcaatgaccaggatgatatgtttcccgcattgtgtgaggtcttgagacatccagaatgtaacctgcgatatctcgggttggtgtcttgttccgctaccactcagcagtgggctgatctctccttggcccttgaagtcaaccagtccctgacgtgcgtaaacctctccgacaatgagcttctggatgagggtgctaagttgctgtacacaactttgagacaccccaagtgctttctgcagaggttgtcgttggaaaactgtcaccttacagaagccaattgcaaggaccttgctgctgtgttggttgtcagccgggagctgacacacctgtgcttggccaagaaccccattgggaatacaggggtgaagtttctgtgtgagggcttgaggtaccccgagtgtaaactgcagaccttggtgctttggaactgcgacataactagcgatggctgctgcgatctcacaaagcttctccaagaaaaatcaagcctgttgtgtttggatctggggctgaatcacataggagttaagggaatgaagttcctgtgtgaggctttgaggaaaccactgtgcaacttgagatgtctgtggttgtggggatgttccatccctccgttcagttgtgaagacctctgctctgccctcagctgcaaccagagcctcgtcactctggacctgggtcagaatcccttggggtctagtggagtgaagatgctgtttgaaaccttgacatgttccagtggcaccctccggacactcaggttgaaaatcgatgactttaatgatgaactcaataagctgctggaagaaatagaagaaaaaaacccacaactgattattgatactgagaaacatcatccctgggcagaaaggccttcttctcatgacttcatgatctgaatccccccgagtcattcattctccatgaagtcatcgattttccaggtgttggtgaactgcctgtgactcctctcctccccggcccctacccctcagggataatgagttcattgctgggctagatgttttagccatgattctgcctctgttttatacctgcacacatccttatctttgttacatatgaaatatctgtatcacgggtatattgagagaaataaaggtgagagcattcac

SEQ ID NO: 159700 - DNA, 3411 bp, Homo sapiens
  Payload ID: 11255
  Gene Symbol: NLRP2
  Gene Name: NLR family, pyrin domain containing 2
  Uniprot ID: Q9NX02
  ENST ID: ENST00000427260
  CDS Start-End: 112-3231
aatcacagggctgcggccgagagagaagccttattagagctttctcaacctgcagccctcatctccgccggcgagtagggccaggtgttgggagctcccacgtgggacaagatggtgtcttcggcgcagatgggcttcaacctgcaggctctcctggagcagctcagccaggatgagttgagcaagttcaagtatctgatcacgaccttctccctggcacacgagctccagaagatcccccacaaggagatggcgagcctccaggtctttgaaaagatgcaccgaatggatctgtctgagagagcaaaggatgaagtcagagaagcagctttgaaatcctttaataaaaggaagcctctatcattagggataacacggaaagaacgaccacctctagacgtggacgaaatgctggagcgcttcaaaacagaagcacaagcgtttacagaaacgaaaggaaatgtcatctgcctgggtaaagaagtctttaaaggaaaaaagccagacaaagacaataggtgcaggtatatattgaagacgaagttccgggagatgtggaagagctggcctggagatagcaaagaggtccaggttatggctgagagatacaagatgctgatcccattcagcaaccccagggtgcttcccgggcccttctcatacacggtggtgctgtatggtcctgcaggccttgggaaaaccacgctggcccagaaactaatgctagactgggcagaggacaacctcatccacaaattcaaatatgcgttctacctcagctgcagggagctcagccgcctgggcccgtgcagttttgcagagctggtcttcagggactggcctgaattgcaggatgacattccacacatcctagcccaagcacggaaaatcttgttcgtgattgacggctttgatgagctgggagccgcacctggggcgctgatcgaggacatctgcggggactgggagaagaagaagccggtgcccgtcctcctggggagtttgctgaacagggtgatgttacccaaggccgccctgctggtcaccacgcggcccagggccctgagggacctccggatcctggcggaggagccgatctacataagggtggagggcttcctggaggaggacaggagggcctatttcctgagacactttggagacgaggaccaagccatgcgtgcctttgagctaatgaggagcaacgcggccctgttccagctgggctcggcccccgcggtgtgctggatcgtgtgcacgactctgaagctgcagatggagaagggggaggacccggtccccacctgcctcacccgcacggggctgttcctgcgtttcctctgcagccggttcccgcagggcgcacagctgcggggcgcgctgcggacgctgagcctcctggccgcgcagggcctgtgggcgcagacgtccgtgcttcaccgagaggatctggaaaggctcggggtgcaggagtccgacctccgtctgttcctggacggagacatcctccgccaggacagagtctccaaaggctgctactccttcatccacctcagcttccagcagtttctcactgccctgttctacaccctggagaaggaggaggaagaggatagggacggccacacctgggacattggggacgtacagaagctgctttccggagtagaaagactcaggaaccccgacctgatccaagcaggctactactcctttggcctcgctaacgagaagagagccaaggagttggaggccacttttggctgccggatgtcaccggacatcaaacaggaattgctgcgatgcgacataagttgtaagggtggacattcaacggtgacagacctgcaggagctcctcggctgtctgtacgagtctcaggaggaggagctggtgaaggaggtgatggctcagttcaaagaaatatccctgcacttaaatgcagtagacgttgtgccatcttcattctgcgtcaagcactgtcgaaacctgcagaaaatgtcactgcaggtaataaaggagaatctcccggagaatgtcactgcgtctgaatcagacgccgaggttgagagatcccaggatgatcagcacatgcttcctttctggacggacctttgttccatatttggatcaaataaggatctgatgggtctagcaatcaatgatagctttctcagtgcctccctagtaaggatcctgtgtgaacaaatagcctctgacacctgtcatctccagagagtggtgttcaaaaacatttccccagctgatgctcatcggaacctctgcctagctcttcgaggtcacaagactgtaacgtatctgacccttcaaggcaatgaccaggatgatatgtttcccgcattgtgtgaggtcttgagacatccagaatgtaacctgcgatatctcgggttggtgtcttgttccgctaccactcagcagtgggctgatctctccttggcccttgaagtcaaccagtccctgacgtgcgtaaacctctccgacaatgagcttctggatgagggtgctaagttgctgtacacaactttgagacaccccaagtgctttctgcagaggttgtcgttggaaaactgtcaccttacagaagccaattgcaaggaccttgctgctgtgttggttgtcagccgggagctgacacacctgtgcttggccaagaaccccattgggaatacaggggtgaagtttctgtgtgagggcttgaggtaccccgagtgtaaactgcagaccttggtgctttggaactgcgacataactagcgatggctgctgcgatctcacaaagcttctccaagaaaaatcaagcctgttgtgtttggatctggggctgaatcacataggagttaagggaatgaagttcctgtgtgaggctttgaggaaaccactgtgcaacttgagatgtctgtggttgtggggatgttccatccctccgttcagttgtgaagacctctgctctgccctcagctgcaaccagagcctcgtcactctggacctgggtcagaatcccttggggtctagtggagtgaagatgctgtttgaaaccttgacatgttccagtggcaccctccggacactcaggttgaaaatcgatgactttaatgatgaactcaataagctgctggaagaaatagaagaaaaaaacccacaactgattattgatactgagaaacatcatccctgggcagaaaggccttcttctcatgacttcatgatctgaatccccccgagtcattcattctccatgaagtcatcgattttccaggtgttggtgaactgcctgtgactcctctcctccccggcccctacccctcagggataatgagttcattgctgggctagatgttttagccatgattctgcctctgttttatacctgcacacatccttatctttgtta

SEQ ID NO: 159701 - DNA, 3573 bp, Homo sapiens
  Payload ID: 11255
  Gene Symbol: NLRP2
  Gene Name: NLR family, pyrin domain containing 2
  Uniprot ID: Q9NX02
  ENST ID: ENST00000448584
  CDS Start-End: 143-3331
agtgctcagcaacgattacgccccgagggccaatcacagggctgcggccgagagagaagccttattagagctttctcaacctgcagccctcatctccgccggcgagtagggccaggtgttgggagctcccacgtgggacaagatggtgtcttcggcgcagatgggcttcaacctgcaggctctcctggagcagctcagccaggatgagttgagcaagttcaagtatctgatcacgaccttctccctggcacacgagctccagaagatcccccacaaggaggtagacaaggctgatgggaagcaactggtagaaatcctcaccacccattgtgacagctactgggtggagatggcgagcctccaggtctttgaaaagatgcaccgaatggatctgtctgagagagcaaaggatgaagtcagagaagcagctttgaaatcctttaataaaaggaagcctctatcattagggataacacggaaagaacgaccacctctagacgtggacgaaatgctggagcgcttcaaaacagaagcacaagcgtttacagaaacgaaaggaaatgtcatctgcctgggtaaagaagtctttaaaggaaaaaagccagacaaagacaataggtgcaggtatatattgaagacgaagttccgggagatgtggaagagctggcctggagatagcaaagaggtccaggttatggctgagagatacaagatgctgatcccattcagcaaccccagggtgcttcccgggcccttctcatacacggtggtgctgtatggtcctgcaggccttgggaaaaccacgctggcccagaaactaatgctagactgggcagaggacaacctcatccacaaattcaaatatgcgttctacctcagctgcagggagctcagccgcctgggcccgtgcagttttgcagagctggtcttcagggactggcctgaattgcaggatgacattccacacatcctagcccaagcacggaaaatcttgttcgtgattgacggctttgatgagctgggagccgcacctggggcgctgatcgaggacatctgcggggactgggagaagaagaagccggtgcccgtcctcctggggagtttgctgaacagggtgatgttacccaaggccgccctgctggtcaccacgcggcccagggccctgagggacctccggatcctggcggaggagccgatctacataagggtggagggcttcctggaggaggacaggagggcctatttcctgagacactttggagacgaggaccaagccatgcgtgcctttgagctaatgaggagcaacgcggccctgttccagctgggctcggcccccgcggtgtgctggatcgtgtgcacgactctgaagctgcagatggagaagggggaggacccggtccccacctgcctcacccgcacggggctgttcctgcgtttcctctgcagccggttcccgcagggcgcacagctgcggggcgcgctgcggacgctgagcctcctggccgcgcagggcctgtgggcgcagacgtccgtgcttcaccgagaggatctggaaaggctcggggtgcaggagtccgacctccgtctgttcctggacggagacatcctccgccaggacagagtctccaaaggctgctactccttcatccacctcagcttccagcagtttctcactgccctgttctacaccctggagaaggaggaggaagaggatagggacggccacacctgggacattggggacgtacagaagctgctttccggagtagaaagactcaggaaccccgacctgatccaagcaggctactactcctttggcctcgctaacgagaagagagccaaggagttggaggccacttttggctgccggatgtcaccggacatcaaacaggaattgctgcgatgcgacataagttgtaagggtggacattcaacggtgacagacctgcaggagctcctcggctgtctgtacgagtctcaggaggaggagctggtgaaggaggtgatggctcagttcaaagaaatatccctgcacttaaatgcagtagacgttgtgccatcttcattctgcgtcaagcactgtcgaaacctgcagaaaatgtcactgcaggtaataaaggagaatctcccggagaatgtcactgcgtctgaatcagacgccgaggttgagagatcccaggatgatcagcacatgcttcctttctggacggacctttgttccatatttggatcaaataaggatctgatgggtctagcaatcaatgatagctttctcagtgcctccctagtaaggatcctgtgtgaacaaatagcctctgacacctgtcatctccagagagtggtgttcaaaaacatttccccagctgatgctcatcggaacctctgcctagctcttcgaggtcacaagactgtaacgtatctgacccttcaaggcaatgaccaggatgatatgtttcccgcattgtgtgaggtcttgagacatccagaatgtaacctgcgatatctcgggttggtgtcttgttccgctaccactcagcagtgggctgatctctccttggcccttgaagtcaaccagtccctgacgtgcgtaaacctctccgacaatgagcttctggatgagggtgctaagttgctgtacacaactttgagacaccccaagtgctttctgcagaggttgtcgttggaaaactgtcaccttacagaagccaattgcaaggaccttgctgctgtgttggttgtcagccgggagctgacacacctgtgcttggccaagaaccccattgggaatacaggggtgaagtttctgtgtgagggcttgaggtaccccgagtgtaaactgcagaccttggtgctttggaactgcgacataactagcgatggctgctgcgatctcacaaagcttctccaagaaaaatcaagcctgttgtgtttggatctggggctgaatcacataggagttaagggaatgaagttcctgtgtgaggctttgaggaaaccactgtgcaacttgagatgtctgtggttgtggggatgttccatccctccgttcagttgtgaagacctctgctctgccctcagctgcaaccagagcctcgtcactctggacctgggtcagaatcccttggggtctagtggagtgaagatgctgtttgaaaccttgacatgttccagtggcaccctccggacactcaggttgaaaatcgatgactttaatgatgaactcaataagctgctggaagaaatagaagaaaaaaacccacaactgattattgatactgagaaacatcatccctgggcagaaaggccttcttctcatgacttcatgatctgaatccccccgagtcattcattctccatgaagtcatcgattttccaggtgttggtgaactgcctgtgactcctctcctccccggcccctacccctcagggataatgagttcattgctgggctagatgttttagccatgattctgcctctgttttatacctgcacacatccttatctttgttacatatgaaatatctgtatcacgggtatattgagagaaataaaggtgagagcattcacaaatg

SEQ ID NO: 159702 - DNA, 3507 bp, Homo sapiens
  Payload ID: 11255
  Gene Symbol: NLRP2
  Gene Name: NLR family, pyrin domain containing 2
  Uniprot ID: Q9NX02
  ENST ID: ENST00000537859
  CDS Start-End: 143-3265
agtgctcagcaacgattacgccccgagggccaatcacagggctgcggccgagagagaagccttattagagctttctcaacctgcagccctcatctccgccggcgagtagggccaggtgttgggagctcccacgtgggacaagatggtgtcttcggcgcagatgggcttcaacctgcaggctctcctggagcagctcagccaggatgagttgagcaagttcaagtatctgatcacgaccttctccctggcacacgagctccagaagatcccccacaaggaggtagacaaggctgatgggaagcaactggtagaaatcctcaccacccattgtgacagctactgggtggagatggcgagcctccaggtctttgaaaagatgcaccgaatggatctgtctgagagagcaaaggatgaagtcagagaagcagctttgaaatcctttaataaaaggaagcctctatcattagggataacacggaaagaacgaccacctctagacgtggacgaaatgctggagcgcttcaaaacagaagcacaagacaaagacaataggtgcaggtatatattgaagacgaagttccgggagatgtggaagagctggcctggagatagcaaagaggtccaggttatggctgagagatacaagatgctgatcccattcagcaaccccagggtgcttcccgggcccttctcatacacggtggtgctgtatggtcctgcaggccttgggaaaaccacgctggcccagaaactaatgctagactgggcagaggacaacctcatccacaaattcaaatatgcgttctacctcagctgcagggagctcagccgcctgggcccgtgcagttttgcagagctggtcttcagggactggcctgaattgcaggatgacattccacacatcctagcccaagcacggaaaatcttgttcgtgattgacggctttgatgagctgggagccgcacctggggcgctgatcgaggacatctgcggggactgggagaagaagaagccggtgcccgtcctcctggggagtttgctgaacagggtgatgttacccaaggccgccctgctggtcaccacgcggcccagggccctgagggacctccggatcctggcggaggagccgatctacataagggtggagggcttcctggaggaggacaggagggcctatttcctgagacactttggagacgaggaccaagccatgcgtgcctttgagctaatgaggagcaacgcggccctgttccagctgggctcggcccccgcggtgtgctggatcgtgtgcacgactctgaagctgcagatggagaagggggaggacccggtccccacctgcctcacccgcacggggctgttcctgcgtttcctctgcagccggttcccgcagggcgcacagctgcggggcgcgctgcggacgctgagcctcctggccgcgcagggcctgtgggcgcagacgtccgtgcttcaccgagaggatctggaaaggctcggggtgcaggagtccgacctccgtctgttcctggacggagacatcctccgccaggacagagtctccaaaggctgctactccttcatccacctcagcttccagcagtttctcactgccctgttctacaccctggagaaggaggaggaagaggatagggacggccacacctgggacattggggacgtacagaagctgctttccggagtagaaagactcaggaaccccgacctgatccaagcaggctactactcctttggcctcgctaacgagaagagagccaaggagttggaggccacttttggctgccggatgtcaccggacatcaaacaggaattgctgcgatgcgacataagttgtaagggtggacattcaacggtgacagacctgcaggagctcctcggctgtctgtacgagtctcaggaggaggagctggtgaaggaggtgatggctcagttcaaagaaatatccctgcacttaaatgcagtagacgttgtgccatcttcattctgcgtcaagcactgtcgaaacctgcagaaaatgtcactgcaggtaataaaggagaatctcccggagaatgtcactgcgtctgaatcagacgccgaggttgagagatcccaggatgatcagcacatgcttcctttctggacggacctttgttccatatttggatcaaataaggatctgatgggtctagcaatcaatgatagctttctcagtgcctccctagtaaggatcctgtgtgaacaaatagcctctgacacctgtcatctccagagagtggtgttcaaaaacatttccccagctgatgctcatcggaacctctgcctagctcttcgaggtcacaagactgtaacgtatctgacccttcaaggcaatgaccaggatgatatgtttcccgcattgtgtgaggtcttgagacatccagaatgtaacctgcgatatctcgggttggtgtcttgttccgctaccactcagcagtgggctgatctctccttggcccttgaagtcaaccagtccctgacgtgcgtaaacctctccgacaatgagcttctggatgagggtgctaagttgctgtacacaactttgagacaccccaagtgctttctgcagaggttgtcgttggaaaactgtcaccttacagaagccaattgcaaggaccttgctgctgtgttggttgtcagccgggagctgacacacctgtgcttggccaagaaccccattgggaatacaggggtgaagtttctgtgtgagggcttgaggtaccccgagtgtaaactgcagaccttggtgctttggaactgcgacataactagcgatggctgctgcgatctcacaaagcttctccaagaaaaatcaagcctgttgtgtttggatctggggctgaatcacataggagttaagggaatgaagttcctgtgtgaggctttgaggaaaccactgtgcaacttgagatgtctgtggttgtggggatgttccatccctccgttcagttgtgaagacctctgctctgccctcagctgcaaccagagcctcgtcactctggacctgggtcagaatcccttggggtctagtggagtgaagatgctgtttgaaaccttgacatgttccagtggcaccctccggacactcaggttgaaaatcgatgactttaatgatgaactcaataagctgctggaagaaatagaagaaaaaaacccacaactgattattgatactgagaaacatcatccctgggcagaaaggccttcttctcatgacttcatgatctgaatccccccgagtcattcattctccatgaagtcatcgattttccaggtgttggtgaactgcctgtgactcctctcctccccggcccctacccctcagggataatgagttcattgctgggctagatgttttagccatgattctgcctctgttttatacctgcacacatccttatctttgttacatatgaaatatctgtatcacgggtatattgagagaaataaaggtgagagcattcacaaatg

SEQ ID NO: 159703 - DNA, 550 bp, Homo sapiens
  Payload ID: 11255
  Gene Symbol: NLRP2
  Gene Name: NLR family, pyrin domain containing 2
  ENST ID: ENST00000397169
  CDS Start-End: 56-550
acaaagaagattgtgctaaggcttgagtgccttgagcccaactgcagatctaagaatgctggctattaaaagatacaagcagccaagcgcggtggctcacgcctgtaatcccaacactttgggaggccgagaagcagctttgaaatcctttaataaaaggaagcctctatcattagggataacacggaaagaacgaccacctctagacgtggacgaaatgctggagcgcttcaaaacagaagcacaagcgtttacagaaacgaaaggaaatgtcatctgcctgggtaaagaagtctttaaaggaaaaaagccagacaaagacaataggtgcaggtatatattgaagacgaagttccgggagatgtggaagagctggcctggagatagcaaagaggtccaggttatggctgagagatacaagatgctgatcccattcagcaaccccagggtgcttcccgggcccttctcatacacggtggtgctgtatggtcctgcaggccttgggaaaaccacgctggcccagaaactaatgctagactgggcagaggac

SEQ ID NO: 159704 - DNA, 577 bp, Homo sapiens
  Payload ID: 11255
  Gene Symbol: NLRP2
  Gene Name: NLR family, pyrin domain containing 2
  ENST ID: ENST00000539848
  CDS Start-End: 52-381
atctccgccggcgagtagggccaggtgttgggagctcccacgtgggacaagatggtgtcttcggcgcagatgggcttcaacctgcaggctctcctggagcagctcagccaggatgagttgagcaagttcaagtatctgatcacgaccttctccctggcacacgagctccagaagatcccccacaaggaggtagacaaggctgatgggaagcaactggtagaaatcctcaccacccattgtgacagctactgggtggagatggcgagcctccaggtctttgaaaagatgcaccgaatggatctgtctgagagagcaaaggatgaagtcagagaagcagctttgaaatcctttaataaaaggaagcctctatcattaggctgaagtgcagtggagcgatcttggctcactgcaatctccgcctcctgggttcaagcaattcccttgcctcagcctcgcaagtagctgggacttacagggataacacggaaagaacgaccacctctagacgtggacgaaatgctggagcgcttcaaaacagaagcacaagcgtttacagaaacgaaaggaaatgtcatct

SEQ ID NO: 159705 - DNA, 540 bp, Homo sapiens
  Payload ID: 11255
  Gene Symbol: NLRP2
  Gene Name: NLR family, pyrin domain containing 2
  ENST ID: ENST00000433772
  CDS Start-End: 78-540
agtgtaaccaatcaagcagaatctctaggcgttcgtgctttgaaatgaggctccacatagctcccacgtgggacaagatggtgtcttcggcgcagatgggcttcaacctgcaggctctcctggagcagctcagccaggatgagttgagcaagttcaagtatctgatcacgaccttctccctggcacacgagctccagaagatcccccacaaggaggtagacaaggctgatgggaagcaactggtagaaatcctcaccacccattgtgacagctactgggtggagatggcgagcctccaggtctttgaaaagatgcaccgaatggatctgtctgagagagcaaaggatgaagtcagagaagcagctttgaaatcctttaataaaaggaagcctctatcattagggataacacggaaagaacgaccacctctagacgtggacgaaatgctggagcgcttcaaaacagaagcacaagcgtttacagaaacgaaaggaaatgtcatctgcctgggtaaagaagtctttaaaggaaaaaagccag

SEQ ID NO: 159706 - DNA, 3576 bp, Homo sapiens
  Payload ID: 11255
  Gene Symbol: NLRP2
  Gene Name: NLR family, pyrin domain containing 2
  Uniprot ID: Q9NX02
  ENST ID: ENST00000543010
  CDS Start-End: 144-3332
aagtgctcagcaacgattacgccccgagggccaatcacagggctgcggccgagaaagaagccttaatagagctttctcaacctgcagccctcatctccgccggcgagtagggccaggtgttgggagctcccacgtgggacaagatggtgtcttcggcgcagatgggcttcaacctgcaggctctcctggagcagctcagccaggatgagttgagcaagttcaagtatctgatcacgaccttctccctggcacacgagctccagaagatcccccacaaggaggtagacaaggctgatgggaagcaactggtagaaatcctcaccacccattgtgacagctactgggtggagatggcgagcctccaggtctttgaaaagatgcaccgaatggatctgtctgagagagcaaaggatgaagtcagagaagcagctttgaaatcctttaataaaaggaagcctctatcattagggataacacggaaagaacgaccacctctagacgtggacgaaatgctggagcgcttcaaaacagaagcacaagcgtttacagaaacgaaaggaaatgtcatctgcctgggtaaagaagtctttaaaggaaaaaagccagacaaagacaataggtgcaggtatatattgaagacgaagttccgggagatgtggaagagctggcctggagatagcaaagaggtccaggttatggctgagagatacaagatgctgatcccattcagcaaccccagggtgcttcccgggcccttctcatacacggtggtgctgtatggtcctgcaggccttgggaaaaccacgctggcccagaaactaatgctagactgggcagaggacaacctcatccacaaattcaaatatgcgttctacctcagctgcagggagctcagccgcctgggcccgtgcagttttgcagagctggtcttcagggactggcctgaattgcaggatgacattccacacatcctagcccaagcacggaaaatcttgttcgtgattgacggctttgatgagctgggagccgcacctggggcgctgatcgaggacatctgcggggactgggagaagaagaagccggtgcccgtcctcctggggagtttgctgaacagggtgatgttacccaaggccgccctgctggtcaccacgcggcccagggccctgagggacctccggatcctggcggaggagccgatctacataagggtggagggcttcctggaggaggacaggagggcctatttcctgagacactttggagacgaggaccaagccatgcgtgcctttgagctaatgaggagcaacgcggccctgttccagctgggctcggcccccgcggtgtgctggatcgtgtgcacgactctgaagctgcagatggagaagggggaggacccggtccccacctgcctcacccgcacggggctgttcctgcgtttcctctgcagccggttcccgcagggcgcacagctgcggggcgcgctgcggacgctgagcctcctggccgcgcagggcctgtgggcgcagacgtccgtgcttcaccgagaggatctggaaaggctcggggtgcaggagtccgacctccgtctgttcctggacggagacatcctccgccaggacagagtctccaaaggctgctactccttcatccacctcagcttccagcagtttctcactgccctgttctacaccctggagaaggaggaggaagaggatagggacggccacacctgggacattggggacgtacagaagctgctttccggagtagaaagactcaggaaccccgacctgatccaagcaggctactactcctttggcctcgctaacgagaagagagccaaggagttggaggccacttttggctgccggatgtcaccggacatcaaacaggaattgctgcgatgcgacataagttgtaagggtggacattcaacggtgacagacctgcaggagctcctcggctgtctgtacgagtctcaggaggaggagctggtgaaggaggtgatggctcagttcaaagaaatatccctgcacttaaatgcagtagacgttgtgccatcttcattctgcgtcaagcactgtcgaaacctgcagaaaatgtcactgcaggtaataaaggagaatctcccggagaatgtcactgcgtctgaatcagacgccgaggttgagagatcccaggatgatcagcacatgcttcctttctggacggacctttgttccatatttggatcaaataaggatctgatgggtctagcaatcaatgatagctttctcagtgcctccctagtaaggatcctgtgtgaacaaatagcctctgacacctgtcatctccagagagtggtgttcaaaaacatttccccagctgatgctcatcggaacctctgcctagctcttcgaggtcacaagactgtaacgtatctgacccttcaaggcaatgaccaggatgatatgtttcccgcattgtgtgaggtcttgagacatccagaatgtaacctgcgatatctcgggttggtgtcttgttccgctaccactcagcagtgggctgatctctccttggcccttgaagtcaaccagtccctgacgtgcgtaaacctctccgacaatgagcttctggatgagggtgctaagttgctgtacacaactttgagacaccccaagtgctttctgcagaggttgtcgttggaaaactgtcaccttacagaagccaattgcaaggaccttgctgctgtgttggttgtcagccgggagctgacacacctgtgcttggccaagaaccccattgggaatacaggggtgaagtttctgtgtgagggcttgaggtaccccgagtgtaaactgcagaccttggtgctttggaactgcgacataactagcgatggctgctgcgatctcacaaagcttctccaagaaaaatcaagcctgttgtgtttggatctggggctgaatcacataggagttaagggaatgaagttcctgtgtgaggctttgaggaaaccactgtgcaacttgagatgtctgtggttgtggggatgttccatccctccgttcagttgtgaagacctctgctctgccctcagctgcaaccagagcctcgtcactctggacctgggtcagaatcccttggggtctagtggagtgaagatgctgtttgaaaccttgacatgttccagtggcaccctccggacactcaggttgaaaatcgatgactttaatgatgaactcaataagctgctggaagaaatagaagaaaaaaacccacaactgattattgatactgagaaacatcatccctgggcagaaaggccttcttctcatgacttcatgatctgaatccccccgagtcattcattctccatgaagtcatcgattttccaggtgttggtgaactgcctgtgactcctctcctccccggcccctacccctcagggataatgagttcattgctgggctagatgttttagccatgattctgcctctgttttatacctgcacacatccttatctttgttacatatgaaatatctgtatcacgggtatattgagagaaataaaggtgagagcattcacaaatgaa

SEQ ID NO: 159707 - DNA, 707 bp, Homo sapiens
  Payload ID: 11255
  Gene Symbol: NLRP2
  Gene Name: NLR family, pyrin domain containing 2
  ENST ID: ENST00000543277
  CDS Start-End: 1-267
ggtcacaagactgtaacgtatctgacccttcaaggcaatgaccaggatgatatgtttcccgcattgtgtgaggtcttgagacatccagaatgtaacctgcgatatctcgggttggtgtcttgttccgctaccactcagcagtgggctgatctctccttggcccttgaagtcaaccagtccctgacagcagctgtgctttcgatctggggccacagacgagcaatggtcatgcctgacttggctgtatggaacctctcgctgatgtgaacacctgttcccatgtttagatccaggccgatggcctgtgaattttgttcttctctcattcctattccttcataggatcaccagtgcatgatagaaggttggaaaactgtcaccttacagaagccaattgcaaggaccttgctgctgtgttggttgtcagccgggagctgacacacctgtgcttggccaagaaccccattgggaatacaggggtgaagtttctgtgtgagggcttgaggtaccccgagtgtaaactgcagaccttggtgctttggaactgcgacataactagcgatggctgctgcgatctcacaaagcttctccaagaaaaatcaagcctgttgtgtttggatctggggctgaatcacataggagttaagggaatgaagttcctgtgtgaggctttgaggaaaccactgtgcaacttgagatgtctgtgg

SEQ ID NO: 159708 - DNA, 592 bp, Homo sapiens
  Payload ID: 11255
  Gene Symbol: NLRP2
  Gene Name: NLR family, pyrin domain containing 2
  ENST ID: ENST00000588107
  CDS Start-End: 220-592
agcaatgtagcaggaccagccacagacaaaactcctcagacaccgagttaaagaagaaaggggtttatccggccaggggcatcggcaagactcccgtctcaagagccgagatccccaagtgagcaattcctgtcccttttaagggctcacaactctaagggggtgtgcgtgagagggtcgtgatcgactgagcaagcaggggctcccacgtgggacaagatggtgtcttcggcgcagatgggcttcaacctgcaggctctcctggagcagctcagccaggatgagttgagcaagttcaagtatctgatcacgaccttctccctggcacacgagctccagaagatcccccacaaggaggtagacaaggctgatgggaagcaactggtagaaatcctcaccacccattgtgacagctactgggtggagatggcgagcctccaggtctttgaaaagatgcaccgaatggatctgtctgagagagcaaaggatgaagtcagagaagcagctttgaaatcctttaataaaaggaagcctctatcattagggataacacggaaagaacgaccacctctagacgtggacgaaatgctgg

SEQ ID NO: 159709 - DNA, 593 bp, Homo sapiens
  Payload ID: 11255
  Gene Symbol: NLRP2
  Gene Name: NLR family, pyrin domain containing 2
  ENST ID: ENST00000588619
  CDS Start-End: 174-593
aagatacaggtcataaggaccttgctgataacacaggtagcaatgtagcaggaccagccacagacaaaactcctcagacaccgagttaaagaagaaaggggtttatccggccaggggcatcggcaagactcccgtctcaagagccgagatccccaactcccacgtgggacaagatggtgtcttcggcgcagatgggcttcaacctgcaggctctcctggagcagctcagccaggatgagttgagcaagttcaagtatctgatcacgaccttctccctggcacacgagctccagaagatcccccacaaggaggtagacaaggctgatgggaagcaactggtagaaatcctcaccacccattgtgacagctactgggtggagatggcgagcctccaggtctttgaaaagatgcaccgaatggatctgtctgagagagcaaaggatgaagtcagagaagcagctttgaaatcctttaataaaaggaagcctctatcattagggataacacggaaagaacgaccacctctagacgtggacgaaatgctggagcgcttcaaaacagaagcacaagcgtttacagaaacgaaaggaaat

SEQ ID NO: 159710 - DNA, 665 bp, Homo sapiens
  Payload ID: 11255
  Gene Symbol: NLRP2
  Gene Name: NLR family, pyrin domain containing 2
  ENST ID: ENST00000540005
  CDS Start-End: 1-592
ttcaacggtgacagacctgcaggagctcctcggctgtctgtacgagtctcaggaggaggagctggtgaaggaggtgatggctcagttcaaagaaatatccctgcacttaaatgcagtagacgttgtgccatcttcattctgcgtcaagcactgtcgaaacctgcagaaaatgtcactgcaggtaataaaggagaatctcccggagaatgtcactgcgtctgaatcagacgccgaggttgagagatcccaggatgatcagcacatgcttcctttctggacggacctttgttccatatttggatcaaataaggatctgatgggtctagcaatcaatgatagctttctcagtgcctccctagtaaggatcctgtgtgaacaaatagcctctgacacctgtcatctccagagagtggtgttcaaaaacatttccccagctgatgctcatcggaacctctgcctagctcttcgaggtcacaagactgtaacgtatctgacccttcaaggcaatgaccaggatgatatgtttcccgcattgtgtgaggtcttgagacatccagaatgtaacctgcgatatctcgggtatatctcttaatcattaaaatccttcatcatacaaacataagctaccacaagcttatgtggcaattttgtgtaaataagaaaaa

SEQ ID NO: 159711 - DNA, 576 bp, Homo sapiens
  Payload ID: 11255
  Gene Symbol: NLRP2
  Gene Name: NLR family, pyrin domain containing 2
  ENST ID: ENST00000585500
  CDS Start-End: 171-576
aatcacagggctgcggccgagagagaagccttattagagctttctcaacctgcagccctcatctccgccggcgagtagggccaggtgttgggaggtgagaggtagacaaggctgatgggaagcaactggtagaaatcctcaccacccattgtgacagctactgggtggagatggcgagcctccaggtctttgaaaagatgcaccgaatggatctgtctgagagagcaaaggatgaagtcagagaagcagctttgaaatcctttaataaaaggaagcctctatcattagggataacacggaaagaacgaccacctctagacgtggacgaaatgctggagcgcttcaaaacagaagcacaagcgtttacagaaacgaaaggaaatgtcatctgcctgggtaaagaagtctttaaaggaaaaaagccagacaaagacaataggtgcaggtatatattgaagacgaagttccgggagatgtggaagagctggcctggagatagcaaagaggtccaggttatggctgagagatacaagatgctgatcccattcagcaaccccagggtgcttcccgggccct

SEQ ID NO: 159712 - DNA, 405 bp, Homo sapiens
  Payload ID: 11255
  Gene Symbol: NLRP2
  Gene Name: NLR family, pyrin domain containing 2
  ENST ID: ENST00000381637
  CDS Start-End: 1-28
agaatgtaacctgcgatatctcggctgattcctgggcgatgttggtgccactggtctgaccaccctttgacaactgctgctccagataattcaagtcggggtataacacaaccagtgagatgtaaaccaaagacgattccacggttagattctcaagaatgacttgttctgccgggcgcggtggctcacgcctgtcatcccagcactctgggaggccgaggttggtgtcttgttccgctaccactcagcagtgggctgatctctccttggcccttgaagtcaaccagtccctgacgtgcgtaaacctctccgacaatgagcttctggatgagggtgctaagttgctgtacacaactttgagacaccccaagtgctttctgcagaggttgtcgtaagtctctcctc

SEQ ID NO: 159713 - DNA, 3507 bp, Homo sapiens; identical to SEQ ID NO: 159702
  Payload ID: 11255
  Gene Symbol: NLRP2
  Gene Name: NLR family, pyrin domain containing 2
  Uniprot ID: Q9NX02
  ENST ID: ENST00000622864
  CDS Start-End: 143-3265

SEQ ID NO: 159714 - DNA, 2703 bp, Homo sapiens
  Payload ID: 11255
  Gene Symbol: NLRP2
  Gene Name: NLR family, pyrin domain containing 2
  ENST ID: ENST00000616079
  CDS Start-End: 67-2703
caacctgcagccctcatctccgccggcgagtagggccaggtgttgggagctcccacgtgggacaagatggtgtcttcggcacagatgggcttcaacctgcaggctctcctggagcagctcagccaggatgagttgagcaagttcaagtatctgatcacgaccttctccctggcacacgagctccagaagatcccccacaaggaggtagacaaggctgatgggaagcaactggtagaaatcctcaccacccattgtgacagctactgggtggagatggcgagcctccaggtctttgaaaagatgcaccgaatggatctgtctgagagagcaaaggatgaagtcagagaagcagctttgaaatcctttaataaaaggaagcctctatcattagcgtttacagaaacgaaaggaaatgtcatctgcctgggtaaagaagtctttaaaggaaaaaagccagacaaagacaataggtgcaggtatatattgaagacgaagttccgggagatgtggaagagctggcctggagatagcaaagaggtccaggttatggctgagagatacaagatgctgatcccattcagcaaccccagggtgcttcccgggcccttctcatacacggtggtgctgtatggtcctgcaggccttgggaaaaccacgctggcccagaaactaatgctagactgggcagaggacaacctcatccacaaattcaaatatgcgttctacctcagctgcagggagctcagccgcctgggcccgtgcagttttgcagagctggtcttcagggactggcctgaattgcaggatgacattccacacatcctagcccaagcacggaaaatcttgttcgtgattgacggctttgatgagctgggagccgcacctggggcgctgatcgaggacatctgcggggactgggagaagaagaagccggtgcccgtcctcctggggagtttgctgaacagggtgatgttacccaaggccgccctgctggtcaccacgcggcccagggccctgagggacctccggatcctggcggaggagccgatctacataagggtggagggcttcctggaggaggacaggagggcctatttcctgagacactttggagatgaggaccaagccatgcgtgcctttgagctaatgaggagcaacgcggccctgttccagctgggctcggcccccgcggtgtgctggatcgtgtgcacgactctgaagctgcagatggagaagggggaggacccggtccccacctgcctcacccgcacggggctgttcctgcgtttcctctgcagccggttcccgcagggcgcacagctgcggggcgcgctgcggacgctgagcctcctggccgcgcagggcctgtgggcgcagacgtccgtgcttcaccgagaggatctggaaaggctcggggtgcaggagtccgacctccgtctgttcctggacggagacatcctccgccaggacagagtctccaaaggctgctactccttcatccacctcagcttccagcagtttctcactgccctgttctacaccctggagaaggaggaggaagaggatagggacggccacgcctgggacattggggacgtacagaagctgctttccggagtagaaagactcaggaaccccgacctgatccaagcaggctactactccttcggcctcgctaacgagaagagagccaaggagttggaggccacttttggctgccggatgtcaccggacatcaaacaggaattgctgcgatgcgacataagttgtaagggtggacattcaacggtgacagacctgcaggagctgctcggctgtctgtacgagtctcaggaggaggagctggtgaaggaggtgatggctcagttcaaagaaatatccctgcacttaaatgcagtagacgttgtgccatcttcattctgcgtcaagcactgtcgaaacctgcagaaaatgtcactgcaggtaataaaggagaatctcccggagaatgtcactgcgtctgaatcagacgccgaggttgagagatcccaggatgatcagcacatgcttcctttctggacggacctttgttccatatttggatcaaataaggatctgatgggtctagcaatcaatgatagctttctcagtgcctccctagtaaggatcctgtgtgaacaaatagcctctgacacctgtcatctccagagagtggtgttcaaaaacatttccccagctgatgctcatcggaacctctgcctagctcttcgaggtcacaagactgtaacgtatctgacccttcaaggcaatgaccaggatgatatgtttcccgcattgtgtgaggtcttgagacatccagaatgtaacctgcgatatctcgggttggtgtcttgttccgctaccactcagcagtgggctgatctctccttggcccttgaagtcaaccagtccctgacgtgcgtaaacctctccgacaatgagcttctggatgagggtgctaagttgctgtacacaactttgagacaccccaagtgctttctgcagaggttgtcgttggaaaactgtcaccttacagaagccaattgcaaggaccttgctgctgtgttggttgtcagccgggagctgacacacctgtgcttggccaagaaccccattgggaatacaggggtgaagtttctgtgtgagggcttgaggtaccccgagtgtaaactgcagaccttggtg

SEQ ID NO: 159715 - DNA, 3507 bp, Homo sapiens
  Payload ID: 11255
  Gene Symbol: NLRP2
  Gene Name: NLR family, pyrin domain containing 2
  ENST ID: ENST00000618011
  CDS Start-End: 143-3265
agtgctcagcaacgattacgccccgagggccaatcacagggctgcggccgagagagaagccttattagagctttctcaacctgcagccctcatctccgccggcgagtagggccaggtgttgggagctcccacgtgggacaagatggtgtcttcggcacagatgggcttcaacctgcaggctctcctggagcagctcagccaggatgagttgagcaagttcaagtatctgatcacgaccttctccctggcacacgagctccagaagatcccccacaaggaggtagacaaggctgatgggaagcaactggtagaaatcctcaccacccattgtgacagctactgggtggagatggcgagcctccaggtctttgaaaagatgcaccgaatggatctgtctgagagagcaaaggatgaagtcagagaagcagctttgaaatcctttaataaaaggaagcctctatcattagggataacacggaaagaacgaccacctctagacgtggacgaaatgctggagcgcttcaaaacagaagcacaagacaaagacaataggtgcaggtatatattgaagacgaagttccgggagatgtggaagagctggcctggagatagcaaagaggtccaggttatggctgagagatacaagatgctgatcccattcagcaaccccagggtgcttcccgggcccttctcatacacggtggtgctgtatggtcctgcaggccttgggaaaaccacgctggcccagaaactaatgctagactgggcagaggacaacctcatccacaaattcaaatatgcgttctacctcagctgcagggagctcagccgcctgggcccgtgcagttttgcagagctggtcttcagggactggcctgaattgcaggatgacattccacacatcctagcccaagcacggaaaatcttgttcgtgattgacggctttgatgagctgggagccgcacctggggcgctgatcgaggacatctgcggggactgggagaagaagaagccggtgcccgtcctcctggggagtttgctgaacagggtgatgttacccaaggccgccctgctggtcaccacgcggcccagggccctgagggacctccggatcctggcggaggagccgatctacataagggtggagggcttcctggaggaggacaggagggcctatttcctgagacactttggagatgaggaccaagccatgcgtgcctttgagctaatgaggagcaacgcggccctgttccagctgggctcggcccccgcggtgtgctggatcgtgtgcacgactctgaagctgcagatggagaagggggaggacccggtccccacctgcctcacccgcacggggctgttcctgcgtttcctctgcagccggttcccgcagggcgcacagctgcggggcgcgctgcggacgctgagcctcctggccgcgcagggcctgtgggcgcagacgtccgtgcttcaccgagaggatctggaaaggctcggggtgcaggagtccgacctccgtctgttcctggacggagacatcctccgccaggacagagtctccaaaggctgctactccttcatccacctcagcttccagcagtttctcactgccctgttctacaccctggagaaggaggaggaagaggatagggacggccacgcctgggacattggggacgtacagaagctgctttccggagtagaaagactcaggaaccccgacctgatccaagcaggctactactccttcggcctcgctaacgagaagagagccaaggagttggaggccacttttggctgccggatgtcaccggacatcaaacaggaattgctgcgatgcgacataagttgtaagggtggacattcaacggtgacagacctgcaggagctgctcggctgtctgtacgagtctcaggaggaggagctggtgaaggaggtgatggctcagttcaaagaaatatccctgcacttaaatgcagtagacgttgtgccatcttcattctgcgtcaagcactgtcgaaacctgcagaaaatgtcactgcaggtaataaaggagaatctcccggagaatgtcactgcgtctgaatcagacgccgaggttgagagatcccaggatgatcagcacatgcttcctttctggacggacctttgttccatatttggatcaaataaggatctgatgggtctagcaatcaatgatagctttctcagtgcctccctagtaaggatcctgtgtgaacaaatagcctctgacacctgtcatctccagagagtggtgttcaaaaacatttccccagctgatgctcatcggaacctctgcctagctcttcgaggtcacaagactgtaacgtatctgacccttcaaggcaatgaccaggatgatatgtttcccgcattgtgtgaggtcttgagacatccagaatgtaacctgcgatatctcgggttggtgtcttgttccgctaccactcagcagtgggctgatctctccttggcccttgaagtcaaccagtccctgacgtgcgtaaacctctccgacaatgagcttctggatgagggtgctaagttgctgtacacaactttgagacaccccaagtgctttctgcagaggttgtcgttggaaaactgtcaccttacagaagccaattgcaaggaccttgctgctgtgttggttgtcagccgggagctgacacacctgtgcttggccaagaaccccattgggaatacaggggtgaagtttctgtgtgagggcttgaggtaccccgagtgtaaactgcagaccttggtgctttggaactgcgacataactagcgatggctgctgcgatctcacaaagcttctccaagaaaaatcaagcctgttgtgtttggatctggggctgaatcacataggagttaagggaatgaagttcctgtgtgaggctttgaggaaaccactgtgcaacttgagatgtctgtggttgtggggatgttccatccctccgttcagttgtgaagacctctgctctgccctcagctgcaaccagagcctcgtcactctggacctgggtcagaatcccttggggtctagtggagtgaagatgctgtttgaaaccttgacatgttccagtggcaccctccggacactcaggttgaaaatcgatgactttaatgatgaactcaataagctgctggaagaaatagaagaaaaaaacccacaactgattattgatactgagaaacatcatccctgggcagaaaggccttcttctcatgacttcatgatctgaatccccccgagtcattcattctccatgaagtcatcgattttccaggtgttggtgaactgcctgtgactcctctcctccccggcccctacccctcagggataatgagttcattgctgggctagatgttttagccatgattctgcctctgttttatacctgcacacatccttatctttgttacatatgaaatatctgtatcacgggtatattgagagaaataaaggtgagagcattcacaaatg

SEQ ID NO: 159716 - DNA, 3573 bp, Homo sapiens; identical to SEQ ID NO: 159701
  Payload ID: 11255
  Gene Symbol: NLRP2
  Gene Name: NLR family, pyrin domain containing 2
  Uniprot ID: Q9NX02
  ENST ID: ENST00000619281
  CDS Start-End: 143-3331

SEQ ID NO: 159717 - DNA, 3504 bp, Homo sapiens
  Payload ID: 11255
  Gene Symbol: NLRP2
  Gene Name: NLR family, pyrin domain containing 2
  Uniprot ID: Q9NX02
  ENST ID: ENST00000618789
  CDS Start-End: 143-3262
agtgctcagcaacgattacgccccgagggccaatcacagggctgcggccgagagagaagccttattagagctttctcaacctgcagccctcatctccgccggcgagtagggccaggtgttgggagctcccacgtgggacaagatggtgtcttcggcgcagatgggcttcaacctgcaggctctcctggagcagctcagccaggatgagttgagcaagttcaagtatctgatcacgaccttctccctggcacacgagctccagaagatcccccacaaggagatggcgagcctccaggtctttgaaaagatgcaccgaatggatctgtctgagagagcaaaggatgaagtcagagaagcagctttgaaatcctttaataaaaggaagcctctatcattagggataacacggaaagaacgaccacctctagacgtggacgaaatgctggagcgcttcaaaacagaagcacaagcgtttacagaaacgaaaggaaatgtcatctgcctgggtaaagaagtctttaaaggaaaaaagccagacaaagacaataggtgcaggtatatattgaagacgaagttccgggagatgtggaagagctggcctggagatagcaaagaggtccaggttatggctgagagatacaagatgctgatcccattcagcaaccccagggtgcttcccgggcccttctcatacacggtggtgctgtatggtcctgcaggccttgggaaaaccacgctggcccagaaactaatgctagactgggcagaggacaacctcatccacaaattcaaatatgcgttctacctcagctgcagggagctcagccgcctgggcccgtgcagttttgcagagctggtcttcagggactggcctgaattgcaggatgacattccacacatcctagcccaagcacggaaaatcttgttcgtgattgacggctttgatgagctgggagccgcacctggggcgctgatcgaggacatctgcggggactgggagaagaagaagccggtgcccgtcctcctggggagtttgctgaacagggtgatgttacccaaggccgccctgctggtcaccacgcggcccagggccctgagggacctccggatcctggcggaggagccgatctacataagggtggagggcttcctggaggaggacaggagggcctatttcctgagacactttggagacgaggaccaagccatgcgtgcctttgagctaatgaggagcaacgcggccctgttccagctgggctcggcccccgcggtgtgctggatcgtgtgcacgactctgaagctgcagatggagaagggggaggacccggtccccacctgcctcacccgcacggggctgttcctgcgtttcctctgcagccggttcccgcagggcgcacagctgcggggcgcgctgcggacgctgagcctcctggccgcgcagggcctgtgggcgcagacgtccgtgcttcaccgagaggatctggaaaggctcggggtgcaggagtccgacctccgtctgttcctggacggagacatcctccgccaggacagagtctccaaaggctgctactccttcatccacctcagcttccagcagtttctcactgccctgttctacaccctggagaaggaggaggaagaggatagggacggccacacctgggacattggggacgtacagaagctgctttccggagtagaaagactcaggaaccccgacctgatccaagcaggctactactcctttggcctcgctaacgagaagagagccaaggagttggaggccacttttggctgccggatgtcaccggacatcaaacaggaattgctgcgatgcgacataagttgtaagggtggacattcaacggtgacagacctgcaggagctcctcggctgtctgtacgagtctcaggaggaggagctggtgaaggaggtgatggctcagttcaaagaaatatccctgcacttaaatgcagtagacgttgtgccatcttcattctgcgtcaagcactgtcgaaacctgcagaaaatgtcactgcaggtaataaaggagaatctcccggagaatgtcactgcgtctgaatcagacgccgaggttgagagatcccaggatgatcagcacatgcttcctttctggacggacctttgttccatatttggatcaaataaggatctgatgggtctagcaatcaatgatagctttctcagtgcctccctagtaaggatcctgtgtgaacaaatagcctctgacacctgtcatctccagagagtggtgttcaaaaacatttccccagctgatgctcatcggaacctctgcctagctcttcgaggtcacaagactgtaacgtatctgacccttcaaggcaatgaccaggatgatatgtttcccgcattgtgtgaggtcttgagacatccagaatgtaacctgcgatatctcgggttggtgtcttgttccgctaccactcagcagtgggctgatctctccttggcccttgaagtcaaccagtccctgacgtgcgtaaacctctccgacaatgagcttctggatgagggtgctaagttgctgtacacaactttgagacaccccaagtgctttctgcagaggttgtcgttggaaaactgtcaccttacagaagccaattgcaaggaccttgctgctgtgttggttgtcagccgggagctgacacacctgtgcttggccaagaaccccattgggaatacaggggtgaagtttctgtgtgagggcttgaggtaccccgagtgtaaactgcagaccttggtgctttggaactgcgacataactagcgatggctgctgcgatctcacaaagcttctccaagaaaaatcaagcctgttgtgtttggatctggggctgaatcacataggagttaagggaatgaagttcctgtgtgaggctttgaggaaaccactgtgcaacttgagatgtctgtggttgtggggatgttccatccctccgttcagttgtgaagacctctgctctgccctcagctgcaaccagagcctcgtcactctggacctgggtcagaatcccttggggtctagtggagtgaagatgctgtttgaaaccttgacatgttccagtggcaccctccggacactcaggttgaaaatcgatgactttaatgatgaactcaataagctgctggaagaaatagaagaaaaaaacccacaactgattattgatactgagaaacatcatccctgggcagaaaggccttcttctcatgacttcatgatctgaatccccccgagtcattcattctccatgaagtcatcgattttccaggtgttggtgaactgcctgtgactcctctcctccccggcccctacccctcagggataatgagttcattgctgggctagatgttttagccatgattctgcctctgttttatacctgcacacatccttatctttgttacatatgaaatatctgtatcacgggtatattgagagaaataaaggtgagagcattcacaaatg

SEQ ID NO: 159718 - DNA, 3573 bp, Homo sapiens; identical to SEQ ID NO: 159701
  Payload ID: 11255
  Gene Symbol: NLRP2
  Gene Name: NLR family, pyrin domain containing 2
  ENST ID: ENST00000621594
  CDS Start-End: 143-3331

SEQ ID NO: 159719 - DNA, 540 bp, Homo sapiens; identical to SEQ ID NO: 159705
  Payload ID: 11255
  Gene Symbol: NLRP2
  Gene Name: NLR family, pyrin domain containing 2
  ENST ID: ENST00000618465
  CDS Start-End: 78-540

SEQ ID NO: 159720 - DNA, 3573 bp, Homo sapiens; identical to SEQ ID NO: 159701
  Payload ID: 11255
  Gene Symbol: NLRP2
  Gene Name: NLR family, pyrin domain containing 2
  Uniprot ID: Q9NX02
  ENST ID: ENST00000619664
  CDS Start-End: 143-3331

SEQ ID NO: 159721 - DNA, 3507 bp, Homo sapiens; identical to SEQ ID NO: 159702
  Payload ID: 11255
  Gene Symbol: NLRP2
  Gene Name: NLR family, pyrin domain containing 2
  Uniprot ID: Q9NX02
  ENST ID: ENST00000618731
  CDS Start-End: 143-3265

SEQ ID NO: 159722 - DNA, 3542 bp, Homo sapiens
  Payload ID: 11255
  Gene Symbol: NLRP2
  Gene Name: NLR family, pyrin domain containing 2
  Uniprot ID: Q9NX02
  ENST ID: ENST00000616040
  CDS Start-End: 112-3300
aatcacagggctgcggccgagaaagaagccttaatagagctttctcaacctgcagccctcatctccgccggcgagtagggccaggtgttgggagctcccacgtgggacaagatggtgtcttcggcgcagatgggcttcaacctgcaggctctcctggagcagctcagccaggatgagttgagcaagttcaagtatctgatcacgaccttctccctggcacacgagctccagaagatcccccacaaggaggtagacaaggctgatgggaagcaactggtagaaatcctcaccacccattgtgacagctactgggtggagatggcgagcctccaggtctttgaaaagatgcaccgaatggatctgtctgagagagcaaaggatgaagtcagagaagcagctttgaaatcctttaataaaaggaagcctctatcattagggataacacggaaagaacgaccacctctagacgtggacgaaatgctggagcgcttcaaaacagaagcacaagcgtttacagaaacgaaaggaaatgtcatctgcctgggtaaagaagtctttaaaggaaaaaagccagacaaagacaataggtgcaggtatatattgaagacgaagttccgggagatgtggaagagctggcctggagatagcaaagaggtccaggttatggctgagagatacaagatgctgatcccattcagcaaccccagggtgcttcccgggcccttctcatacacggtggtgctgtatggtcctgcaggccttgggaaaaccacgctggcccagaaactaatgctagactgggcagaggacaacctcatccacaaattcaaatatgcgttctacctcagctgcagggagctcagccgcctgggcccgtgcagttttgcagagctggtcttcagggactggcctgaattgcaggatgacattccacacatcctagcccaagcacggaaaatcttgttcgtgattgacggctttgatgagctgggagccgcacctggggcgctgatcgaggacatctgcggggactgggagaagaagaagccggtgcccgtcctcctggggagtttgctgaacagggtgatgttacccaaggccgccctgctggtcaccacgcggcccagggccctgagggacctccggatcctggcggaggagccgatctacataagggtggagggcttcctggaggaggacaggagggcctatttcctgagacactttggagacgaggaccaagccatgcgtgcctttgagctaatgaggagcaacgcggccctgttccagctgggctcggcccccgcggtgtgctggatcgtgtgcacgactctgaagctgcagatggagaagggggaggacccggtccccacctgcctcacccgcacggggctgttcctgcgtttcctctgcagccggttcccgcagggcgcacagctgcggggcgcgctgcggacgctgagcctcctggccgcgcagggcctgtgggcgcagacgtccgtgcttcaccgagaggatctggaaaggctcggggtgcaggagtccgacctccgtctgttcctggacggagacatcctccgccaggacagagtctccaaaggctgctactccttcatccacctcagcttccagcagtttctcactgccctgttctacaccctggagaaggaggaggaagaggatagggacggccacacctgggacattggggacgtacagaagctgctttccggagtagaaagactcaggaaccccgacctgatccaagcaggctactactcctttggcctcgctaacgagaagagagccaaggagttggaggccacttttggctgccggatgtcaccggacatcaaacaggaattgctgcgatgcgacataagttgtaagggtggacattcaacggtgacagacctgcaggagctcctcggctgtctgtacgagtctcaggaggaggagctggtgaaggaggtgatggctcagttcaaagaaatatccctgcacttaaatgcagtagacgttgtgccatcttcattctgcgtcaagcactgtcgaaacctgcagaaaatgtcactgcaggtaataaaggagaatctcccggagaatgtcactgcgtctgaatcagacgccgaggttgagagatcccaggatgatcagcacatgcttcctttctggacggacctttgttccatatttggatcaaataaggatctgatgggtctagcaatcaatgatagctttctcagtgcctccctagtaaggatcctgtgtgaacaaatagcctctgacacctgtcatctccagagagtggtgttcaaaaacatttccccagctgatgctcatcggaacctctgcctagctcttcgaggtcacaagactgtaacgtatctgacccttcaaggcaatgaccaggatgatatgtttcccgcattgtgtgaggtcttgagacatccagaatgtaacctgcgatatctcgggttggtgtcttgttccgctaccactcagcagtgggctgatctctccttggcccttgaagtcaaccagtccctgacgtgcgtaaacctctccgacaatgagcttctggatgagggtgctaagttgctgtacacaactttgagacaccccaagtgctttctgcagaggttgtcgttggaaaactgtcaccttacagaagccaattgcaaggaccttgctgctgtgttggttgtcagccgggagctgacacacctgtgcttggccaagaaccccattgggaatacaggggtgaagtttctgtgtgagggcttgaggtaccccgagtgtaaactgcagaccttggtgctttggaactgcgacataactagcgatggctgctgcgatctcacaaagcttctccaagaaaaatcaagcctgttgtgtttggatctggggctgaatcacataggagttaagggaatgaagttcctgtgtgaggctttgaggaaaccactgtgcaacttgagatgtctgtggttgtggggatgttccatccctccgttcagttgtgaagacctctgctctgccctcagctgcaaccagagcctcgtcactctggacctgggtcagaatcccttggggtctagtggagtgaagatgctgtttgaaaccttgacatgttccagtggcaccctccggacactcaggttgaaaatcgatgactttaatgatgaactcaataagctgctggaagaaatagaagaaaaaaacccacaactgattattgatactgagaaacatcatccctgggcagaaaggccttcttctcatgacttcatgatctgaatccccccgagtcattcattctccatgaagtcatcgattttccaggtgttggtgaactgcctgtgactcctctcctccccggcccctacccctcagggataatgagttcattgctgggctagatgttttagccatgattctgcctctgttttatacctgcacacatccttatctttgttacatatgaaatatctgtatcacgggtatattgagagaaataaaggtgagagcattcacaaatg

SEQ ID NO: 159723 - DNA, 3573 bp, Homo sapiens; identical to SEQ ID NO: 159701
  Payload ID: 11255
  Gene Symbol: NLRP2
  Gene Name: NLR family, pyrin domain containing 2
  ENST ID: ENST00000611772
  CDS Start-End: 143-3331

SEQ ID NO: 159724 - DNA, 3504 bp, Homo sapiens
  Payload ID: 11255
  Gene Symbol: NLRP2
  Gene Name: NLR family, pyrin domain containing 2
  ENST ID: ENST00000610346
  CDS Start-End: 143-3262
agtgctcagcaacgattacgccccgagggccaatcacagggctgcggccgagagagaagccttattagagctttctcaacctgcagccctcatctccgccggcgagtagggccaggtgttgggagctcccacgtgggacaagatggtgtcttcggcacagatgggcttcaacctgcaggctctcctggagcagctcagccaggatgagttgagcaagttcaagtatctgatcacgaccttctccctggcacacgagctccagaagatcccccacaaggagatggcgagcctccaggtctttgaaaagatgcaccgaatggatctgtctgagagagcaaaggatgaagtcagagaagcagctttgaaatcctttaataaaaggaagcctctatcattagggataacacggaaagaacgaccacctctagacgtggacgaaatgctggagcgcttcaaaacagaagcacaagcgtttacagaaacgaaaggaaatgtcatctgcctgggtaaagaagtctttaaaggaaaaaagccagacaaagacaataggtgcaggtatatattgaagacgaagttccgggagatgtggaagagctggcctggagatagcaaagaggtccaggttatggctgagagatacaagatgctgatcccattcagcaaccccagggtgcttcccgggcccttctcatacacggtggtgctgtatggtcctgcaggccttgggaaaaccacgctggcccagaaactaatgctagactgggcagaggacaacctcatccacaaattcaaatatgcgttctacctcagctgcagggagctcagccgcctgggcccgtgcagttttgcagagctggtcttcagggactggcctgaattgcaggatgacattccacacatcctagcccaagcacggaaaatcttgttcgtgattgacggctttgatgagctgggagccgcacctggggcgctgatcgaggacatctgcggggactgggagaagaagaagccggtgcccgtcctcctggggagtttgctgaacagggtgatgttacccaaggccgccctgctggtcaccacgcggcccagggccctgagggacctccggatcctggcggaggagccgatctacataagggtggagggcttcctggaggaggacaggagggcctatttcctgagacactttggagatgaggaccaagccatgcgtgcctttgagctaatgaggagcaacgcggccctgttccagctgggctcggcccccgcggtgtgctggatcgtgtgcacgactctgaagctgcagatggagaagggggaggacccggtccccacctgcctcacccgcacggggctgttcctgcgtttcctctgcagccggttcccgcagggcgcacagctgcggggcgcgctgcggacgctgagcctcctggccgcgcagggcctgtgggcgcagacgtccgtgcttcaccgagaggatctggaaaggctcggggtgcaggagtccgacctccgtctgttcctggacggagacatcctccgccaggacagagtctccaaaggctgctactccttcatccacctcagcttccagcagtttctcactgccctgttctacaccctggagaaggaggaggaagaggatagggacggccacgcctgggacattggggacgtacagaagctgctttccggagtagaaagactcaggaaccccgacctgatccaagcaggctactactccttcggcctcgctaacgagaagagagccaaggagttggaggccacttttggctgccggatgtcaccggacatcaaacaggaattgctgcgatgcgacataagttgtaagggtggacattcaacggtgacagacctgcaggagctgctcggctgtctgtacgagtctcaggaggaggagctggtgaaggaggtgatggctcagttcaaagaaatatccctgcacttaaatgcagtagacgttgtgccatcttcattctgcgtcaagcactgtcgaaacctgcagaaaatgtcactgcaggtaataaaggagaatctcccggagaatgtcactgcgtctgaatcagacgccgaggttgagagatcccaggatgatcagcacatgcttcctttctggacggacctttgttccatatttggatcaaataaggatctgatgggtctagcaatcaatgatagctttctcagtgcctccctagtaaggatcctgtgtgaacaaatagcctctgacacctgtcatctccagagagtggtgttcaaaaacatttccccagctgatgctcatcggaacctctgcctagctcttcgaggtcacaagactgtaacgtatctgacccttcaaggcaatgaccaggatgatatgtttcccgcattgtgtgaggtcttgagacatccagaatgtaacctgcgatatctcgggttggtgtcttgttccgctaccactcagcagtgggctgatctctccttggcccttgaagtcaaccagtccctgacgtgcgtaaacctctccgacaatgagcttctggatgagggtgctaagttgctgtacacaactttgagacaccccaagtgctttctgcagaggttgtcgttggaaaactgtcaccttacagaagccaattgcaaggaccttgctgctgtgttggttgtcagccgggagctgacacacctgtgcttggccaagaaccccattgggaatacaggggtgaagtttctgtgtgagggcttgaggtaccccgagtgtaaactgcagaccttggtgctttggaactgcgacataactagcgatggctgctgcgatctcacaaagcttctccaagaaaaatcaagcctgttgtgtttggatctggggctgaatcacataggagttaagggaatgaagttcctgtgtgaggctttgaggaaaccactgtgcaacttgagatgtctgtggttgtggggatgttccatccctccgttcagttgtgaagacctctgctctgccctcagctgcaaccagagcctcgtcactctggacctgggtcagaatcccttggggtctagtggagtgaagatgctgtttgaaaccttgacatgttccagtggcaccctccggacactcaggttgaaaatcgatgactttaatgatgaactcaataagctgctggaagaaatagaagaaaaaaacccacaactgattattgatactgagaaacatcatccctgggcagaaaggccttcttctcatgacttcatgatctgaatccccccgagtcattcattctccatgaagtcatcgattttccaggtgttggtgaactgcctgtgactcctctcctccccggcccctacccctcagggataatgagttcattgctgggctagatgttttagccatgattctgcctctgttttatacctgcacacatccttatctttgttacatatgaaatatctgtatcacgggtatattgagagaaataaaggtgagagcattcacaaatg

SEQ ID NO: 159725 - DNA, 3542 bp, Homo sapiens; identical to SEQ ID NO: 159722
  Payload ID: 11255
  Gene Symbol: NLRP2
  Gene Name: NLR family, pyrin domain containing 2
  ENST ID: ENST00000611410
  CDS Start-End: 112-3300

SEQ ID NO: 159726 - DNA, 3542 bp, Homo sapiens; identical to SEQ ID NO: 159722
  Payload ID: 11255
  Gene Symbol: NLRP2
  Gene Name: NLR family, pyrin domain containing 2
  ENST ID: ENST00000615521
  CDS Start-End: 112-3300

SEQ ID NO: 159727 - DNA, 3496 bp, Homo sapiens; identical to SEQ ID NO: 159697
  Payload ID: 11255
  Gene Symbol: NLRP2
  Gene Name: NLR family, pyrin domain containing 2
  ENST ID: ENST00000612740
  CDS Start-End: 80-3259

SEQ ID NO: 159728 - DNA, 3573 bp, Homo sapiens; identical to SEQ ID NO: 159701
  Payload ID: 11255
  Gene Symbol: NLRP2
  Gene Name: NLR family, pyrin domain containing 2
  ENST ID: ENST00000621239
  CDS Start-End: 143-3331

SEQ ID NO: 159729 - DNA, 3542 bp, Homo sapiens; identical to SEQ ID NO: 159722
  Payload ID: 11255
  Gene Symbol: NLRP2
  Gene Name: NLR family, pyrin domain containing 2
  ENST ID: ENST00000621200
  CDS Start-End: 112-3300

SEQ ID NO: 159730 - DNA, 2852 bp, Homo sapiens
  Payload ID: 11255
  Gene Symbol: NLRP2
  Gene Name: NLR family, pyrin domain containing 2
  ENST ID: ENST00000615023
  CDS Start-End: 144-2852
aagtgctcagcaacgattacgccccgagggccaatcacagggctgcggccgagagagaagccttattagagctttctcaacctgcagccctcatctccgccggcgagtagggccaggtgttgggagctcccacgtgggacaagatggtgtcttcggcacagatgggcttcaacctgcaggctctcctggagcagctcagccaggatgagttgagcaagttcaagtatctgatcacgaccttctccctggcacacgagctccagaagatcccccacaaggaggtagacaaggctgatgggaagcaactggtagaaatcctcaccacccattgtgacagctactgggtggagatggcgagcctccaggtctttgaaaagatgcaccgaatggatctgtctgagagagcaaaggatgaagtcagagaagcagctttgaaatcctttaataaaaggaagcctctatcattagggataacacggaaagaacgaccacctctagacgtggacgaaatgctggagcgcttcaaaacagaagcacaagcgtttacagaaacgaaaggaaatgtcatctgcctgggtaaagaagtctttaaaggaaaaaagccagacaaagacaataggtgcaggtatatattgaagacgaagttccgggagatgtggaagagctggcctggagatagcaaagaggtccaggttatggctgagagatacaagatgctgatcccattcagcaaccccagggtgcttcccgggcccttctcatacacggtggtgctgtatggtcctgcaggccttgggaaaaccacgctggcccagaaactaatgctagactgggcagaggacaacctcatccacaaattcaaatatgcgttctacctcagctgcagggagctcagccgcctgggcccgtgcagttttgcagagctggtcttcagggactggcctgaattgcaggatgacattccacacatcctagcccaagcacggaaaatcttgttcgtgattgacggctttgatgagctgggagccgcacctggggcgctgatcgaggacatctgcggggactgggagaagaagaagccggtgcccgtcctcctggggagtttgctgaacagggtgatgttacccaaggccgccctgctggtcaccacgcggcccagggccctgagggacctccggatcctggcggaggagccgatctacataagggtggagggcttcctggaggaggacaggagggcctatttcctgagacactttggagatgaggaccaagccatgcgtgcctttgagctaatgaggagcaacgcggccctgttccagctgggctcggcccccgcggtgtgctggatcgtgtgcacgactctgaagctgcagatggagaagggggaggacccggtccccacctgcctcacccgcacggggctgttcctgcgtttcctctgcagccggttcccgcagggcgcacagctgcggggcgcgctgcggacgctgagcctcctggccgcgcagggcctgtgggcgcagacgtccgtgcttcaccgagaggatctggaaaggctcggggtgcaggagtccgacctccgtctgttcctggacggagacatcctccgccaggacagagtctccaaaggctgctactccttcatccacctcagcttccagcagtttctcactgccctgttctacaccctggagaaggaggaggaagaggatagggacggccacgcctgggacattggggacgtacagaagctgctttccggagtagaaagactcaggaaccccgacctgatccaagcaggctactactccttcggcctcgctaacgagaagagagccaaggagttggaggccacttttggctgccggatgtcaccggacatcaaacaggaattgctgcgatgcgacataagttgtaagggtggacattcaacggtgacagacctgcaggagctgctcggctgtctgtacgagtctcaggaggaggagctggtgaaggaggtgatggctcagttcaaagaaatatccctgcacttaaatgcagtagacgttgtgccatcttcattctgcgtcaagcactgtcgaaacctgcagaaaatgtcactgcaggtaataaaggagaatctcccggagaatgtcactgcgtctgaatcagacgccgaggttgagagatcccaggatgatcagcacatgcttcctttctggacggacctttgttccatatttggatcaaataaggatctgatgggtctagcaatcaatgatagctttctcagtgcctccctagtaaggatcctgtgtgaacaaatagcctctgacacctgtcatctccagagagtggtgttcaaaaacatttccccagctgatgctcatcggaacctctgcctagctcttcgaggtcacaagactgtaacgtatctgacccttcaaggcaatgaccaggatgatatgtttcccgcattgtgtgaggtcttgagacatccagaatgtaacctgcgatatctcgggttggtgtcttgttccgctaccactcagcagtgggctgatctctccttggcccttgaagtcaaccagtccctgacgtgcgtaaacctctccgacaatgagcttctggatgagggtgctaagttgctgtacacaactttgagacaccccaagtgctttctgcagaggttgtcgttggaaaactgtcaccttacagaagccaattgcaaggaccttgctgctgtgttggttgtcagccgggagctgacacacctgtgcttggccaagaaccccattgggaatacaggggtgaagtttctgtgtgagggcttgaggtaccccgagtgtaaactgcagaccttggtg

SEQ ID NO: 159731 - DNA, 550 bp, Homo sapiens; identical to SEQ ID NO: 159703
  Payload ID: 11255
  Gene Symbol: NLRP2
  Gene Name: NLR family, pyrin domain containing 2
  ENST ID: ENST00000611888
  CDS Start-End: 56-550

SEQ ID NO: 159732 - DNA, 3507 bp, Homo sapiens; identical to SEQ ID NO: 159702
  Payload ID: 11255
  Gene Symbol: NLRP2
  Gene Name: NLR family, pyrin domain containing 2
  Uniprot ID: Q9NX02
  ENST ID: ENST00000616919
  CDS Start-End: 143-3265

SEQ ID NO: 159733 - DNA, 3573 bp, Homo sapiens; identical to SEQ ID NO: 159701
  Payload ID: 11255
  Gene Symbol: NLRP2
  Gene Name: NLR family, pyrin domain containing 2
  ENST ID: ENST00000615391
  CDS Start-End: 143-3331

SEQ ID NO: 159734 - DNA, 3507 bp, Homo sapiens; identical to SEQ ID NO: 159702
  Payload ID: 11255
  Gene Symbol: NLRP2
  Gene Name: NLR family, pyrin domain containing 2
  ENST ID: ENST00000611676
  CDS Start-End: 143-3265

SEQ ID NO: 159735 - DNA, 3507 bp, Homo sapiens; identical to SEQ ID NO: 159702
  Payload ID: 11255
  Gene Symbol: NLRP2
  Gene Name: NLR family, pyrin domain containing 2
  ENST ID: ENST00000622216
  CDS Start-End: 143-3265

SEQ ID NO: 159736 - DNA, 3504 bp, Homo sapiens; identical to SEQ ID NO: 159717
  Payload ID: 11255
  Gene Symbol: NLRP2
  Gene Name: NLR family, pyrin domain containing 2
  ENST ID: ENST00000622444
  CDS Start-End: 143-3262

SEQ ID NO: 159737 - DNA, 3542 bp, Homo sapiens; identical to SEQ ID NO: 159722
  Payload ID: 11255
  Gene Symbol: NLRP2
  Gene Name: NLR family, pyrin domain containing 2
  Uniprot ID: Q9NX02
  ENST ID: ENST00000622042
  CDS Start-End: 112-3300

SEQ ID NO: 159738 - DNA, 3504 bp, Homo sapiens; identical to SEQ ID NO: 159717
  Payload ID: 11255
  Gene Symbol: NLRP2
  Gene Name: NLR family, pyrin domain containing 2
  ENST ID: ENST00000618943
  CDS Start-End: 143-3262

SEQ ID NO: 159739 - DNA, 592 bp, Homo sapiens; identical to SEQ ID NO: 159708
  Payload ID: 11255
  Gene Symbol: NLRP2
  Gene Name: NLR family, pyrin domain containing 2
  ENST ID: ENST00000615586
  CDS Start-End: 220-592

SEQ ID NO: 159740 - DNA, 3504 bp, Homo sapiens; identical to SEQ ID NO: 159717
  Payload ID: 11255
  Gene Symbol: NLRP2
  Gene Name: NLR family, pyrin domain containing 2
  ENST ID: ENST00000616903
  CDS Start-End: 143-3262

SEQ ID NO: 159741 - DNA, 3504 bp, Homo sapiens; identical to SEQ ID NO: 159717
  Payload ID: 11255
  Gene Symbol: NLRP2
  Gene Name: NLR family, pyrin domain containing 2
  ENST ID: ENST00000618694
  CDS Start-End: 143-3262

SEQ ID NO: 159742 - DNA, 3504 bp, Homo sapiens; identical to SEQ ID NO: 159717
  Payload ID: 11255
  Gene Symbol: NLRP2
  Gene Name: NLR family, pyrin domain containing 2
  Uniprot ID: Q9NX02
  ENST ID: ENST00000613851
  CDS Start-End: 143-3262

SEQ ID NO: 159743 - DNA, 3507 bp, Homo sapiens; identical to SEQ ID NO: 159702
  Payload ID: 11255
  Gene Symbol: NLRP2
  Gene Name: NLR family, pyrin domain containing 2
  ENST ID: ENST00000622600
  CDS Start-End: 143-3265

SEQ ID NO: 159744 - DNA, 2702 bp, Homo sapiens
  Payload ID: 11255
  Gene Symbol: NLRP2
  Gene Name: NLR family, pyrin domain containing 2
  ENST ID: ENST00000615197
  CDS Start-End: 60-2702
cagccctcatctccgccggcgagtagggccaggtgttgggagctcccacgtgggacaagatggtgtcttcggcacagatgggcttcaacctgcaggctctcctggagcagctcagccaggatgagttgagcaagttcaagtatctgatcacgaccttctccctggcacacgagctccagaagatcccccacaaggaggtagacaaggctgatgggaagcaactggtagaaatcctcaccacccattgtgacagctactgggtggagatggcgagcctccaggtctttgaaaagatgcaccgaatggatctgtctgagagagcaaaggatgaagtcagagaagcagctttgaaatcctttaataaaaggaagcctctatcattagggataacacggaaagaacgaccacctctagacgtggacgaaatgctggagcgcttcaaaacagaagcacaagacaaagacaataggtgcaggtatatattgaagacgaagttccgggagatgtggaagagctggcctggagatagcaaagaggtccaggttatggctgagagatacaagatgctgatcccattcagcaaccccagggtgcttcccgggcccttctcatacacggtggtgctgtatggtcctgcaggccttgggaaaaccacgctggcccagaaactaatgctagactgggcagaggacaacctcatccacaaattcaaatatgcgttctacctcagctgcagggagctcagccgcctgggcccgtgcagttttgcagagctggtcttcagggactggcctgaattgcaggatgacattccacacatcctagcccaagcacggaaaatcttgttcgtgattgacggctttgatgagctgggagccgcacctggggcgctgatcgaggacatctgcggggactgggagaagaagaagccggtgcccgtcctcctggggagtttgctgaacagggtgatgttacccaaggccgccctgctggtcaccacgcggcccagggccctgagggacctccggatcctggcggaggagccgatctacataagggtggagggcttcctggaggaggacaggagggcctatttcctgagacactttggagatgaggaccaagccatgcgtgcctttgagctaatgaggagcaacgcggccctgttccagctgggctcggcccccgcggtgtgctggatcgtgtgcacgactctgaagctgcagatggagaagggggaggacccggtccccacctgcctcacccgcacggggctgttcctgcgtttcctctgcagccggttcccgcagggcgcacagctgcggggcgcgctgcggacgctgagcctcctggccgcgcagggcctgtgggcgcagacgtccgtgcttcaccgagaggatctggaaaggctcggggtgcaggagtccgacctccgtctgttcctggacggagacatcctccgccaggacagagtctccaaaggctgctactccttcatccacctcagcttccagcagtttctcactgccctgttctacaccctggagaaggaggaggaagaggatagggacggccacgcctgggacattggggacgtacagaagctgctttccggagtagaaagactcaggaaccccgacctgatccaagcaggctactactccttcggcctcgctaacgagaagagagccaaggagttggaggccacttttggctgccggatgtcaccggacatcaaacaggaattgctgcgatgcgacataagttgtaagggtggacattcaacggtgacagacctgcaggagctgctcggctgtctgtacgagtctcaggaggaggagctggtgaaggaggtgatggctcagttcaaagaaatatccctgcacttaaatgcagtagacgttgtgccatcttcattctgcgtcaagcactgtcgaaacctgcagaaaatgtcactgcaggtaataaaggagaatctcccggagaatgtcactgcgtctgaatcagacgccgaggttgagagatcccaggatgatcagcacatgcttcctttctggacggacctttgttccatatttggatcaaataaggatctgatgggtctagcaatcaatgatagctttctcagtgcctccctagtaaggatcctgtgtgaacaaatagcctctgacacctgtcatctccagagagtggtgttcaaaaacatttccccagctgatgctcatcggaacctctgcctagctcttcgaggtcacaagactgtaacgtatctgacccttcaaggcaatgaccaggatgatatgtttcccgcattgtgtgaggtcttgagacatccagaatgtaacctgcgatatctcgggttggtgtcttgttccgctaccactcagcagtgggctgatctctccttggcccttgaagtcaaccagtccctgacgtgcgtaaacctctccgacaatgagcttctggatgagggtgctaagttgctgtacacaactttgagacaccccaagtgctttctgcagaggttgtcgttggaaaactgtcaccttacagaagccaattgcaaggaccttgctgctgtgttggttgtcagccgggagctgacacacctgtgcttggccaagaaccccattgggaatacaggggtgaagtttctgtgtgagggcttgaggtaccccgagtgtaaactgcagaccttggtg

SEQ ID NO: 159745 - DNA, 3573 bp, Homo sapiens; identical to SEQ ID NO: 159701
  Payload ID: 11255
  Gene Symbol: NLRP2
  Gene Name: NLR family, pyrin domain containing 2
  Uniprot ID: Q9NX02
  ENST ID: ENST00000615173
  CDS Start-End: 143-3331

SEQ ID NO: 159746 - DNA, 3576 bp, Homo sapiens; identical to SEQ ID NO: 159706
  Payload ID: 11255
  Gene Symbol: NLRP2
  Gene Name: NLR family, pyrin domain containing 2
  Uniprot ID: Q9NX02
  ENST ID: ENST00000613062
  CDS Start-End: 144-3332

SEQ ID NO: 159747 - DNA, 665 bp, Homo sapiens; identical to SEQ ID NO: 159710
  Payload ID: 11255
  Gene Symbol: NLRP2
  Gene Name: NLR family, pyrin domain containing 2
  ENST ID: ENST00000617384
  CDS Start-End: 1-592

SEQ ID NO: 159748 - DNA, 3020 bp, Homo sapiens
  Payload ID: 11255
  Gene Symbol: NLRP2
  Gene Name: NLR family, pyrin domain containing 2
  ENST ID: ENST00000621165
  CDS Start-End: 111-2651
atcacagggctgcggccgagagagaagccttattagagctttctcaacctgcagccctcatctccgccggcgagtagggccaggtgttgggagctcccacgtgggacaagatggtgtcttcggcacagatgggcttcaacctgcaggctctcctggagcagctcagccaggatgagttgagcaagttcaagtatctgatcacgaccttctccctggcacacgagctccagaagatcccccacaaggaggtagacaaggctgatgggaagcaactggtagaaatcctcaccacccattgtgacagctactgggtggagatggcgagcctccaggtctttgaaaagatgcaccgaatggatctgtctgagagagcaaaggatgaagtcagagaagcagctttgaaatcctttaataaaaggaagcctctatcattagggataacacggaaagaacgaccacctctagacgtggacgaaatgctggagcgcttcaaaacagaagcacaagcgtttacagaaacgaaaggaaatgtcatctgcctgggtaaagaagtctttaaaggaaaaaagccagacaaagacaataggtgcaggtatatattgaagacgaagttccgggagatgtggaagagctggcctggagatagcaaagaggtccaggttatggctgagagatacaagatgctgatcccattcagcaaccccagggtgcttcccgggcccttctcatacacggtggtgctgtatggtcctgcaggccttgggaaaaccacgctggcccagaaactaatgctagactgggcagaggacaacctcatccacaaattcaaatatgcgttctacctcagctgcagggagctcagccgcctgggcccgtgcagttttgcagagctggtcttcagggactggcctgaattgcaggatgacattccacacatcctagcccaagcacggaaaatcttgttcgtgattgacggctttgatgagctgggagccgcacctggggcgctgatcgaggacatctgcggggactgggagaagaagaagccggtgcccgtcctcctggggagtttgctgaacagggtgatgttacccaaggccgccctgctggtcaccacgcggcccagggccctgagggacctccggatcctggcggaggagccgatctacataagggtggagggcttcctggaggaggacaggagggcctatttcctgagacactttggagatgaggaccaagccatgcgtgcctttgagctaatgaggagcaacgcggccctgttccagctgggctcggcccccgcggtgtgctggatcgtgtgcacgactctgaagctgcagatggagaagggggaggacccggtccccacctgcctcacccgcacggggctgttcctgcgtttcctctgcagccggttcccgcagggcgcacagctgcggggcgcgctgcggacgctgagcctcctggccgcgcagggcctgtgggcgcagacgtccgtgcttcaccgagaggatctggaaaggctcggggtgcaggagtccgacctccgtctgttcctggacggagacatcctccgccaggacagagtctccaaaggctgctactccttcatccacctcagcttccagcagtttctcactgccctgttctacaccctggagaaggaggaggaagaggatagggacggccacgcctgggacattggggacgtacagaagctgctttccggagtagaaagactcaggaaccccgacctgatccaagcaggctactactccttcggcctcgctaacgagaagagagccaaggagttggaggccacttttggctgccggatgtcaccggacatcaaacaggaattgctgcgatgcgacataagttgtaagggtggacattcaacggtgacagacctgcaggagctgctcggctgtctgtacgagtctcaggaggaggagctggtgaaggaggtgatggctcagttcaaagaaatatccctgcacttaaatgcagtagacgttgtgccatcttcattctgcgtcaagcactgtcgaaacctgcagaaaatgtcactgcaggtaataaaggagaatctcccggagaatgtcactgcgtctgaatcagacgccgaggttgagagatcccaggatgatcagcacatgcttcctttctggacggacctttgttccatatttggatcaaataaggatctgatgggtctagcaatcaatgatagctttctcagtgcctccctagtaaggatcctgtgtgaacaaatagcctctgacacctgtcatctccagagagtggtgttcaaaaacatttccccagctgatgctcatcggaacctctgcctagctcttcgaggtcacaagactgtaacgtatctgacccttcaaggcaatgaccaggatgatatgtttcccgcattgtgtgaggtcttgagacatccagaatgtaacctgcgatatctcgggttggtgtcttgttccgctaccactcagcagtgggctgatctctccttggcccttgaagtcaaccagtccctgacgtgcgtaaacctctccgacaatgagcttctggatgagggtgctaagttgctgtacacaactttgagacaccccaagtgctttctgcagaggttgtcgtaagtctctcctctcttccagagcagctgtgctttcgatctggggccacagacgagcaatggtcatgcctgacttggctgtatggaacctctcgctgatgtgaacacctgttcccatgtttagatccaggccgatggcctgtgaattttgttcttctctcattcctattccttcataggatcaccagtgcatgatagaaggttggaaaactgtcaccttacagaagccaattgcaaggaccttgctgctgtgttggttgtcagccgggagctgacacacctgtgcttggccaagaaccccattgggaatacaggggtgaagtttctgtgtgagggcttgaggtaccccgagtgtaaactgcagaccttggtg

SEQ ID NO: 159749 - DNA, 593 bp, Homo sapiens; identical to SEQ ID NO: 159709
  Payload ID: 11255
  Gene Symbol: NLRP2
  Gene Name: NLR family, pyrin domain containing 2
  ENST ID: ENST00000621151
  CDS Start-End: 174-593

SEQ ID NO: 159750 - DNA, 3507 bp, Homo sapiens; identical to SEQ ID NO: 159702
  Payload ID: 11255
  Gene Symbol: NLRP2
  Gene Name: NLR family, pyrin domain containing 2
  ENST ID: ENST00000619885
  CDS Start-End: 143-3265

SEQ ID NO: 159751 - DNA, 3542 bp, Homo sapiens; identical to SEQ ID NO: 159722
  Payload ID: 11255
  Gene Symbol: NLRP2
  Gene Name: NLR family, pyrin domain containing 2
  ENST ID: ENST00000619454
  CDS Start-End: 112-3300

SEQ ID NO: 159752 - DNA, 577 bp, Homo sapiens; identical to SEQ ID NO: 159704
  Payload ID: 11255
  Gene Symbol: NLRP2
  Gene Name: NLR family, pyrin domain containing 2
  ENST ID: ENST00000614389
  CDS Start-End: 52-381

SEQ ID NO: 159753 - DNA, 3507 bp, Homo sapiens; identical to SEQ ID NO: 159702
  Payload ID: 11255
  Gene Symbol: NLRP2
  Gene Name: NLR family, pyrin domain containing 2
  ENST ID: ENST00000618018
  CDS Start-End: 143-3265

SEQ ID NO: 159754 - DNA, 3573 bp, Homo sapiens; identical to SEQ ID NO: 159701
  Payload ID: 11255
  Gene Symbol: NLRP2
  Gene Name: NLR family, pyrin domain containing 2
  ENST ID: ENST00000613825
  CDS Start-End: 143-3331

SEQ ID NO: 159755 - DNA, 3573 bp, Homo sapiens
  Payload ID: 11255
  Gene Symbol: NLRP2
  Gene Name: NLR family, pyrin domain containing 2
  ENST ID: ENST00000620082
  CDS Start-End: 143-3331
agtgctcagcaacgattacgccccgagggccaatcacagggctgcggccgagagagaagccttattagagctttctcaacctgcagccctcatctccgccggcgagtagggccaggtgttgggagctcccacgtgggacaagatggtgtcttcggcacagatgggcttcaacctgcaggctctcctggagcagctcagccaggatgagttgagcaagttcaagtatctgatcacgaccttctccctggcacacgagctccagaagatcccccacaaggaggtagacaaggctgatgggaagcaactggtagaaatcctcaccacccattgtgacagctactgggtggagatggcgagcctccaggtctttgaaaagatgcaccgaatggatctgtctgagagagcaaaggatgaagtcagagaagcagctttgaaatcctttaataaaaggaagcctctatcattagggataacacggaaagaacgaccacctctagacgtggacgaaatgctggagcgcttcaaaacagaagcacaagcgtttacagaaacgaaaggaaatgtcatctgcctgggtaaagaagtctttaaaggaaaaaagccagacaaagacaataggtgcaggtatatattgaagacgaagttccgggagatgtggaagagctggcctggagatagcaaagaggtccaggttatggctgagagatacaagatgctgatcccattcagcaaccccagggtgcttcccgggcccttctcatacacggtggtgctgtatggtcctgcaggccttgggaaaaccacgctggcccagaaactaatgctagactgggcagaggacaacctcatccacaaattcaaatatgcgttctacctcagctgcagggagctcagccgcctgggcccgtgcagttttgcagagctggtcttcagggactggcctgaattgcaggatgacattccacacatcctagcccaagcacggaaaatcttgttcgtgattgacggctttgatgagctgggagccgcacctggggcgctgatcgaggacatctgcggggactgggagaagaagaagccggtgcccgtcctcctggggagtttgctgaacagggtgatgttacccaaggccgccctgctggtcaccacgcggcccagggccctgagggacctccggatcctggcggaggagccgatctacataagggtggagggcttcctggaggaggacaggagggcctatttcctgagacactttggagatgaggaccaagccatgcgtgcctttgagctaatgaggagcaacgcggccctgttccagctgggctcggcccccgcggtgtgctggatcgtgtgcacgactctgaagctgcagatggagaagggggaggacccggtccccacctgcctcacccgcacggggctgttcctgcgtttcctctgcagccggttcccgcagggcgcacagctgcggggcgcgctgcggacgctgagcctcctggccgcgcagggcctgtgggcgcagacgtccgtgcttcaccgagaggatctggaaaggctcggggtgcaggagtccgacctccgtctgttcctggacggagacatcctccgccaggacagagtctccaaaggctgctactccttcatccacctcagcttccagcagtttctcactgccctgttctacaccctggagaaggaggaggaagaggatagggacggccacgcctgggacattggggacgtacagaagctgctttccggagtagaaagactcaggaaccccgacctgatccaagcaggctactactccttcggcctcgctaacgagaagagagccaaggagttggaggccacttttggctgccggatgtcaccggacatcaaacaggaattgctgcgatgcgacataagttgtaagggtggacattcaacggtgacagacctgcaggagctgctcggctgtctgtacgagtctcaggaggaggagctggtgaaggaggtgatggctcagttcaaagaaatatccctgcacttaaatgcagtagacgttgtgccatcttcattctgcgtcaagcactgtcgaaacctgcagaaaatgtcactgcaggtaataaaggagaatctcccggagaatgtcactgcgtctgaatcagacgccgaggttgagagatcccaggatgatcagcacatgcttcctttctggacggacctttgttccatatttggatcaaataaggatctgatgggtctagcaatcaatgatagctttctcagtgcctccctagtaaggatcctgtgtgaacaaatagcctctgacacctgtcatctccagagagtggtgttcaaaaacatttccccagctgatgctcatcggaacctctgcctagctcttcgaggtcacaagactgtaacgtatctgacccttcaaggcaatgaccaggatgatatgtttcccgcattgtgtgaggtcttgagacatccagaatgtaacctgcgatatctcgggttggtgtcttgttccgctaccactcagcagtgggctgatctctccttggcccttgaagtcaaccagtccctgacgtgcgtaaacctctccgacaatgagcttctggatgagggtgctaagttgctgtacacaactttgagacaccccaagtgctttctgcagaggttgtcgttggaaaactgtcaccttacagaagccaattgcaaggaccttgctgctgtgttggttgtcagccgggagctgacacacctgtgcttggccaagaaccccattgggaatacaggggtgaagtttctgtgtgagggcttgaggtaccccgagtgtaaactgcagaccttggtgctttggaactgcgacataactagcgatggctgctgcgatctcacaaagcttctccaagaaaaatcaagcctgttgtgtttggatctggggctgaatcacataggagttaagggaatgaagttcctgtgtgaggctttgaggaaaccactgtgcaacttgagatgtctgtggttgtggggatgttccatccctccgttcagttgtgaagacctctgctctgccctcagctgcaaccagagcctcgtcactctggacctgggtcagaatcccttggggtctagtggagtgaagatgctgtttgaaaccttgacatgttccagtggcaccctccggacactcaggttgaaaatcgatgactttaatgatgaactcaataagctgctggaagaaatagaagaaaaaaacccacaactgattattgatactgagaaacatcatccctgggcagaaaggccttcttctcatgacttcatgatctgaatccccccgagtcattcattctccatgaagtcatcgattttccaggtgttggtgaactgcctgtgactcctctcctccccggcccctacccctcagggataatgagttcattgctgggctagatgttttagccatgattctgcctctgttttatacctgcacacatccttatctttgttacatatgaaatatctgtatcacgggtatattgagagaaataaaggtgagagcattcacaaatg

SEQ ID NO: 159756 - DNA, 3504 bp, Homo sapiens; identical to SEQ ID NO: 159717
  Payload ID: 11255
  Gene Symbol: NLRP2
  Gene Name: NLR family, pyrin domain containing 2
  ENST ID: ENST00000611642
  CDS Start-End: 143-3262

SEQ ID NO: 159757 - DNA, 3422 bp, Homo sapiens; identical to SEQ ID NO: 159698
  Payload ID: 11255
  Gene Symbol: NLRP2
  Gene Name: NLR family, pyrin domain containing 2
  Uniprot ID: Q9NX02
  ENST ID: ENST00000613485
  CDS Start-End: 60-3182

SEQ ID NO: 159758 - DNA, 3542 bp, Homo sapiens; identical to SEQ ID NO: 159722
  Payload ID: 11255
  Gene Symbol: NLRP2
  Gene Name: NLR family, pyrin domain containing 2
  ENST ID: ENST00000611679
  CDS Start-End: 112-3300

SEQ ID NO: 159759 - DNA, 3420 bp, Homo sapiens; identical to SEQ ID NO: 159699
  Payload ID: 11255
  Gene Symbol: NLRP2
  Gene Name: NLR family, pyrin domain containing 2
  Uniprot ID: Q9NX02
  ENST ID: ENST00000621057
  CDS Start-End: 67-3183

SEQ ID NO: 159760 - DNA, 405 bp, Homo sapiens; identical to SEQ ID NO: 159712
  Payload ID: 11255
  Gene Symbol: NLRP2
  Gene Name: NLR family, pyrin domain containing 2
  ENST ID: ENST00000610410
  CDS Start-End: 1-28

SEQ ID NO: 159761 - DNA, 3411 bp, Homo sapiens; identical to SEQ ID NO: 159700
  Payload ID: 11255
  Gene Symbol: NLRP2
  Gene Name: NLR family, pyrin domain containing 2
  Uniprot ID: Q9NX02
  ENST ID: ENST00000622773
  CDS Start-End: 112-3231

SEQ ID NO: 159762 - DNA, 576 bp, Homo sapiens; identical to SEQ ID NO: 159711
  Payload ID: 11255
  Gene Symbol: NLRP2
  Gene Name: NLR family, pyrin domain containing 2
  ENST ID: ENST00000611476
  CDS Start-End: 171-576

SEQ ID NO: 159763 - DNA, 707 bp, Homo sapiens; identical to SEQ ID NO: 159707
  Payload ID: 11255
  Gene Symbol: NLRP2
  Gene Name: NLR family, pyrin domain containing 2
  ENST ID: ENST00000617992
  CDS Start-End: 1-267

SEQ ID NO: 159764 - DNA, 3194 bp, Homo sapiens
  Payload ID: 11256
  Gene Symbol: NLRP2P
  Gene Name: NLR family, pyrin domain containing 2 pseudogene
  Uniprot ID: P0DMW2
  ENST ID: ENST00000434992
  CDS Start-End: 1-138
atggtgtcttctgcacagctggacttcaacctgcaggctcttctgggacagctcagccaggatgacttgtgcaagttcaagtctctgatcaggaccgtctccctgggaaatgagctgcaaaagatcccccagacataggtagacaaggctgatgggaagcaactggcagaaatcatcaccagccattgccacagctactggatgaagatagagaccatccaggtctttgaaaagatgcaccgagcggatctgtctgagaaagtaaaggatgaactcagagaagacactttgaaatcaagcctgtatcattagggaaaacagggaaagaagagccaaaacctatagacctgaaacaaatgctggggcgtttcgaagcagaagcactagagtttatagaaacggaggaagatgtcaccagcctaagagaagctaaagaagtcttgaaaggagaaaagccaggtaaagaggataggtacaggagtatattgaagacgaagttctggcaaatgtggaaaacctggcctggagacctcaaagtggtccatattatggctcagagatacaagatgctgatcccgttcagcaaccccagggtgcttcccgggccctgcccacacacggtggtgctgcatggtcctgcgggccttgggaaaaccacgctggccaagaaattaatgctggactgggcagaggacaacctcagccagaaatttagataggctttctacctcacctgcaaggagctcatctgcctgggcccgtgcagttttgcagagctggtcttcaggaactggcctgaattgcaggatgacattccaaacatcctagcccaagcacagaaaatcctgttcgtggtcgacggctttgatgagctgggagccccacctggggcactgatctaggacatctgtggggactgggagaagcagaagccggtgccggtcttcttggggaggttactgaagaggaagattttacccagggccgccgtgctggtcaccacgtggcctgcgggccctgagagacctccggctgttggtggagcggccgatctatgtaagggtggaggagttcctggagaaggacaggagggcatatttcctgagacactttggagacgaggaccaagccatgtgtgcctttgagctgatgagaagaaacgcggccctgttccagcctgtctcggcacccatggtgtgctggatcatgtgcatgagtctgaagctgcagaggttagaaggggaaggacccgccccacccgcacggggctgttcctgcgcttcctttgcggccggttcccgcagggcgcacagctctggggcgtgctgcgggcgctgagcctcctggcggcacagggcctgtgggcgcagatgtcagtgttccgtggagaggacttggcgaggctcggggtgcaggagttcaacatccgcccgtccctggacagagacatcctccgccaggacatagtctctaaaggctgctattcctacatccacctcagcttccagcagtttttcactgtgctgttccacgccctggagaaggaggaggaggaggaggaggaggacaaggacggccacgcctgggacaatggagacgtgcagaagctgttttctagagaagaaagactcaagaaccccgacctgatccaagcaagacacttcttattcggcttcgccaacgagaagaaagccaaggagttggagaccactttgggctgcctgatgtcaccggagatcaaaaaggaattactgtgatgagagataaattgtgaaaaggttggacactcaacaatgatgaacccgaaggagctcttgtgctgtctgtacgagtctcaggaggaggagctggtgaagggagtgatggctccgttcaaagaaatatccctgcacttaaatgcagtagacattatgctgttttcaatctgcctcaagcattgtcgaaacttgcagaaaatgccactgcaggcagcaaaggcaaagctcccagagaatgtcactgtgtctgaatcagatgctgaagttgagagatcccaggatgatcaacacatgcttcctttctggaccgacctttgttccatatttggctcaaataaggatctgatcattctagaaatcaataatagctttcttggtgccacattagtaaggatcctgtgtgaacaaatagcttctgacacctgtcgtctccagagagtgatgttcaaaaacatttcaccagctgatgcttatcggaacctctgcctagctctttgaggtcacaagactgtaagatatctgacccttcaaggcaatgaccagaatgatatgcttcctgcattgtgtaaggtcttgagacactcaaaatgtaacctgcaatatctcgggttggtgtctttttccaccaccacttagcaatgggctgatctctccttggcccttgaagtcaaccagtccctgacatgtgtaaacctctctcacaatgagctcttggatgagggtgccaagttgctgtacacaactttgagacacccaaaatgcttcctgccgaggttgttgttggaaaactgtcactttatagaaggcaattgcaagaactttgctgctgttttggttgtcagcggggagctgacacacctgtgcttggccaagaaccccccactcggggatacatgggtgatgtttctgtgtaagggtttgagttacccccattgtaaactacagaccctggtgctgtgggactgcgacataactagcaatggctgctgttatctcgcagagcttctccaagaaaaatcaagcctaatgtgcttggatctgggactgaatcacataggagttactggagtgaagctcctatgtgaggctttgaagaaaccactgtgtaacttgagatgtctgtggttgtgggggtgttccatccctctgttcagttgtgaggacctctgctctgtgctcagctgcaaccacagcctcgtcgttctggacctgagccagaatcccttggggtctagtggagtaaagatgctgtttgaaaccttgacacatccaaattgcaccctccagacactcaggttgaaaatagatgactttaatgttgaactcgataagctgctggaagaaatagaagaaaacaacccacaactgcctgctgataactgagaaacatgatcctttgggggggaaaaaaggctttcttttcattacttcattatc

SEQ ID NO: 159765 - DNA, 3828 bp, Homo sapiens
  Payload ID: 11257
  Gene Symbol: NLRP3
  Gene Name: NLR family, pyrin domain containing 3
  Uniprot ID: Q96P20
  ENST ID: ENST00000348069
  CDS Start-End: 747-3515
gtagatgaggaaactgaagttgaggaatagtgaagagtttgtccaatgtcatagccccgtaatcaacgggacaaaaattttcttgctgatgggtcaagatggcatcgtgaagtggttgttcaccgtaaactgtaatacaatcctgtttatggatttgtttgcatatttttccctccatagggaaacctttcttccatggctcaggacacactcctggatcgagccaacaggagaactttctggtaagcatttggctaacttttttttttttgagatggagtcttgctgtgtcgcctaggctggagtgcagtggcgtgatcttggctcactgcagcctccacttcccgggttcaatcaattctcctacctcaacttcctgagtagctgggattacaggcgcccgccaccacacccggctcatttttgtacttttagtagagacacagttttgccatgttggccaggctggtcttgaattcctcagctcaggtgatctgcctgccttggcctctcaaagtgctgggattacaggcgtgagccactgtgcccggccttggctaacttttcaaaattaaagattttgacttgttacagtcatgtgacatttttttctttctgtttgctgagtttttgataatttatatctctcaaagtggagactttaaaaaagactcatccgtgtgccgtgttcactgcctggtatcttagtgtggaccgaagcctaaggaccctgaaaacagctgcagatgaagatggcaagcacccgctgcaagctggccaggtacctggaggacctggaggatgtggacttgaagaaatttaagatgcacttagaggactatcctccccagaagggctgcatccccctcccgaggggtcagacagagaaggcagaccatgtggatctagccacgctaatgatcgacttcaatggggaggagaaggcgtgggccatggccgtgtggatcttcgctgcgatcaacaggagagacctttatgagaaagcaaaaagagatgagccgaagtggggttcagataatgcacgtgtttcgaatcccactgtgatatgccaggaagacagcattgaagaggagtggatgggtttactggagtacctttcgagaatctctatttgtaaaatgaagaaagattaccgtaagaagtacagaaagtacgtgagaagcagattccagtgcattgaagacaggaatgcccgtctgggtgagagtgtgagcctcaacaaacgctacacacgactgcgtctcatcaaggagcaccggagccagcaggagagggagcaggagcttctggccatcggcaagaccaagacgtgtgagagccccgtgagtcccattaagatggagttgctgtttgaccccgatgatgagcattctgagcctgtgcacaccgtggtgttccagggggcggcagggattgggaaaacaatcctggccaggaagatgatgttggactgggcgtcggggacactctaccaagacaggtttgactatctgttctatatccactgtcgagaggtgagccttgtgacacagaggagcctgggggacctgatcatgagctgctgccccgacccaaacccacccatccacaagatcgtgagaaaaccctccagaatcctcttcctcatggacggcttcgatgagctgcaaggtgcctttgacgagcacataggaccgctctgcactgactggcagaaggccgagcggggagacattctcctgagcagcctcatcagaaagaagctgcttcccgaggcctctctgctcatcaccacgagacctgtggccctggagaaactgcagcacttgctggaccatcctcggcatgtggagatcctgggtttctccgaggccaaaaggaaagagtacttcttcaagtacttctctgatgaggcccaagccagggcagccttcagtctgattcaggagaacgaggtcctcttcaccatgtgcttcatccccctggtctgctggatcgtgtgcactggactgaaacagcagatggagagtggcaagagccttgcccagacatccaagaccaccaccgcggtgtacgtcttcttcctttccagtttgctgcagccccggggagggagccaggagcacggcctctgcgcccacctctgggggctctgctctttggctgcagatggaatctggaaccagaaaatcctgtttgaggagtccgacctcaggaatcatggactgcagaaggcggatgtgtctgctttcctgaggatgaacctgttccaaaaggaagtggactgcgagaagttctacagcttcatccacatgactttccaggagttctttgccgccatgtactacctgctggaagaggaaaaggaaggaaggacgaacgttccagggagtcgtttgaagcttcccagccgagacgtgacagtccttctggaaaactatggcaaattcgaaaaggggtatttgatttttgttgtacgtttcctctttggcctggtaaaccaggagaggacctcctacttggagaagaaattaagttgcaagatctctcagcaaatcaggctggagctgctgaaatggattgaagtgaaagccaaagctaaaaagctgcagatccagcccagccagctggaattgttctactgtttgtacgagatgcaggaggaggacttcgtgcaaagggccatggactatttccccaagattgagatcaatctctccaccagaatggaccacatggtttcttccttttgcattgagaactgtcatcgggtggagtcactgtccctggggtttctccataacatgcccaaggaggaagaggaggaggaaaaggaaggccgacaccttgatatggtgcagtgtgtcctcccaagctcctctcatgctgcctgttctcatgggttggggcgctgtggcctctcgcatgagtgctgcttcgacatctccttggtcctcagcagcaaccagaagctggtggagctggacctgagtgacaacgccctcggtgacttcggaatcagacttctgtgtgtgggactgaagcacctgttgtgcaatctgaagaagctctggttggtgaattctggccttacgtcagtctgttgttcagctttgtcctcggtactcagcactaatcagaatctcacgcacctttacctgcgaggcaacactctcggagacaaggggatcaaactactctgtgagggactcttgcaccccgactgcaagcttcaggtgttggaattagacaactgcaacctcacgtcacactgctgctgggatctttccacacttctgacctccagccagagcctgcgaaagctgagcctgggcaacaatgacctgggcgacctgggggtcatgatgttctgtgaagtgctgaaacagcagagctgcctcctgcagaacctggggttgtctgaaatgtatttcaattatgagacaaaaagtgcgttagaaacacttcaagaagaaaagcctgagctgaccgtcgtctttgagccttcttggtaggagtggaaacggggctgccagacgccagtgttctccggtccctccagctgggggccctcaggtggagagagctgcgatccatccaggccaagaccacagctctgtgatccttccggtggagtgtcggagaagagagcttgccgacgatgccttcctgtgcagagcttgggcatctcctttacgccagggtgaggaagacaccaggacaatgacagcatcgggtgttgttgtcatcacagcgcctcagttagaggatgttcctcttggtgacctcatgtaattagctcattcaataaagcactttctttatttt

SEQ ID NO: 159766 - DNA, 4170 bp, Homo sapiens
  Payload ID: 11257
  Gene Symbol: NLRP3
  Gene Name: NLR family, pyrin domain containing 3
  Uniprot ID: Q96P20
  ENST ID: ENST00000336119
  CDS Start-End: 747-3857
gtagatgaggaaactgaagttgaggaatagtgaagagtttgtccaatgtcatagccccgtaatcaacgggacaaaaattttcttgctgatgggtcaagatggcatcgtgaagtggttgttcaccgtaaactgtaatacaatcctgtttatggatttgtttgcatatttttccctccatagggaaacctttcttccatggctcaggacacactcctggatcgagccaacaggagaactttctggtaagcatttggctaacttttttttttttgagatggagtcttgctgtgtcgcctaggctggagtgcagtggcgtgatcttggctcactgcagcctccacttcccgggttcaatcaattctcctacctcaacttcctgagtagctgggattacaggcgcccgccaccacacccggctcatttttgtacttttagtagagacacagttttgccatgttggccaggctggtcttgaattcctcagctcaggtgatctgcctgccttggcctctcaaagtgctgggattacaggcgtgagccactgtgcccggccttggctaacttttcaaaattaaagattttgacttgttacagtcatgtgacatttttttctttctgtttgctgagtttttgataatttatatctctcaaagtggagactttaaaaaagactcatccgtgtgccgtgttcactgcctggtatcttagtgtggaccgaagcctaaggaccctgaaaacagctgcagatgaagatggcaagcacccgctgcaagctggccaggtacctggaggacctggaggatgtggacttgaagaaatttaagatgcacttagaggactatcctccccagaagggctgcatccccctcccgaggggtcagacagagaaggcagaccatgtggatctagccacgctaatgatcgacttcaatggggaggagaaggcgtgggccatggccgtgtggatcttcgctgcgatcaacaggagagacctttatgagaaagcaaaaagagatgagccgaagtggggttcagataatgcacgtgtttcgaatcccactgtgatatgccaggaagacagcattgaagaggagtggatgggtttactggagtacctttcgagaatctctatttgtaaaatgaagaaagattaccgtaagaagtacagaaagtacgtgagaagcagattccagtgcattgaagacaggaatgcccgtctgggtgagagtgtgagcctcaacaaacgctacacacgactgcgtctcatcaaggagcaccggagccagcaggagagggagcaggagcttctggccatcggcaagaccaagacgtgtgagagccccgtgagtcccattaagatggagttgctgtttgaccccgatgatgagcattctgagcctgtgcacaccgtggtgttccagggggcggcagggattgggaaaacaatcctggccaggaagatgatgttggactgggcgtcggggacactctaccaagacaggtttgactatctgttctatatccactgtcgagaggtgagccttgtgacacagaggagcctgggggacctgatcatgagctgctgccccgacccaaacccacccatccacaagatcgtgagaaaaccctccagaatcctcttcctcatggacggcttcgatgagctgcaaggtgcctttgacgagcacataggaccgctctgcactgactggcagaaggccgagcggggagacattctcctgagcagcctcatcagaaagaagctgcttcccgaggcctctctgctcatcaccacgagacctgtggccctggagaaactgcagcacttgctggaccatcctcggcatgtggagatcctgggtttctccgaggccaaaaggaaagagtacttcttcaagtacttctctgatgaggcccaagccagggcagccttcagtctgattcaggagaacgaggtcctcttcaccatgtgcttcatccccctggtctgctggatcgtgtgcactggactgaaacagcagatggagagtggcaagagccttgcccagacatccaagaccaccaccgcggtgtacgtcttcttcctttccagtttgctgcagccccggggagggagccaggagcacggcctctgcgcccacctctgggggctctgctctttggctgcagatggaatctggaaccagaaaatcctgtttgaggagtccgacctcaggaatcatggactgcagaaggcggatgtgtctgctttcctgaggatgaacctgttccaaaaggaagtggactgcgagaagttctacagcttcatccacatgactttccaggagttctttgccgccatgtactacctgctggaagaggaaaaggaaggaaggacgaacgttccagggagtcgtttgaagcttcccagccgagacgtgacagtccttctggaaaactatggcaaattcgaaaaggggtatttgatttttgttgtacgtttcctctttggcctggtaaaccaggagaggacctcctacttggagaagaaattaagttgcaagatctctcagcaaatcaggctggagctgctgaaatggattgaagtgaaagccaaagctaaaaagctgcagatccagcccagccagctggaattgttctactgtttgtacgagatgcaggaggaggacttcgtgcaaagggccatggactatttccccaagattgagatcaatctctccaccagaatggaccacatggtttcttccttttgcattgagaactgtcatcgggtggagtcactgtccctggggtttctccataacatgcccaaggaggaagaggaggaggaaaaggaaggccgacaccttgatatggtgcagtgtgtcctcccaagctcctctcatgctgcctgttctcatggattggtgaacagccacctcacttccagtttttgccggggcctcttttcagttctgagcaccagccagagtctaactgaattggacctcagtgacaattctctgggggacccagggatgagagtgttgtgtgaaacgctccagcatcctggctgtaacattcggagattgtggttggggcgctgtggcctctcgcatgagtgctgcttcgacatctccttggtcctcagcagcaaccagaagctggtggagctggacctgagtgacaacgccctcggtgacttcggaatcagacttctgtgtgtgggactgaagcacctgttgtgcaatctgaagaagctctggttggtcagctgctgcctcacatcagcatgttgtcaggatcttgcatcagtattgagcaccagccattccctgaccagactctatgtgggggagaatgccttgggagactcaggagtcgcaattttatgtgaaaaagccaagaatccacagtgtaacctgcagaaactggggttggtgaattctggccttacgtcagtctgttgttcagctttgtcctcggtactcagcactaatcagaatctcacgcacctttacctgcgaggcaacactctcggagacaaggggatcaaactactctgtgagggactcttgcaccccgactgcaagcttcaggtgttggaattagacaactgcaacctcacgtcacactgctgctgggatctttccacacttctgacctccagccagagcctgcgaaagctgagcctgggcaacaatgacctgggcgacctgggggtcatgatgttctgtgaagtgctgaaacagcagagctgcctcctgcagaacctggggttgtctgaaatgtatttcaattatgagacaaaaagtgcgttagaaacacttcaagaagaaaagcctgagctgaccgtcgtctttgagccttcttggtaggagtggaaacggggctgccagacgccagtgttctccggtccctccagctgggggccctcaggtggagagagctgcgatccatccaggccaagaccacagctctgtgatccttccggtggagtgtcggagaagagagcttgccgacgatgccttcctgtgcagagcttgggcatctcctttacgccagggtgaggaagacaccaggacaatgacagcatcgggtgttgttgtcatcacagcgcctcagttagaggatgttcctcttggtgacctcatgtaattagctcattcaataaagcactttctttatttt

SEQ ID NO: 159767 - DNA, 3996 bp, Homo sapiens
  Payload ID: 11257
  Gene Symbol: NLRP3
  Gene Name: NLR family, pyrin domain containing 3
  Uniprot ID: Q96P20
  ENST ID: ENST00000366496
  CDS Start-End: 744-3683
gatgaggaaactgaagttgaggaatagtgaagagtttgtccaatgtcatagccccgtaatcaacgggacaaaaattttcttgctgatgggtcaagatggcatcgtgaagtggttgttcaccgtaaactgtaatacaatcctgtttatggatttgtttgcatatttttccctccatagggaaacctttcttccatggctcaggacacactcctggatcgagccaacaggagaactttctggtaagcatttggctaacttttttttttttgagatggagtcttgctgtgtcgcctaggctggagtgcagtggcgtgatcttggctcactgcagcctccacttcccgggttcaatcaattctcctacctcaacttcctgagtagctgggattacaggcgcccgccaccacacccggctcatttttgtacttttagtagagacacagttttgccatgttggccaggctggtcttgaattcctcagctcaggtgatctgcctgccttggcctctcaaagtgctgggattacaggcgtgagccactgtgcccggccttggctaacttttcaaaattaaagattttgacttgttacagtcatgtgacatttttttctttctgtttgctgagtttttgataatttatatctctcaaagtggagactttaaaaaagactcatccgtgtgccgtgttcactgcctggtatcttagtgtggaccgaagcctaaggaccctgaaaacagctgcagatgaagatggcaagcacccgctgcaagctggccaggtacctggaggacctggaggatgtggacttgaagaaatttaagatgcacttagaggactatcctccccagaagggctgcatccccctcccgaggggtcagacagagaaggcagaccatgtggatctagccacgctaatgatcgacttcaatggggaggagaaggcgtgggccatggccgtgtggatcttcgctgcgatcaacaggagagacctttatgagaaagcaaaaagagatgagccgaagtggggttcagataatgcacgtgtttcgaatcccactgtgatatgccaggaagacagcattgaagaggagtggatgggtttactggagtacctttcgagaatctctatttgtaaaatgaagaaagattaccgtaagaagtacagaaagtacgtgagaagcagattccagtgcattgaagacaggaatgcccgtctgggtgagagtgtgagcctcaacaaacgctacacacgactgcgtctcatcaaggagcaccggagccagcaggagagggagcaggagcttctggccatcggcaagaccaagacgtgtgagagccccgtgagtcccattaagatggagttgctgtttgaccccgatgatgagcattctgagcctgtgcacaccgtggtgttccagggggcggcagggattgggaaaacaatcctggccaggaagatgatgttggactgggcgtcggggacactctaccaagacaggtttgactatctgttctatatccactgtcgagaggtgagccttgtgacacagaggagcctgggggacctgatcatgagctgctgccccgacccaaacccacccatccacaagatcgtgagaaaaccctccagaatcctcttcctcatggacggcttcgatgagctgcaaggtgcctttgacgagcacataggaccgctctgcactgactggcagaaggccgagcggggagacattctcctgagcagcctcatcagaaagaagctgcttcccgaggcctctctgctcatcaccacgagacctgtggccctggagaaactgcagcacttgctggaccatcctcggcatgtggagatcctgggtttctccgaggccaaaaggaaagagtacttcttcaagtacttctctgatgaggcccaagccagggcagccttcagtctgattcaggagaacgaggtcctcttcaccatgtgcttcatccccctggtctgctggatcgtgtgcactggactgaaacagcagatggagagtggcaagagccttgcccagacatccaagaccaccaccgcggtgtacgtcttcttcctttccagtttgctgcagccccggggagggagccaggagcacggcctctgcgcccacctctgggggctctgctctttggctgcagatggaatctggaaccagaaaatcctgtttgaggagtccgacctcaggaatcatggactgcagaaggcggatgtgtctgctttcctgaggatgaacctgttccaaaaggaagtggactgcgagaagttctacagcttcatccacatgactttccaggagttctttgccgccatgtactacctgctggaagaggaaaaggaaggaaggacgaacgttccagggagtcgtttgaagcttcccagccgagacgtgacagtccttctggaaaactatggcaaattcgaaaaggggtatttgatttttgttgtacgtttcctctttggcctggtaaaccaggagaggacctcctacttggagaagaaattaagttgcaagatctctcagcaaatcaggctggagctgctgaaatggattgaagtgaaagccaaagctaaaaagctgcagatccagcccagccagctggaattgttctactgtttgtacgagatgcaggaggaggacttcgtgcaaagggccatggactatttccccaagattgagatcaatctctccaccagaatggaccacatggtttcttccttttgcattgagaactgtcatcgggtggagtcactgtccctggggtttctccataacatgcccaaggaggaagaggaggaggaaaaggaaggccgacaccttgatatggtgcagtgtgtcctcccaagctcctctcatgctgcctgttctcatggattggtgaacagccacctcacttccagtttttgccggggcctcttttcagttctgagcaccagccagagtctaactgaattggacctcagtgacaattctctgggggacccagggatgagagtgttgtgtgaaacgctccagcatcctggctgtaacattcggagattgtggttggggcgctgtggcctctcgcatgagtgctgcttcgacatctccttggtcctcagcagcaaccagaagctggtggagctggacctgagtgacaacgccctcggtgacttcggaatcagacttctgtgtgtgggactgaagcacctgttgtgcaatctgaagaagctctggttggtgaattctggccttacgtcagtctgttgttcagctttgtcctcggtactcagcactaatcagaatctcacgcacctttacctgcgaggcaacactctcggagacaaggggatcaaactactctgtgagggactcttgcaccccgactgcaagcttcaggtgttggaattagacaactgcaacctcacgtcacactgctgctgggatctttccacacttctgacctccagccagagcctgcgaaagctgagcctgggcaacaatgacctgggcgacctgggggtcatgatgttctgtgaagtgctgaaacagcagagctgcctcctgcagaacctggggttgtctgaaatgtatttcaattatgagacaaaaagtgcgttagaaacacttcaagaagaaaagcctgagctgaccgtcgtctttgagccttcttggtaggagtggaaacggggctgccagacgccagtgttctccggtccctccagctgggggccctcaggtggagagagctgcgatccatccaggccaagaccacagctctgtgatccttccggtggagtgtcggagaagagagcttgccgacgatgccttcctgtgcagagcttgggcatctcctttacgccagggtgaggaagacaccaggacaatgacagcatcgggtgttgttgtcatcacagcgcctcagttagaggatgttcctcttggtgacctcatgtaattagctcattcaataaagcactttctttatttt

SEQ ID NO: 159768 - DNA, 4318 bp, Homo sapiens
  Payload ID: 11257
  Gene Symbol: NLRP3
  Gene Name: NLR family, pyrin domain containing 3
  Uniprot ID: Q96P20
  ENST ID: ENST00000366497
  CDS Start-End: 781-3720
gcatttcctctctagctgttcctgaggctggcatctggatgaggaaactgaagttgaggaatagtgaagagtttgtccaatgtcatagccccgtaatcaacgggacaaaaattttcttgctgatgggtcaagatggcatcgtgaagtggttgttcaccgtaaactgtaatacaatcctgtttatggatttgtttgcatatttttccctccatagggaaacctttcttccatggctcaggacacactcctggatcgagccaacaggagaactttctggtaagcatttggctaacttttttttttttgagatggagtcttgctgtgtcgcctaggctggagtgcagtggcgtgatcttggctcactgcagcctccacttcccgggttcaatcaattctcctacctcaacttcctgagtagctgggattacaggcgcccgccaccacacccggctcatttttgtacttttagtagagacacagttttgccatgttggccaggctggtcttgaattcctcagctcaggtgatctgcctgccttggcctctcaaagtgctgggattacaggcgtgagccactgtgcccggccttggctaacttttcaaaattaaagattttgacttgttacagtcatgtgacatttttttctttctgtttgctgagtttttgataatttatatctctcaaagtggagactttaaaaaagactcatccgtgtgccgtgttcactgcctggtatcttagtgtggaccgaagcctaaggaccctgaaaacagctgcagatgaagatggcaagcacccgctgcaagctggccaggtacctggaggacctggaggatgtggacttgaagaaatttaagatgcacttagaggactatcctccccagaagggctgcatccccctcccgaggggtcagacagagaaggcagaccatgtggatctagccacgctaatgatcgacttcaatggggaggagaaggcgtgggccatggccgtgtggatcttcgctgcgatcaacaggagagacctttatgagaaagcaaaaagagatgagccgaagtggggttcagataatgcacgtgtttcgaatcccactgtgatatgccaggaagacagcattgaagaggagtggatgggtttactggagtacctttcgagaatctctatttgtaaaatgaagaaagattaccgtaagaagtacagaaagtacgtgagaagcagattccagtgcattgaagacaggaatgcccgtctgggtgagagtgtgagcctcaacaaacgctacacacgactgcgtctcatcaaggagcaccggagccagcaggagagggagcaggagcttctggccatcggcaagaccaagacgtgtgagagccccgtgagtcccattaagatggagttgctgtttgaccccgatgatgagcattctgagcctgtgcacaccgtggtgttccagggggcggcagggattgggaaaacaatcctggccaggaagatgatgttggactgggcgtcggggacactctaccaagacaggtttgactatctgttctatatccactgtcgagaggtgagccttgtgacacagaggagcctgggggacctgatcatgagctgctgccccgacccaaacccacccatccacaagatcgtgagaaaaccctccagaatcctcttcctcatggacggcttcgatgagctgcaaggtgcctttgacgagcacataggaccgctctgcactgactggcagaaggccgagcggggagacattctcctgagcagcctcatcagaaagaagctgcttcccgaggcctctctgctcatcaccacgagacctgtggccctggagaaactgcagcacttgctggaccatcctcggcatgtggagatcctgggtttctccgaggccaaaaggaaagagtacttcttcaagtacttctctgatgaggcccaagccagggcagccttcagtctgattcaggagaacgaggtcctcttcaccatgtgcttcatccccctggtctgctggatcgtgtgcactggactgaaacagcagatggagagtggcaagagccttgcccagacatccaagaccaccaccgcggtgtacgtcttcttcctttccagtttgctgcagccccggggagggagccaggagcacggcctctgcgcccacctctgggggctctgctctttggctgcagatggaatctggaaccagaaaatcctgtttgaggagtccgacctcaggaatcatggactgcagaaggcggatgtgtctgctttcctgaggatgaacctgttccaaaaggaagtggactgcgagaagttctacagcttcatccacatgactttccaggagttctttgccgccatgtactacctgctggaagaggaaaaggaaggaaggacgaacgttccagggagtcgtttgaagcttcccagccgagacgtgacagtccttctggaaaactatggcaaattcgaaaaggggtatttgatttttgttgtacgtttcctctttggcctggtaaaccaggagaggacctcctacttggagaagaaattaagttgcaagatctctcagcaaatcaggctggagctgctgaaatggattgaagtgaaagccaaagctaaaaagctgcagatccagcccagccagctggaattgttctactgtttgtacgagatgcaggaggaggacttcgtgcaaagggccatggactatttccccaagattgagatcaatctctccaccagaatggaccacatggtttcttccttttgcattgagaactgtcatcgggtggagtcactgtccctggggtttctccataacatgcccaaggaggaagaggaggaggaaaaggaaggccgacaccttgatatggtgcagtgtgtcctcccaagctcctctcatgctgcctgttctcatggattggtgaacagccacctcacttccagtttttgccggggcctcttttcagttctgagcaccagccagagtctaactgaattggacctcagtgacaattctctgggggacccagggatgagagtgttgtgtgaaacgctccagcatcctggctgtaacattcggagattgtggttggggcgctgtggcctctcgcatgagtgctgcttcgacatctccttggtcctcagcagcaaccagaagctggtggagctggacctgagtgacaacgccctcggtgacttcggaatcagacttctgtgtgtgggactgaagcacctgttgtgcaatctgaagaagctctggttggtgaattctggccttacgtcagtctgttgttcagctttgtcctcggtactcagcactaatcagaatctcacgcacctttacctgcgaggcaacactctcggagacaaggggatcaaactactctgtgagggactcttgcaccccgactgcaagcttcaggtgttggaattagacaactgcaacctcacgtcacactgctgctgggatctttccacacttctgacctccagccagagcctgcgaaagctgagcctgggcaacaatgacctgggcgacctgggggtcatgatgttctgtgaagtgctgaaacagcagagctgcctcctgcagaacctggggttgtctgaaatgtatttcaattatgagacaaaaagtgcgttagaaacacttcaagaagaaaagcctgagctgaccgtcgtctttgagccttcttggtaggagtggaaacggggctgccagacgccagtgttctccggtccctccagctgggggccctcaggtggagagagctgcgatccatccaggccaagaccacagctctgtgatccttccggtggagtgtcggagaagagagcttgccgacgatgccttcctgtgcagagcttgggcatctcctttacgccagggtgaggaagacaccaggacaatgacagcatcgggtgttgttgtcatcacagcgcctcagttagaggatgttcctcttggtgacctcatgtaattagctcattcaataaagcactttctttatttttctcttctctgtctaactttctttttcctatcttttttcttctttgttctgtttacttttgctcatatcatcattcccgctatctttctattaactgaccataacacagaactagttgactatatattatgttgaaattttatggcagctatttatttatttaaattttttgtaacagttttgttttctaataagaaaaatccatgctttttgtagctggttgaaaattcaggaatatgtaaaactttttggtatttaattaaattgattccttttcttaatttt

SEQ ID NO: 159769 - DNA, 2940 bp, Homo sapiens
  Payload ID: 11257
  Gene Symbol: NLRP3
  Gene Name: NLR family, pyrin domain containing 3
  Uniprot ID: Q96P20
  ENST ID: ENST00000391827
  CDS Start-End: 1-2940
atgaagatggcaagcacccgctgcaagctggccaggtacctggaggacctggaggatgtggacttgaagaaatttaagatgcacttagaggactatcctccccagaagggctgcatccccctcccgaggggtcagacagagaaggcagaccatgtggatctagccacgctaatgatcgacttcaatggggaggagaaggcgtgggccatggccgtgtggatcttcgctgcgatcaacaggagagacctttatgagaaagcaaaaagagatgagccgaagtggggttcagataatgcacgtgtttcgaatcccactgtgatatgccaggaagacagcattgaagaggagtggatgggtttactggagtacctttcgagaatctctatttgtaaaatgaagaaagattaccgtaagaagtacagaaagtacgtgagaagcagattccagtgcattgaagacaggaatgcccgtctgggtgagagtgtgagcctcaacaaacgctacacacgactgcgtctcatcaaggagcaccggagccagcaggagagggagcaggagcttctggccatcggcaagaccaagacgtgtgagagccccgtgagtcccattaagatggagttgctgtttgaccccgatgatgagcattctgagcctgtgcacaccgtggtgttccagggggcggcagggattgggaaaacaatcctggccaggaagatgatgttggactgggcgtcggggacactctaccaagacaggtttgactatctgttctatatccactgtcgagaggtgagccttgtgacacagaggagcctgggggacctgatcatgagctgctgccccgacccaaacccacccatccacaagatcgtgagaaaaccctccagaatcctcttcctcatggacggcttcgatgagctgcaaggtgcctttgacgagcacataggaccgctctgcactgactggcagaaggccgagcggggagacattctcctgagcagcctcatcagaaagaagctgcttcccgaggcctctctgctcatcaccacgagacctgtggccctggagaaactgcagcacttgctggaccatcctcggcatgtggagatcctgggtttctccgaggccaaaaggaaagagtacttcttcaagtacttctctgatgaggcccaagccagggcagccttcagtctgattcaggagaacgaggtcctcttcaccatgtgcttcatccccctggtctgctggatcgtgtgcactggactgaaacagcagatggagagtggcaagagccttgcccagacatccaagaccaccaccgcggtgtacgtcttcttcctttccagtttgctgcagccccggggagggagccaggagcacggcctctgcgcccacctctgggggctctgctctttggctgcagatggaatctggaaccagaaaatcctgtttgaggagtccgacctcaggaatcatggactgcagaaggcggatgtgtctgctttcctgaggatgaacctgttccaaaaggaagtggactgcgagaagttctacagcttcatccacatgactttccaggagttctttgccgccatgtactacctgctggaagaggaaaaggaaggaaggacgaacgttccagggagtcgtttgaagcttcccagccgagacgtgacagtccttctggaaaactatggcaaattcgaaaaggggtatttgatttttgttgtacgtttcctctttggcctggtaaaccaggagaggacctcctacttggagaagaaattaagttgcaagatctctcagcaaatcaggctggagctgctgaaatggattgaagtgaaagccaaagctaaaaagctgcagatccagcccagccagctggaattgttctactgtttgtacgagatgcaggaggaggacttcgtgcaaagggccatggactatttccccaagattgagatcaatctctccaccagaatggaccacatggtttcttccttttgcattgagaactgtcatcgggtggagtcactgtccctggggtttctccataacatgcccaaggaggaagaggaggaggaaaaggaaggccgacaccttgatatggtgcagtgtgtcctcccaagctcctctcatgctgcctgttctcatgggttggggcgctgtggcctctcgcatgagtgctgcttcgacatctccttggtcctcagcagcaaccagaagctggtggagctggacctgagtgacaacgccctcggtgacttcggaatcagacttctgtgtgtgggactgaagcacctgttgtgcaatctgaagaagctctggttggtcagctgctgcctcacatcagcatgttgtcaggatcttgcatcagtattgagcaccagccattccctgaccagactctatgtgggggagaatgccttgggagactcaggagtcgcaattttatgtgaaaaagccaagaatccacagtgtaacctgcagaaactggggttggtgaattctggccttacgtcagtctgttgttcagctttgtcctcggtactcagcactaatcagaatctcacgcacctttacctgcgaggcaacactctcggagacaaggggatcaaactactctgtgagggactcttgcaccccgactgcaagcttcaggtgttggaattagacaactgcaacctcacgtcacactgctgctgggatctttccacacttctgacctccagccagagcctgcgaaagctgagcctgggcaacaatgacctgggcgacctgggggtcatgatgttctgtgaagtgctgaaacagcagagctgcctcctgcagaacctggggttgtctgaaatgtatttcaattatgagacaaaaagtgcgttagaaacacttcaagaagaaaagcctgagctgaccgtcgtctttgagccttcttggtag

SEQ ID NO: 159770 - DNA, 3853 bp, Homo sapiens
  Payload ID: 11257
  Gene Symbol: NLRP3
  Gene Name: NLR family, pyrin domain containing 3
  Uniprot ID: Q96P20
  ENST ID: ENST00000391828
  CDS Start-End: 139-3249
gcatttcctctctagctgttcctgaggctggcatctggggaaacctttcttccatggctcaggacacactcctggatcgagccaacaggagaactttctgtgtggaccgaagcctaaggaccctgaaaacagctgcagatgaagatggcaagcacccgctgcaagctggccaggtacctggaggacctggaggatgtggacttgaagaaatttaagatgcacttagaggactatcctccccagaagggctgcatccccctcccgaggggtcagacagagaaggcagaccatgtggatctagccacgctaatgatcgacttcaatggggaggagaaggcgtgggccatggccgtgtggatcttcgctgcgatcaacaggagagacctttatgagaaagcaaaaagagatgagccgaagtggggttcagataatgcacgtgtttcgaatcccactgtgatatgccaggaagacagcattgaagaggagtggatgggtttactggagtacctttcgagaatctctatttgtaaaatgaagaaagattaccgtaagaagtacagaaagtacgtgagaagcagattccagtgcattgaagacaggaatgcccgtctgggtgagagtgtgagcctcaacaaacgctacacacgactgcgtctcatcaaggagcaccggagccagcaggagagggagcaggagcttctggccatcggcaagaccaagacgtgtgagagccccgtgagtcccattaagatggagttgctgtttgaccccgatgatgagcattctgagcctgtgcacaccgtggtgttccagggggcggcagggattgggaaaacaatcctggccaggaagatgatgttggactgggcgtcggggacactctaccaagacaggtttgactatctgttctatatccactgtcgagaggtgagccttgtgacacagaggagcctgggggacctgatcatgagctgctgccccgacccaaacccacccatccacaagatcgtgagaaaaccctccagaatcctcttcctcatggacggcttcgatgagctgcaaggtgcctttgacgagcacataggaccgctctgcactgactggcagaaggccgagcggggagacattctcctgagcagcctcatcagaaagaagctgcttcccgaggcctctctgctcatcaccacgagacctgtggccctggagaaactgcagcacttgctggaccatcctcggcatgtggagatcctgggtttctccgaggccaaaaggaaagagtacttcttcaagtacttctctgatgaggcccaagccagggcagccttcagtctgattcaggagaacgaggtcctcttcaccatgtgcttcatccccctggtctgctggatcgtgtgcactggactgaaacagcagatggagagtggcaagagccttgcccagacatccaagaccaccaccgcggtgtacgtcttcttcctttccagtttgctgcagccccggggagggagccaggagcacggcctctgcgcccacctctgggggctctgctctttggctgcagatggaatctggaaccagaaaatcctgtttgaggagtccgacctcaggaatcatggactgcagaaggcggatgtgtctgctttcctgaggatgaacctgttccaaaaggaagtggactgcgagaagttctacagcttcatccacatgactttccaggagttctttgccgccatgtactacctgctggaagaggaaaaggaaggaaggacgaacgttccagggagtcgtttgaagcttcccagccgagacgtgacagtccttctggaaaactatggcaaattcgaaaaggggtatttgatttttgttgtacgtttcctctttggcctggtaaaccaggagaggacctcctacttggagaagaaattaagttgcaagatctctcagcaaatcaggctggagctgctgaaatggattgaagtgaaagccaaagctaaaaagctgcagatccagcccagccagctggaattgttctactgtttgtacgagatgcaggaggaggacttcgtgcaaagggccatggactatttccccaagattgagatcaatctctccaccagaatggaccacatggtttcttccttttgcattgagaactgtcatcgggtggagtcactgtccctggggtttctccataacatgcccaaggaggaagaggaggaggaaaaggaaggccgacaccttgatatggtgcagtgtgtcctcccaagctcctctcatgctgcctgttctcatggattggtgaacagccacctcacttccagtttttgccggggcctcttttcagttctgagcaccagccagagtctaactgaattggacctcagtgacaattctctgggggacccagggatgagagtgttgtgtgaaacgctccagcatcctggctgtaacattcggagattgtggttggggcgctgtggcctctcgcatgagtgctgcttcgacatctccttggtcctcagcagcaaccagaagctggtggagctggacctgagtgacaacgccctcggtgacttcggaatcagacttctgtgtgtgggactgaagcacctgttgtgcaatctgaagaagctctggttggtcagctgctgcctcacatcagcatgttgtcaggatcttgcatcagtattgagcaccagccattccctgaccagactctatgtgggggagaatgccttgggagactcaggagtcgcaattttatgtgaaaaagccaagaatccacagtgtaacctgcagaaactggggttggtgaattctggccttacgtcagtctgttgttcagctttgtcctcggtactcagcactaatcagaatctcacgcacctttacctgcgaggcaacactctcggagacaaggggatcaaactactctgtgagggactcttgcaccccgactgcaagcttcaggtgttggaattagacaactgcaacctcacgtcacactgctgctgggatctttccacacttctgacctccagccagagcctgcgaaagctgagcctgggcaacaatgacctgggcgacctgggggtcatgatgttctgtgaagtgctgaaacagcagagctgcctcctgcagaacctggggttgtctgaaatgtatttcaattatgagacaaaaagtgcgttagaaacacttcaagaagaaaagcctgagctgaccgtcgtctttgagccttcttggtaggagtggaaacggggctgccagacgccagtgttctccggtccctccagctgggggccctcaggtggagagagctgcgatccatccaggccaagaccacagctctgtgatccttccggtggagtgtcggagaagagagcttgccgacgatgccttcctgtgcagagcttgggcatctcctttacgccagggtgaggaagacaccaggacaatgacagcatcgggtgttgttgtcatcacagcgcctcagttagaggatgttcctcttggtgacctcatgtaattagctcattcaataaagcactttctttatttttctcttctctgtctaactttctttttcctatcttttttcttctttgttctgtttacttttgctcatatcatcattcccgctatctttctattaactgaccataacacagaactagttgactatatattatgttgaaattttatggcagctatttatttatttaaattttttgtaacagttttgttttctaataagaaaaatccatgctttttgtagctggttgaaaattcaggaatatgtaaaactttttggtatttaattaaattgattccttttcttaattttaaaaaa

SEQ ID NO: 159771 - DNA, 3670 bp, Homo sapiens
  Payload ID: 11258
  Gene Symbol: NLRP4
  Gene Name: NLR family, pyrin domain containing 4
  Uniprot ID: Q96MN2
  ENST ID: ENST00000301295
  CDS Start-End: 423-3407
gtgctgggctgttcgtctcttctatgtgctgatttcctgggttactttgggtcttccttttctttctcccttttaccctgtctcctttcttgaggctgatcgatcacagccaggcctctccattctatttacccagcgttttccttctctccagttagtggggtagatgaacgccctgtgtttataaggtgcctcccaggagcctgagacctgtgagaagaatggggggtggaggtgggggagactcgtcacgaagggagaccttggagcttcgagggtgggaatgttcttattagattcttcatctctgttgacacaaacatgtaggagaagctggagaacatagacagggatgaggttttatttatttattgttcctggtcactgtctctttgaggattggtatctctgctccagaaaagatggcagcctctttcttctctgattttggtcttatgtggtatctggaggagctcaaaaaggaggagttcaggaaatttaaagaacatctcaagcaaatgactttgcagcttgaactcaagcagattccctggactgaggtcaaaaaagcatcccgggaagaacttgcaaacctcttgatcaagcactatgaagaacaacaagcttggaacataaccttaagaatctttcaaaagatggatagaaaggatctctgcatgaaggtcatgagggagagaacaggatacacaaagacctatcaagctcacgcaaagcagaaattcagccgcttatggtccagcaagtctgtcactgagattcacctatactttgaggaggaagtcaagcaagaagaatgtgaccatttggaccgcctttttgctcccaaggaagctgggaaacagccacgtacagtgatcattcaaggaccacaaggaattggaaaaacgacactcctgatgaagctgatgatggcctggtcggacaacaagatctttcgggataggttcctgtacacgttctatttctgctgcagagaactgagggagttgccgccaacgagtttggctgacttgatttccagagagtggcctgaccccgctgctcctataacagagatcgtgtctcaaccggagagactcttgttcgtcatcgacagcttcgaagagctgcagggcggcttgaacgaacccgattcggatctgtgtggtgacttgatggagaaacggccggtgcaggtgcttctgagcagtttgctgaggaagaagatgctcccggaggcctccctgctcatcgctatcaaacccgtgtgcccgaaggagctccgggatcaggtgacgatctcagaaatctaccagccccggggattcaacgagagtgataggttagtgtatttctgctgtttcttcaaagacccgaaaagagccatggaagccttcaatcttgtaagagaaagtgaacagctgttttccatatgccaaatcccgctcctctgctggatcctgtgtaccagtctgaagcaagagatgcagaaaggaaaagacctggccctgacctgccagagcactacctctgtgtactcctctttcgtctttaacctgttcacacctgagggtgccgagggcccgactccgcaaacccagcaccagctgaaggccctgtgctccctggctgcagagggtatgtggacagacacatttgagttttgtgaagacgacctccggagaaatggggttgttgacgctgacatccctgcgctgctgggcaccaagatacttctgaagtacggggagcgtgagagctcctacgtgttcctccacgtgtgtatccaggagttctgtgccgccttgttctatttgctcaagagccaccttgatcatcctcacccagctgtgagatgtgtacaggaattgctagttgccaattttgaaaaagcaaggagagcacattggatttttttggggtgttttctaactggccttttaaataaaaaggaacaagaaaaactggatgcgttttttggcttccaactgtcccaagagataaagcagcaaattcaccagtgcctgaagagcttaggggagcgtggcaatcctcagggacaggtggattccttggcgatattttactgtctctttgaaatgcaggatcctgcctttgtgaagcaggcagtgaacctcctccaagaagctaactttcatattattgacaacgtggacttggtggtttctgcctactgcttaaaatactgctccagcttgaggaaactctgtttttccgttcaaaatgtctttaagaaagaggatgaacacagctctacgtcggattacagcctcatctgttggcatcacatctgctctgtgctcaccaccagcgggcacctcagagagctccaggtgcaggacagcaccctcagcgagtcgacctttgtgacctggtgtaaccagctgaggcatcccagctgtcgccttcagaagcttggaataaataacgtttccttttctggccagagtgttctgctctttgaggtgctcttttatcagccagacttgaaatacctgagcttcaccctcacgaaactctctcgtgatgacatcaggtccctctgtgatgccttgaactacccagcaggcaacgtcaaagagctagcgctggtaaattgtcacctctcacccattgattgtgaagtccttgctggccttctaaccaacaacaagaagctgacgtatctgaatgtatcctgcaaccagttagacacaggcgtgccccttttgtgtgaagccctgtgcagcccagacacggtcctggtatacctgatgttggctttctgccacctcagcgagcagtgctgcgaatacatctctgaaatgcttctgcgtaacaagagcgtgcgctatctagacctcagtgccaatgtcctgaaggacgaaggactgaaaactctctgcgaggccttgaaacatccggactgctgcctggattcactgtgtttggtaaaatgttttatcactgctgctggctgtgaagacctcgcctctgctctcatcagcaatcaaaacctgaagattctgcaaattgggtgcaatgaaatcggagatgtgggtgtgcagctgttgtgtcgggctctgacgcatacggattgccgcttagagattcttgggttggaagaatgtgggttaacgagcacctgctgtaaggatctcgcgtctgttctcacctgcagtaagaccctgcagcagctcaacctgaccttgaacaccttggaccacacaggggtggttgtactctgtgaggccctgagacacccagagtgtgccctgcaggtgctcgggctgagaaaaactgattttgatgaggaaacccaggcacttctgacggctgaggaagagagaaatcctaacctgaccatcacagacgactgtgacacaatcacaagggtagagatctgattgcgaggaacctgggctctgactcgaacacctgcaaaggacagggactgggaccgttacttacatgacactgcacccaggagatacaaatcattgatactctgagttgtgagatttctggcaccccattcatagatttgatatgatacacgtggtttttatgtgctctgtggccttggatgagtcactgaaaggccttcatggtctctcggtctcacaaggacctcttaacccctcaataaagtgttacatttctaaacatt

SEQ ID NO: 159772 - DNA, 3201 bp, Homo sapiens
  Payload ID: 11258
  Gene Symbol: NLRP4
  Gene Name: NLR family, pyrin domain containing 4
  Uniprot ID: Q96MN2
  ENST ID: ENST00000587891
  CDS Start-End: 175-2934
agctgttcagctctgctattcaatcaggaaggctcctgtagacaatatacccgtgaatggtgtagtgagttctaatgaaactttatttacaagaggagactgaccaggtttggcctgggggccacagtgtgtagacccctggaaagatacatcctgagaagaaaaaaagaatatatgcaggaatgcttaactttgtgggttttctctcctcttgccctcactgactcaggatacacaaagacctatcaagctcacgcaaagcagaaattcagccgcttatggtccagcaagtctgtcactgagattcacctatactttgaggaggaagtcaagcaagaagaatgtgaccatttggaccgcctttttgctcccaaggaagctgggaaacagccacgtacagtgatcattcaaggaccacaaggaattggaaaaacgacactcctgatgaagctgatgatggcctggtcggacaacaagatctttcgggataggttcctgtacacgttctatttctgctgcagagaactgagggagttgccgccaacgagtttggctgacttgatttccagagagtggcctgaccccgctgctcctataacagagatcgtgtctcaaccggagagactcttgttcgtcatcgacagcttcgaagagctgcagggcggcttgaacgaacccgattcggatctgtgtggtgacttgatggagaaacggccggtgcaggtgcttctgagcagtttgctgaggaagaagatgctcccggaggcctccctgctcatcgctatcaaacccgtgtgcccgaaggagctccgggatcaggtgacgatctcagaaatctaccagccccggggattcaacgagagtgataggttagtgtatttctgctgtttcttcaaagacccgaaaagagccatggaagccttcaatcttgtaagagaaagtgaacagctgttttccatatgccaaatcccgctcctctgctggatcctgtgtaccagtctgaagcaagagatgcagaaaggaaaagacctggccctgacctgccagagcactacctctgtgtactcctctttcgtctttaacctgttcacacctgagggtgccgagggcccgactccgcaaacccagcaccagctgaaggccctgtgctccctggctgcagagggtatgtggacagacacatttgagttttgtgaagacgacctccggagaaatggggttgttgacgctgacatccctgcgctgctgggcaccaagatacttctgaagtacggggagcgtgagagctcctacgtgttcctccacgtgtgtatccaggagttctgtgccgccttgttctatttgctcaagagccaccttgatcatcctcacccagctgtgagatgtgtacaggaattgctagttgccaattttgaaaaagcaaggagagcacattggatttttttggggtgttttctaactggccttttaaataaaaaggaacaagaaaaactggatgcgttttttggcttccaactgtcccaagagataaagcagcaaattcaccagtgcctgaagagcttaggggagcgtggcaatcctcagggacaggtggattccttggcgatattttactgtctctttgaaatgcaggatcctgcctttgtgaagcaggcagtgaacctcctccaagaagctaactttcatattattgacaacgtggacttggtggtttctgcctactgcttaaaatactgctccagcttgaggaaactctgtttttccgttcaaaatgtctttaagaaagaggatgaacacagctctacgtcggattacagcctcatctgttggcatcacatctgctctgtgctcaccaccagcgggcacctcagagagctccaggtgcaggacagcaccctcagcgagtcgacctttgtgacctggtgtaaccagctgaggcatcccagctgtcgccttcagaagcttggaataaataacgtttccttttctggccagagtgttctgctctttgaggtgctcttttatcagccagacttgaaatacctgagcttcaccctcacgaaactctctcgtgatgacatcaggtccctctgtgatgccttgaactacccagcaggcaacgtcaaagagctagcgctggtaaattgtcacctctcacccattgattgtgaagtccttgctggccttctaaccaacaacaagaagctgacgtatctgaatgtatcctgcaaccagttagacacaggcgtgccccttttgtgtgaagccctgtgcagcccagacacggtcctggtatacctgatgttggctttctgccacctcagcgagcagtgctgcgaatacatctctgaaatgcttctgcgtaacaagagcgtgcgctatctagacctcagtgccaatgtcctgaaggacgaaggactgaaaactctctgcgaggccttgaaacatccggactgctgcctggattcactgtgtttggtaaaatgttttatcactgctgctggctgtgaagacctcgcctctgctctcatcagcaatcaaaacctgaagattctgcaaattgggtgcaatgaaatcggagatgtgggtgtgcagctgttgtgtcgggctctgacgcatacggattgccgcttagagattcttgggttggaagaatgtgggttaacgagcacctgctgtaaggatctcgcgtctgttctcacctgcagtaagaccctgcagcagctcaacctgaccttgaacaccttggaccacacaggggtggttgtactctgtgaggccctgagacacccagagtgtgccctgcaggtgctcgggctgagaaaaactgattttgatgaggaaacccaggcacttctgacggctgaggaagagagaaatcctaacctgaccatcacagacgactgtgacacaatcacaagggtagagatctgattgcgaggaacctgggctctgactcgaacacctgcaaaggacagggactgggaccgttacttacatgacactgcacccaggagatacaaatcattgatactctgagttgtgagatttctggcaccccattcatagatttgatatgatacacgtggtttttatgtgctctgtggccttggatgagtcactgaaaggccttcatggtctctcggtctcacaaggacctcttaacccctcaataaagtgttacatttctaaacattggaa

SEQ ID NO: 159773 - DNA, 572 bp, Homo sapiens
  Payload ID: 11258
  Gene Symbol: NLRP4
  Gene Name: NLR family, pyrin domain containing 4
  ENST ID: ENST00000587464
  CDS Start-End: 106-572
aaacatgtaggagaagctggagaacatagacagggatgaggttttatttatttattgttcctggtcactgtctctttgaggattggtatctctgctccagaaaagatggcagcctctttcttctctgattttggtcttatgtggtatctggaggagctcaaaaaggaggagttcaggaaatttaaagaacatctcaagcaaatgactttgcagcttgaactcaagcagattccctggactgaggtcaaaaaagcatcccgggaagaacttgcaaacctcttgatcaagcactatgaagaacaacaagcttggaacataaccttaagaatctttcaaaagatggatagaaaggatctctgcatgaaggtcatgagggagagaacaggatacacaaagacctatcaagctcacgcaaagcagaaattcagccgcttatggtccagcaagtctgtcactgagattcacctatactttgaggaggaagtcaagcaagaagaatgtgaccatttggaccgcctttttgctcccaaggaagctgggaaacagccacgtacagtgatcattcaaggacc

SEQ ID NO: 159774 - DNA, 1781 bp, Homo sapiens
  Payload ID: 11258
  Gene Symbol: NLRP4
  Gene Name: NLR family, pyrin domain containing 4
  ENST ID: ENST00000589437
  CDS Start-End: 1-1514
ccaagatacttctgaagtacggggagcgtgagagctcctacgtgttcctccacgtgtgtatccaggagttctgtgccgccttgttctatttgctcaagagccaccttgatcatcctcacccagctgtgagatgtgtacaggaattgctagttgccaattttgaaaaagcaaggagagcacattggatttttttggggtgttttctaactggccttttaaataaaaaggaacaagaaaaactggatgcgttttttggcttccaactgtcccaagagataaagcagcaaattcaccagtgcctgaagagcttaggggagcgtggcaatcctcagggacaggtggattccttggcgatattttactgtctctttgaaatgcaggatcctgcctttgtgaagcaggcagtgaacctcctccaagaagctaactttcatattattgacaacgtggacttggtggtttctgcctactgcttaaaatactgctccagcttgaggaaactctgtttttccgttcaaaatgtctttaagaaagaggatgaacacagctctacgtcggattacagcctcatctgttggcatcacatctgctctgtgctcaccaccagcgggcacctcagagagctccaggtgcaggacagcaccctcagcgagtcgacctttgtgacctggtgtaaccagctgaggcatcccagctgtcgccttcagaagcttggaataaataacgtttccttttctggccagagtgttctgctctttgaggtgctcttttatcagccagacttgaaatacctgagcttcaccctcacgaaactctctcgtgatgacatcaggtccctctgtgatgccttgaactacccagcaggcaacgtcaaagagctagcgttggctttctgccacctcagcgagcagtgctgcgaatacatctctgaaatgcttctgcgtaacaagagcgtgcgctatctagacctcagtgccaatgtcctgaaggacgaaggactgaaaactctctgcgaggccttgaaacatccggactgctgcctggattcactgtgtttggtaaaatgttttatcactgctgctggctgtgaagacctcgcctctgctctcatcagcaatcaaaacctgaagattctgcaaattgggtgcaatgaaatcggagatgtgggtgtgcagctgttgtgtcgggctctgacgcatacggattgccgcttagagattcttgggttggaagaatgtgggttaacgagcacctgctgtaaggatctcgcgtctgttctcacctgcagtaagaccctgcagcagctcaacctgaccttgaacaccttggaccacacaggggtggttgtactctgtgaggccctgagacacccagagtgtgccctgcaggtgctcgggctgagaaaaactgattttgatgaggaaacccaggcacttctgacggctgaggaagagagaaatcctaacctgaccatcacagacgactgtgacacaatcacaagggtagagatctgattgcgaggaacctgggctctgactcgaacacctgcaaaggacagggactgggaccgttacttacatgacactgcacccaggagatacaaatcattgatactctgagttgtgagatttctggcaccccattcatagatttgatatgatacacgtggtttttatgtgctctgtggccttggatgagtcactgaaaggccttcatggtctctcggtctcacaaggacctcttaacccctcaataaagtgttacatttctaaacattggaa

SEQ ID NO: 159775 - DNA, 3888 bp, Homo sapiens
  Payload ID: 11259
  Gene Symbol: NLRP5
  Gene Name: NLR family, pyrin domain containing 5
  Uniprot ID: P59047
  ENST ID: ENST00000390649
  CDS Start-End: 1-3603
atgaaggttgcaggaggacttgaacttggagctgctgctctgctctcagcatcaccacgtgctcttgtcactctttccacaggtcctacttgctctatattaccaaagaatccacttttcccccaaaacctgagctctcagccttgtatcaagatggaaggagacaaatcgctcaccttttccagctacgggctgcaatggtgtctctatgagctagacaaggaagaatttcagacattcaaggaattactaaagaagaaatcttcagaatcgaccacatgctctattccacagtttgaaatcgagaatgccaacgtggaatgtctggcactcctcttgcatgagtattatggagcatcgctggcctgggctacgtccattagcatctttgaaaacatgaacctgcgaaccctctcggagaaggcacgggatgacatgaaaagacattcaccagaagatcctgaagcaacgatgactgaccaaggaccaagcaaggaaaaagtgccaggaatttcacaagctgtgcaacaagatagtgccacagctgcagagacaaaagaacaagaaatttcacaagctatggaacaagaaggtgccacagcagcagagacagaagaacaagaaatttcacaagctatggaacaagaaggtgccacagcagcagagacagaagaacaaggacatggaggtgacacatgggactacaagagtcacgtgatgaccaaattcgctgaggaggaggatgtacgtcgtagttttgaaaacactgctgctgactggccggaaatgcaaacgttggctggtgcttttgattcagaccggtggggcttccggcctcgcacggtggttctgcacggaaagtcaggaattgggaaatcggctctagccagaaggatcgtgctgtgctgggcgcaaggtggactctaccagggaatgttctcctacgtcttcttcctccccgttagagagatgcagcggaagaaggagagcagtgtcacagagttcatctccagggagtggccagactcccaggctccggtgacggagatcatgtcccgaccagaaaggctgttgttcatcattgacggtttcgatgacctgggctctgtcctcaacaatgacacaaagctctgcaaagactgggctgagaagcagcctccgttcaccctcatacgcagtctgctgaggaaggtcctgctccctgagtccttcctgatcgtcaccgtcagagacgtgggcacagagaagctcaagtcagaggtcgtgtctccccgttacctgttagttagaggaatctccggggaacaaagaatccacttgctccttgagcgcgggattggtgagcatcagaagacacaagggttgcgtgcgatcatgaacaaccgtgagctgctcgaccagtgccaggtgcccgccgtgggctctctcatctgcgtggccctgcagctgcaggacgtggtgggggagagcgtcgcccccttcaaccaaacgctcacaggcctgcacgccgcttttgtgtttcatcagctcacccctcgaggcgtggtccggcgctgtctcaatctggaggaaagagttgtcctgaagcgcttctgccgtatggctgtggagggagtgtggaataggaagtcagtgtttgacggtgacgacctcatggttcaaggactcggggagtctgagctccgtgctctgtttcacatgaacatccttctcccagacagccactgtgaggagtactacaccttcttccacctcagtctccaggacttctgtgccgccttgtactacgtgttagagggcctggaaatcgagccagctctctgccctctgtacgttgagaagacaaagaggtccatggagcttaaacaggcaggcttccatatccactcgctttggatgaagcgtttcttgtttggcctcgtgagcgaagacgtaaggaggccactggaggtcctgctgggctgtcccgttcccctgggggtgaagcagaagcttctgcactgggtctctctgttgggtcagcagcctaatgccaccaccccaggagacaccctggacgccttccactgtcttttcgagactcaagacaaagagtttgttcgcttggcattaaacagcttccaagaagtgtggcttccgattaaccagaacctggacttgatagcatcttccttctgcctccagcactgtccgtatttgcggaaaattcgggtggatgtcaaagggatcttcccaagagatgagtccgctgaggcatgtcctgtggtccctctatggatgcgggataagaccctcattgaggagcagtgggaagatttctgctccatgcttggcacccacccacacctgcggcagctggacctgggcagcagcatcctgacagagcgggccatgaagaccctgtgtgccaagctgaggcatcccacctgcaagatacagaccctgatgtttagaaatgcacagattacccctggtgtgcagcacctctggagaatcgtcatggccaaccgtaacctaagatccctcaacttgggaggcacccacctgaaggaagaggatgtaaggatggcgtgtgaagccttaaaacacccaaaatgtttgttggagtctttgaggctggattgctgtggattgacccatgcctgttacctgaagatctcccaaatccttacgacctcccccagcctgaaatctctgagcctggcaggaaacaaggtgacagaccagggagtaatgcctctcagtgatgccttgagagtctcccagtgcgccctgcagaagctgatactggaggactgtggcatcacagccacgggttgccagagtctggcctcagccctcgtcagcaaccggagcttgacacacctgtgcctatccaacaacagcctggggaacgaaggtgtaaatctactgtgtcgatccatgaggcttccccactgtagtctgcagaggctgatgctgaatcagtgccacctggacacggctggctgtggttttcttgcacttgcgcttatgggtaactcatggctgacgcacctgagccttagcatgaaccctgtggaagacaatggcgtgaagcttctgtgcgaggtcatgagagaaccatcttgtcatctccaggacctggagttggtaaagtgtcatctcaccgccgcgtgctgtgagagtctgtcctgtgtgatctcgaggagcagacacctgaagagcctggatctcacggacaatgccctgggtgacggtggggttgctgcgctgtgcgagggactgaagcaaaagaacagtgttctggcgagactcgggttgaaggcatgtggactgacttctgattgctgtgaggcactctccttggccctttcctgcaaccggcatctgaccagtctaaacctggtgcagaataacttcagtcccaaaggaatgatgaagctgtgttcggcctttgcctgtcccacgtctaacttacagataattgggctgtggaaatggcagtaccctgtgcaaataaggaagctgctggaggaagtgcagctactcaagccccgagtcgtaattgacggtagttggcattcttttgatgaagatgaccggtactggtggaaaaactgaagatacggaaacctgccccactcacacccatctgatggaggaactttaaacgctgttttctcagagcaagctatgcacctgggagttccttctcaaagatggagaatgatttctgattctcacaaagccctcaatggtagtgattcttctgtgttcactctacgttggttactggatttgaaggctagagaccttcaagtcataggactcagtatctgtgaaatgtccgtcatatctcagagcatatagagggaattaaataaacacaaagcatttggaaaagtt

SEQ ID NO: 159776 - DNA, 668 bp, Homo sapiens
  Payload ID: 11259
  Gene Symbol: NLRP5
  Gene Name: NLR family, pyrin domain containing 5
  ENST ID: ENST00000597673
  CDS Start-End: 1-537
ggtcctacttgctctatattaccaaagaatccacttttcccccaaaacctgagctctcagccttgtatcaagatggaaggagacaaatcgctcaccttttccagctacgggctgcaatggtgtctctatgagctagacaaggaagaatttcagacattcaaggaattactaaagaagaaatcttcagaatcgaccacatgctctattccacagtttgaaatcgagaatgccaacgtggaatgtctggcactcctcttgcatgagtattatggagcatcgctggcctgggctacgtccattagcatctttgaaaacatgaacctgcgaaccctctcggagaaggcacgggatgacatgaaaagacattcaccagaagatcctgaagcaacgatgactgaccaaggaccaagcaaggaaaaagtgccaggaatttcacaagctgtgcaacaagatagtgccacagctgcagagacaaaagaacaagagagttttgctgtattgctgagactacaatgcagtggctatccacaagcatgaccgtagctcactacagcctcaaactgctggactcaagtgattctcctgcctcagcctcccaagtagctgggactacaggcataaatttcacaagctatggaacaagaaggtgccacagcagcagagacaga

SEQ ID NO: 159777 - DNA, 3885 bp, Homo sapiens
  Payload ID: 11259
  Gene Symbol: NLRP5
  Gene Name: NLR family, pyrin domain containing 5
  ENST ID: ENST00000621651
  CDS Start-End: 1-3603
atgaaggttgcaggaggacttgaacttggagctgctgctctgctctcagcatcaccacgtgctcttgtcactctttccacaggtcctacttgctctatattaccaaagaatccacttttcccccaaaacctgagctctcagccttgtatcaagatggaaggagacaaatcgctcaccttttccagctacgggctgcaatggtgtctctatgagctagacaaggaagaatttcagacattcaaggaattactaaagaagaaatcttcagaatcgaccacatgctctattccacagtttgaaatcgagaatgccaacgtggaatgtctggcactcctcttgcatgagtattatggagcatcgctggcctgggctacgtccattagcatctttgaaaacatgaacctgcgaaccctctcggagaaggcacgggatgacatgaaaagacattcaccagaagatcctgaagcaacgatgactgaccaaggaccaagcaaggaaaaagtgccagacatctctgactcaaataataaacacaagtatgttggaattcattcttcttttgcagaaatttcacaagctatggaacaagaaggtgccacagcagcagagacagaagaacaagaaatttcacaagctatggaacaagaaggtgccacagcagcagagacagaagaacaaggacatggaggtgacacatgggactacaagagtcacgtgatgaccaaattcgctgaggaggaggatgtacgtcgtagttttgaaaacactgctgctgactggccggaaatgcaaacgttggctggtgcttttgattcagaccggtggggcttccggcctcgcacggtggttctgcacggaaagtcaggaattgggaaatcggctctagccagaaggatcgtgctgtgctgggcgcaaggtggactctaccagggaatgttctcctacgtcttcttcctccccgttagagagatgcagcggaagaaggagagcagtgtcacagagttcatctccagggagtggccagactcccaggctccggtgacggagatcatgtcccgaccagaaaggctgttgttcatcattgacggtttcgatgacctgggctctgtcctcaacaatgacacaaagctctgcaaagactgggctgagaagcagcctccgttcaccctcatacgcagtctgctgaggaaggtcctgctccctgagtccttcctgatcgtcaccgtcagagacgtgggcacagagaagctcaagtcagaggtcgtgtctccccgttacctgttagttagaggaatctccggggaacaaagaatccacttgctccttgagcgcgggattggtgagcatcagaagacacaagggttgcgtgcgatcatgaacaaccgtgagctgctcgaccagtgccaggtgcccgccgtgggctctctcatctgcgtggccctgcagctgcaggacgtggtgggggagagcgtcgcccccttcaaccaaacgctcacaggcctgcacgccgcttttgtgtttcatcagctcacccctcgaggcgtggtccggcgctgtctcaatctggaggaaagagttgtcctgaagcgcttctgccgtatggctgtggagggagtgtggaataggaagtcagtgtttgacggtgacgacctcatggttcaaggactcggggagtctgagctccgtgctctgtttcacatgaacatccttctcccagacagccactgtgaggagtactacaccttcttccacctcagtctccaggacttctgtgccgccttgtactacgtgttagagggcctggaaatcgagccagctctctgccctctgtacgttgagaagacaaagaggtccatggagcttaaacaggcaggcttccatatccactcgctttggatgaagcgtttcttgtttggcctcgtgagcgaagacgtaaggaggccactggaggtcctgctgggctgtcccgttcccctgggggtgaagcagaagcttctgcactgggtctctctgttgggtcagcagcctaatgccaccaccccaggagacaccctggacgccttccactgtcttttcgagactcaagacaaagagtttgttcgcttggcattaaacagcttccaagaagtgtggcttccgattaaccagaacctggacttgatagcatcttccttctgcctccagcactgtccgtatttgcggaaaattcgggtggatgtcaaagggatcttcccaagagatgagtccgctgaggcatgtcctgtggtccctctatggatgcgggataagaccctcattgaggagcagtgggaagatttctgctccatgcttggcacccacccacacctgcggcagctggacctgggcagcagcatcctgacagagcgggccatgaagaccctgtgtgccaagctgaggcatcccacctgcaagatacagaccctgatgtttagaaatgcacagattacccctggtgtgcagcacctctggagaatcgtcatggccaaccgtaacctaagatccctcaacttgggaggcacccacctgaaggaagaggatgtaaggatggcgtgtgaagccttaaaacacccaaaatgtttgttggagtctttgaggctggattgctgtggattgacccatgcctgttacctgaagatctcccaaatccttacgacctcccccagcctgaaatctctgagcctggcaggaaacaaggtgacagaccagggagtaatgcctctcagtgatgccttgagagtctcccagtgcgccctgcagaagctgatactggaggactgtggcatcacagccacgggttgccagagtctggcctcagccctcgtcagcaaccggagcttgacacacctgtgcctatccaacaacagcctggggaacgaaggtgtaaatctactgtgtcgatccatgaggcttccccactgtagtctgcagaggctgatgctgaatcagtgccacctggacacggctggctgtggttttcttgcacttgcgcttatgggtaactcatggctgacgcacctgagccttagcatgaaccctgtggaagacaatggcgtgaagcttctgtgcgaggtcatgagagaaccatcttgtcatctccaggacctggagttggtaaagtgtcatctcaccgccgcgtgctgtgagagtctgtcctgtgtgatctcgaggagcagacacctgaagagcctggatctcacggacaatgccctgggtgacggtggggttgctgcgctgtgcgagggactgaagcaaaagaacagtgttctggcgagactcgggttgaaggcatgtggactgacttctgattgctgtgaggcactctccttggccctttcctgcaaccggcatctgaccagtctaaacctggtgcagaataacttcagtcccaaaggaatgatgaagctgtgttcggcctttgcctgtcccacgtctaacttacagataattgggctgtggaaatggcagtaccctgtgcaaataaggaagctgctggaggaagtgcagctactcaagccccgagtcgtaattgacggtagttggcattcttttgatgaagatgaccggtactggtggaaaaactgaagatacggaaacctgccccactcacacccatctgatggaggaactttaaacgctgttttctcagagcaagctatgcacctgggagttccttctcaaagatggagaatgatttctgattctcacaaagccctcaatggtagtgattcttctgtgttcactctacgttggttactggatttgaaggctagagaccttcaagtcataggactcagtatctgtgaaatgtccgtcatatctcagagcatatagagggaattaaataaacacaaagcatttggaaaa

SEQ ID NO: 159778 - DNA, 2679 bp, Homo sapiens
  Payload ID: 11260
  Gene Symbol: NLRP6
  Gene Name: NLR family, pyrin domain containing 6
  Uniprot ID: P59044
  ENST ID: ENST00000312165
  CDS Start-End: 1-2679
atggaccagccagaggccccctgctccagcacggggccgcgcctcgcggtggcccgcgagctgctcctggctgcgctggaggaactgagccaagagcagctgaagcgcttccgccacaagctgcgcgacgtgggcccggacggacgcagcatcccgtgggggcggctggagcgcgcggacgccgtggacctcgcggagcagctggcccagttctacggcccggagcctgccctggaggtggcccgcaagaccctcaagagggcggacgcgcgcgacgtggcggcgcagctccaggagcggcggctgcagcggctcgggctcggctccgggacgctgctctccgtgtccgagtacaagaagaagtaccgggagcacgtgctgcagctgcacgctcgggtgaaggagaggaacgcccgctccgtgaagatcaccaagcgcttcaccaagctgctcatcgcgcccgagagcgccgccccggaggaggcgatggggcccgcggaagagcctgagccggggcgcgcgcggcgctcggacacgcacactttcaaccgcctcttccgccgcgacgaggagggccggcggccgctgaccgtggtgctgcagggcccggcgggcatcggcaagaccatggcggccaaaaagatcctgtacgactgggcggcgggcaagctgtaccagggccaggtggacttcgccttcttcatgccctgcggcgagctgctggagaggccgggcacgcgcagcctggctgacctgatcctggaccagtgccccgaccgcggcgcgccggtgccgcagatgctggcccagccgcagcggctgctcttcatcctggacggcgcggacgagctgccggcgctggggggccccgaggccgcgccctgcacagaccccttcgaggcggcgagcggcgcgcgggtgctaggcgggctgctgagcaaggcgctgctgcccacggccctcctgctggtgaccacgcgcgccgccgcccccgggaggctgcagggccgcctgtgttccccgcagtgcgccgaggtgcgcggcttctccgacaaggacaagaagaagtatttctacaagtatttccgggatgagaggagggccgagcgcgcctaccgcttcgtgaaggagaacgagacgctgttcgcgctgtgcttcgtgcccttcgtgtgctggatcgtgtgcaccgtgctgcgccagcagctggagctcggtcgggacctgtcgcgcacgtccaagaccaccacgtcagtgtacctgcttttcatcaccagcgttctgagctcggctccggtagccgacgggccccggttgcagggcgacctgcgcaatctgtgccgcctggcccgcgagggcgtcctcggacgcagggcgcagtttgccgagaaggaactggagcaactggagcttcgtggctccaaagtgcagacgctgtttctcagcaaaaaggagctgccgggcgtgctggagacagaggtcacctaccagttcatcgaccagagcttccaggagttcctcgcggcactgtcctacctgctggaggacggcggggtgcccaggaccgcggctggcggcgttgggacactcctgcgtggggacgcccagccgcacagccacttggtgctcaccacgcgcttcctcttcggactgctgagcgcggagcggatgcgcgacatcgagcgccacttcggctgcatggtttcagagcgtgtgaagcaggaggccctgcggtgggtgcagggacagggacagggctgccccggagtggcaccagaggtgaccgagggggccaaagggctcgaggacaccgaagagccagaggaggaggaggagggagaggagcccaactacccactggagttgctgtactgcctgtacgagacgcaggaggacgcgtttgtgcgccaagccctgtgccggttcccggagctggcgctgcagcgagtgcgcttctgccgcatggacgtggctgttctgagctactgcgtgaggtgctgccctgctggacaggcactgcggctgatcagctgcagattggttgctgcgcaggagaagaagaagaagagcctggggaagcggctccaggccagcctgggtggcggcagcagttctcaaggcaccacaaaacaactgccagcctcccttcttcatccactctttcaggcaatgactgacccactgtgccatctgagcagcctcacgctgtcccactgcaaactccctgacgcggtctgccgagacctttctgaggccctgagggcagcccccgcactgacggagctgggcctcctccacaacaggctcagtgaggcgggactgcgtatgctgagtgagggcctagcctggccgcagtgcagggtgcagacggtcagggtacagctgcctgacccccagcgagggctccagtacctggtgggtatgcttcggcagagccctgccctgaccaccctggatctcagcggctgccaactgcccgcccccatggtgacctacctgtgtgcagtcctgcagcaccagggatgcggcctgcagaccctcagtctggcctctgtggagctgagcgagcagtcactacaggagcttcaggctgtgaagagagcaaagccggatctggtcatcacacacccagcgctggacggccacccacaacctcccaaggaactcatctcgaccttctga

SEQ ID NO: 159779 - DNA, 2936 bp, Homo sapiens
  Payload ID: 11260
  Gene Symbol: NLRP6
  Gene Name: NLR family, pyrin domain containing 6
  Uniprot ID: P59044
  ENST ID: ENST00000534750
  CDS Start-End: 206-2881
aaacggagcccttaaagggcaatgctctgcgtgtgccacggtgcccaacagcatctcgtgccagctgagctgcggtgtgtggacccggggaatggaccgggctggacaacctctaagacttggctccagctcagcctgtgaaggaatcacctctctgatccccacctctgccccggagtgctagacccagggaggaagagaccccatggaccagccagaggccccctgctccagcacggggccgcgcctcgcggtggcccgcgagctgctcctggctgcgctggaggaactgagccaagagcagctgaagcgcttccgccacaagctgcgcgacgtgggcccggacggacgcagcatcccgtgggggcggctggagcgcgcggacgccgtggacctcgcggagcagctggcccagttctacggcccggagcctgccctggaggtggcccgcaagaccctcaagagggcggacgcgcgcgacgtggcggcgcagctccaggagcggcggctgcagcggctcgggctcggctccgggacgctgctctccgtgtccgagtacaagaagaagtaccgggagcacgtgctgcagctgcacgctcgggtgaaggagaggaacgcccgctccgtgaagatcaccaagcgcttcaccaagctgctcatcgcgcccgagagcgccgccccggaggaggcgatggggcccgcggaagagcctgagccggggcgcgcgcggcgctcggacacgcacactttcaaccgcctcttccgccgcgacgaggagggccggcggccgctgaccgtggtgctgcagggcccggcgggcatcggcaagaccatggcggccaaaaagatcctgtacgactgggcggcgggcaagctgtaccagggccaggtggacttcgccttcttcatgccctgcggcgagctgctggagaggccgggcacgcgcagcctggctgacctgatcctggaccagtgccccgaccgcggcgcgccggtgccgcagatgctggcccagccgcagcggctgctcttcatcctggacggcgcggacgagctgccggcgctggggggccccgaggccgcgccctgcacagaccccttcgaggcggcgagcggcgcgcgggtgctaggcgggctgctgagcaaggcgctgctgcccacggccctcctgctggtgaccacgcgcgccgccgcccccgggaggctgcagggccgcctgtgttccccgcagtgcgccgaggtgcgcggcttctccgacaaggacaagaagaagtatttctacaagtatttccgggatgagaggagggccgagcgcgcctaccgcttcgtgaaggagaacgagacgctgttcgcgctgtgcttcgtgcccttcgtgtgctggatcgtgtgcaccgtgctgcgccagcagctggagctcggtcgggacctgtcgcgcacgtccaagaccaccacgtcagtgtacctgcttttcatcaccagcgttctgagctcggctccggtagccgacgggccccggttgcagggcgacctgcgcaatctgtgccgcctggcccgcgagggcgtcctcggacgcagggcgcagtttgccgagaaggaactggagcaactggagcttcgtggctccaaagtgcagacgctgtttctcagcaaaaaggagctgccgggcgtgctggagacagaggtcacctaccagttcatcgaccagagcttccaggagttcctcgcggcactgtcctacctgctggaggacggcggggtgcccaggaccgcggctggcggcgttgggacactcctgcgtggggacgcccagccgcacagccacttggtgctcaccacgcgcttcctcttcggactgctgagcgcggagcggatgcgcgacatcgagcgccacttcggctgcatggtttcagagcgtgtgaagcaggaggccctgcggtgggtgcagggacagggacagggctgccccggagtggcaccagaggtgaccgagggggccaaagggctcgaggacaccgaagagccagaggaggaggaggagggagaggagcccaactacccactggagttgctgtactgcctgtacgagacgcaggaggacgcgtttgtgcgccaagccctgtgccggttcccggagctggcgctgcagcgagtgcgcttctgccgcatggacgtggctgttctgagctactgcgtgaggtgctgccctgctggacaggcactgcggctgatcagctgcagattggttgctgcgcaggagaagaagaagaagagcctggggaagcggctccaggccagcctgggtggcggcagttctcaaggcaccacaaaacaactgccagcctcccttcttcatccactctttcaggcaatgactgacccactgtgccatctgagcagcctcacgctgtcccactgcaaactccctgacgcggtctgccgagacctttctgaggccctgagggcagcccccgcactgacggagctgggcctcctccacaacaggctcagtgaggcgggactgcgtatgctgagtgagggcctagcctggccgcagtgcagggtgcagacggtcagggtacagctgcctgacccccagcgagggctccagtacctggtgggtatgcttcggcagagccctgccctgaccaccctggatctcagcggctgccaactgcccgcccccatggtgacctacctgtgtgcagtcctgcagcaccagggatgcggcctgcagaccctcagtctggcctctgtggagctgagcgagcagtcactacaggagcttcaggctgtgaagagagcaaagccggatctggtcatcacacacccagcgctggacggccacccacaacctcccaaggaactcatctcgaccttctgaggctctggtggccagagcagggtggaagaccctagtcaaagtccctgtggagaga

SEQ ID NO: 159780 - DNA, 3299 bp, Homo sapiens
  Payload ID: 11261
  Gene Symbol: NLRP7
  Gene Name: NLR family, pyrin domain containing 7
  Uniprot ID: Q8WX94
  ENST ID: ENST00000328092
  CDS Start-End: 40-3069
ttcttcagccttaacctaaggtctcatactcggagcactatgacatcgccccagctagagtggactctgcagacccttctggagcagctgaacgaggatgaattaaagagtttcaaatcccttttatgggcttttcccctcgaagacgtgctacagaagaccccatggtctgaggtggaagaggctgatggcaagaaactggcagaaattctggtcaacacctcctcagaaaattggataaggaatgcgactgtgaacatcttggaagagatgaatctcacggaattgtgtaagatggcaaaggctgagatgatggaggacggacaggtgcaagaaatagataatcctgagctgggagatgcagaagaagactcggagttagcaaagccaggtgaaaaggaaggatggagaaattcaatggagaaacagtctttggtctggaagaacaccttttggcaaggagacattgacaatttccatgacgacgtcactctgagaaaccaacggttcattccattcttgaatcccagaacacccaggaagctaacaccttacacggtggtgctgcacggccccgcaggcgtggggaaaaccacgctggccaaaaagtgtatgctggactggacagactgcaacctcagcccgacgctcagatacgcgttctacctcagctgcaaggagctcagccgcatgggcccctgcagttttgcagagctgatctccaaagactggcctgaattgcaggatgacattccaagcatcctagcccaagcacagagaatcctgttcgtggtcgatggccttgatgagctgaaagtcccacctggggcgctgatccaggacatctgcggggactgggagaagaagaagccggtgcccgtcctcctggggagtttgctgaagaggaagatgttacccagggcagccttgctggtcaccacgcggcccagggcactgagggacctccagctcctggcgcagcagccgatctacgtaagggtggagggcttcctggaggaggacaggagggcctatttcctgagacactttggagacgaggaccaagccatgcgtgcctttgagctaatgaggagcaacgcggccctgttccagctgggctcggcccccgcggtgtgctggattgtgtgcacgactctgaagctgcagatggagaagggggaggacccggtccccacctgcctcacccgcacggggctgttcctgcgtttcctctgcagccggttcccgcagggcgcacagctgcggggcgcgctgcggacgctgagcctcctggccgcgcagggcctgtgggcgcagatgtccgtgttccaccgagaggacctggaaaggctcggggtgcaggagtccgacctccgtctgttcctggacggagacatcctccgccaggacagagtctccaaaggctgctactccttcatccacctcagcttccagcagtttctcactgccctgttctacgccctggagaaggaggagggggaggacagggacggccacgcctgggacatcggggacgtacagaagctgctttccggagaagaaagactcaagaaccccgacctgattcaagtaggacacttcttattcggcctcgctaacgagaagagagccaaggagttggaggccacttttggctgccggatgtcaccggacatcaaacaggaattgctgcaatgcaaagcacatcttcatgcaaataagcccttatccgtgaccgacctgaaggaggtcttgggctgcctgtatgagtctcaggaggaggagctggcgaaggtggtggtggccccgttcaaggaaatttctattcacctgacaaatacttctgaagtgatgcattgttccttcagcctgaagcattgtcaagacttgcagaaactctcactgcaggtagcaaagggggtgttcctggagaattacatggattttgaactggacattgaatttgaaagctcaaacagcaacctcaagtttctggaagtgaaacaaagcttcctgagtgactcttctgtgcggattctttgtgaccacgtaacccgtagcacctgtcatctgcagaaagtggagattaaaaacgtcacccctgacaccgcgtaccgggacttctgtcttgctttcattgggaagaagaccctcacgcacctgaccctggcagggcacatcgagtgggaacgcacgatgatgctgatgctgtgtgacctgctcagaaatcataaatgcaacctgcagtacctgaggttgggaggtcactgtgccaccccggagcagtgggctgaattcttctatgtcctcaaagccaaccagtccctgaagcacctgcgtctctcagccaatgtgctcctggatgagggtgccatgttgctgtacaagaccatgacacgcccaaaacacttcctgcagatgttgtcgttggaaaactgtcgtcttacagaagccagttgcaaggaccttgctgctgtcttggttgtcagcaagaagctgacacacctgtgcttggccaagaaccccattggggatacaggggtgaagtttctgtgtgagggcttgagttaccctgattgtaaactgcagaccttggtgttacagcaatgcagcataaccaagcttggctgtagatatctctcagaggcgctccaagaagcctgcagcctcacaaacctggacttgagtatcaaccagatagctcgtggattgtggattctctgtcaggcattagagaatccaaactgtaacctaaaacacctacgcctctggagctgctccctcatgcctttctattgtcagcatcttggatctgctctcctcagcaatcagaagcttgaaactctggacctgggccagaatcatttgtggaagagtggcataattaagctctttggggttctaagacaaagaactggatccttgaagatactcaggttgaagacctatgaaactaatttggaaatcaagaagctgttggaggaagtgaaagaaaagaatcccaagctgactattgattgcaatgcttccggggcaacggcacctccgtgctgtgactttttttgctgagcagcctgggatcgctctacgaattacacaggaagcgggattcgggtctctaagatgtcttatgaatgcaggtcagagggtcacatgttaacactagagtctgtcgagaggtaggatttgacactggttttctcactatttttgggagattctgcacgagtcacgcacccccttcacatgacgctatgtactttctcacagggataataaagttagagcactctcgttgc

SEQ ID NO: 159781 - DNA, 3250 bp, Homo sapiens
  Payload ID: 11261
  Gene Symbol: NLRP7
  Gene Name: NLR family, pyrin domain containing 7
  Uniprot ID: Q8WX94
  ENST ID: ENST00000340844
  CDS Start-End: 77-3019
gaaacacaggctggaagcaagacctgacctgagggagttcttcagccttaacctaaggtctcatactcggagcactatgacatcgccccagctagagtggactctgcagacccttctggagcagctgaacgaggatgaattaaagagtttcaaatcccttttatgggcttttcccctcgaagacgtgctacagaagaccccatggtctgaggtggaagaggctgatggcaagaaactggcagaaattctggtcaacacctcctcagaaaattggataaggaatgcgactgtgaacatcttggaagagatgaatctcacggaattgtgtaagatggcaaaggctgagatgatggaggacggacaggtgcaagaaatagataatcctgagctgggagatgcagaagaagactcggagttagcaaagccaggtgaaaaggaaggatggagaaattcaatggagaaacagtctttggtctggaagaacaccttttggcaaggagacattgacaatttccatgacgacgtcactctgagaaaccaacggttcattccattcttgaatcccagaacacccaggaagctaacaccttacacggtggtgctgcacggccccgcaggcgtggggaaaaccacgctggccaaaaagtgtatgctggactggacagactgcaacctcagcccgacgctcagatacgcgttctacctcagctgcaaggagctcagccgcatgggcccctgcagttttgcagagctgatctccaaagactggcctgaattgcaggatgacattccaagcatcctagcccaagcacagagaatcctgttcgtggtcgatggccttgatgagctgaaagtcccacctggggcgctgatccaggacatctgcggggactgggagaagaagaagccggtgcccgtcctcctggggagtttgctgaagaggaagatgttacccagggcagccttgctggtcaccacgcggcccagggcactgagggacctccagctcctggcgcagcagccgatctacgtaagggtggagggcttcctggaggaggacaggagggcctatttcctgagacactttggagacgaggaccaagccatgcgtgcctttgagctaatgaggagcaacgcggccctgttccagctgggctcggcccccgcggtgtgctggattgtgtgcacgactctgaagctgcagatggagaagggggaggacccggtccccacctgcctcacccgcacggggctgttcctgcgtttcctctgcagccggttcccgcagggcgcacagctgcggggcgcgctgcggacgctgagcctcctggccgcgcagggcctgtgggcgcagatgtccgtgttccaccgagaggacctggaaaggctcggggtgcaggagtccgacctccgtctgttcctggacggagacatcctccgccaggacagagtctccaaaggctgctactccttcatccacctcagcttccagcagtttctcactgccctgttctacgccctggagaaggaggagggggaggacagggacggccacgcctgggacatcggggacgtacagaagctgctttccggagaagaaagactcaagaaccccgacctgattcaagtaggacacttcttattcggcctcgctaacgagaagagagccaaggagttggaggccacttttggctgccggatgtcaccggacatcaaacaggaattgctgcaatgcaaagcacatcttcatgcaaataagcccttatccgtgaccgacctgaaggaggtcttgggctgcctgtatgagtctcaggaggaggagctggcgaaggtggtggtggccccgttcaaggaaatttctattcacctgacaaatacttctgaagtgatgcattgttccttcagcctgaagcattgtcaagacttgcagaaactctcactgcaggtagcaaagggggtgttcctggagaattacatggattttgaactggacattgaatttgaaaggtgcacttacctaaccattccgaactgggctcggcaggatcttcgctctcttcgcctctggacagatttctgctctctcttcagctcaaacagcaacctcaagtttctggaagtgaaacaaagcttcctgagtgactcttctgtgcggattctttgtgaccacgtaacccgtagcacctgtcatctgcagaaagtggagattaaaaacgtcacccctgacaccgcgtaccgggacttctgtcttgctttcattgggaagaagaccctcacgcacctgaccctggcagggcacatcgagtgggaacgcacgatgatgctgatgctgtgtgacctgctcagaaatcataaatgcaacctgcagtacctgaggttgggaggtcactgtgccaccccggagcagtgggctgaattcttctatgtcctcaaagccaaccagtccctgaagcacctgcgtctctcagccaatgtgctcctggatgagggtgccatgttgctgtacaagaccatgacacgcccaaaacacttcctgcagatgttgtcgttggaaaactgtcgtcttacagaagccagttgcaaggaccttgctgctgtcttggttgtcagcaagaagctgacacacctgtgcttggccaagaaccccattggggatacaggggtgaagtttctgtgtgagggcttgagttaccctgattgtaaactgcagaccttggtgttacagcaatgcagcataaccaagcttggctgtagatatctctcagaggcgctccaagaagcctgcagcctcacaaacctggacttgagtatcaaccagatagctcgtggattgtggattctctgtcaggcattagagaatccaaactgtaacctaaaacacctacggttgaagacctatgaaactaatttggaaatcaagaagctgttggaggaagtgaaagaaaagaatcccaagctgactattgattgcaatgcttccggggcaacggcacctccgtgctgtgactttttttgctgagcagcctgggatcgctctacgaattacacaggaagcgggattcgggtctctaagatgtcttatgaatgcaggtcagagggtcacatgttaacactagagtctgtcgagaggtaggatttgacactggttttctcactatttttgggagattctgcacgagtcacgcacccccttcacatgacgctatgtactttctcacagggataataaagttagagcactctcgttgca

SEQ ID NO: 159782 - DNA, 3209 bp, Homo sapiens
  Payload ID: 11261
  Gene Symbol: NLRP7
  Gene Name: NLR family, pyrin domain containing 7
  Uniprot ID: Q8WX94
  ENST ID: ENST00000590030
  CDS Start-End: 42-2984
agttcttcagccttaacctaaggtctcatactcggagcactatgacatcgccccagctagagtggactctgcagacccttctggagcagctgaacgaggatgaattaaagagtttcaaatcccttttatgggcttttcccctcgaagacgtgctacagaagaccccatggtctgaggtggaagaggctgatggcaagaaactggcagaaattctggtcaacacctcctcagaaaattggataaggaatgcgactgtgaacatcttggaagagatgaatctcacggaattgtgtaagatggcaaaggctgagatgatggaggacggacaggtgcaagaaatagataatcctgagctgggagatgcagaagaagactcggagttagcaaagccaggtgaaaaggaaggatggagaaattcaatggagaaacagtctttggtctggaagaacaccttttggcaaggagacattgacaatttccatgacgacgtcactctgagaaaccaacggttcattccattcttgaatcccagaacacccaggaagctaacaccttacacggtggtgctgcacggccccgcaggcgtggggaaaaccacgctggccaaaaagtgtatgctggactggacagactgcaacctcagcccgacgctcagatacgcgttctacctcagctgcaaggagctcagccgcatgggcccctgcagttttgcagagctgatctccaaagactggcctgaattgcaggatgacattccaagcatcctagcccaagcacagagaatcctgttcgtggtcgatggccttgatgagctgaaagtcccacctggggcgctgatccaggacatctgcggggactgggagaagaagaagccggtgcccgtcctcctggggagtttgctgaagaggaagatgttacccagggcagccttgctggtcaccacgcggcccagggcactgagggacctccagctcctggcgcagcagccgatctacgtaagggtggagggcttcctggaggaggacaggagggcctatttcctgagacactttggagacgaggaccaagccatgcgtgcctttgagctaatgaggagcaacgcggccctgttccagctgggctcggcccccgcggtgtgctggattgtgtgcacgactctgaagctgcagatggagaagggggaggacccggtccccacctgcctcacccgcacggggctgttcctgcgtttcctctgcagccggttcccgcagggcgcacagctgcggggcgcgctgcggacgctgagcctcctggccgcgcagggcctgtgggcgcagatgtccgtgttccaccgagaggacctggaaaggctcggggtgcaggagtccgacctccgtctgttcctggacggagacatcctccgccaggacagagtctccaaaggctgctactccttcatccacctcagcttccagcagtttctcactgccctgttctacgccctggagaaggaggagggggaggacagggacggccacgcctgggacatcggggacgtacagaagctgctttccggagaagaaagactcaagaaccccgacctgattcaagtaggacacttcttattcggcctcgctaacgagaagagagccaaggagttggaggccacttttggctgccggatgtcaccggacatcaaacaggaattgctgcaatgcaaagcacatcttcatgcaaataagcccttatccgtgaccgacctgaaggaggtcttgggctgcctgtatgagtctcaggaggaggagctggcgaaggtggtggtggccccgttcaaggaaatttctattcacctgacaaatacttctgaagtgatgcattgttccttcagcctgaagcattgtcaagacttgcagaaactctcactgcaggtagcaaagggggtgttcctggagaattacatggattttgaactggacattgaatttgaaaggtgcacttacctaaccattccgaactgggctcggcaggatcttcgctctcttcgcctctggacagatttctgctctctcttcagctcaaacagcaacctcaagtttctggaagtgaaacaaagcttcctgagtgactcttctgtgcggattctttgtgaccacgtaacccgtagcacctgtcatctgcagaaagtggagattaaaaacgtcacccctgacaccgcgtaccgggacttctgtcttgctttcattgggaagaagaccctcacgcacctgaccctggcagggcacatcgagtgggaacgcacgatgatgctgatgctgtgtgacctgctcagaaatcataaatgcaacctgcagtacctgaggttgggaggtcactgtgccaccccggagcagtgggctgaattcttctatgtcctcaaagccaaccagtccctgaagcacctgcgtctctcagccaatgtgctcctggatgagggtgccatgttgctgtacaagaccatgacacgcccaaaacacttcctgcagatgttgtcgttggaaaactgtcgtcttacagaagccagttgcaaggaccttgctgctgtcttggttgtcagcaagaagctgacacacctgtgcttggccaagaaccccattggggatacaggggtgaagtttctgtgtgagggcttgagttaccctgattgtaaactgcagaccttggtgttacagcaatgcagcataaccaagcttggctgtagatatctctcagaggcgctccaagaagcctgcagcctcacaaacctggacttgagtatcaaccagatagctcgtggattgtggattctctgtcaggcattagagaatccaaactgtaacctaaaacacctacggttgaagacctatgaaactaatttggaaatcaagaagctgttggaggaagtgaaagaaaagaatcccaagctgactattgattgcaatgcttccggggcaacggcacctccgtgctgtgactttttttgctgagcagcctgggatcgctctacgaattacacaggaagcgggattcgggtctctaagatgtcttatgaatgcaggtcagagggtcacatgttaacactagagtctgtcgagaggtaggatttgacactggttttctcactatttttgggagattctgcacgagtcacgcacccccttcacatgacgctatgtactttctcacagggataataaagttagagcactctc

SEQ ID NO: 159783 - DNA, 3826 bp, Homo sapiens
  Payload ID: 11261
  Gene Symbol: NLRP7
  Gene Name: NLR family, pyrin domain containing 7
  Uniprot ID: Q8WX94
  ENST ID: ENST00000588756
  CDS Start-End: 488-3601
atcttgactgcctgttaaacttacctatgtggagcctcatttcaaagcacgaacgcctagagattctgcttgattggttacactgggactgcccagaccctggagttctttcgagagtcccagataactgtgattgcggccgaggctgagaatcaccgcttagaagcctcagctgtgattggctaccttctcccatcaccccagagtttttaaagctgggagccaggtaccctgcaaaacccaaaatgtgtatttcctgttctgtcgcctatcacacctggcccgggtggtctaggaagggaattgcacattaatctcacctggggagattcagcaagccgtaattctccaaagcccactgaagcccaattacagccaaatccctgaggatggggcccaggtgatgtcaaggaaacacaggctggaagcaagacctgacctgagggagttcttcagccttaacctaaggtctcatactcggagcactatgacatcgccccagctagagtggactctgcagacccttctggagcagctgaacgaggatgaattaaagagtttcaaatcccttttatgggcttttcccctcgaagacgtgctacagaagaccccatggtctgaggtggaagaggctgatggcaagaaactggcagaaattctggtcaacacctcctcagaaaattggataaggaatgcgactgtgaacatcttggaagagatgaatctcacggaattgtgtaagatggcaaaggctgagatgatggaggacggacaggtgcaagaaatagataatcctgagctgggagatgcagaagaagactcggagttagcaaagccaggtgaaaaggaaggatggagaaattcaatggagaaacagtctttggtctggaagaacaccttttggcaaggagacattgacaatttccatgacgacgtcactctgagaaaccaacggttcattccattcttgaatcccagaacacccaggaagctaacaccttacacggtggtgctgcacggccccgcaggcgtggggaaaaccacgctggccaaaaagtgtatgctggactggacagactgcaacctcagcccgacgctcagatacgcgttctacctcagctgcaaggagctcagccgcatgggcccctgcagttttgcagagctgatctccaaagactggcctgaattgcaggatgacattccaagcatcctagcccaagcacagagaatcctgttcgtggtcgatggccttgatgagctgaaagtcccacctggggcgctgatccaggacatctgcggggactgggagaagaagaagccggtgcccgtcctcctggggagtttgctgaagaggaagatgttacccagggcagccttgctggtcaccacgcggcccagggcactgagggacctccagctcctggcgcagcagccgatctacgtaagggtggagggcttcctggaggaggacaggagggcctatttcctgagacactttggagacgaggaccaagccatgcgtgcctttgagctaatgaggagcaacgcggccctgttccagctgggctcggcccccgcggtgtgctggattgtgtgcacgactctgaagctgcagatggagaagggggaggacccggtccccacctgcctcacccgcacggggctgttcctgcgtttcctctgcagccggttcccgcagggcgcacagctgcggggcgcgctgcggacgctgagcctcctggccgcgcagggcctgtgggcgcagatgtccgtgttccaccgagaggacctggaaaggctcggggtgcaggagtccgacctccgtctgttcctggacggagacatcctccgccaggacagagtctccaaaggctgctactccttcatccacctcagcttccagcagtttctcactgccctgttctacgccctggagaaggaggagggggaggacagggacggccacgcctgggacatcggggacgtacagaagctgctttccggagaagaaagactcaagaaccccgacctgattcaagtaggacacttcttattcggcctcgctaacgagaagagagccaaggagttggaggccacttttggctgccggatgtcaccggacatcaaacaggaattgctgcaatgcaaagcacatcttcatgcaaataagcccttatccgtgaccgacctgaaggaggtcttgggctgcctgtatgagtctcaggaggaggagctggcgaaggtggtggtggccccgttcaaggaaatttctattcacctgacaaatacttctgaagtgatgcattgttccttcagcctgaagcattgtcaagacttgcagaaactctcactgcaggtagcaaagggggtgttcctggagaattacatggattttgaactggacattgaatttgaaaggtgcacttacctaaccattccgaactgggctcggcaggatcttcgctctcttcgcctctggacagatttctgctctctcttcagctcaaacagcaacctcaagtttctggaagtgaaacaaagcttcctgagtgactcttctgtgcggattctttgtgaccacgtaacccgtagcacctgtcatctgcagaaagtggagattaaaaacgtcacccctgacaccgcgtaccgggacttctgtcttgctttcattgggaagaagaccctcacgcacctgaccctggcagggcacatcgagtgggaacgcacgatgatgctgatgctgtgtgacctgctcagaaatcataaatgcaacctgcagtacctgaggttgggaggtcactgtgccaccccggagcagtgggctgaattcttctatgtcctcaaagccaaccagtccctgaagcacctgcgtctctcagccaatgtgctcctggatgagggtgccatgttgctgtacaagaccatgacacgcccaaaacacttcctgcagatgttgtcgttggaaaactgtcgtcttacagaagccagttgcaaggaccttgctgctgtcttggttgtcagcaagaagctgacacacctgtgcttggccaagaaccccattggggatacaggggtgaagtttctgtgtgagggcttgagttaccctgattgtaaactgcagaccttggtgttacagcaatgcagcataaccaagcttggctgtagatatctctcagaggcgctccaagaagcctgcagcctcacaaacctggacttgagtatcaaccagatagctcgtggattgtggattctctgtcaggcattagagaatccaaactgtaacctaaaacacctacgcctctggagctgctccctcatgcctttctattgtcagcatcttggatctgctctcctcagcaatcagaagcttgaaactctggacctgggccagaatcatttgtggaagagtggcataattaagctctttggggttctaagacaaagaactggatccttgaagatactcaggttgaagacctatgaaactaatttggaaatcaagaagctgttggaggaagtgaaagaaaagaatcccaagctgactattgattgcaatgcttccggggcaacggcacctccgtgctgtgactttttttgctgagcagcctgggatcgctctacgaattacacaggaagcgggattcgggtctctaagatgtcttatgaatgcaggtcagagggtcacatgttaacactagagtctgtcgagaggtaggatttgacactggttttctcactatttttgggagattctgcacgagtcacgcacccccttcacatgacgctatgtactttctcacagggataataaagttagagcactctc

SEQ ID NO: 159784 - DNA, 559 bp, Homo sapiens
  Payload ID: 11261
  Gene Symbol: NLRP7
  Gene Name: NLR family, pyrin domain containing 7
  ENST ID: ENST00000587103
  CDS Start-End: 350-559
ttttgggggcggggggtgttggggggcggtccttcacctgagcttccggatctccacctgtggtcctccatcttgactgcctgttaaacttacctatgtggagcctcatttcaaagcacgaacgcctagagattctgcttgattggttacactgggactgcccagaccctggagttctttcgagagtcccagataactgtgattgcggccgaggctgagaatcaccgcttagaagcctcagctgtgattggctaccttctcccatcaccccaggaaacacaggctggaagcaagacctgacctgagggagttcttcagccttaacctaaggtctcatactcggagcactatgacatcgccccagctagagtggactctgcagacccttctggagcagctgaacgaggatgaattaaagagtttcaaatcccttttatgggcttttcccctcgaagacgtgctacagaagaccccatggtctgaggtggaagaggctgatggcaagaaactggcagaaattctggtcaacacctcctcagaaaattggataaggaatgcg

SEQ ID NO: 159785 - DNA, 568 bp, Homo sapiens
  Payload ID: 11261
  Gene Symbol: NLRP7
  Gene Name: NLR family, pyrin domain containing 7
  ENST ID: ENST00000590659
  CDS Start-End: 408-568
atcttgactgcctgttaaacttacctatgtggagcctcatttcaaagcacgaacgcctagagattctgcttgattggttacactgggactgcccagaccctggagttctttcgagagtcccagataactgtgattgcggccgaggctgagaatcaccgcttagaagcctcagctgtgattggctaccttctcccatcaccccaggaagggaattgcacattaatctcacctggggagattcagcaagccgtaattctccaaagcccactgaagcccaattacagccaaatccctgaggatggggcccaggtgatgtcaaggtgagcctgaggaaacacaggctggaagcaagacctgacctgagggagttcttcagccttaacctaaggtctcatactcggagcactatgacatcgccccagctagagtggactctgcagacccttctggagcagctgaacgaggatgaattaaagagtttcaaatcccttttatgggcttttcccctcgaagacgtgctacagaagaccccatggtctgaggtggaagaggctgatggcaagaaact

SEQ ID NO: 159786 - DNA, 543 bp, Homo sapiens
  Payload ID: 11261
  Gene Symbol: NLRP7
  Gene Name: NLR family, pyrin domain containing 7
  ENST ID: ENST00000587844
  CDS Start-End: 254-543
gtggtcctccatcttgactgcctgttaaacttacctatgtggagcctcatttcaaagcacgaacgcctagagattctgcttgattggttacactgggactgcccagaccctggagttctttcgagagtcccagataactgtgattgcggccgaggctgagaatcaccgcttagaagcctcagctgtgattggctaccttctcccatcaccccagttcttcagccttaacctaaggtctcatactcggagcactatgacatcgccccagctagagtggactctgcagacccttctggagcagctgaacgaggatgaattaaagagtttcaaatcccttttatgggcttttcccctcgaagacgtgctacagaagaccccatggtctgaggtggaagaggctgatggcaagaaactggcagaaattctggtcaacacctcctcagaaaattggataaggaatgcgactgtgaacatcttggaagagatgaatctcacggaattgtgtaagatggcaaaggctgagatgatggaggacggacaggt

SEQ ID NO: 159787 - DNA, 3233 bp, Homo sapiens
  Payload ID: 11261
  Gene Symbol: NLRP7
  Gene Name: NLR family, pyrin domain containing 7
  ENST ID: ENST00000586379
  CDS Start-End: 69-2960
ggctggaagcaagacctgacctgagggagttcttcagccttaacctaaggtctcatactcggagcactatgacatcgccccagctagagtggactctgcagacccttctggagcagctgaacgaggatgaattaaagagtttcaaatcccttttatgggcttttcccctcgaagacgtgctacagaagaccccatggtctgaggtggaagaggctgatggcaagaaactggcagaaattctggtcaacacctcctcagaaaattggataaggaatgcgactgtgaacatcttggaagagatgaatctcacggaattgtgtaagatggcaaaggctgagatgatggaggacggacaggtgcaagaaatagataatcctgagctgggagatgcagaagaagactcggagttagcaaagccaggtgaaaaggaaggatggagaaattcaatggagaaacagtctttggtctggaagaacaccttttggcaaggagacattgacaatttccatgacgacgtcactctgagaaaccaacggttcattccattcttgaatcccagaacacccaggaagctaacaccttacacggtggtgctgcacggccccgcaggcgtggggaaaaccacgctggccaaaaagtgtatgctggactggacagactgcaacctcagcccgacgctcagatacgcgttctacctcagctgcaaggagctcagccgcatgggcccctgcagttttgcagagctgatctccaaagactggcctgaattgcaggatgacattccaagcatcctagcccaagcacagagaatcctgttcgtggtcgatggccttgatgagctgaaagtcccacctggggcgctgatccaggacatctgcggggactgggagaagaagaagccggtgcccgtcctcctggggagtttgctgaagaggaagatgttacccagggcagccttgctggtcaccacgcggcccagggcactgagggacctccagctcctggcgcagcagccgatctacgtaagggtggagggcttcctggaggaggacaggagggcctatttcctgagacactttggagacgaggaccaagccatgcgtgcctttgagctaatgaggagcaacgcggccctgttccagctgggctcggcccccgcggtgtgctggattgtgtgcacgactctgaagctgcagatggagaagggggaggacccggtccccacctgcctcacccgcacggggctgttcctgcgtttcctctgcagccggttcccgcagggcgcacagctgcggggcgcgctgcggacgctgagcctcctggccgcgcagggcctgtgggcgcagatgtccgtgttccaccgagaggacctggaaaggctcggggtgcaggagtccgacctccgtctgttcctggacggagacatcctccgccaggacagagtctccaaaggctgctactccttcatccacctcagcttccagcagtttctcactgccctgttctacgccctggagaaggaggagggggaggacagggacggccacgcctgggacatcggggacgtacagaagctgctttccggagaagaaagactcaagaaccccgacctgattcaagtaggacacttcttattcggcctcgctaacgagaagagagccaaggagttggaggccacttttggctgccggatgtcaccggacatcaaacaggaattgctgcaatgcaaagcacatcttcatgcaaataagcccttatccgtgaccgacctgaaggaggtcttgggctgcctgtatgagtctcaggaggaggagctggcgaaggtggtggtggccccgttcaaggaaatttctattcacctgacaaatacttctgaagtgatgcattgttccttcagcctgaagcattgtcaagacttgcagaaactctcactgcaggtagcaaagggggtgttcctggagaattacatggattttgaactggacattgaatttgaaaggtgcacttacctaaccattccgaactgggctcggcaggatcttcgctctcttcgcctctggacagatttctgctctctcttcagctcaaacagcaacctcaagtttctggaagtgaaacaaagcttcctgagtgactcttctgtgcggattctttgtgaccacgtaacccgtagcacctgtcatctgcagaaagtggagattaaaaacgtcacccctgacaccgcgtaccgggacttctgtcttgctttcattgggaagaagaccctcacgcacctgaccctggcagggcacatcgagtgggaacgcacgatgatgctgatgctgtgtgacctgctcagaaatcataaatgcaacctgcagtacctgaggttgggaggtcactgtgccaccccggagcagtgggctgaattcttctatgtcctcaaagccaaccagtccctgaagcacctgcgtctctcagccaatgtgctcctggatgagggtgccatgttgctgtacaagaccatgacacgcccaaaacacttcctgcagatgttgtcgttggaaaactgtcgtcttacagaagccagttgcaaggaccttgctgctgtcttggttgtcagcaagaagctgacacacctgtgcttggccaagaaccccattggggatacaggggtgaagtttctgtgtgagggcttgagttaccctgattgtaaactgcagaccttggtgttacagcaatgcagcataaccaagcttggctgtagatatctctcagaggcgctccaagaagcctgcagcctcacaaacctggacttgagtatcaaccagatagctcgtggattgtggattctctgtcaggcattagagaatccaaactgtaacctaaaacacctacgcatcttggatctgctctcctcagcaatcagaagcttgaaactctggacctgggccagaatcatttgtggaagagtggcataattaagctctttggggttctaagacaaagaactggatccttgaagatactcaggttgaagacctatgaaactaatttggaaatcaagaagctgttggaggaagtgaaagaaaagaatcccaagctgactattgattgcaatgcttccggggcaacggcacctccgtgctgtgactttttttgctgagcagcctgggatcgctctacgaattacacaggaagcgggattcgggtctctaagatgtcttatgaatgcaggtcagagggtcacatgt

SEQ ID NO: 159788 - DNA, 3269 bp, Homo sapiens
  Payload ID: 11261
  Gene Symbol: NLRP7
  Gene Name: NLR family, pyrin domain containing 7
  Uniprot ID: Q8WX94
  ENST ID: ENST00000592784
  CDS Start-End: 69-3182
ggctggaagcaagacctgacctgagggagttcttcagccttaacctaaggtctcatactcggagcactatgacatcgccccagctagagtggactctgcagacccttctggagcagctgaacgaggatgaattaaagagtttcaaatcccttttatgggcttttcccctcgaagacgtgctacagaagaccccatggtctgaggtggaagaggctgatggcaagaaactggcagaaattctggtcaacacctcctcagaaaattggataaggaatgcgactgtgaacatcttggaagagatgaatctcacggaattgtgtaagatggcaaaggctgagatgatggaggacggacaggtgcaagaaatagataatcctgagctgggagatgcagaagaagactcggagttagcaaagccaggtgaaaaggaaggatggagaaattcaatggagaaacagtctttggtctggaagaacaccttttggcaaggagacattgacaatttccatgacgacgtcactctgagaaaccaacggttcattccattcttgaatcccagaacacccaggaagctaacaccttacacggtggtgctgcacggccccgcaggcgtggggaaaaccacgctggccaaaaagtgtatgctggactggacagactgcaacctcagcccgacgctcagatacgcgttctacctcagctgcaaggagctcagccgcatgggcccctgcagttttgcagagctgatctccaaagactggcctgaattgcaggatgacattccaagcatcctagcccaagcacagagaatcctgttcgtggtcgatggccttgatgagctgaaagtcccacctggggcgctgatccaggacatctgcggggactgggagaagaagaagccggtgcccgtcctcctggggagtttgctgaagaggaagatgttacccagggcagccttgctggtcaccacgcggcccagggcactgagggacctccagctcctggcgcagcagccgatctacgtaagggtggagggcttcctggaggaggacaggagggcctatttcctgagacactttggagacgaggaccaagccatgcgtgcctttgagctaatgaggagcaacgcggccctgttccagctgggctcggcccccgcggtgtgctggattgtgtgcacgactctgaagctgcagatggagaagggggaggacccggtccccacctgcctcacccgcacggggctgttcctgcgtttcctctgcagccggttcccgcagggcgcacagctgcggggcgcgctgcggacgctgagcctcctggccgcgcagggcctgtgggcgcagatgtccgtgttccaccgagaggacctggaaaggctcggggtgcaggagtccgacctccgtctgttcctggacggagacatcctccgccaggacagagtctccaaaggctgctactccttcatccacctcagcttccagcagtttctcactgccctgttctacgccctggagaaggaggagggggaggacagggacggccacgcctgggacatcggggacgtacagaagctgctttccggagaagaaagactcaagaaccccgacctgattcaagtaggacacttcttattcggcctcgctaacgagaagagagccaaggagttggaggccacttttggctgccggatgtcaccggacatcaaacaggaattgctgcaatgcaaagcacatcttcatgcaaataagcccttatccgtgaccgacctgaaggaggtcttgggctgcctgtatgagtctcaggaggaggagctggcgaaggtggtggtggccccgttcaaggaaatttctattcacctgacaaatacttctgaagtgatgcattgttccttcagcctgaagcattgtcaagacttgcagaaactctcactgcaggtagcaaagggggtgttcctggagaattacatggattttgaactggacattgaatttgaaaggtgcacttacctaaccattccgaactgggctcggcaggatcttcgctctcttcgcctctggacagatttctgctctctcttcagctcaaacagcaacctcaagtttctggaagtgaaacaaagcttcctgagtgactcttctgtgcggattctttgtgaccacgtaacccgtagcacctgtcatctgcagaaagtggagattaaaaacgtcacccctgacaccgcgtaccgggacttctgtcttgctttcattgggaagaagaccctcacgcacctgaccctggcagggcacatcgagtgggaacgcacgatgatgctgatgctgtgtgacctgctcagaaatcataaatgcaacctgcagtacctgaggttgggaggtcactgtgccaccccggagcagtgggctgaattcttctatgtcctcaaagccaaccagtccctgaagcacctgcgtctctcagccaatgtgctcctggatgagggtgccatgttgctgtacaagaccatgacacgcccaaaacacttcctgcagatgttgtcgttggaaaactgtcgtcttacagaagccagttgcaaggaccttgctgctgtcttggttgtcagcaagaagctgacacacctgtgcttggccaagaaccccattggggatacaggggtgaagtttctgtgtgagggcttgagttaccctgattgtaaactgcagaccttggtgttacagcaatgcagcataaccaagcttggctgtagatatctctcagaggcgctccaagaagcctgcagcctcacaaacctggacttgagtatcaaccagatagctcgtggattgtggattctctgtcaggcattagagaatccaaactgtaacctaaaacacctacgcctctggagctgctccctcatgcctttctattgtcagcatcttggatctgctctcctcagcaatcagaagcttgaaactctggacctgggccagaatcatttgtggaagagtggcataattaagctctttggggttctaagacaaagaactggatccttgaagatactcaggttgaagacctatgaaactaatttggaaatcaagaagctgttggaggaagtgaaagaaaagaatcccaagctgactattgattgcaatgcttccggggcaacggcacctccgtgctgtgactttttttgctgagcagcctgggatcgctctacgaattacacaggaagcgggattcgggtctctaagatgtcttatgaatgcaggtcagagggtcacatg

SEQ ID NO: 159789 - DNA, 3149 bp, Homo sapiens
  Payload ID: 11261
  Gene Symbol: NLRP7
  Gene Name: NLR family, pyrin domain containing 7
  ENST ID: ENST00000622173
  CDS Start-End: 69-2876
ggctggaagcaagacctgacctgagggagttcttcagccttaacctaaggtctcatactcggagcactatgacatcgccccagctagagtggactctgcagacccttctggagcagctgaacgaggatgaattaaagagtttcaaatcccttttatgggcttttcccctcgaagacgtgctacagaagaccccatggtctgaggtggaagaggctgatggcaagaaactggcagaaattctggtcaacacctcctcagaaaattggataaggaatgcgactgtgaacatcttggaagagatgaatctcacggaattgtgtaagatggcaaaggctgagatgatggaggacggacaggtgcaagaaatagataatcctgagctgggagatgcagaagaagactcggagttagcaaagccaggtgaaaaggaaggatggagaaattcaatggagaaacaatctttggtctggaagaacaccttttggcaaggagacattgacaatttccatgacgacgtcactctgagaaaccaacggttcattccattcttgaatcccagaacacccaggaagctaacaccttacacggtggtgctgcacggccccgcaggcgtggggaaaaccacgctggccaaaaagtgtatgctggactggacagactgcaacctcagcccgacgctcagatacgcgttctacctcagctgcaaggagctcagccgcatgggcccctgcagttttgcagagctgatctccaaagactggcctgaattgcaggatgacattccaagcatcctagcccaagcacagagaatcctgttcgtggtcgatggccttgatgagctgaaagtcccacctggggcgctgatccaggacatctgcggggactgggagaagaagaagccggtgcccgtcctcctggggagtttgctgaagaggaagatgttacccagggcagccttgctggtcaccacgcggcccagggcactgagggacctccagctcctggcgcagcagccgatctacgtaagggtggagggcttcctggaggaggacaggagggcctatttcctgagacactttggagacgaggaccaagccatgcgtgcctttgagctaatgaggagcaacgcggccctgttccagctgggctcggcccccgcggtgtgctggattgtgtgcacgactctgaagctgcagatggagaagggggaggacccggtccccacctgcctcacccgcacggggctgttcctgcgtttcctctgcagccggttcccgcagggcgcacagctgcggggcgcgctgcggacgctgagcctcctggccgcgcagggcctgtgggcgcagatgtccgtgttccaccgagaggacctggaaaggctcggggtgcaggagtccgacctccgtctgttcctggacggagacatcctccgccaggacagagtctccaaaggctgctactccttcatccacctcagcttccagcagtttctcactgccctgttctacaccctggagaaggaggagggggaggacagggacggccacgcctgggacatcggggacgtacagaagctgctttccggagaagaaagactcaagaaccccgacctgattcaagtaggacacttcttattcggcctcgctaacgagaagagagccaaggagttggaggccacttttggctgccggatgtcaccggacatcaaacaggaattgctgcaatgcaaagcacatcttcatgcaaataagcccttatccgtgaccgacctgaaggaggtcttgggctgcctgtatgagtctcaggaggaggagctggcgaaggtggtggtggccccgttcaaggaaatttctattcacctgacaaatacttctgaagtgatgcattgttccttcagcctgaagcattgtcaagacttgcagaaactctcactgcaggtagcaaagggggtgttcctggagaattacatggattttgaactggacattgaatttgaaagctcaaacagcaacctcaagtttctggaagtgaaacaaagcttcctgagtgactcttctgtgcggattctttgtgaccacgtaacccgtagcacctgtcatctgcagaaagtggagattaaaaacgtcacccctgacaccgcgtaccgggacttctgtcttgctttcattgggaagaagaccctcacgcacctgaccctggcagggcacatcgagtgggaacgcacgatgatgctgatgctgtgtgacctgctcagaaatcataaatgcaacctgcagtacctgaggttgggaggtcactgtgccaccccggagcagtgggctgaattcttctatgtcctcaaagccaaccagtccctgaagcacctgcgtctctcagccaatgtgctcctggatgagggtgccatgttgctgtacaagaccatgacacgcccaaaacacttcctgcagatgttgtcgttggaaaactgtcgtcttacagaagccagttgcaaggaccttgctgctgtcttggttgtcagcaagaagctgacacacctgtgcttggccaagaaccccattggggatacaggggtgaagtttctgtgtgagggcttgagttaccctgattgtaaactgcagaccttggtgttacagcaatgcagcataaccaagcttggctgtagatatctctcagaggcgctccaagaagcctgcagcctcacaaacctggacttgagtatcaaccagatagctcgtggattgtggattctctgtcaggcattagagaatccaaactgtaacctaaaacacctacgcatcttggatctgctctcctcagcaatcagaagcttgaaactctggacctgggccagaatcatttgtggaagagtggcataattaagctctttggggttctaagacaaagaactggatccttgaagatactcaggttgaagacctatgaaactaatttggaaatcaagaagctgttggaggaagtgaaagaaaagaatcccaagctgactattgattgcaatgcttccggggcaacggcacctccgtgctgtgactttttttgctgagcagcctgggatcgctctacgaattacacaggaagcgggattcgggtctctaagatgtcttatgaatgcaggtcagagggtcacatgt

SEQ ID NO: 159790 - DNA, 683 bp, Homo sapiens
  Payload ID: 11261
  Gene Symbol: NLRP7
  Gene Name: NLR family, pyrin domain containing 7
  ENST ID: ENST00000615467
  CDS Start-End: 1-472
gttacagcaatgcagcataaccaagcttggctgtagatacctctcagaggcgctccaagaagcctgcagcctcacaaacctggacttgagtatcaaccagatagctcgtggattgtggattctctgtcaggcgttagagaatccaaactgtaacctaaaacacctacgcctctggagctgctccctcatgcctttctattgtcagcatcttggatctgctctcctcagcaatcagaagcttgaaactctggacctgggccagaatcatttgtggaagagtggcataattaagctctttggggttctaagacaaagaactggatccttgaagatactcaggttgaagacctatgaaactaatttggaaatcaagaagctgttggaggaagtgaaagaaaagaatcccaagctgactattgattgcaatgcttccggggcaacggcacctccgtgctgtgactttttttgctgagcagcctgggatcgctctacgaattacacaggaagcgggattcgggtctctaagatgtcttatgaatgcaggtcagagggtcacatgttaacactagagtctgtcgagaggtaggatttgacactggttttctcactatttttgggagattctgcacgagtcacgcacccccttcacatgacgctatgtactttctcacagggataataaa

SEQ ID NO: 159791 - DNA, 3250 bp, Homo sapiens; identical to SEQ ID NO: 159781
  Payload ID: 11261
  Gene Symbol: NLRP7
  Gene Name: NLR family, pyrin domain containing 7
  Uniprot ID: Q8WX94
  ENST ID: ENST00000610790
  CDS Start-End: 77-3019

SEQ ID NO: 159792 - DNA, 559 bp, Homo sapiens; identical to SEQ ID NO: 159784
  Payload ID: 11261
  Gene Symbol: NLRP7
  Gene Name: NLR family, pyrin domain containing 7
  ENST ID: ENST00000618592
  CDS Start-End: 350-559

SEQ ID NO: 159793 - DNA, 3250 bp, Homo sapiens
  Payload ID: 11261
  Gene Symbol: NLRP7
  Gene Name: NLR family, pyrin domain containing 7
  ENST ID: ENST00000614922
  CDS Start-End: 77-3019
gaaacacaggctggaagcaagacctgacctgagggagttcttcagccttaacctaaggtctcatactcggagcactatgacatcgccccagctagagtggactctgcagacccttctggagcagctgaacgaggatgaattaaagagtttcaaatcccttttatgggcttttcccctcgaagacgtgctacagaagaccccatggtctgaggtggaagaggctgatggcaagaaactggcagaaattctggtcaacacctcctcagaaaattggataaggaatgcgactgtgaacatcttggaagagatgaatctcacggaattgtgtaagatggcaaaggctgagatgatggaggacggacaggtgcaagaaatagataatcctgagctgggagatgcagaagaagactcggagttagcaaagccaggtgaaaaggaaggatggagaaattcaatggagaaacaatctttggtctggaagaacaccttttggcaaggagacattgacaatttccatgacgacgtcactctgagaaaccaacggttcattccattcttgaatcccagaacacccaggaagctaacaccttacacggtggtgctgcacggccccgcaggcgtggggaaaaccacgctggccaaaaagtgtatgctggactggacagactgcaacctcagcccgacgctcagatacgcgttctacctcagctgcaaggagctcagccgcatgggcccctgcagttttgcagagctgatctccaaagactggcctgaattgcaggatgacattccaagcatcctagcccaagcacagagaatcctgttcgtggtcgatggccttgatgagctgaaagtcccacctggggcgctgatccaggacatctgcggggactgggagaagaagaagccggtgcccgtcctcctggggagtttgctgaagaggaagatgttacccagggcagccttgctggtcaccacgcggcccagggcactgagggacctccagctcctggcgcagcagccgatctacgtaagggtggagggcttcctggaggaggacaggagggcctatttcctgagacactttggagacgaggaccaagccatgcgtgcctttgagctaatgaggagcaacgcggccctgttccagctgggctcggcccccgcggtgtgctggattgtgtgcacgactctgaagctgcagatggagaagggggaggacccggtccccacctgcctcacccgcacggggctgttcctgcgtttcctctgcagccggttcccgcagggcgcacagctgcggggcgcgctgcggacgctgagcctcctggccgcgcagggcctgtgggcgcagatgtccgtgttccaccgagaggacctggaaaggctcggggtgcaggagtccgacctccgtctgttcctggacggagacatcctccgccaggacagagtctccaaaggctgctactccttcatccacctcagcttccagcagtttctcactgccctgttctacaccctggagaaggaggagggggaggacagggacggccacgcctgggacatcggggacgtacagaagctgctttccggagaagaaagactcaagaaccccgacctgattcaagtaggacacttcttattcggcctcgctaacgagaagagagccaaggagttggaggccacttttggctgccggatgtcaccggacatcaaacaggaattgctgcaatgcaaagcacatcttcatgcaaataagcccttatccgtgaccgacctgaaggaggtcttgggctgcctgtatgagtctcaggaggaggagctggcgaaggtggtggtggccccgttcaaggaaatttctattcacctgacaaatacttctgaagtgatgcattgttccttcagcctgaagcattgtcaagacttgcagaaactctcactgcaggtagcaaagggggtgttcctggagaattacatggattttgaactggacattgaatttgaaaggtgcacttacctaaccattccgaactgggctcggcaggatcttcgctctcttcgcctctggacagatttctgctctctcttcagctcaaacagcaacctcaagtttctggaagtgaaacaaagcttcctgagtgactcttctgtgcggattctttgtgaccacgtaacccgtagcacctgtcatctgcagaaagtggagattaaaaacgtcacccctgacaccgcgtaccgggacttctgtcttgctttcattgggaagaagaccctcacgcacctgaccctggcagggcacatcgagtgggaacgcacgatgatgctgatgctgtgtgacctgctcagaaatcataaatgcaacctgcagtacctgaggttgggaggtcactgtgccaccccggagcagtgggctgaattcttctatgtcctcaaagccaaccagtccctgaagcacctgcgtctctcagccaatgtgctcctggatgagggtgccatgttgctgtacaagaccatgacacgcccaaaacacttcctgcagatgttgtcgttggaaaactgtcgtcttacagaagccagttgcaaggaccttgctgctgtcttggttgtcagcaagaagctgacacacctgtgcttggccaagaaccccattggggatacaggggtgaagtttctgtgtgagggcttgagttaccctgattgtaaactgcagaccttggtgttacagcaatgcagcataaccaagcttggctgtagatatctctcagaggcgctccaagaagcctgcagcctcacaaacctggacttgagtatcaaccagatagctcgtggattgtggattctctgtcaggcattagagaatccaaactgtaacctaaaacacctacggttgaagacctatgaaactaatttggaaatcaagaagctgttggaggaagtgaaagaaaagaatcccaagctgactattgattgcaatgcttccggggcaacggcacctccgtgctgtgactttttttgctgagcagcctgggatcgctctacgaattacacaggaagcgggattcgggtctctaagatgtcttatgaatgcaggtcagagggtcacatgttaacactagagtctgtcgagaggtaggatttgacactggttttctcactatttttgggagattctgcacgagtcacgcacccccttcacatgacgctatgtactttctcacagggataataaagttagagcactctcgttgca

SEQ ID NO: 159794 - DNA, 3299 bp, Homo sapiens; identical to SEQ ID NO: 159780
  Payload ID: 11261
  Gene Symbol: NLRP7
  Gene Name: NLR family, pyrin domain containing 7
  Uniprot ID: Q8WX94
  ENST ID: ENST00000610853
  CDS Start-End: 40-3069

SEQ ID NO: 159795 - DNA, 3421 bp, Homo sapiens
  Payload ID: 11261
  Gene Symbol: NLRP7
  Gene Name: NLR family, pyrin domain containing 7
  ENST ID: ENST00000610981
  CDS Start-End: 77-3190
gaaacacaggctggaagcaagacctgacctgagggagttcttcagccttaacctaaggtctcatactcggagcactatgacatcgccccagctagagtggactctgcagacccttctggagcagctgaacgaggatgaattaaagagtttcaaatcccttttatgggcttttcccctcgaagacgtgctacagaagaccccatggtctgaggtggaagaggctgatggcaagaaactggcagaaattctggtcaacacctcctcagaaaattggataaggaatgcgactgtgaacatcttggaagagatgaatctcacggaattgtgtaagatggcaaaggctgagatgatggaggacggacaggtgcaagaaatagataatcctgagctgggagatgcagaagaagactcggagttagcaaagccaggtgaaaaggaaggatggagaaattcaatggagaaacagtctttggtctggaagaacaccttttggcaaggagacattgacaatttccatgacgacgtcactctgagaaaccaacggttcattccattcttgaatcccagaacacccaggaagctaacaccttacacggtggtgctgcacggccccgcaggcgtggggaaaaccacgctggccaaaaagtgtatgctggactggacagactgcaacctcagcccgacgctcagatacgcgttctacctcagctgcaaggagctcagccgcatgggcccctgcagttttgcagagctgatctccaaagactggcctgaattgcaggatgacattccaagcatcctagcccaagcacagagaatcctgttcgtggtcgatggccttgatgagctgaaagtcccacctggggcgctgatccaggacatctgcggggactgggagaagaagaagccggtgcccgtcctcctggggagtttgctgaagaggaagatgttacccagggcagccttgctggtcaccacgcggcccagggcactgagggacctccagctcctggcgcagcagccgatctacgtaagggtggagggcttcctggaggaggacaggagggcctatttcctgagacactttggagacgaggaccaagccatgcgtgcctttgagctaatgaggagcaacgcggccctgttccagctgggctcggcccccgcggtgtgctggattgtgtgcacgactctgaagctgcagatggagaagggggaggacccggtccccacctgcctcacccgcacggggctgttcctgcgtttcctctgcagccggttcccgcagggcgcacagctgcggggcgcgctgcggacgctgagcctcctggccgcgcagggcctgtgggcgcagatgtccgtgttccaccgagaggacctggaaaggctcggggtgcaggagtccgacctccgtctgttcctggacggagacatcctccgccaggacagagtctccaaaggctgctactccttcatccacctcagcttccagcagtttctcactgccctgttctacgccctggagaaggaggagggggaggacagggacggccacgcctgggacatcggggacgtacagaagctgctttccggagaagaaagactcaagaaccccgacctgattcaagtaggacacttcttattcggcctcgctaacgagaagagagccaaggagttggaggccacttttggctgccggatgtcaccggacatcaaacaggaattgctgcaatgcaaagcacatcttcatgcaaataagcccttatccgtgaccgacctgaaggaggtcttgggctgcctgtatgagtctcaggaggaggagctggcgaaggtggtggtggccccgttcaaggaaatttctattcacctgacaaatacttctgaagtgatgcattgttccttcagcctgaagcattgtcaagacttgcagaaactctcactgcaggtagcaaagggggtgttcctggagaattacatggattttgaactggacattgaatttgaaaggtgcacttacctaaccattccgaactgggctcggcaggatcttcgctctcttcgcctctggacagatttctgctctctcttcagctcaaacagcaacctcaagtttctggaagtgaaacaaagcttcctgagtgactcttctgtgcggattctttgtgaccacgtaacccgtagcacctgtcatctgcagaaagtggagattaaaaacgtcacccctgacaccgcgtaccgggacttctgtcttgctttcattgggaagaagaccctcacgcacctgaccctggcagggcacatcgagtgggaacgcacgatgatgctgatgctgtgtgacctgctcagaaatcataaatgcaacctgcagtacctgaggttgggaggtcactgtgccaccccggagcagtgggctgaattcttctatgtcctcaaagccaaccagtccctgaagcacctgcgtctctcagccaatgtgctcctggatgagggtgccatgttgctgtacaagaccatgacacgcccaaaacacttcctgcagatgttgtcgttggaaaactgtcgtcttacagaagccagttgcaaggaccttgctgctgtcttggttgtcagcaagaagctgacacacctgtgcttggccaagaaccccattggggatacaggggtgaagtttctgtgtgagggcttgagttaccctgattgtaaactgcagaccttggtgttacagcaatgcagcataaccaagcttggctgtagatatctctcagaggcgctccaagaagcctgcagcctcacaaacctggacttgagtatcaaccagatagctcgtggattgtggattctctgtcaggcattagagaatccaaactgtaacctaaaacacctacgcctctggagctgctccctcatgcctttctattgtcagcatcttggatctgctctcctcagcaatcagaagcttgaaactctggacctgggccagaatcatttgtggaagagtggcataattaagctctttggggttctaagacaaagaactggatccttgaagatactcaggttgaagacctatgaaactaatttggaaatcaagaagctgttggaggaagtgaaagaaaagaatcccaagctgactattgattgcaatgcttccggggcaacggcacctccgtgctgtgactttttttgctgagcagcctgggatcgctctacgaattacacaggaagcgggattcgggtctctaagatgtcttatgaatgcaggtcagagggtcacatgttaacactagagtctgtcgagaggtaggatttgacactggttttctcactatttttgggagattctgcacgagtcacgcacccccttcacatgacgctatgtactttctcacagggataataaagttagagcactctcgttgca

SEQ ID NO: 159796 - DNA, 3250 bp, Homo sapiens; identical to SEQ ID NO: 159781
  Payload ID: 11261
  Gene Symbol: NLRP7
  Gene Name: NLR family, pyrin domain containing 7
  Uniprot ID: Q8WX94
  ENST ID: ENST00000621584
  CDS Start-End: 77-3019

SEQ ID NO: 159797 - DNA, 543 bp, Homo sapiens; identical to SEQ ID NO: 159786
  Payload ID: 11261
  Gene Symbol: NLRP7
  Gene Name: NLR family, pyrin domain containing 7
  ENST ID: ENST00000622467
  CDS Start-End: 254-543

SEQ ID NO: 159798 - DNA, 3250 bp, Homo sapiens
  Payload ID: 11261
  Gene Symbol: NLRP7
  Gene Name: NLR family, pyrin domain containing 7
  ENST ID: ENST00000620183
  CDS Start-End: 77-3019
gaaacacaggctggaagcaagacctgacctgagggagttcttcagccttaacctaaggtctcatactcggagcactatgacatcgccccagctagagtggactctgcagacccttctggagcagctgaacgaggatgaattaaagagtttcaaatcccttttatgggcttttcccctcgaagacgtgctacagaagaccccatggtctgaggtggaagaggctgatggcaagaaactggcagaaattctggtcaacacctcctcagaaaattggataaggaatgcgactgtgaacatcttggaagagatgaatctcacggaattgtgtaagatggcaaaggctgagatgatggaggacggacaggtgcaagaaatagataatcctgagctgggagatgcagaagaagactcggagttagcaaagccaggtgaaaaggaaggatggagaaattcaatggagaaacagtctttggtctggaagaacaccttttggcaaggagacattgacaatttccatgacgacgtcactctgagaaaccaacggttcattccattcttgaatcccagaacacccaggaagctaacaccttacacggtggtgctgcacggccccgcaggcgtggggaaaaccacgctggccaaaaagtgtatgctggactggacagactgcaacctcagcccgacgctcagatacgcgttctacctcagctgcaaggagctcagccgcatgggcccctgcagttttgcagagctgatctccaaagactggcctgaattgcaggatgacattccaagcatcctagcccaagcacagagaatcctgttcgtggtcgatggccttgatgagctgaaagtcccacctggggcgctgatccaggacatctgcggggactgggagaagaagaagccggtgcccgtcctcctggggagtttgctgaagaggaagatgttacccagggcagccttgctggtcaccacgcggcccagggcactgagggacctccagctcctggcgcagcagccgatctacgtaagggtggagggcttcctggaggaggacaggagggcctatttcctgagacactttggagacgaggaccaagccatgcgtgcctttgagctaatgaggagcaacgcggccctgttccagctgggctcggcccccgcggtgtgctggattgtgtgcacgactctgaagctgcagatggagaagggggaggacccggtccccacctgcctcacccgcacggggctgttcctgcgtttcctctgcagccggttcccgcagggcgcacagctgcggggcgcgctgcggacgctgagcctcctggccgcgcagggcctgtgggcgcagatgtccgtgttccaccgagaggacctggaaaggctcggggtgcaggagtccgacctccgtctgttcctggacggagacatcctccgccaggacagagtctccaaaggctgctactccttcatccacctcagcttccagcagtttctcactgccctgttctacgccctggagaaggaggagggggaggacagggacggccacgcctgggacatcggggacgtacagaagctgctttccggagaagaaagactcaagaaccccgacctgattcaagtaggacacttcttattcggcctcgctaacgagaagagagccaaggagttggaggccacttttggctgccggatgtcaccggacatcaaacaggaattgctgcaatgcaaagcacatcttcatgcaaataagcccttatccgtgaccgacctgaaggaggtcttgggctgcctgtatgagtctcaggaggaggagctggcgaaggtggtggtggccccgttcaaggaaatttctattcacctgacaaatacttctgaagtgatgcattgttccttcagcctgaagcattgtcaagacttgcagaaactctcactgcaggtagcaaagggggtgttcctggagaattacatggattttgaactggacattgaatttgaaaggtgcacttacctaaccattccgaactgggctcggcaggatcttcgctctcttcgcctctggacagatttctgctctctcttcagctcaaacagcaacctcaagtttctggaagtgaaacaaagcttcctgagtgactcttctgtgcggattctttgtgaccacgtaacccgtagcacctgtcatctgcagaaagtggagattaaaaacgtcacccctgacaccgcgtaccgggacttctgtcttgctttcattgggaagaagaccctcacgcacctgaccctggcagggcacatcgagtgggaacgcacgatgatgctgatgctgtgtgacctgctcagaaatcataaatgcaacctgcagtacctgaggttgggaggtcactgtgccaccccggagcagtgggctgaattcttctatgtcctcaaagccaaccagtccctgaagcacctgcgtctctcagccaatgtgctcctggatgagggtgccatgttgctgtacaagaccatgacacgcccaaaacacttcctgcagatgttgtcgttggaaaactgtcgtcttacagaagccagttgcaaggaccttgctgctgtcttggttgtcagcaagaagctgacacacctgtgcttggccaagaaccccattggggatacaggggtgaagtttctgtgtgagggcttgagttaccctgattgtaaactgcagaccttggtgttacagcaatgcagcataaccaagcttggctgtagatacctctcagaggcgctccaagaagcctgcagcctcacaaacctggacttgagtatcaaccagatagctcgtggattgtggattctctgtcaggcgttagagaatccaaactgtaacctaaaacacctacggttgaagacctatgaaactaatttggaaatcaagaagctgttggaggaagtgaaagaaaagaatcccaagctgactattgattgcaatgcttccggggcaacggcacctccgtgctgtgactttttttgctgagcagcctgggatcgctctacgaattacacaggaagcgggattcgggtctctaagatgtcttatgaatgcaggtcagagggtcacatgttaacactagagtctgtcgagaggtaggatttgacactggttttctcactatttttgggagattctgcacgagtcacgcacccccttcacatgacgctatgtactttctcacagggataataaagttagagcactctcgttgca

SEQ ID NO: 159799 - DNA, 3421 bp, Homo sapiens
  Payload ID: 11261
  Gene Symbol: NLRP7
  Gene Name: NLR family, pyrin domain containing 7
  ENST ID: ENST00000618343
  CDS Start-End: 77-3190
gaaacacaggctggaagcaagacctgacctgagggagttcttcagccttaacctaaggtctcatactcggagcactatgacatcgccccagctagagtggactctgcagacccttctggagcagctgaacgaggatgaattaaagagtttcaaatcccttttatgggcttttcccctcgaagacgtgctacagaagaccccatggtctgaggtggaagaggctgatggcaagaaactggcagaaattctggtcaacacctcctcagaaaattggataaggaatgcgactgtgaacatcttggaagagatgaatctcacggaattgtgtaagatggcaaaggctgagatgatggaggacggacaggtgcaagaaatagataatcctgagctgggagatgcagaagaagactcggagttagcaaagccaggtgaaaaggaaggatggagaaattcaatggagaaacagtctttggtctggaagaacaccttttggcaaggagacattgacaatttccatgacgacgtcactctgagaaaccaacggttcattccattcttgaatcccagaacacccaggaagctaacaccttacacggtggtgctgcacggccccgcaggcgtggggaaaaccacgctggccaaaaagtgtatgctggactggacagactgcaacctcagcccgacgctcagatacgcgttctacctcagctgcaaggagctcagccgcatgggcccctgcagttttgcagagctgatctccaaagactggcctgaattgcaggatgacattccaagcatcctagcccaagcacagagaatcctgttcgtggtcgatggccttgatgagctgaaagtcccacctggggcgctgatccaggacatctgcggggactgggagaagaagaagccggtgcccgtcctcctggggagtttgctgaagaggaagatgttacccagggcagccttgctggtcaccacgcggcccagggcactgagggacctccagctcctggcgcagcagccgatctacgtaagggtggagggcttcctggaggaggacaggagggcctatttcctgagacactttggagacgaggaccaagccatgcgtgcctttgagctaatgaggagcaacgcggccctgttccagctgggctcggcccccgcggtgtgctggattgtgtgcacgactctgaagctgcagatggagaagggggaggacccggtccccacctgcctcacccgcacggggctgttcctgcgtttcctctgcagccggttcccgcagggcgcacagctgcggggcgcgctgcggacgctgagcctcctggccgcgcagggcctgtgggcgcagatgtccgtgttccaccgagaggacctggaaaggctcggggtgcaggagtccgacctccgtctgttcctggacggagacatcctccgccaggacagagtctccaaaggctgctactccttcatccacctcagcttccagcagtttctcactgccctgttctacgccctggagaaggaggagggggaggacagggacggccacgcctgggacatcggggacgtacagaagctgctttccggagaagaaagactcaagaaccccgacctgattcaagtaggacacttcttattcggcctcgctaacgagaagagagccaaggagttggaggccacttttggctgccggatgtcaccggacatcaaacaggaattgctgcaatgcaaagcacatcttcatgcaaataagcccttatccgtgaccgacctgaaggaggtcttgggctgcctgtatgagtctcaggaggaggagctggcgaaggtggtggtggccccgttcaaggaaatttctattcacctgacaaatacttctgaagtgatgcattgttccttcagcctgaagcattgtcaagacttgcagaaactctcactgcaggtagcaaagggggtgttcctggagaattacatggattttgaactggacattgaatttgaaaggtgcacttacctaaccattccgaactgggctcggcaggatcttcgctctcttcgcctctggacagatttctgctctctcttcagctcaaacagcaacctcaagtttctggaagtgaaacaaagcttcctgagtgactcttctgtgcggattctttgtgaccacgtaacccgtagcacctgtcatctgcagaaagtggagattaaaaacgtcacccctgacaccgcgtaccgggacttctgtcttgctttcattgggaagaagaccctcacgcacctgaccctggcagggcacatcgagtgggaacgcacgatgatgctgatgctgtgtgacctgctcagaaatcataaatgcaacctgcagtacctgaggttgggaggtcactgtgccaccccggagcagtgggctgaattcttctatgtcctcaaagccaaccagtccctgaagcacctgcgtctctcagccaatgtgctcctggatgagggtgccatgttgctgtacaagaccatgacacgcccaaaacacttcctgcagatgttgtcgttggaaaactgtcgtcttacagaagccagttgcaaggaccttgctgctgtcttggttgtcagcaagaagctgacacacctgtgcttggccaagaaccccattggggatacaggggtgaagtttctgtgtgagggcttgagttaccctgattgtaaactgcagaccttggtgttacagcaatgcagcataaccaagcttggctgtagatacctctcagaggcgctccaagaagcctgcagcctcacaaacctggacttgagtatcaaccagatagctcgtggattgtggattctctgtcaggcgttagagaatccaaactgtaacctaaaacacctacgcctctggagctgctccctcatgcctttctattgtcagcatcttggatctgctctcctcagcaatcagaagcttgaaactctggacctgggccagaatcatttgtggaagagtggcataattaagctctttggggttctaagacaaagaactggatccttgaagatactcaggttgaagacctatgaaactaatttggaaatcaagaagctgttggaggaagtgaaagaaaagaatcccaagctgactattgattgcaatgcttccggggcaacggcacctccgtgctgtgactttttttgctgagcagcctgggatcgctctacgaattacacaggaagcgggattcgggtctctaagatgtcttatgaatgcaggtcagagggtcacatgttaacactagagtctgtcgagaggtaggatttgacactggttttctcactatttttgggagattctgcacgagtcacgcacccccttcacatgacgctatgtactttctcacagggataataaagttagagcactctcgttgca

SEQ ID NO: 159800 - DNA, 3250 bp, Homo sapiens; identical to SEQ ID NO: 159781
  Payload ID: 11261
  Gene Symbol: NLRP7
  Gene Name: NLR family, pyrin domain containing 7
  Uniprot ID: Q8WX94
  ENST ID: ENST00000615699
  CDS Start-End: 77-3019

SEQ ID NO: 159801 - DNA, 3233 bp, Homo sapiens; identical to SEQ ID NO: 159787
  Payload ID: 11261
  Gene Symbol: NLRP7
  Gene Name: NLR family, pyrin domain containing 7
  ENST ID: ENST00000621903
  CDS Start-End: 69-2960

SEQ ID NO: 159802 - DNA, 3209 bp, Homo sapiens; identical to SEQ ID NO: 159782
  Payload ID: 11261
  Gene Symbol: NLRP7
  Gene Name: NLR family, pyrin domain containing 7
  Uniprot ID: Q8WX94
  ENST ID: ENST00000611597
  CDS Start-End: 42-2984

SEQ ID NO: 159803 - DNA, 3826 bp, Homo sapiens; identical to SEQ ID NO: 159783
  Payload ID: 11261
  Gene Symbol: NLRP7
  Gene Name: NLR family, pyrin domain containing 7
  Uniprot ID: Q8WX94
  ENST ID: ENST00000621238
  CDS Start-End: 488-3601

SEQ ID NO: 159804 - DNA, 3421 bp, Homo sapiens; identical to SEQ ID NO: 159795
  Payload ID: 11261
  Gene Symbol: NLRP7
  Gene Name: NLR family, pyrin domain containing 7
  Uniprot ID: Q8WX94
  ENST ID: ENST00000618672
  CDS Start-End: 77-3190

SEQ ID NO: 159805 - DNA, 523 bp, Homo sapiens
  Payload ID: 11261
  Gene Symbol: NLRP7
  Gene Name: NLR family, pyrin domain containing 7
  ENST ID: ENST00000613487
  CDS Start-End: 1-250
gttacagcaatgcagcataaccaagcttggctgtagatacctctcagaggcgctccaagaagcctgcagcctcacaaacctggacttgagtatcaaccagatagctcgtggattgtggattctctgtcaggcgttagagaatccaaactgtaacctaaaacacctacgcatcttggatctgctctcctcagcaatcagaagcttgaaactctggacctgggccagaatcatttgtggaagagtggcataattaagctctttggggttctaagacaaagaactggatccttgaagatactcaggttgaagacctatgaaactaatttggaaatcaagaagctgttggaggaagtgaaagaaaagaatcccaagctgactattgattgcaatgcttccggggcaacggcacctccgtgctgtgactttttttgctgagcagcctgggatcgctctacgaattacacaggaagcgggattcgggtctctaagatgtcttatgaatgcaggtcagagggtcacatgt

SEQ ID NO: 159806 - DNA, 3160 bp, Homo sapiens
  Payload ID: 11261
  Gene Symbol: NLRP7
  Gene Name: NLR family, pyrin domain containing 7
  ENST ID: ENST00000619082
  CDS Start-End: 71-2929
caggctggaagcaagacctgacctgagggagttcttcagccttaacctaaggtctcatactcggagcactatgacatcgccccagctagagtggactctgcagacccttctggagcagctgaacgaggatgaattaaagagtttcaaatcccttttatgggcttttcccctcgaagacgtgctacagaagaccccatggtctgaggtggaagaggctgatggcaagaaactggcagaaattctggtcaacacctcctcagaaaattggataaggaatgcgactgtgaacatcttggaagagatgaatctcacggaattgtgtaagatggcaaaggctgagatgatggaggacggacaggtgcaagaaatagataatcctgagctgggagatgcagaagaagactcggagttagcaaagccaggtgaaaaggaaggatggagaaattcaatggagaaacaatctttggtctggaagaacaccttttggcaaggagacattgacaatttccatgacgacgtcactctgagaaaccaacggttcattccattcttgaatcccagaacacccaggaagctaacaccttacacggtggtgctgcacggccccgcaggcgtggggaaaaccacgctggccaaaaagtgtatgctggactggacagactgcaacctcagcccgacgctcagatacgcgttctacctcagctgcaaggagctcagccgcatgggcccctgcagttttgcagagctgatctccaaagactggcctgaattgcaggatgacattccaagcatcctagcccaagcacagagaatcctgttcgtggtcgatggccttgatgagctgaaagtcccacctggggcgctgatccaggacatctgcggggactgggagaagaagaagccggtgcccgtcctcctggggagtttgctgaagaggaagatgttacccagggcagccttgctggtcaccacgcggcccagggcactgagggacctccagctcctggcgcagcagccgatctacgtaagggtggagggcttcctggaggaggacaggagggcctatttcctgagacactttggagacgaggaccaagccatgcgtgcctttgagctaatgaggagcaacgcggccctgttccagctgggctcggcccccgcggtgtgctggattgtgtgcacgactctgaagctgcagatggagaagggggaggacccggtccccacctgcctcacccgcacggggctgttcctgcgtttcctctgcagccggttcccgcagggcgcacagctgcggggcgcgctgcggacgctgagcctcctggccgcgcagggcctgtgggcgcagatgtccgtgttccaccgagaggacctggaaaggctcggggtgcaggagtccgacctccgtctgttcctggacggagacatcctccgccaggacagagtctccaaaggctgctactccttcatccacctcagcttccagcagtttctcactgccctgttctacaccctggagaaggaggagggggaggacagggacggccacgcctgggacatcggggacgtacagaagctgctttccggagaagaaagactcaagaaccccgacctgattcaagtaggacacttcttattcggcctcgctaacgagaagagagccaaggagttggaggccacttttggctgccggatgtcaccggacatcaaacaggaattgctgcaatgcaaagcacatcttcatgcaaataagcccttatccgtgaccgacctgaaggaggtcttgggctgcctgtatgagtctcaggaggaggagctggcgaaggtggtggtggccccgttcaaggaaatttctattcacctgacaaatacttctgaagtgatgcattgttccttcagcctgaagcattgtcaagacttgcagaaactctcactgcaggtagcaaagggggtgttcctggagaattacatggattttgaactggacattgaatttgaaagctcaaacagcaacctcaagtttctggaagtgaaacaaagcttcctgagtgactcttctgtgcggattctttgtgaccacgtaacccgtagcacctgtcatctgcagaaagtggagattaaaaacgtcacccctgacaccgcgtaccgggacttctgtcttgctttcattgggaagaagaccctcacgcacctgaccctggcagggcacatcgagtgggaacgcacgatgatgctgatgctgtgtgacctgctcagaaatcataaatgcaacctgcagtacctgaggttgggaggtcactgtgccaccccggagcagtgggctgaattcttctatgtcctcaaagccaaccagtccctgaagcacctgcgtctctcagccaatgtgctcctggatgagggtgccatgttgctgtacaagaccatgacacgcccaaaacacttcctgcagatgttgtcgttggaaaactgtcgtcttacagaagccagttgcaaggaccttgctgctgtcttggttgtcagcaagaagctgacacacctgtgcttggccaagaaccccattggggatacaggggtgaagtttctgtgtgagggcttgagttaccctgattgtaaactgcagaccttggtgttacagcaatgcagcataaccaagcttggctgtagatatctctcagaggcgctccaagaagcctgcagcctcacaaacctggacttgagtatcaaccagatagctcgtggattgtggattctctgtcaggcattagagaatccaaactgtaacctaaaacacctacggttgaagacctatgaaactaatttggaaatcaagaagctgttggaggaagtgaaagaaaagaatcccaagctgactattgattgcaatgcttccggggcaacggcacctccgtgctgtgactttttttgctgagcagcctgggatcgctctacgaattacacaggaagcgggattcgggtctctaagatgtcttatgaatgcaggtcagagggtcacatgttaacactagagtctgtcgagaggtaggatttgacactggttttctcactatttttgggagattctgcacgagtcacgcacccccttcacatgacgctatgtactttctcacagggataataaagttagagcactctcgttgca

SEQ ID NO: 159807 - DNA, 3421 bp, Homo sapiens
  Payload ID: 11261
  Gene Symbol: NLRP7
  Gene Name: NLR family, pyrin domain containing 7
  ENST ID: ENST00000621787
  CDS Start-End: 77-3190
gaaacacaggctggaagcaagacctgacctgagggagttcttcagccttaacctaaggtctcatactcggagcactatgacatcgccccagctagagtggactctgcagacccttctggagcagctgaacgaggatgaattaaagagtttcaaatcccttttatgggcttttcccctcgaagacgtgctacagaagaccccatggtctgaggtggaagaggctgatggcaagaaactggcagaaattctggtcaacacctcctcagaaaattggataaggaatgcgactgtgaacatcttggaagagatgaatctcacggaattgtgtaagatggcaaaggctgagatgatggaggacggacaggtgcaagaaatagataatcctgagctgggagatgcagaagaagactcggagttagcaaagccaggtgaaaaggaaggatggagaaattcaatggagaaacaatctttggtctggaagaacaccttttggcaaggagacattgacaatttccatgacgacgtcactctgagaaaccaacggttcattccattcttgaatcccagaacacccaggaagctaacaccttacacggtggtgctgcacggccccgcaggcgtggggaaaaccacgctggccaaaaagtgtatgctggactggacagactgcaacctcagcccgacgctcagatacgcgttctacctcagctgcaaggagctcagccgcatgggcccctgcagttttgcagagctgatctccaaagactggcctgaattgcaggatgacattccaagcatcctagcccaagcacagagaatcctgttcgtggtcgatggccttgatgagctgaaagtcccacctggggcgctgatccaggacatctgcggggactgggagaagaagaagccggtgcccgtcctcctggggagtttgctgaagaggaagatgttacccagggcagccttgctggtcaccacgcggcccagggcactgagggacctccagctcctggcgcagcagccgatctacgtaagggtggagggcttcctggaggaggacaggagggcctatttcctgagacactttggagacgaggaccaagccatgcgtgcctttgagctaatgaggagcaacgcggccctgttccagctgggctcggcccccgcggtgtgctggattgtgtgcacgactctgaagctgcagatggagaagggggaggacccggtccccacctgcctcacccgcacggggctgttcctgcgtttcctctgcagccggttcccgcagggcgcacagctgcggggcgcgctgcggacgctgagcctcctggccgcgcagggcctgtgggcgcagatgtccgtgttccaccgagaggacctggaaaggctcggggtgcaggagtccgacctccgtctgttcctggacggagacatcctccgccaggacagagtctccaaaggctgctactccttcatccacctcagcttccagcagtttctcactgccctgttctacaccctggagaaggaggagggggaggacagggacggccacgcctgggacatcggggacgtacagaagctgctttccggagaagaaagactcaagaaccccgacctgattcaagtaggacacttcttattcggcctcgctaacgagaagagagccaaggagttggaggccacttttggctgccggatgtcaccggacatcaaacaggaattgctgcaatgcaaagcacatcttcatgcaaataagcccttatccgtgaccgacctgaaggaggtcttgggctgcctgtatgagtctcaggaggaggagctggcgaaggtggtggtggccccgttcaaggaaatttctattcacctgacaaatacttctgaagtgatgcattgttccttcagcctgaagcattgtcaagacttgcagaaactctcactgcaggtagcaaagggggtgttcctggagaattacatggattttgaactggacattgaatttgaaaggtgcacttacctaaccattccgaactgggctcggcaggatcttcgctctcttcgcctctggacagatttctgctctctcttcagctcaaacagcaacctcaagtttctggaagtgaaacaaagcttcctgagtgactcttctgtgcggattctttgtgaccacgtaacccgtagcacctgtcatctgcagaaagtggagattaaaaacgtcacccctgacaccgcgtaccgggacttctgtcttgctttcattgggaagaagaccctcacgcacctgaccctggcagggcacatcgagtgggaacgcacgatgatgctgatgctgtgtgacctgctcagaaatcataaatgcaacctgcagtacctgaggttgggaggtcactgtgccaccccggagcagtgggctgaattcttctatgtcctcaaagccaaccagtccctgaagcacctgcgtctctcagccaatgtgctcctggatgagggtgccatgttgctgtacaagaccatgacacgcccaaaacacttcctgcagatgttgtcgttggaaaactgtcgtcttacagaagccagttgcaaggaccttgctgctgtcttggttgtcagcaagaagctgacacacctgtgcttggccaagaaccccattggggatacaggggtgaagtttctgtgtgagggcttgagttaccctgattgtaaactgcagaccttggtgttacagcaatgcagcataaccaagcttggctgtagatatctctcagaggcgctccaagaagcctgcagcctcacaaacctggacttgagtatcaaccagatagctcgtggattgtggattctctgtcaggcattagagaatccaaactgtaacctaaaacacctacgcctctggagctgctccctcatgcctttctattgtcagcatcttggatctgctctcctcagcaatcagaagcttgaaactctggacctgggccagaatcatttgtggaagagtggcataattaagctctttggggttctaagacaaagaactggatccttgaagatactcaggttgaagacctatgaaactaatttggaaatcaagaagctgttggaggaagtgaaagaaaagaatcccaagctgactattgattgcaatgcttccggggcaacggcacctccgtgctgtgactttttttgctgagcagcctgggatcgctctacgaattacacaggaagcgggattcgggtctctaagatgtcttatgaatgcaggtcagagggtcacatgttaacactagagtctgtcgagaggtaggatttgacactggttttctcactatttttgggagattctgcacgagtcacgcacccccttcacatgacgctatgtactttctcacagggataataaagttagagcactctcgttgca

SEQ ID NO: 159808 - DNA, 3250 bp, Homo sapiens; identical to SEQ ID NO: 159781
  Payload ID: 11261
  Gene Symbol: NLRP7
  Gene Name: NLR family, pyrin domain containing 7
  ENST ID: ENST00000618995
  CDS Start-End: 77-3019

SEQ ID NO: 159809 - DNA, 532 bp, Homo sapiens
  Payload ID: 11261
  Gene Symbol: NLRP7
  Gene Name: NLR family, pyrin domain containing 7
  ENST ID: ENST00000613325
  CDS Start-End: 1-301
gttacagcaatgcagcataaccaagcttggctgtagatacctctcagaggcgctccaagaagcctgcagcctcacaaacctggacttgagtatcaaccagatagctcgtggattgtggattctctgtcaggcgttagagaatccaaactgtaacctaaaacacctacggttgaagacctatgaaactaatttggaaatcaagaagctgttggaggaagtgaaagaaaagaatcccaagctgactattgattgcaatgcttccggggcaacggcacctccgtgctgtgactttttttgctgagcagcctgggatcgctctacgaattacacaggaagcgggattcgggtctctaagatgtcttatgaatgcaggtcagagggtcacatgttaacactagagtctgtcgagaggtaggatttgacactggttttctcactatttttgggagattctgcacgagtcacgcacccccttcacatgacgctatgtactttctcacagggataataaagttagagcactctcgttgca

SEQ ID NO: 159810 - DNA, 3421 bp, Homo sapiens; identical to SEQ ID NO: 159795
  Payload ID: 11261
  Gene Symbol: NLRP7
  Gene Name: NLR family, pyrin domain containing 7
  Uniprot ID: Q8WX94
  ENST ID: ENST00000622199
  CDS Start-End: 77-3190

SEQ ID NO: 159811 - DNA, 3421 bp, Homo sapiens; identical to SEQ ID NO: 159795
  Payload ID: 11261
  Gene Symbol: NLRP7
  Gene Name: NLR family, pyrin domain containing 7
  ENST ID: ENST00000620820
  CDS Start-End: 77-3190

SEQ ID NO: 159812 - DNA, 568 bp, Homo sapiens; identical to SEQ ID NO: 159785
  Payload ID: 11261
  Gene Symbol: NLRP7
  Gene Name: NLR family, pyrin domain containing 7
  ENST ID: ENST00000620334
  CDS Start-End: 408-568

SEQ ID NO: 159813 - DNA, 3269 bp, Homo sapiens; identical to SEQ ID NO: 159788
  Payload ID: 11261
  Gene Symbol: NLRP7
  Gene Name: NLR family, pyrin domain containing 7
  Uniprot ID: Q8WX94
  ENST ID: ENST00000610424
  CDS Start-End: 69-3182

SEQ ID NO: 159814 - DNA, 3250 bp, Homo sapiens; identical to SEQ ID NO: 159781
  Payload ID: 11261
  Gene Symbol: NLRP7
  Gene Name: NLR family, pyrin domain containing 7
  ENST ID: ENST00000613233
  CDS Start-End: 77-3019

SEQ ID NO: 159815 - DNA, 3250 bp, Homo sapiens; identical to SEQ ID NO: 159781
  Payload ID: 11261
  Gene Symbol: NLRP7
  Gene Name: NLR family, pyrin domain containing 7
  Uniprot ID: Q8WX94
  ENST ID: ENST00000618261
  CDS Start-End: 77-3019

SEQ ID NO: 159816 - DNA, 3325 bp, Homo sapiens
  Payload ID: 11261
  Gene Symbol: NLRP7
  Gene Name: NLR family, pyrin domain containing 7
  ENST ID: ENST00000619096
  CDS Start-End: 71-3100
caggctggaagcaagacctgacctgagggagttcttcagccttaacctaaggtctcatactcggagcactatgacatcgccccagctagagtggactctgcagacccttctggagcagctgaacgaggatgaattaaagagtttcaaatcccttttatgggcttttcccctcgaagacgtgctacagaagaccccatggtctgaggtggaagaggctgatggcaagaaactggcagaaattctggtcaacacctcctcagaaaattggataaggaatgcgactgtgaacatcttggaagagatgaatctcacggaattgtgtaagatggcaaaggctgagatgatggaggacggacaggtgcaagaaatagataatcctgagctgggagatgcagaagaagactcggagttagcaaagccaggtgaaaaggaaggatggagaaattcaatggagaaacaatctttggtctggaagaacaccttttggcaaggagacattgacaatttccatgacgacgtcactctgagaaaccaacggttcattccattcttgaatcccagaacacccaggaagctaacaccttacacggtggtgctgcacggccccgcaggcgtggggaaaaccacgctggccaaaaagtgtatgctggactggacagactgcaacctcagcccgacgctcagatacgcgttctacctcagctgcaaggagctcagccgcatgggcccctgcagttttgcagagctgatctccaaagactggcctgaattgcaggatgacattccaagcatcctagcccaagcacagagaatcctgttcgtggtcgatggccttgatgagctgaaagtcccacctggggcgctgatccaggacatctgcggggactgggagaagaagaagccggtgcccgtcctcctggggagtttgctgaagaggaagatgttacccagggcagccttgctggtcaccacgcggcccagggcactgagggacctccagctcctggcgcagcagccgatctacgtaagggtggagggcttcctggaggaggacaggagggcctatttcctgagacactttggagacgaggaccaagccatgcgtgcctttgagctaatgaggagcaacgcggccctgttccagctgggctcggcccccgcggtgtgctggattgtgtgcacgactctgaagctgcagatggagaagggggaggacccggtccccacctgcctcacccgcacggggctgttcctgcgtttcctctgcagccggttcccgcagggcgcacagctgcggggcgcgctgcggacgctgagcctcctggccgcgcagggcctgtgggcgcagatgtccgtgttccaccgagaggacctggaaaggctcggggtgcaggagtccgacctccgtctgttcctggacggagacatcctccgccaggacagagtctccaaaggctgctactccttcatccacctcagcttccagcagtttctcactgccctgttctacaccctggagaaggaggagggggaggacagggacggccacgcctgggacatcggggacgtacagaagctgctttccggagaagaaagactcaagaaccccgacctgattcaagtaggacacttcttattcggcctcgctaacgagaagagagccaaggagttggaggccacttttggctgccggatgtcaccggacatcaaacaggaattgctgcaatgcaaagcacatcttcatgcaaataagcccttatccgtgaccgacctgaaggaggtcttgggctgcctgtatgagtctcaggaggaggagctggcgaaggtggtggtggccccgttcaaggaaatttctattcacctgacaaatacttctgaagtgatgcattgttccttcagcctgaagcattgtcaagacttgcagaaactctcactgcaggtagcaaagggggtgttcctggagaattacatggattttgaactggacattgaatttgaaagctcaaacagcaacctcaagtttctggaagtgaaacaaagcttcctgagtgactcttctgtgcggattctttgtgaccacgtaacccgtagcacctgtcatctgcagaaagtggagattaaaaacgtcacccctgacaccgcgtaccgggacttctgtcttgctttcattgggaagaagaccctcacgcacctgaccctggcagggcacatcgagtgggaacgcacgatgatgctgatgctgtgtgacctgctcagaaatcataaatgcaacctgcagtacctgaggttgggaggtcactgtgccaccccggagcagtgggctgaattcttctatgtcctcaaagccaaccagtccctgaagcacctgcgtctctcagccaatgtgctcctggatgagggtgccatgttgctgtacaagaccatgacacgcccaaaacacttcctgcagatgttgtcgttggaaaactgtcgtcttacagaagccagttgcaaggaccttgctgctgtcttggttgtcagcaagaagctgacacacctgtgcttggccaagaaccccattggggatacaggggtgaagtttctgtgtgagggcttgagttaccctgattgtaaactgcagaccttggtgttacagcaatgcagcataaccaagcttggctgtagatatctctcagaggcgctccaagaagcctgcagcctcacaaacctggacttgagtatcaaccagatagctcgtggattgtggattctctgtcaggcattagagaatccaaactgtaacctaaaacacctacgcctctggagctgctccctcatgcctttctattgtcagcatcttggatctgctctcctcagcaatcagaagcttgaaactctggacctgggccagaatcatttgtggaagagtggcataattaagctctttggggttctaagacaaagaactggatccttgaagatactcaggttgaagacctatgaaactaatttggaaatcaagaagctgttggaggaagtgaaagaaaagaatcccaagctgactattgattgcaatgcttccggggcaacggcacctccgtgctgtgactttttttgctgagcagcctgggatcgctctacgaattacacaggaagcgggattcgggtctctaagatgtcttatgaatgcaggtcagagggtcacatgttaacactagagtctgtcgagaggtaggatttgacactggttttctcactatttttgggagattctgcacgagtcacgcacccccttcacatgacgctatgtactttctcacagggataataaagttagagcactctc

SEQ ID NO: 159817 - DNA, 3421 bp, Homo sapiens; identical to SEQ ID NO: 159795
  Payload ID: 11261
  Gene Symbol: NLRP7
  Gene Name: NLR family, pyrin domain containing 7
  ENST ID: ENST00000615426
  CDS Start-End: 77-3190

SEQ ID NO: 159818 - DNA, 3250 bp, Homo sapiens; identical to SEQ ID NO: 159781
  Payload ID: 11261
  Gene Symbol: NLRP7
  Gene Name: NLR family, pyrin domain containing 7
  ENST ID: ENST00000614879
  CDS Start-End: 77-3019

SEQ ID NO: 159819 - DNA, 3421 bp, Homo sapiens; identical to SEQ ID NO: 159795
  Payload ID: 11261
  Gene Symbol: NLRP7
  Gene Name: NLR family, pyrin domain containing 7
  Uniprot ID: Q8WX94
  ENST ID: ENST00000618740
  CDS Start-End: 77-3190

SEQ ID NO: 159820 - DNA, 3934 bp, Homo sapiens
  Payload ID: 11262
  Gene Symbol: NLRP8
  Gene Name: NLR family, pyrin domain containing 8
  Uniprot ID: Q86W28
  ENST ID: ENST00000291971
  CDS Start-End: 72-3218
gtctcgtgtttctctcttccaatcggttgtctttatcgtggacactgaggtgttctctgccttgactaaagatgagtgacgtgaatccaccctctgacacccccattcccttttcatcctcctccactcacagttctcatattccgccctggacattctcttgctaccccggctccccatgtgaaaatggggtcatgctgtacatgagaaacgtgagccatgaggagctacaacggttcaagcagctcttactgactgagctcagtactggcaccatgcccatcacctgggaccaggtcgagacagccagctgggcagaggtggttcatctcttgatagagcgtttccctggacgacgcgcttgggatgtgacttcgaacatctttgccattatgaactgtgataaaatgtgtgttgtagtccgcagagagataaatgccattctgcctaccttggaaccagaggacttgaatgtgggagaaacacaggtgaatctggaggaaggagaatctggtaaaatacggcggtataaatcgaatgtgatggaaaagtttttccccatatgggacattacgacttggcctggaaaccagagggacttcttctaccaaggtgtacacaggcacgaggagtacttaccatgtctgcttctgcccaaaagaccccagggtagacagcccaagaccgtggccatacagggagctcctgggatcggaaaaacaatcctggccaaaaaggtgatgtttgagtgggccagaaacaagttctacgcccacaagcgctggtgtgctttctacttccattgccaagaggtgaaccagacgacagaccagagcttctccgagctgattgagcaaaagtggcctggatctcaggacctcgtgtcaaagattatgtccaaacccgaccaacttctgctgctcttggatggctttgaggagctcacatctaccctcattgacagactggaggacctgagtgaagactggaggcagaaattgcctgggtctgtcctactgagcagtttgctgagcaaaacgatgcttccagaggccacgctactgatcatgataagatttacctcttggcagacatgcaagcccttgctgaaatgtccctctctcgtaacccttccggggtttaatacgatggaaaaaatcaagtatttccagatgtattttggacacacagaggagggagaccaagtcttgagtttcgccatggaaaacaccattctcttctccatgtgccgggtccctgtggtttgctggatggtctgctctggtctgaaacagcaaatggagagaggaaacaatctcacacagtcatgtccaaatgccacctctgtgttcgtccggtatatttctagcttgtttcccaccagagctgagaacttttccagaaagatccaccaagcacaactggaaggtctgtgtcacttggccgcagacagcatgtggcacaggaaatgggtgttaggtaaagaagatcttgaggaagccaagctggatcagacgggagtcaccgccttccttggcatgagtattcttcggagaattgcaggtgaggaagaccactatgtctttaccctcgtgacttttcaggaattttttgcggccttgttttatgttctctgtttcccacaaagactcaaaaattttcatgtgttgagccacgtgaatatccagcgcctgatagcgagtcccagaggaagcaaaagctatctctctcacatgggacttttcttattcggttttctgaacgaggcctgcgcttcggccgtggaacagtcattccaatgcaaggtgtctttcggtaataagaggaaactgctgaaagtcatacctctgttgcataaatgtgacccaccttctccgggcagtggggtcccgcagttattctactgtctgcatgaaatccgggaggaagcctttgtaagccaagccctaaatgattatcataaagttgtcttgagaattggcaacaacaaagaagttcaagtgtctgctttttgcctgaagcggtgtcaatatttgcatgaggtggaactgaccgtcaccctgaacttcatgaacgtgtggaagctcagctccagctcccatcctggctctgaagcgccagagagcaatgggctgcatcgttggtggcaagacttatgctctgtgtttgcaacgaatgataagctggaagtcctgactatgaccaacagtgttttggggcctccttttttgaaggctctcgcggccgcactgaggcaccctcagtgcaaactgcaaaagctactcctaaggcgtgtgaatagcaccatgttgaaccaggacttaatcggtgttttgacggggaaccagcatctgagatacttggaaatacaacatgtggaagtggagtccaaagctgtgaagcttctatgcagggtgctgagatccccccggtgccgtctgcagtgtctcaggttggaagactgcttggccacccctagaatttggactgatcttggcaataatcttcaaggtaacgggcatctaaagactctcatactaagaaaaaactccctggagaactgtggggcgtattacctgtctgtggcccagctggagaggctgtcgatagagaactgcaaccttacacagcttacttgtgaaagccttgcctcctgtctcaggcagagtaagatgctgacccacctgagcttggcagaaaacgccttgaaagatgaaggggccaagcatatttggaatgccctgccacacctgagatgtcctctgcagaggctggtactgagaaagtgtgacttgacctttaattgctgtcaggatatgatctctgcgctctgtaaaaataaaaccctgaaaagtcttgacctaagttttaatagcctgaaggatgatggggtgatcctgctgtgtgaggccctgaagaaccctgactgtacattacagatcctggagctggaaaactgcctgttcacctccatctgctgccaggccatggcttccatgctccgcaaaaaccaacatctgagacatctggacttgagcaagaatgcgattggagtctatggtattctgaccttgtgcgaggccttctcaagccaaaagaagagagaagaggtcattttctgtattcctgcctggactcgaataactagcttctccccaactcctcacccacccgacttcacgggaaaaagtgactgcctatcccagattaatccttaggccgtccagtcatctttctctggggcttgattgatcagttcccactctgacaactggcaaataccaggcgttatcatcctgtatgcattaacgtactttcccctgaaacagagcaacccagtcaacaccacagaacctcagctttgaaccctggagtgaggacggtgatgccctgtgtgtattaatatgctatgtaaggctgggcgtggtggctcacgcctgtaacccagcactatgggaggtcgaggtgggcagattacctgaggtcaggagttccagaccagcctggccaacatggtgaaaccccgcctctactaaaaaaaaaaatacaaaaaattaggcgtggtggtgggctcctgtaatcccagctgctcgggaggctgaggcaggagaatcacttgaatctaggaggcagagtttgcagtgagctgagatcacgccattgcactccagcctgggcgacagagcaagactctgtctcaagaagaaaaaaaaaatacatatacacataaatatatatatgtgtgtgtgtatatatatatatatatatatatatgctatataaagtttaaatgaaatgctttgagtcacctaagacaggatatagacaaagtcttcatcgtcttcttgcttcttctacctttatttattctcagctctgaatgtatgaacctgctcaatcacctcatcttaaaaataaaatcactgtccctaga

SEQ ID NO: 159821 - DNA, 3090 bp, Homo sapiens
  Payload ID: 11262
  Gene Symbol: NLRP8
  Gene Name: NLR family, pyrin domain containing 8
  Uniprot ID: Q86W28
  ENST ID: ENST00000590542
  CDS Start-End: 1-3090
atgagtgacgtgaatccaccctctgacacccccattcccttttcatcctcctccactcacagttctcatattccgccctggacattctcttgctaccccggctccccatgtgaaaatggggtcatgctgtacatgagaaacgtgagccatgaggagctacaacggttcaagcagctcttactgactgagctcagtactggcaccatgcccatcacctgggaccaggtcgagacagccagctgggcagaggtggttcatctcttgatagagcgtttccctggacgacgcgcttgggatgtgacttcgaacatctttgccattatgaactgtgataaaatgtgtgttgtagtccgcagagagataaatgccattctgcctaccttggaaccagaggacttgaatgtgggagaaacacaggtgaatctggaggaaggagaatctggtaaaatacggcggtataaatcgaatgtgatggaaaagtttttccccatatgggacattacgacttggcctggaaaccagagggacttcttctaccaaggtgtacacaggcacgaggagtacttaccatgtctgcttctgcccaaaagaccccagggtagacagcccaagaccgtggccatacagggagctcctgggatcggaaaaacaatcctggccaaaaaggtgatgtttgagtgggccagaaacaagttctacgcccacaagcgctggtgtgctttctacttccattgccaagaggtgaaccagacgacagaccagagcttctccgagctgattgagcaaaagtggcctggatctcaggacctcgtgtcaaagattatgtccaaacccgaccaacttctgctgctcttggatggctttgaggagctcacatctaccctcattgacagactggaggacctgagtgaagactggaggcagaaattgcctgggtctgtcctactgagcagtttgctgagcaaaacgatgcttccagaggccacgctactgatcatgataagatttacctcttggcagacatgcaagcccttgctgaaatgtccctctctcgtaacccttccggggtttaatacgatggaaaaaatcaagtatttccagatgtattttggacacacagaggagggagaccaagtcttgagtttcgccatggaaaacaccattctcttctccatgtgccgggtccctgtggtttgctggatggtctgctctggtctgaaacagcaaatggagagaggaaacaatctcacacagtcatgtccaaatgccacctctgtgttcgtccggtatatttctagcttgtttcccaccagagctgagaacttttccagaaagatccaccaagcacaactggaaggtctgtgtcacttggccgcagacagcatgtggcacaggaaatgggtgttaggtaaagaagatcttgaggaagccaagctggatcagacgggagtcaccgccttccttggcatgagtattcttcggagaattgcaggtgaggaagaccactatgtctttaccctcgtgacttttcaggaattttttgcggccttgttttatgttctctgtttcccacaaagactcaaaaattttcatgtgttgagccacgtgaatatccagcgcctgatagcgagtcccagaggaagcaaaagctatctctctcacatgggacttttcttattcggttttctgaacgaggcctgcgcttcggccgtggaacagtcattccaatgcaaggtgtctttcggtaataagaggaaactgctgaaagtcatacctctgttgcataaatgtgacccaccttctccgggcagtggggtcccgcagttattctactgtctgcatgaaatccgggaggaagcctttgtaagccaagccctaaatgattatcataaagttgtcttgagaattggcaacaacaaagaagttcaagtgtctgctttttgcctgaagcggtgtcaatatttgcatgaggtggaactgaccgtcaccctgaacttcatgaacgtgtggaagctcagctccagctcccatcctggctctgaagcgccagagagcaatgggctgcatcgttggtggcaagacttatgctctgtgtttgcaacgaatgataagctggaagtcctgactatgaccaacagtgttttggggcctccttttttgaaggctctcgcggccgcactgaggcaccctcagtgcaaactgcaaaagctactcctaaggcgtgtgaatagcaccatgttgaaccaggacttaatcggtgttttgacggggaaccagcatctgagatacttggaaatacaacatgtggaagtggagtccaaagctgtgaagcttctatgcagggtgctgagatccccccggtgccgtctgcagtgtctcaggttggaagactgcttggccacccctagaatttggactgatcttggcaataatcttcaaggtaacgggcatctaaagactctcatactaagaaaaaactccctggagaactgtggggcgtattacctgtctgtggcccagctggagaggctgtcgcagagtaagatgctgacccacctgagcttggcagaaaacgccttgaaagatgaaggggccaagcatatttggaatgccctgccacacctgagatgtcctctgcagaggctggtactgagaaagtgtgacttgacctttaattgctgtcaggatatgatctctgcgctctgtaaaaataaaaccctgaaaagtcttgacctaagttttaatagcctgaaggatgatggggtgatcctgctgtgtgaggccctgaagaaccctgactgtacattacagatcctggagctggaaaactgcctgttcacctccatctgctgccaggccatggcttccatgctccgcaaaaaccaacatctgagacatctggacttgagcaagaatgcgattggagtctatggtattctgaccttgtgcgaggccttctcaagccaaaagaagagagaagaggtcattttctgtattcctgcctggactcgaataactagcttctccccaactcctcacccacccgacttcacgggaaaaagtgactgcctatcccagattaatccttag

SEQ ID NO: 159822 - DNA, 3484 bp, Homo sapiens
  Payload ID: 11263
  Gene Symbol: NLRP9
  Gene Name: NLR family, pyrin domain containing 9
  Uniprot ID: Q7RTR0
  ENST ID: ENST00000332836
  CDS Start-End: 29-3004
acacctcagttcacaatcctggggcgatatggcagaatcttttttttcggattttggcttgttgtggtatctgaaggagctcagaaaggaagagttttggaaatttaaggagctcctcaaacaacctttggagaaatttgaactcaagccaatcccctgggctgagctgaagaaggcctccaaagaagatgtagcaaagctgctggacaaacattacccaggaaagcaggcatgggaggtaacactgaacctgtttctacagatcaataggaaagatctctggacaaaggctcaggaagagatgagaaataagctaaacccatacagaaagcatatgaaggaaacatttcaactcatatgggagaaggaaacctgtcttcacgtccctgagcatttctacaaagaaaccatgaaaaatgagtataaagaattgaatgacgcatatactgctgcggctagacgacacactgtggtcctggaaggtcctgatggaattggaaaaacaacccttttaagaaaagtgatgttggactgggcagagggaaacttatggaaggacaggttcacatttgtgtttttcctcaatgtctgtgaaatgaacggtatcgcagagaccagcttactggagctcctctctagggactggccggagtcttcagagaagatcgaagacattttttcccagccagagagaattctgttcatcatggatggctttgagcaactgaagtttaacttacaacttaaggctgacttgagcgatgattggaggcagcggcagccaatgccaattatcctgagcagtttgttgcaaaaaaagatgcttccagaatcctctctccttattgcattaggaaaactggctatgcaaaaacactattttatgttgcggcatccaaaactcataaagctcttaggattcagtgaatctgaaaagaagtcgtatttctcctacttctttggtgagaagagcaaagccctgaaagtcttcaattttgtgagagataatgggccgctgtttatcttgtgccataatccctttacgtgctggttggtctgtacttgtgtgaaacagaggctagagaggggagaagaccttgaaataaactcccaaaacaccacctatttatatgcatcctttttaacaactgtattcaaagcaggaagtcagagttttccacctaaggtgaacagagcccgactaaaaagcctgtgtgctttggctgcagagggaatttggacatatacatttgtattttcccatggggatctccggaggaatgggttatctgagtctgagggcgtgatgtgggtgggtatgagactcctccaaaggagaggggactgttttgccttcatgcatctgtgtatccaagagttttgtgccgccatgttttatttgctcaaacgacccaaagacgatcctaacccggccattggaagcataacccagcttgtaagagcaagtgtggttcagcctcaaaccctcttgacccaggtggggatattcatgtttggaatttcaacagaagaaatcgtcagcatgctggagacctcctttggttttccactgtcaaaagacctaaagcaggaaataacccaatgccttgaaagtttaagtcaatgtgaagctgatagggaagccatagctttccaggaactattcattggtttgtttgaaactcaggaaaaagaatttgtaaccaaagtgatgaatttctttgaagaagttttcatttatattggtaacatagaacatttggtaatagcttcattctgcctgaagcattgtcaacatttaacgacacttcgcatgtgtgtggagaatatctttccagatgactcaggatgcatctcagattacaatgagaagctcgtctactggcgggagctttgctcaatgttcattaccaacaagaacttccagattttagacatggaaaataccagcctcgatgatccctccctggcgattctttgcaaagcgctggctcagcctgtttgtaaactccgaaaactcatatttacttctgtgtactttggacatgattcagaattatttaaggcagttcttcacaaccctcatctgaaacttctgagcctgtacggcactagcctctcccagtctgacatcagacacctgtgtgagacgctgaaacatccaatgtgcaagatagaagagctgatactgggaaagtgtgacatctccagtgaagtttgtgaagacatcgcctccgtcctggcctgcaacagcaagctgaaacacctctccttggtagaaaatcccttgagggacgaaggaatgacgttgctgtgtgaagccctgaagcactcacactgtgccctggagaggctgatgttgatgtactgctgtctcacctctgtctcctgtgactccatttccgaagtcctcttgtgcagtaagtccctgtccctcctcgatctgggctcaaatgccctggaagataatggagtggcatctctgtgtgcagcgctgaagcacccaggctgcagcatacgggagctgtggttgatgggctgtttccttacttccgattcctgtaaggacattgctgctgttcttatttgcaatgggaaactgaagaccctgaaacttgggcataatgaaataggagacactggtgtcagacagttatgtgcagctttgcagcatcctcactgtaaattagagtgtctcgggctgcaaacgtgtccgatcacccgtgcctgctgcgacgacatcgccgcagcactcatcgcctgcaaaacactgaggagcctgaacctcgactggattgccttggatgctgatgcagtggtggtgctgtgtgaggcattgagccacccggactgtgccctgcagatgctggggctgcacaaatctggctttgatgaagaaactcagaagatcctgatgtctgtggaagaaaaaattccccatctgaccatttcacatggaccttggattgacgaggaatacaagatcaggggtgtgctcctctgatggggaacaccctgaagtagtcgtctcacaaaggctttccttggccacagtgggaccttcacctggcacctctatcctgtaattgcacatcatggcagcagggctgtgatttcagaggtactccctaagtgttctagcaatatgattatggagtgtgattcagtgtacatgctgattgtctttgcctcggtcctatatccccttgtctttagaaatcccatcctgccttgtgatatttagaagcacaagtacgttaaacaagtgctaaacgctctggaaagcatggctttattttcttaatggatgtcttggtgtgtaggagcatgcatttgtaggcaccacaatccggatacttctgacacagaagtgatgctagaatgtgtctatagattgtattgctagcatccagactttctagtttgtccagatttcgatttgatcaattttcttgtccaataaaaaagcatttccaaatctcta

SEQ ID NO: 159823 - DNA, 2958 bp, Homo sapiens
  Payload ID: 11263
  Gene Symbol: NLRP9
  Gene Name: NLR family, pyrin domain containing 9
  Uniprot ID: Q7RTR0
  ENST ID: ENST00000590200
  CDS Start-End: 1-2958
atggcagaatcttttttttcggattttggcttgttgtggtatctgaaggagctcagaaaggaagagttttggaaatttaaggagctcctcaaacaacctttggagaaatttgaactcaagccaatcccctgggctgagctgaagaaggcctccaaagaagatgtagcaaagctgctggacaaacattacccaggaaagcaggcatgggaggtaacactgaacctgtttctacagatcaataggaaagatctctggacaaaggctcaggaagagatgagaaataagctaaacccatacagaaagcatatgaaggaaacatttcaactcatatgggagaaggaaacctgtcttcacgtccctgagcatttctacaaagaaaccatgaaaaatgagtataaagaattgaatgacgcatatactgctgcggctagacgacacactgtggtcctggaaggtcctgatggaattggaaaaacaacccttttaagaaaagtgatgttggactgggcagagggaaacttatggaaggacaggttcacatttgtgtttttcctcaatgtctgtgaaatgaacggtatcgcagagaccagcttactggagctcctctctagggactggccggagtcttcagagaagatcgaagacattttttcccagccagagagaattctgttcatcatggatggctttgagcaactgaagtttaacttacaacttaaggctgacttgagcgatgattggaggcagcggcagccaatgccaattatcctgagcagtttgttgcaaaaaaagatgcttccagaatcctctctccttattgcattaggaaaactggctatgcaaaaacactattttatgttgcggcatccaaaactcataaagctcttaggattcagtgaatctgaaaagaagtcgtatttctcctacttctttggtgagaagagcaaagccctgaaagtcttcaattttgtgagagataatgggccgctgtttatcttgtgccataatccctttacgtgctggttggtctgtacttgtgtgaaacagaggctagagaggggagaagaccttgaaataaactcccaaaacaccacctatttatatgcatcctttttaacaactgtattcaaagcaggaagtcagagttttccacctaaggtgaacagagcccgactaaaaagcctgtgtgctttggctgcagagggaatttggacatatacatttgtattttcccatggggatctccggaggaatgggttatctgagtctgagggcgtgatgtgggtgggtatgagactcctccaaaggagaggggactgttttgccttcatgcatctgtgtatccaagagttttgtgccgccatgttttatttgctcaaacgacccaaagacgatcctaacccggccattggaagcataacccagcttgtaagagcaagtgtggttcagcctcaaaccctcttgacccaggtggggatattcatgtttggaatttcaacagaagaaatcgtcagcatgctggagacctcctttggttttccactgtcaaaagacctaaagcaggaaataacccaatgccttgaaagtttaagtcaatgtgaagctgatagggaagccatagctttccaggaactattcattggtttgtttgaaactcaggaaaaagaatttgtaaccaaagtgatgaatttctttgaagaagttttcatttatattggtaacatagaacatttggtaatagcttcattctgcctgaagcattgtcaacatttaacgacacttcgcatgtgtgtggagaatatctttccagatgactcaggatgcatctcagattacaatgagaagctcgtctactggcgggagctttgctcaatgttcattaccaacaagaacttccagattttagacatggaaaataccagcctcgatgatccctccctggcgattctttgcaaagcgctggctcagcctgtttgtaaactccgaaaactcatatttacttctgtgtactttggacatgattcagaattatttaaggcagttcttcacaaccctcatctgaaacttctgagcctgtacggcactagcctctcccagtctgacatcagacacctgtgtgagacgctgaaacatccaatgtgcaagatagaagagctgatactgggaaagtgtgacatctccagtgaagtttgtgaagacatcgcctccgtcctggcctgcaacagcaagctgaaacacctctccttggtagaaaatcccttgagggacgaaggaatgacgttgctgtgtgaagccctgaagcactcacactgtgccctggagaggctgatgttgatgtactgctgtctcacctctgtctcctgtgactccatttccgaagtcctcttgtgcagtaagtccctgtccctcctcgatctgggctcaaatgccctggaagataatggagtggcatctctgtgtgcagcgctgaagcacccaggctgcagcatacgggagctgtggttgatgggctgtttccttacttccgattcctgtaaggacattgctgctgttcttatttgcaatgggaaactgaagaccctgaaacttgggcataatgaaataggagacactggtgtcagacagttatgtgcagctttgcagcatcctcactgtaaattagagtgtctcgggctgcaaacgtgtccgatcacccgtgcctgctgcgacgacatcgccgcagcactcatcgcctgcaaaacactgaggagcctgaacctcgactggattgccttggatgctgatgcagtggtggtgctgtgtgaggcattgagccacccggactgtgccctgcagatgctgggaaattgtcagaagtccctcggagacacagttgcaccaggtgagaaccactgctctataaaacatcttctacttacgttgcccataaatatgcaacgccagctcagacttcagaag

SEQ ID NO: 159824 - DNA, 3049 bp, Homo sapiens
  Payload ID: 11264
  Gene Symbol: NMD3
  Gene Name: NMD3 ribosome export adaptor
  Uniprot ID: Q96D46
  ENST ID: ENST00000351193
  CDS Start-End: 141-1652
gcatttcgctcgcgagatcttctctgtggcggagacagccaggttggcagctgacgggacagccggggtctattttgttgcgggttttcagcaaatccagggctggtctggaggcgcgaaaacttaaggcatacagaacgatggagtatatggcagaatccaccgaccgcagccctggacacatcttgtgctgtgagtgtggtgttccgataagtccaaatcctgccaatatttgtgtggcctgtttgcgaagtaaagtggacatcagccaaggtattccgaaacaagtctcgatttcgttctgcaaacaatgtcaaaggtattttcaaccaccaggaacttggatacagtgtgctttagaatccagggaacttcttgctttgtgcttgaaaaaaatcaaagcccctctgagtaaggtacggcttgtagatgcaggctttgtttggactgagcctcattctaagagacttaaagttaaactgactattcagaaagaggtgatgaatggtgctatccttcaacaagtgtttgtggtggattatgttgttcagtcccaaatgtgtggagattgccatagagtagaagctaaggatttctggaaggctgtgattcaagtgaggcaaaagactttgcataaaaaaactttctactatctggaacagttaattctgaaatatggaatgcatcagaatacacttcgtatcaaagagattcatgatggtctggatttttattattcctcaaaacaacatgctcagaagatggtcgaatttcttcagtgtacagttccctgtagatacaaagcatcacaaagactgatctctcaagatatccatagtaacacatacaattacaaaagcactttttctgtggaaattgttccaatatgcaaggataatgttgtctgtctgtctccaaaactggcacaaagcctgggaaatatgaaccagatttgtgtgtgtattcgagtaaccagtgccattcacctcattgatccaaacaccctacaagtggcagatattgatgggagcactttctggagtcaccctttcaatagtttatgtcatcccaaacagctagaggagtttattgtgatggaatgcagcatagtccaagatataaaacgtgctgcaggtgctggaatgatatcaaaaaagcataccctcggggaagtctgggtacagaagacatctgaaatgaatacagataaacagtatttttgtcgtactcatttgggacatcttctaaatcccggagacctggtgttagggtttgatttggccaactgtaacttaaatgatgagcatgtcaacaaaatgaactcagatagagttccagatgtggtattaatcaagaagagctatgaccggaccaaacgtcagcgtcgtagaaactggaaattgaaagagcttgcaagagagagagaaaacatggatacagatgatgaaaggcaataccaagattttcttgaagatcttgaagaagatgaggcaattcgaaaaaatgtcaacatttacagagattcagccatccctgtggaaagtgacaccgatgatgaaggagcacctcgaattagtctggctgagatgcttgaagaccttcatatttcccaagatgccactggtgaagaaggtgcatcaatgctgacataatgagatgttgtagactgtttccatacatgggcttaagaagttggacagagttaccttaagtgtctctactatctttgcctccagatttcaagaggagaaatttagttttaaacctgaataaacatgtttgttttcagtgctcactcaaaccactaaaacagatggatagctttgaggttttagataaggaaagattatggagaatgtagttgttattgatttttggcaattttacatttggaattttatcactgtgcttttttatatgaggcactgtagtattttcacatagtatagtactctggatgtaaaagctcaaaaattgtgattccttgaacgttcactaaatcttcaagcaaaaacacatttttacattatttttacgttgattattttagtgaaagaccatatgaagaagcatttttaatattaacttgttacatactttgatccactttacatcatttttatgttgttgaggtagggaaattagggttcagtttatcactggacattcaggaggcaagtcaatcttttttatttccttataaaattaactcttcaaaagccgttaaacagagagttatcttaatttttattgcagtaggaggaaatatatttaaaatatttgtagatttatagcaaatagagactcgttatttaaaggttaaataacaatttgttcttttgttgtttttgccagtttagggcagtagctgcttttgtcataaatatcttcctaccacatcaaaaatgctgcttttaaaatttttgtttataaattgagaaggaattttctctctataagtttctgtcattgaacagatcaccattaaaaagaatattagaatccagcatgaagataatggctaataaaaatgaggtacatactttataaaaccattaatcagatttgaatgaggaatgcttcccacatccttgaaagaaaaactgtggcttacgttttgaagtattctgagaatgaagtattaagatccaatttctataagcaagatcagacttgttaagtatgccgcaagtaagagctaattcattcattccatgtgtgccactaaataaagagattgagcaagtgccactgtgtggaacatttttcttttttttaatattggactttccaattttgaaattatggataaagtcctaaattttctatagtggcttcttttctgtctgcatattttgttaaaattgtggatctaaaagccatatcctgtctttggtggtggcctggtaggaatggcttgtcctagttcttcaaaggtaagattgaccaaagcaagttctcattggtggtctgtgtttacatcttccgtgtcaagatattttaaagcatgaaaataaagccattcttgccctttttcgtgtgtttgaaa

SEQ ID NO: 159825 - DNA, 2378 bp, Homo sapiens
  Payload ID: 11264
  Gene Symbol: NMD3
  Gene Name: NMD3 ribosome export adaptor
  ENST ID: ENST00000472947
  CDS Start-End: 123-1712
cttctctgtggcggagacagccaggttggcagctgacgggacagccggggtctattttgttgcgggttttcagcaaatccagggctggtctggaggcgcgaaaacttaaggcatacagaacgatggagtatatggcagaatccaccgaccgcagccctggacacatcttgtgctgtgagtgtggtgttccgataagtccaaatcctgccaatatttgtgtggcctgtttgcgaagtaaagtggacatcagccaaggtattccgaaacaagtctcgatttcgttctgcaaacaatgtcaaaggtattttcaaccaccaggaacttggatacagtgtgctttagaatccagggaacttcttgctttgtgcttgaaaaaaatcaaagcccctctgagtaaggtacggcttgtagatgcaggctttgtttggactgagcctcattctaagagacttaaagttaaactgactattcagaaagaggtgatgaatggtgctatccttcaacaagtgtttgtggtggattatgttgttcagtcccaaatgtgtggagattgccatagagtagaagctaaggatttctggaaggctgtgattcaagtgaggcaaaagactttgcataaaaaaactttctactatctggaacagttaattctgaaatatggaatgcatcagaatacacttcgtatcaaagagattcatgatggtctggatttttattattcctcaaaacaacatgctcagaagatggtcgaatttcttcagtgtacagttccctgtagatacaaagcatcacaaagactgatctctcaagatatccatagtaacacatacaattacaaaagcactttttctgtggaaattgttccaatatgcaaggataatgttgtctgtctgtctccaaaactggcacaaagcctgggaaatatgaaccagatttgtgtgtgtattcgagtaaccagtgccattcacctcattgatccaaacaccctacaagtggcagatattgatgggagcactttctggagtcaccctttcaatagtttatgtcatcccaaacagctagaggagtttattgtgatggaatgcagcatagtccaagatataaaacgtgctgcaggtgctggaatgatatcaaaaaagcataccctcggggaagtctgggtacagaagacatctgaaatgaatacagataaacagtatttttgtcgtactcatttgggacatcttctaaatcccggagacctggtgttagggtttgatttggccaactgtaacttaaatgatgagcatgtcaacaaaatgaactcagatagagttccagatgtggtattaatcaagaagagctatgaccggaccaaacgtcagcgtcgtagaaactggaaattgaaagagcttgcaagagagagagaaaacatggatacagatgatgaaaggcaataccaagattttcttgaagatcttgaagaagatgaggcaattcgaaaaaatgtcaacatttacagagattcagccatccctgtggaaagtgacaccgatgatgaaggagcacctcgaattagtctggctgagatgcttgaagaccttcatatttcccaagatgccactggtgaagaagccaaatctgcacctgaagctgctgatttagagtcagaagtcactgaggggccaagtgtggtggttgacgcctgtaatcccagcactttgggaggctgaggagggcagatcacttcaggccaggagttcaagaccagcctggccaacatagtgaaaccctgtctctactaaaaatgcaaaaattatccgggcgtggtggtgcacacatagtcccagctactcgggacgctgaggcaggagaatcacttgaacccaggaggcagaggttgcagtgagtcgagatctggccactgtactccagcctgggcgacagagtgagactctgttcccccactcccccaataaaaaaagtctgatgagcaagaaaagttcaggggtagagttgcttgtgtaattgagatgtttaacagcatcaggctaattccttgccatagtagaacccagaagctctgagctgtgtgccaggagatacctccctggtcagtacttagtaccagagttttccctagattctttaattttagtaaatgtgctcacattgagtcaatccttacataactgggtatgttatttccagcccaaggaatgtttatttttaaaaatatttttaattatccataatttcagacttacaaaatgtcgcaagtattcccggataccatttacctagatttgccaaatgtaaacaatttgcctcatttgctttctttccccttctcactaataattttttcctcaacatttaagagtaaaatgcagacatga

SEQ ID NO: 159826 - DNA, 589 bp, Homo sapiens
  Payload ID: 11264
  Gene Symbol: NMD3
  Gene Name: NMD3 ribosome export adaptor
  ENST ID: ENST00000468606
  CDS Start-End: 296-589
cccaatccctccgacatccctgcgccggggcccttccctagcgctccgggaaagcgttcgccgcaggcctgttaggggcccaccaataccgtaacaccgttcccgtcctcttcctcggcaccgctgcaaacgccccgggtcgctacccggatttgacggtggctggagcggcacgggcgacgcaaggcagatgcggactgaattacaccgctggctttccttgttctccagcttgcaggcagcatactgtgggacttctgggcctccataattgtaacttaaggcatacagaacgatggagtatatggcagaatccaccgaccgcagccctggacacatcttgtgctgtgagtgtggtgttccgataagtccaaatcctgccaatatttgtgtggcctgtttgcgaagtaaagtggacatcagccaaggtattccgaaacaagtctcgatttcgttctgcaaacaatgtcaaaggtattttcaaccaccaggaacttggatacagtgtgctttagaatccagggaacttcttgctttgtgcttgaaaaaaatcaaagcccctctgagtaaggtacggcttgtagatgca

SEQ ID NO: 159827 - DNA, 1077 bp, Homo sapiens
  Payload ID: 11264
  Gene Symbol: NMD3
  Gene Name: NMD3 ribosome export adaptor
  ENST ID: ENST00000463518
  CDS Start-End: 422-1077
acagccaggttggcagctgacgggacagccggggtctattttgttgcgggttttcagcaaatccagggctggtctggaggcgcgaagtaggttccggagtccgagacctgggctgtcggccgcgggcccctgagtagcggatggggcgggctccccggcctcggggccgtgctcagtctgcgtgagcgccgcgtgcccggaacccgtgtgcggtcgcgccccggggttgggggtcggcgtgggtggccctcgggcgccgggacgccgtccggagactcctgtggcgtgggtctgaggcgcggtggtccggtgcggtccctgggctggtggagagcgggagggcccgggcgtccacaatcccgagctgacctcgcccttggtcgtccagggttggagcccagaacttaaggcatacagaacgatggagtatatggcagaatccaccgaccgcagccctggacacatcttgtgctgtgagtgtggtgttccgataagtccaaatcctgccaatatttgtgtggcctgtttgcgaagtaaagtggacatcagccaaggtattccgaaacaagtctcgatttcgttctgcaaacaatgtcaaaggtattttcaaccaccaggaacttggatacagtgtgctttagaatccagggaacttcttgctttgtgcttgaaaaaaatcaaagcccctctgagtaaggtacggcttgtagatgcaggctttgtttggactgagcctcattctaagagacttaaagttaaactgactattcagaaagaggtgatgaatggtgctatccttcaacaagtgtttgtggtggattatgttgttcagtcccaaatgtgtggagattgccatagagtagaagctaaggatttctggaaggctgtgattcaagtgaggcaaaagactttgcataaaaaaactttctactatctggaacagttaattctgaaatatggaatgcatcagaatacacttcgtatcaaagagattcatgatggtctggatttttattattcctcaaaacaacatgctcagaagatggtcgaatttcttcagtgtacagttccctgtag

SEQ ID NO: 159828 - DNA, 547 bp, Homo sapiens
  Payload ID: 11264
  Gene Symbol: NMD3
  Gene Name: NMD3 ribosome export adaptor
  ENST ID: ENST00000460503
  CDS Start-End: 81-547
caaacgccccgggtcgctacccggatttgacggtggctggagcggcacgggcgacgcaagaacttaaggcatacagaacgatggagtatatggcagaatccaccgaccgcagccctggacacatcttgtgctgtgagtgtggtgttccgataagtccaaatcctgccaatatttgtgtggcctgtttgcgaagtaaagtggacatcagccaaggtattccgaaacaagtctcgatttcgttctgcaaacaatgtcaaaggtattttcaaccaccaggaacttggatacagtgtgctttagaatccagggaacttcttgctttgtgcttgaaaaaaatcaaagcccctctgagtaaggtacggcttgtagatgcaggctttgtttggactgagcctcattctaagagacttaaagttaaactgactattcagaaagaggtgatgaatggtgctatccttcaacaagtgtttgtggtggattatgttgttcagtcccaaatgtgtggagattgccatagagtagaagctaaggatttctggaaggctgt

SEQ ID NO: 159829 - DNA, 3061 bp, Homo sapiens
  Payload ID: 11264
  Gene Symbol: NMD3
  Gene Name: NMD3 ribosome export adaptor
  Uniprot ID: Q96D46
  ENST ID: ENST00000460469
  CDS Start-End: 456-1967
ggcgtgggtggccctcgggcgccgggacgccgtccggagactcctgtggcgtgggtctgaggcgcggtggtccggtgcggtccctgggctggtggagagcgggagggcccgggcgtccacaatcccgagctgacctcgcccttggtcgtccagggttggagcccaggtgagatggaggtcagcggcagagctgggtggcccgagggtcttgcagctgggaagctcaggaaatcccatggtcctcatcttaaagttctttttaacgaacttacccagtggagttgggtttccttctttcctgctttttcgaagttctgtgaatatattaattattcagagagactggaggaagacgtaaaaagaggagactaggtaaagtgatttaaatcccaacattctcttttttttttttttttttttttttttttttaaaagaacttaaggcatacagaacgatggagtatatggcagaatccaccgaccgcagccctggacacatcttgtgctgtgagtgtggtgttccgataagtccaaatcctgccaatatttgtgtggcctgtttgcgaagtaaagtggacatcagccaaggtattccgaaacaagtctcgatttcgttctgcaaacaatgtcaaaggtattttcaaccaccaggaacttggatacagtgtgctttagaatccagggaacttcttgctttgtgcttgaaaaaaatcaaagcccctctgagtaaggtacggcttgtagatgcaggctttgtttggactgagcctcattctaagagacttaaagttaaactgactattcagaaagaggtgatgaatggtgctatccttcaacaagtgtttgtggtggattatgttgttcagtcccaaatgtgtggagattgccatagagtagaagctaaggatttctggaaggctgtgattcaagtgaggcaaaagactttgcataaaaaaactttctactatctggaacagttaattctgaaatatggaatgcatcagaatacacttcgtatcaaagagattcatgatggtctggatttttattattcctcaaaacaacatgctcagaagatggtcgaatttcttcagtgtacagttccctgtagatacaaagcatcacaaagactgatctctcaagatatccatagtaacacatacaattacaaaagcactttttctgtggaaattgttccaatatgcaaggataatgttgtctgtctgtctccaaaactggcacaaagcctgggaaatatgaaccagatttgtgtgtgtattcgagtaaccagtgccattcacctcattgatccaaacaccctacaagtggcagatattgatgggagcactttctggagtcaccctttcaatagtttatgtcatcccaaacagctagaggagtttattgtgatggaatgcagcatagtccaagatataaaacgtgctgcaggtgctggaatgatatcaaaaaagcataccctcggggaagtctgggtacagaagacatctgaaatgaatacagataaacagtatttttgtcgtactcatttgggacatcttctaaatcccggagacctggtgttagggtttgatttggccaactgtaacttaaatgatgagcatgtcaacaaaatgaactcagatagagttccagatgtggtattaatcaagaagagctatgaccggaccaaacgtcagcgtcgtagaaactggaaattgaaagagcttgcaagagagagagaaaacatggatacagatgatgaaaggcaataccaagattttcttgaagatcttgaagaagatgaggcaattcgaaaaaatgtcaacatttacagagattcagccatccctgtggaaagtgacaccgatgatgaaggagcacctcgaattagtctggctgagatgcttgaagaccttcatatttcccaagatgccactggtgaagaaggtgcatcaatgctgacataatgagatgttgtagactgtttccatacatgggcttaagaagttggacagagttaccttaagtgtctctactatctttgcctccagatttcaagaggagaaatttagttttaaacctgaataaacatgtttgttttcagtgctcactcaaaccactaaaacagatggatagctttgaggttttagataaggaaagattatggagaatgtagttgttattgatttttggcaattttacatttggaattttatcactgtgcttttttatatgaggcactgtagtattttcacatagtatagtactctggatgtaaaagctcaaaaattgtgattccttgaacgttcactaaatcttcaagcaaaaacacatttttacattatttttacgttgattattttagtgaaagaccatatgaagaagcatttttaatattaacttgttacatactttgatccactttacatcatttttatgttgttgaggtagggaaattagggttcagtttatcactggacattcaggaggcaagtcaatcttttttatttccttataaaattaactcttcaaaagccgttaaacagagagttatcttaatttttattgcagtaggaggaaatatatttaaaatatttgtagatttatagcaaatagagactcgttatttaaaggttaaataacaatttgttcttttgttgtttttgccagtttagggcagtagctgcttttgtcataaatatcttcctaccacatcaaaaatgctgcttttaaaatttttgtttataaattgagaaggaattttctctctataagtttctgtcattgaacagatcaccattaaaaagaatattagaatccagcatgaagataatggctaataaaaatgaggtacatactttataaaaccattaatcagatttgaatgaggaatgcttcccacatccttgaaagaaaaactgtggcttacgttttgaagtattctgagaatgaagtattaagatccaatttctataagcaagatcagacttgttaagtatgccgcaagtaagagctaattcattcattccatgtgtgccactaaataaagagattgagcaag

SEQ ID NO: 159830 - DNA, 746 bp, Homo sapiens
  Payload ID: 11264
  Gene Symbol: NMD3
  Gene Name: NMD3 ribosome export adaptor
  ENST ID: ENST00000493066
  CDS Start-End: 91-746
atacgtcactcgggccgcgggatttcgagcatttcgctcgcgagatcttctctgtggcggagacagccagaacttaaggcatacagaacgatggagtatatggcagaatccaccgaccgcagccctggacacatcttgtgctgtgagtgtggtgttccgataagtccaaatcctgccaatatttgtgtggcctgtttgcgaagtaaagtggacatcagccaaggtattccgaaacaagtctcgatttcgttctgcaaacaatgtcaaaggtattttcaaccaccaggaacttggatacagtgtgctttagaatccagggaacttcttgctttgtgcttgaaaaaaatcaaagcccctctgagtaaggtacggcttgtagatgcaggctttgtttggactgagcctcattctaagagacttaaagttaaactgactattcagaaagaggtgatgaatggtgctatccttcaacaagtgtttgtggtggattatgttgttcagtcccaaatgtgtggagattgccatagagtagaagctaaggatttctggaaggctgtgattcaagtgaggcaaaagactttgcataaaaaaactttctactatctggaacagttaattctgaaatatggaatgcatcagaatacacttcgtatcaaagagattcatgatggtctggatttttattattcctcaaaacaacatgctcagaagatggtcgaatttcttcagtgtacagttccctgtag

SEQ ID NO: 159831 - DNA, 685 bp, Homo sapiens
  Payload ID: 11264
  Gene Symbol: NMD3
  Gene Name: NMD3 ribosome export adaptor
  ENST ID: ENST00000476237
  CDS Start-End: 200-685
tcggcgtgggtggccctcgggcgccgggacgccgtccggagactcctgtggcgtgggtctgaggcgcggtggtccggtgcggtccctgggctggtggagagcgggagggcccgggcgtccacaatcccgagctgacctcgcccttggtcgtccagggttggagcccaggtgagatggagaacttaaggcatacagaacgatggagtatatggcagaatccaccgaccgcagccctggacacatcttgtgctgtgagtgtggtgttccgataagtccaaatcctgccaatatttgtgtggcctgtttgcgaagtaaagtggacatcagccaaggtattccgaaacaagtctcgatttcgttctgcaaacaatgtcaaaggtattttcaaccaccaggaacttggatacagtgtgctttagaatccagggaacttcttgctttgtgcttgaaaaaaatcaaagcccctctgagtaaggtacggcttgtagatgcaggctttgtttggactgagcctcattctaagagacttaaagttaaactgactattcagaaagaggtgatgaatggtgctatccttcaacaagtgtttgtggtggattatgttgttcagtcccaaatgtgtggagattgccatagagtagaagctaaggatttctggaaggctgtgattcaagtgaggcaaaag

SEQ ID NO: 159832 - DNA, 3640 bp, Homo sapiens
  Payload ID: 11265
  Gene Symbol: NSMF
  Gene Name: NMDA receptor synaptonuclear signaling and neuronal migration factor
  Uniprot ID: Q6X4W1
  ENST ID: ENST00000265663
  CDS Start-End: 233-1819
ggttcgggcagcgctctcccgggagcggcggcacgcgcggagcgccgggtgcggccatgcggggaccgggcccgaccccgagcccgaccccgagcccaagcccgagccggagcccgagcgagaccccgagcccgagcccgagcgcgacccccggtgcggcgcggctaccccggcggaggcggcgggcgcggggcgcgctctgaggcccgggggatgcgccgccgcctcgaccatgggcgccgccgcctccaggaggagggcgctgaggagcgaggccatgtcctcggtggcggccaaagtgcgagcagcccgagcgtttggagagtacctgtcccagagtcaccctgagaaccgcaacggcgcagatcacctgctggctgatgcctactctggccacgacgggtcccccgagatgcagccggccccccagaacaagcgccgcctgtccctcgtctccaacggctgctacgagggcagcctctcagaggagcccagcattaggaagcccgcaggcgagggccctcagcctcgagtgtacaccatctctggggagcctgccctgctgcccagccctgaggcggaggccattgagctggcggtggtgaaggggcggcggcagcggcaccctcaccatcacagccagcccctgcgcgccagccctggtggcagccgggaggacgtcagcaggccctgccagagctgggcgggcagccgccagggctccaaggagtgccccggatgtgcccagctggctcctggccccacccctcgggcctttgggctggaccagccacctctgcctgagacctccggtcgccgcaagaagctggagaggatgtacagcgttgaccgtgtgtctgacgacatccctattcgtacctggttccccaaggaaaatcttttcagcttccagacagcaaccacaactatgcaagcggtgttcaggggctacgcggagaggaagcgccggaaacgggagaatgattccgcgtctgtaatccagaggaacttccgcaaacacctgcgcatggtcggcagccggagggtgaaggcccagacgttcgctgagcggcgcgagcggagcttcagccggtcctggagcgaccccacccccatgaaagccgacacttcccacgactcccgagacagcagtgacctgcagagctcccactgcacgctggacgaggccttcgaggacctggactgggacactgagaagggcctggaggctgtggcctgcgacaccgaaggcttcgtgccaccaaaggtcatgctcatttcctccaaggtgcccaaggctgagtacatccccactatcatccgccgggatgacccctccatcatccccatcctctacgaccatgagcacgcaaccttcgaggacatccttgaggagatagagaggaagctgaacgtctaccacaagggagccaagatctggaaaatgctgattttctgccagggaggtcctggacacctctatctcctcaagaacaaggtggccacctttgccaaagtggagaaggaagaggacatgattcacttctggaagcggctgagccgcctgatgagcaaagtgaacccagagccgaacgtcatccacatcatgggctgctacattctggggaaccccaatggagagaagctgttccagaacctcaggaccctcatgactccttatagggtcaccttcgagtcacccctggagctctcagcccaagggaagcagatgatcgagacgtactttgacttccggttgtatcgcctgtggaagagccgccagcactcgaagctgctggactttgacgacgtcctgtgaggggcagaggcctccgcccagtcaccatcaggccactccctctgcaccgggacctggggctgggccgcctcgtgctccccgggactgtgtggctccggtctcgcctggagccacttcagggcacctcagacgttgctcaggttccccctgtgggttccggtcctcgctgcacccgtggccgcagaggctgcagtccctgggggccgggaggatcccgccctgtggcccgtggatgctcagcggccaggcactgacctgccatgcctcgcctggaggctcagctgtgggcatccctccatggggttcatagaaataagtgcaatttctacacccccgaaacaattcaaagggaagcagcatttcttgttaactagttaagcactatgctgctagttacagtgtaggcaccccggcccagcagcccagcagcccacatgtgttcaggaccctccctgcccaccccctccctgccgtatcgatcaccagcaccagggtggcccgtgtgcgtggggccagcgtcgccgggctgcccagcctggctctgtctacactggccgagtctctgggtctgtctacactggccgagtctccgactgtctgtgctttcacttacactcctcttgccaccccccatccctgcttacttagacctcagccggcgccggacccggtaggggcagtctgggcagcaggaaggaagggcgcagcgtcccctccttcagaggaggctctgggtggggcctgctccccatccccccaagcccacccagcactctcattgctgctgttgagttcagcttttaccagcctcagtgtggaggctccatcccagcacacaggcctggggcttggcaggggcccagctggggctgggccctgggttttgagaaactcgctggcaccacagtgggcccctggacccggccgcgcagctggtggactgtaggggctcctgactgggcacaggagctcccagcttttgtccacggccagcaggatgggctgtcgtgtatatagctggggcgagggggcaggccccccttgtgcagagccaggggtctgagggcacctggctgtgttcccagctgagggagggctggggcgggggccgggcttggaacgatgtacgataccctcatagtgaccattaaacctgatcctccaccgcggccgccgcgtgggtctgtcctctcagtgctttccaggggccttcctgtgcccagcttctgggcccactcctgtgaggtcactgctgcagggccttcctgcctggacagagttggagctaggccactagaccaccccacagggcatagccagggggaccagcacaggaggggacggagaggagctgcaggagggctggggggaggctgcagtctcggaggggggcctcgccgggtctggaggggacagcagagacagcccgttccccctgccgcctgagggcaccagggagagggctgtatgtccctcacgccacactgtgtgtgcagtcagcagtgtggccacagatgggggccactctctcaacctcaggtgtcctcagggcccagaccgctgctgggcacagccaggctggctgccagctggttccctgccccgtggctgggggacagagcagcacgtatcagctgggctagggtcagggggccactggtgcgcagcctggcacagcctggcaggcttgaggcccagtgtgctgggggtggtcacacagccgtcagccacctccagctcttccagggcattctagatggggtcccgggagggggcaggttttggtgccaatttgagtgtataaagttttaggtaaatacc

SEQ ID NO: 159833 - DNA, 2914 bp, Homo sapiens
  Payload ID: 11265
  Gene Symbol: NSMF
  Gene Name: NMDA receptor synaptonuclear signaling and neuronal migration factor
  ENST ID: ENST00000339554
  CDS Start-End: 107-1090
gtgccccggatgtgcccagctggctcctggccccacccctcgggcctttgggctggaccagccacctctgcctgagacctccggtcgccgcaagaagctggagaggatgtacagcgttgaccgtgtgtctgacgacatccctattcgtacctggttccccaaggaaaatcttttcagcttccagacagcaaccacaactatgcaagcggtgttcaggggctacgcggagaggaagcgccggaaacgggagaatgattccgcgtctgtaatccagaggaacttccgcaaacacctgcgcatggtcggcagccggagggtgaaggcccagacgttcgctgagcggcgcgagcggagcttcagccggtcctggagcgaccccacccccatgaaagccgacacttcccacgactcccgagacagcagtgacctgcagagctcccactgcacgctggacgaggccttcgaggacctggactgggacactgagaagggcctggaggctgtggcctgcgacaccgaaggcttcgtgccaccaaaggtcatgctcatttcctccaaggtgcccaaggctgagtacatccccactatcatccgccgggatgacccctccatcatccccatcctctacgaccatgagcacgcaaccttcgaggacatccttgaggagatagagaggaagctgaacgtctaccacaagggagccaagatctggaaaatgctgattttctgccagggaggtcctggacacctctatctcctcaagaacaaggtggccacctttgccaaagtggagaaggaagaggacatgattcacttctggaagcggctgagccgcctgatgagcaaagtgaacccagagccgaacgtcatccacatcatgggctgctacattctggggaaccccaatggagagaagctgttccagaacctcaggaccctcatgactccttatagggtcaccttcgagtcacccctggagctctcagcccaagggaagcagatgatcgagacgtactttgacttccggttgtatcgcctgtggaagagccgccagcactcgaagctgctggactttgacgacgtcctgtgaggggcagaggcctccgcccagtcaccatcaggccactccctctgcaccgggacctggggctgggccgcctcgtgctccccgggactgtgtggctccggtctcgcctggagccacttcagggcacctcagacgttgctcaggttccccctgtgggttccggtcctcgctgcacccgtggccgcagaggctgcagtccctgggggccgggaggatcccgccctgtggcccgtggatgctcagcggccaggcactgacctgccatgcctcgcctggaggctcagctgtgggcatccctccatggggttcatagaaataagtgcaatttctacacccccgaaacaattcaaagggaagcagcatttcttgttaactagttaagcactatgctgctagttacagtgtaggcaccccggcccagcagcccagcagcccacatgtgttcaggaccctccctgcccaccccctccctgccgtatcgatcaccagcaccagggtggcccgtgtgcgtggggccagcgtcgccgggctgcccagcctggctctgtctacactggccgagtctctgggtctgtctacactggccgagtctccgactgtctgtgctttcacttacactcctcttgccaccccccatccctgcttacttagacctcagccggcgccggacccggtaggggcagtctgggcagcaggaaggaagggcgcagcgtcccctccttcagaggaggctctgggtggggcctgctccccatccccccaagcccacccagcactctcattgctgctgttgagttcagcttttaccagcctcagtgtggaggctccatcccagcacacaggcctggggcttggcaggggcccagctggggctgggccctgggttttgagaaactcgctggcaccacagtgggcccctggacccggccgcgcagctggtggactgtaggggctcctgactgggcacaggagctcccagcttttgtccacggccagcaggatgggctgtcgtgtatatagctggggcgagggggcaggccccccttgtgcagagccaggggtctgagggcacctggctgtgttcccagctgagggagggctggggcgggggccgggcttggaacgatgtacgataccctcatagtgaccattaaacctgatcctccaccgcggccgccgcgtgggtctgtcctctcagtgctttccaggggccttcctgtgcccagcttctgggcccactcctgtgaggtcactgctgcagggccttcctgcctggacagagttggagctaggccactagaccaccccacagggcatagccagggggaccagcacaggaggggacggagaggagctgcaggagggctggggggaggctgcagtctcggaggggggcctcgccgggtctggaggggacagcagagacagcccgttccccctgccgcctgagggcaccagggagagggctgtatgtccctcacgccacactgtgtgtgcagtcagcagtgtggccacagatgggggccactctctcaacctcaggtgtcctcagggcccagaccgctgctgggcacagccaggctggctgccagctggttccctgccccgtggctgggggacagagcagcacgtatcagctgggctagggtcagggggccactggtgcgcagcctggcacagcctggcaggcttgaggcccagtgtgctgggggtggtcacacagccgtcagccacctccagctcttccagggcattctagatggggtcccgggagggggcaggttttggtgccaatttgagtgtataaagttttaggtaaataccaaa

SEQ ID NO: 159834 - DNA, 672 bp, Homo sapiens
  Payload ID: 11265
  Gene Symbol: NSMF
  Gene Name: NMDA receptor synaptonuclear signaling and neuronal migration factor
  ENST ID: ENST00000371468
  CDS Start-End: 72-509
tgccgtcaccctctcacggccctcttcagcccctggcttcctcccccaggaacttccgcaaacacctgcgcatggtcggcagccggagggtgaaggcccagacgttcgctgagcggcgcgagcggagcttcagccggtcctggagcgaccccacccccatgaaagccgacacttcccacgactcccgagacagcagtgacctgcagagctcccactgcacgctggacgaggccttcgaggacctggactgggacactgagaagggcctggaggctgtggcctgcgacaccgaaggcttcgtgccaccaaaggtcatgctcatttcctccaaggtgcccaaggctgagtacatccccactatcatccgccgggatgacccctccatcatccccatcctctacgtgagtcccgccccgggcctgcccccaacagatgccctcttgcggccccaccctgggccagcgccggcaccccaggtccccagggtgctgtggcgctgctggctctgacgcagccttgatgtggccttgtggcctgtgtctgtccccaggaccatgagcacgcaaccttcgaggacatccttggtatgtgcctcattggccttctctctgctggttccaggcctgggaggggcagacacaggtgggggtgcccctggggctggggtggggg

SEQ ID NO: 159835 - DNA, 1852 bp, Homo sapiens
  Payload ID: 11265
  Gene Symbol: NSMF
  Gene Name: NMDA receptor synaptonuclear signaling and neuronal migration factor
  Uniprot ID: Q6X4W1
  ENST ID: ENST00000371472
  CDS Start-End: 201-1787
acgcgcggagcgccgggtgcggccatgcggggaccgggcccgaccccgagcccgaccccgagcccaagcccgagccggagcccgagcgagaccccgagcccgagcccgagcgcgacccccggtgcggcgcggctaccccggcggaggcggcgggcgcggggcgcgctctgaggcccgggggatgcgccgccgcctcgaccatgggcgccgccgcctccaggaggagggcgctgaggagcgaggccatgtcctcggtggcggccaaagtgcgagcagcccgagcgtttggagagtacctgtcccagagtcaccctgagaaccgcaacggcgcagatcacctgctggctgatgcctactctggccacgacgggtcccccgagatgcagccggccccccagaacaagcgccgcctgtccctcgtctccaacggctgctacgagggcagcctctcagaggagcccagcattaggaagcccgcaggcgagggccctcagcctcgagtgtacaccatctctggggagcctgccctgctgcccagccctgaggcggaggccattgagctggcggtggtgaaggggcggcggcagcggcaccctcaccatcacagccagcccctgcgcgccagccctggtggcagccgggaggacgtcagcaggccctgccagagctgggcgggcagccgccagggctccaaggagtgccccggatgtgcccagctggctcctggccccacccctcgggcctttgggctggaccagccacctctgcctgagacctccggtcgccgcaagaagctggagaggatgtacagcgttgaccgtgtgtctgacgacatccctattcgtacctggttccccaaggaaaatcttttcagcttccagacagcaaccacaactatgcaagcggtgttcaggggctacgcggagaggaagcgccggaaacgggagaatgattccgcgtctgtaatccagaggaacttccgcaaacacctgcgcatggtcggcagccggagggtgaaggcccagacgttcgctgagcggcgcgagcggagcttcagccggtcctggagcgaccccacccccatgaaagccgacacttcccacgactcccgagacagcagtgacctgcagagctcccactgcacgctggacgaggccttcgaggacctggactgggacactgagaagggcctggaggctgtggcctgcgacaccgaaggcttcgtgccaccaaaggtcatgctcatttcctccaaggtgcccaaggctgagtacatccccactatcatccgccgggatgacccctccatcatccccatcctctacgaccatgagcacgcaaccttcgaggacatccttgaggagatagagaggaagctgaacgtctaccacaagggagccaagatctggaaaatgctgattttctgccagggaggtcctggacacctctatctcctcaagaacaaggtggccacctttgccaaagtggagaaggaagaggacatgattcacttctggaagcggctgagccgcctgatgagcaaagtgaacccagagccgaacgtcatccacatcatgggctgctacattctggggaaccccaatggagagaagctgttccagaacctcaggaccctcatgactccttatagggtcaccttcgagtcacccctggagctctcagcccaagggaagcagatgatcgagacgtactttgacttccggttgtatcgcctgtggaagagccgccagcactcgaagctgctggactttgacgacgtcctgtgaggggccgggcttggaacgatgtacgataccctcatagtgaccattaaacctgatcctccaccgcg

SEQ ID NO: 159836 - DNA, 3556 bp, Homo sapiens
  Payload ID: 11265
  Gene Symbol: NSMF
  Gene Name: NMDA receptor synaptonuclear signaling and neuronal migration factor
  Uniprot ID: Q6X4W1
  ENST ID: ENST00000371473
  CDS Start-End: 233-1735
ggttcgggcagcgctctcccgggagcggcggcacgcgcggagcgccgggtgcggccatgcggggaccgggcccgaccccgagcccgaccccgagcccaagcccgagccggagcccgagcgagaccccgagcccgagcccgagcgcgacccccggtgcggcgcggctaccccggcggaggcggcgggcgcggggcgcgctctgaggcccgggggatgcgccgccgcctcgaccatgggcgccgccgcctccaggaggagggcgctgaggagcgaggccatgtcctcggtggcggccaaagtgcgagcagcccgagcgtttggagagtacctgtcccagagtcaccctgagaaccgcaacggcgcagatcacctgctggctgatgcctactctggccacgacgggtcccccgagatgcagccggccccccagaacaagcgccgcctgtccctcgtctccaacggctgctacgagggcagcctctcagaggagcccagcattaggaagcccgcaggcgagggccctcagcctcgagtgtacaccatctctggggagcctgccctgctgcccagccctgaggcggaggccattgagctggcggtggtgaaggggcggcggcagcggcaccctcaccatcacagccagcccctgcgcgccagccctggtggcagccgggaggacgtcagcaggccctgccagagctgggcgggcagccgccagggctccaaggagtgccccggatgtgcccagctggctcctggccccacccctcgggcctttgggctggaccagccacctctgcctgagacctccggtcgccgcaagaagctggagaggatgtacagcgttgaccgtgtgtctgacgacatccctattcgtacctggttccccaaggaaaatcttttcagcttccagacagcaaccacaactatgcaagccatctcggtgttcaggggctacgcggagaggaagcgccggaaacgggagaatgattccgcgtctgtaatccagaggaacttccgcaaacacctgcgcatggtcggcagccggagggtgaaggcccagagcagtgacctgcagagctcccactgcacgctggacgaggccttcgaggacctggactgggacactgagaagggcctggaggctgtggcctgcgacaccgaaggcttcgtgccaccaaaggtcatgctcatttcctccaaggtgcccaaggctgagtacatccccactatcatccgccgggatgacccctccatcatccccatcctctacgaccatgagcacgcaaccttcgaggacatccttgaggagatagagaggaagctgaacgtctaccacaagggagccaagatctggaaaatgctgattttctgccagggaggtcctggacacctctatctcctcaagaacaaggtggccacctttgccaaagtggagaaggaagaggacatgattcacttctggaagcggctgagccgcctgatgagcaaagtgaacccagagccgaacgtcatccacatcatgggctgctacattctggggaaccccaatggagagaagctgttccagaacctcaggaccctcatgactccttatagggtcaccttcgagtcacccctggagctctcagcccaagggaagcagatgatcgagacgtactttgacttccggttgtatcgcctgtggaagagccgccagcactcgaagctgctggactttgacgacgtcctgtgaggggcagaggcctccgcccagtcaccatcaggccactccctctgcaccgggacctggggctgggccgcctcgtgctccccgggactgtgtggctccggtctcgcctggagccacttcagggcacctcagacgttgctcaggttccccctgtgggttccggtcctcgctgcacccgtggccgcagaggctgcagtccctgggggccgggaggatcccgccctgtggcccgtggatgctcagcggccaggcactgacctgccatgcctcgcctggaggctcagctgtgggcatccctccatggggttcatagaaataagtgcaatttctacacccccgaaacaattcaaagggaagcagcatttcttgttaactagttaagcactatgctgctagttacagtgtaggcaccccggcccagcagcccagcagcccacatgtgttcaggaccctccctgcccaccccctccctgccgtatcgatcaccagcaccagggtggcccgtgtgcgtggggccagcgtcgccgggctgcccagcctggctctgtctacactggccgagtctctgggtctgtctacactggccgagtctccgactgtctgtgctttcacttacactcctcttgccaccccccatccctgcttacttagacctcagccggcgccggacccggtaggggcagtctgggcagcaggaaggaagggcgcagcgtcccctccttcagaggaggctctgggtggggcctgctccccatccccccaagcccacccagcactctcattgctgctgttgagttcagcttttaccagcctcagtgtggaggctccatcccagcacacaggcctggggcttggcaggggcccagctggggctgggccctgggttttgagaaactcgctggcaccacagtgggcccctggacccggccgcgcagctggtggactgtaggggctcctgactgggcacaggagctcccagcttttgtccacggccagcaggatgggctgtcgtgtatatagctggggcgagggggcaggccccccttgtgcagagccaggggtctgagggcacctggctgtgttcccagctgagggagggctggggcgggggccgggcttggaacgatgtacgataccctcatagtgaccattaaacctgatcctccaccgcggccgccgcgtgggtctgtcctctcagtgctttccaggggccttcctgtgcccagcttctgggcccactcctgtgaggtcactgctgcagggccttcctgcctggacagagttggagctaggccactagaccaccccacagggcatagccagggggaccagcacaggaggggacggagaggagctgcaggagggctggggggaggctgcagtctcggaggggggcctcgccgggtctggaggggacagcagagacagcccgttccccctgccgcctgagggcaccagggagagggctgtatgtccctcacgccacactgtgtgtgcagtcagcagtgtggccacagatgggggccactctctcaacctcaggtgtcctcagggcccagaccgctgctgggcacagccaggctggctgccagctggttccctgccccgtggctgggggacagagcagcacgtatcagctgggctagggtcagggggccactggtgcgcagcctggcacagcctggcaggcttgaggcccagtgtgctgggggtggtcacacagccgtcagccacctccagctcttccagggcattctagatggggtcccgggagggggcaggttttggtgccaatttgagtgtataaagttttaggtaaatacc

SEQ ID NO: 159837 - DNA, 3571 bp, Homo sapiens
  Payload ID: 11265
  Gene Symbol: NSMF
  Gene Name: NMDA receptor synaptonuclear signaling and neuronal migration factor
  Uniprot ID: Q6X4W1
  ENST ID: ENST00000371474
  CDS Start-End: 233-1750
ggttcgggcagcgctctcccgggagcggcggcacgcgcggagcgccgggtgcggccatgcggggaccgggcccgaccccgagcccgaccccgagcccaagcccgagccggagcccgagcgagaccccgagcccgagcccgagcgcgacccccggtgcggcgcggctaccccggcggaggcggcgggcgcggggcgcgctctgaggcccgggggatgcgccgccgcctcgaccatgggcgccgccgcctccaggaggagggcgctgaggagcgaggccatgtcctcggtggcggccaaagtgcgagcagcccgagcgtttggagagtacctgtcccagagtcaccctgagaaccgcaacggcgcagatcacctgctggctgatgcctactctggccacgacgggtcccccgagatgcagccggccccccagaacaagcgccgcctgtccctcgtctccaacggctgctacgagggcagcctctcagaggagcccagcattaggaagcccgcaggcgagggccctcagcctcgagtgtacaccatctctggggagcctgccctgctgcccagccctgaggcggaggccattgagctggcggtggtgaaggggcggcggcagcggcaccctcaccatcacagccagcccctgcgcgccagccctggtggcagccgggaggacgtcagcaggccctgccagagctgggcgggcagccgccagggctccaaggagtgccccggatgtgcccagctggctcctggccccacccctcgggcctttgggctggaccagccacctctgcctgagacctccggtcgccgcaagaagctggagaggatgtacagcgttgaccgtgtgtctgacgacatccctattcgtacctggttccccaaggaaaatcttttcagcttccagacagcaaccacaactatgcaagcgaacttccgcaaacacctgcgcatggtcggcagccggagggtgaaggcccagacgttcgctgagcggcgcgagcggagcttcagccggtcctggagcgaccccacccccatgaaagccgacacttcccacgactcccgagacagcagtgacctgcagagctcccactgcacgctggacgaggccttcgaggacctggactgggacactgagaagggcctggaggctgtggcctgcgacaccgaaggcttcgtgccaccaaaggtcatgctcatttcctccaaggtgcccaaggctgagtacatccccactatcatccgccgggatgacccctccatcatccccatcctctacgaccatgagcacgcaaccttcgaggacatccttgaggagatagagaggaagctgaacgtctaccacaagggagccaagatctggaaaatgctgattttctgccagggaggtcctggacacctctatctcctcaagaacaaggtggccacctttgccaaagtggagaaggaagaggacatgattcacttctggaagcggctgagccgcctgatgagcaaagtgaacccagagccgaacgtcatccacatcatgggctgctacattctggggaaccccaatggagagaagctgttccagaacctcaggaccctcatgactccttatagggtcaccttcgagtcacccctggagctctcagcccaagggaagcagatgatcgagacgtactttgacttccggttgtatcgcctgtggaagagccgccagcactcgaagctgctggactttgacgacgtcctgtgaggggcagaggcctccgcccagtcaccatcaggccactccctctgcaccgggacctggggctgggccgcctcgtgctccccgggactgtgtggctccggtctcgcctggagccacttcagggcacctcagacgttgctcaggttccccctgtgggttccggtcctcgctgcacccgtggccgcagaggctgcagtccctgggggccgggaggatcccgccctgtggcccgtggatgctcagcggccaggcactgacctgccatgcctcgcctggaggctcagctgtgggcatccctccatggggttcatagaaataagtgcaatttctacacccccgaaacaattcaaagggaagcagcatttcttgttaactagttaagcactatgctgctagttacagtgtaggcaccccggcccagcagcccagcagcccacatgtgttcaggaccctccctgcccaccccctccctgccgtatcgatcaccagcaccagggtggcccgtgtgcgtggggccagcgtcgccgggctgcccagcctggctctgtctacactggccgagtctctgggtctgtctacactggccgagtctccgactgtctgtgctttcacttacactcctcttgccaccccccatccctgcttacttagacctcagccggcgccggacccggtaggggcagtctgggcagcaggaaggaagggcgcagcgtcccctccttcagaggaggctctgggtggggcctgctccccatccccccaagcccacccagcactctcattgctgctgttgagttcagcttttaccagcctcagtgtggaggctccatcccagcacacaggcctggggcttggcaggggcccagctggggctgggccctgggttttgagaaactcgctggcaccacagtgggcccctggacccggccgcgcagctggtggactgtaggggctcctgactgggcacaggagctcccagcttttgtccacggccagcaggatgggctgtcgtgtatatagctggggcgagggggcaggccccccttgtgcagagccaggggtctgagggcacctggctgtgttcccagctgagggagggctggggcgggggccgggcttggaacgatgtacgataccctcatagtgaccattaaacctgatcctccaccgcggccgccgcgtgggtctgtcctctcagtgctttccaggggccttcctgtgcccagcttctgggcccactcctgtgaggtcactgctgcagggccttcctgcctggacagagttggagctaggccactagaccaccccacagggcatagccagggggaccagcacaggaggggacggagaggagctgcaggagggctggggggaggctgcagtctcggaggggggcctcgccgggtctggaggggacagcagagacagcccgttccccctgccgcctgagggcaccagggagagggctgtatgtccctcacgccacactgtgtgtgcagtcagcagtgtggccacagatgggggccactctctcaacctcaggtgtcctcagggcccagaccgctgctgggcacagccaggctggctgccagctggttccctgccccgtggctgggggacagagcagcacgtatcagctgggctagggtcagggggccactggtgcgcagcctggcacagcctggcaggcttgaggcccagtgtgctgggggtggtcacacagccgtcagccacctccagctcttccagggcattctagatggggtcccgggagggggcaggttttggtgccaatttgagtgtataaagttttaggtaaatacc

SEQ ID NO: 159838 - DNA, 3646 bp, Homo sapiens
  Payload ID: 11265
  Gene Symbol: NSMF
  Gene Name: NMDA receptor synaptonuclear signaling and neuronal migration factor
  Uniprot ID: Q6X4W1
  ENST ID: ENST00000371475
  CDS Start-End: 233-1825
ggttcgggcagcgctctcccgggagcggcggcacgcgcggagcgccgggtgcggccatgcggggaccgggcccgaccccgagcccgaccccgagcccaagcccgagccggagcccgagcgagaccccgagcccgagcccgagcgcgacccccggtgcggcgcggctaccccggcggaggcggcgggcgcggggcgcgctctgaggcccgggggatgcgccgccgcctcgaccatgggcgccgccgcctccaggaggagggcgctgaggagcgaggccatgtcctcggtggcggccaaagtgcgagcagcccgagcgtttggagagtacctgtcccagagtcaccctgagaaccgcaacggcgcagatcacctgctggctgatgcctactctggccacgacgggtcccccgagatgcagccggccccccagaacaagcgccgcctgtccctcgtctccaacggctgctacgagggcagcctctcagaggagcccagcattaggaagcccgcaggcgagggccctcagcctcgagtgtacaccatctctggggagcctgccctgctgcccagccctgaggcggaggccattgagctggcggtggtgaaggggcggcggcagcggcaccctcaccatcacagccagcccctgcgcgccagccctggtggcagccgggaggacgtcagcaggccctgccagagctgggcgggcagccgccagggctccaaggagtgccccggatgtgcccagctggctcctggccccacccctcgggcctttgggctggaccagccacctctgcctgagacctccggtcgccgcaagaagctggagaggatgtacagcgttgaccgtgtgtctgacgacatccctattcgtacctggttccccaaggaaaatcttttcagcttccagacagcaaccacaactatgcaagccatctcggtgttcaggggctacgcggagaggaagcgccggaaacgggagaatgattccgcgtctgtaatccagaggaacttccgcaaacacctgcgcatggtcggcagccggagggtgaaggcccagacgttcgctgagcggcgcgagcggagcttcagccggtcctggagcgaccccacccccatgaaagccgacacttcccacgactcccgagacagcagtgacctgcagagctcccactgcacgctggacgaggccttcgaggacctggactgggacactgagaagggcctggaggctgtggcctgcgacaccgaaggcttcgtgccaccaaaggtcatgctcatttcctccaaggtgcccaaggctgagtacatccccactatcatccgccgggatgacccctccatcatccccatcctctacgaccatgagcacgcaaccttcgaggacatccttgaggagatagagaggaagctgaacgtctaccacaagggagccaagatctggaaaatgctgattttctgccagggaggtcctggacacctctatctcctcaagaacaaggtggccacctttgccaaagtggagaaggaagaggacatgattcacttctggaagcggctgagccgcctgatgagcaaagtgaacccagagccgaacgtcatccacatcatgggctgctacattctggggaaccccaatggagagaagctgttccagaacctcaggaccctcatgactccttatagggtcaccttcgagtcacccctggagctctcagcccaagggaagcagatgatcgagacgtactttgacttccggttgtatcgcctgtggaagagccgccagcactcgaagctgctggactttgacgacgtcctgtgaggggcagaggcctccgcccagtcaccatcaggccactccctctgcaccgggacctggggctgggccgcctcgtgctccccgggactgtgtggctccggtctcgcctggagccacttcagggcacctcagacgttgctcaggttccccctgtgggttccggtcctcgctgcacccgtggccgcagaggctgcagtccctgggggccgggaggatcccgccctgtggcccgtggatgctcagcggccaggcactgacctgccatgcctcgcctggaggctcagctgtgggcatccctccatggggttcatagaaataagtgcaatttctacacccccgaaacaattcaaagggaagcagcatttcttgttaactagttaagcactatgctgctagttacagtgtaggcaccccggcccagcagcccagcagcccacatgtgttcaggaccctccctgcccaccccctccctgccgtatcgatcaccagcaccagggtggcccgtgtgcgtggggccagcgtcgccgggctgcccagcctggctctgtctacactggccgagtctctgggtctgtctacactggccgagtctccgactgtctgtgctttcacttacactcctcttgccaccccccatccctgcttacttagacctcagccggcgccggacccggtaggggcagtctgggcagcaggaaggaagggcgcagcgtcccctccttcagaggaggctctgggtggggcctgctccccatccccccaagcccacccagcactctcattgctgctgttgagttcagcttttaccagcctcagtgtggaggctccatcccagcacacaggcctggggcttggcaggggcccagctggggctgggccctgggttttgagaaactcgctggcaccacagtgggcccctggacccggccgcgcagctggtggactgtaggggctcctgactgggcacaggagctcccagcttttgtccacggccagcaggatgggctgtcgtgtatatagctggggcgagggggcaggccccccttgtgcagagccaggggtctgagggcacctggctgtgttcccagctgagggagggctggggcgggggccgggcttggaacgatgtacgataccctcatagtgaccattaaacctgatcctccaccgcggccgccgcgtgggtctgtcctctcagtgctttccaggggccttcctgtgcccagcttctgggcccactcctgtgaggtcactgctgcagggccttcctgcctggacagagttggagctaggccactagaccaccccacagggcatagccagggggaccagcacaggaggggacggagaggagctgcaggagggctggggggaggctgcagtctcggaggggggcctcgccgggtctggaggggacagcagagacagcccgttccccctgccgcctgagggcaccagggagagggctgtatgtccctcacgccacactgtgtgtgcagtcagcagtgtggccacagatgggggccactctctcaacctcaggtgtcctcagggcccagaccgctgctgggcacagccaggctggctgccagctggttccctgccccgtggctgggggacagagcagcacgtatcagctgggctagggtcagggggccactggtgcgcagcctggcacagcctggcaggcttgaggcccagtgtgctgggggtggtcacacagccgtcagccacctccagctcttccagggcattctagatggggtcccgggagggggcaggttttggtgccaatttgagtgtataaagttttaggtaaatacc

SEQ ID NO: 159839 - DNA, 2888 bp, Homo sapiens
  Payload ID: 11265
  Gene Symbol: NSMF
  Gene Name: NMDA receptor synaptonuclear signaling and neuronal migration factor
  ENST ID: ENST00000371482
  CDS Start-End: 1135-1719
tctggagttgaaggggagccctggaaggctgtcgcgggaagagcactgggtgggatttgcctttgggtgggaggtggtgccaggagccagggagagcactggcttcccacaccgaaggggaacttccgcaaacacctgcgcatggtcggcagccggagggtgaaggcccagacgttcgctgagcggcgcgagcggagcttcagccggtcctggagcgaccccacccccatgaaagccgacacttcccacgactcccgagacagtaggtgccccgcacaggcccgcccaccttccccagagcctcccctagaccccagacccctgctgggggtcccctgccagggccgctgggctgcgcttttgcactcctgaatcttggtttacctgtttgtgagatggggacgccctcagcatctccgatcgcaaaggcggggctaacaacggccgcggcagtgctggccgggggcgcctgtagggccgtgcccaccgccactcgcaagaggccctcaggggcagggggctgcggtgcccgcccccactccctcccaggcgcccggcggacttggctggagctgatgcctgcacgcgccttccaccggcctcgcaccagggtctcccttcccacatcaggccgctgcccagtggtgtccacaggcctgtcctgccgggctggcggcgacctctgtatggtcctcccacttgcttggaggaccctccgggatggggctttcgggccctgtgggccttggggccatggccaggataggaggtgctgccgggcctgctgtcctggtgaccctcttgcttcccaggcagtgacctgcagagctcccactgcacgctggacgaggccttcgaggacctggactgggacactgagaagggcctggaggctgtggcctgcgacaccgaaggcttcgtgccaccaaaggtcatggtgaggcccagcccgggcagtgctcctctacaccccgagcaggactccgccccaacccgagtccagccagctctgcctgggaccacgcagccttctccagctgcctgggggagggtgtctcacagggctatacccttgggctgcctggcagccagaaggtagcctcatgggggctcccacagccccttggcttttggatgggcctggggcccctgagcagctctttgtctccgcagctcatttcctccaaggtgcccaaggctgagtacatccccactatcatccgccgggatgacccctccatcatccccatcctctacgaccatgagcacgcaaccttcgaggacatccttgaggagatagagaggaagctgaacgtctaccacaagggagccaagatctggaaaatgctgattttctgccagggaggtcctggacacctctatctcctcaagaacaaggtggccacctttgccaaagtggagaaggaagaggacatgattcacttctggaagcggctgagccgcctgatgagcaaagtgaacccagagccgaacgtcatccacatcatgggctgctacattctggggaaccccaatggagagaagctgttccagaacctcaggaccctcatgactccttatagggtcaccttcgagtcacccctggagctctcagcccaagggaagcagatgatcgagacgtactttgacttccggttgtatcgcctgtggaagagccgccagcactcgaagctgctggactttgacgacgtcctgtgaggggcagaggcctccgcccagtcaccatcaggccactccctctgcaccgggacctggggctgggccgcctcgtgctccccgggactgtgtggctccggtctcgcctggagccacttcagggcacctcagacgttgctcaggttccccctgtgggttccggtcctcgctgcacccgtggccgcagaggctgcagtccctgggggccgggaggatcccgccctgtggcccgtggatgctcagcggccaggcactgacctgccatgcctcgcctggaggctcagctgtgggcatccctccatggggttcatagaaataagtgcaatttctacacccccgaaacaattcaaagggaagcagcatttcttgttaactagttaagcactatgctgctagttacagtgtaggcaccccggcccagcagcccagcagcccacatgtgttcaggaccctccctgcccaccccctccctgccgtatcgatcaccagcaccagggtggcccgtgtgcgtggggccagcgtcgccgggctgcccagcctggctctgtctacactggccgagtctctgggtctgtctacactggccgagtctccgactgtctgtgctttcacttacactcctcttgccaccccccatccctgcttacttagacctcagccggcgccggacccggtaggggcagtctgggcagcaggaaggaagggcgcagcgtcccctccttcagaggaggctctgggtggggcctgctccccatccccccaagcccacccagcactctcattgctgctgttgagttcagcttttaccagcctcagtgtggaggctccatcccagcacacaggcctggggcttggcaggggcccagctggggctgggccctgggttttgagaaactcgctggcaccacagtgggcccctggacccggccgcgcagctggtggactgtaggggctcctgactgggcacaggagctcccagcttttgtccacggccagcaggatgggctgtcgtgtatatagctggggcgagggggcaggccccccttgtgcagagccaggggtctgagggcacctggctgtgttcccagctgagggagggctggggcgggggccgggcttggaacgatgtacgataccctcatagtgaccattaaacctgatcctccaccgcg

SEQ ID NO: 159840 - DNA, 3577 bp, Homo sapiens
  Payload ID: 11265
  Gene Symbol: NSMF
  Gene Name: NMDA receptor synaptonuclear signaling and neuronal migration factor
  Uniprot ID: Q6X4W1
  ENST ID: ENST00000437259
  CDS Start-End: 233-1756
ggttcgggcagcgctctcccgggagcggcggcacgcgcggagcgccgggtgcggccatgcggggaccgggcccgaccccgagcccgaccccgagcccaagcccgagccggagcccgagcgagaccccgagcccgagcccgagcgcgacccccggtgcggcgcggctaccccggcggaggcggcgggcgcggggcgcgctctgaggcccgggggatgcgccgccgcctcgaccatgggcgccgccgcctccaggaggagggcgctgaggagcgaggccatgtcctcggtggcggccaaagtgcgagcagcccgagcgtttggagagtacctgtcccagagtcaccctgagaaccgcaacggcgcagatcacctgctggctgatgcctactctggccacgacgggtcccccgagatgcagccggccccccagaacaagcgccgcctgtccctcgtctccaacggctgctacgagggcagcctctcagaggagcccagcattaggaagcccgcaggcgagggccctcagcctcgagtgtacaccatctctggggagcctgccctgctgcccagccctgaggcggaggccattgagctggcggtggtgaaggggcggcggcagcggcaccctcaccatcacagccagcccctgcgcgccagccctggtggcagccgggaggacgtcagcaggccctgccagagctgggcgggcagccgccagggctccaaggagtgccccggatgtgcccagctggctcctggccccacccctcgggcctttgggctggaccagccacctctgcctgagacctccggtcgccgcaagaagctggagaggatgtacagcgttgaccgtgtgtctgacgacatccctattcgtacctggttccccaaggaaaatcttttcagcttccagacagcaaccacaactatgcaagccatctcgaacttccgcaaacacctgcgcatggtcggcagccggagggtgaaggcccagacgttcgctgagcggcgcgagcggagcttcagccggtcctggagcgaccccacccccatgaaagccgacacttcccacgactcccgagacagcagtgacctgcagagctcccactgcacgctggacgaggccttcgaggacctggactgggacactgagaagggcctggaggctgtggcctgcgacaccgaaggcttcgtgccaccaaaggtcatgctcatttcctccaaggtgcccaaggctgagtacatccccactatcatccgccgggatgacccctccatcatccccatcctctacgaccatgagcacgcaaccttcgaggacatccttgaggagatagagaggaagctgaacgtctaccacaagggagccaagatctggaaaatgctgattttctgccagggaggtcctggacacctctatctcctcaagaacaaggtggccacctttgccaaagtggagaaggaagaggacatgattcacttctggaagcggctgagccgcctgatgagcaaagtgaacccagagccgaacgtcatccacatcatgggctgctacattctggggaaccccaatggagagaagctgttccagaacctcaggaccctcatgactccttatagggtcaccttcgagtcacccctggagctctcagcccaagggaagcagatgatcgagacgtactttgacttccggttgtatcgcctgtggaagagccgccagcactcgaagctgctggactttgacgacgtcctgtgaggggcagaggcctccgcccagtcaccatcaggccactccctctgcaccgggacctggggctgggccgcctcgtgctccccgggactgtgtggctccggtctcgcctggagccacttcagggcacctcagacgttgctcaggttccccctgtgggttccggtcctcgctgcacccgtggccgcagaggctgcagtccctgggggccgggaggatcccgccctgtggcccgtggatgctcagcggccaggcactgacctgccatgcctcgcctggaggctcagctgtgggcatccctccatggggttcatagaaataagtgcaatttctacacccccgaaacaattcaaagggaagcagcatttcttgttaactagttaagcactatgctgctagttacagtgtaggcaccccggcccagcagcccagcagcccacatgtgttcaggaccctccctgcccaccccctccctgccgtatcgatcaccagcaccagggtggcccgtgtgcgtggggccagcgtcgccgggctgcccagcctggctctgtctacactggccgagtctctgggtctgtctacactggccgagtctccgactgtctgtgctttcacttacactcctcttgccaccccccatccctgcttacttagacctcagccggcgccggacccggtaggggcagtctgggcagcaggaaggaagggcgcagcgtcccctccttcagaggaggctctgggtggggcctgctccccatccccccaagcccacccagcactctcattgctgctgttgagttcagcttttaccagcctcagtgtggaggctccatcccagcacacaggcctggggcttggcaggggcccagctggggctgggccctgggttttgagaaactcgctggcaccacagtgggcccctggacccggccgcgcagctggtggactgtaggggctcctgactgggcacaggagctcccagcttttgtccacggccagcaggatgggctgtcgtgtatatagctggggcgagggggcaggccccccttgtgcagagccaggggtctgagggcacctggctgtgttcccagctgagggagggctggggcgggggccgggcttggaacgatgtacgataccctcatagtgaccattaaacctgatcctccaccgcggccgccgcgtgggtctgtcctctcagtgctttccaggggccttcctgtgcccagcttctgggcccactcctgtgaggtcactgctgcagggccttcctgcctggacagagttggagctaggccactagaccaccccacagggcatagccagggggaccagcacaggaggggacggagaggagctgcaggagggctggggggaggctgcagtctcggaggggggcctcgccgggtctggaggggacagcagagacagcccgttccccctgccgcctgagggcaccagggagagggctgtatgtccctcacgccacactgtgtgtgcagtcagcagtgtggccacagatgggggccactctctcaacctcaggtgtcctcagggcccagaccgctgctgggcacagccaggctggctgccagctggttccctgccccgtggctgggggacagagcagcacgtatcagctgggctagggtcagggggccactggtgcgcagcctggcacagcctggcaggcttgaggcccagtgtgctgggggtggtcacacagccgtcagccacctccagctcttccagggcattctagatggggtcccgggagggggcaggttttggtgccaatttgagtgtataaagttttaggtaaatacc

SEQ ID NO: 159841 - DNA, 1198 bp, Homo sapiens
  Payload ID: 11266
  Gene Symbol: NME5
  Gene Name: NME/NM23 family member 5
  Uniprot ID: P56597
  ENST ID: ENST00000265191
  CDS Start-End: 51-689
aggtctcctagcaacaagttgtaccatatgaggacggccgctgagccataatggagatatcaatgcctccacctcagatatatgtagaaaaaactctggccattatcaaaccagatattgttgacaaagaggaggagatacaagatattattcttagatccggattcaccattgttcagagaagaaaactacgcctcagccctgagcaatgtagtaacttttatgtggaaaagtatggaaaaatgtttttccccaacttaacagcttacatgagttctggaccacttgtcgccatgatattagctagacataaagccatctcttattggttagaacttttgggaccaaataatagcttagtagcgaaggagacacatccagacagtctgagggcaatttatggcacagatgacctaaggaatgcacttcatgggagtaatgactttgctgctgcggaaagagaaatacgttttatgtttcctgaagtgattgttgagcccattccaattggacaagctgctaaggactatttaaatttacatataatgccaactctgcttgaaggactcacagagctttgtaagcaaaaaccagcagatcctttgatttggctagctgattggctgctgaaaaataatcctaacaaacccaaactttgtcaccatccaattgtagaagaaccttattaaaaaaaaaatcctcgaaagaacaaatcatgaactatcttattataaaaggctgtacttctactgtttgaaaaaattatttctagggtttaagtaactacaagtaaaataaatttatttcttaaaaataagtgttaaaggaataactattctatgaagcagataacattaaggtaaaatataggcttagagtatgattttaacaatgatgtaacactaggtaatggaaaactcatgtaagatgttgctagatgtttttgtttttcttaagtttgagaagtaagacataaagtttagttatacattttcccaagcacatatcctatatctaaatacataattaatgcacagttgagacagtctagtttaaaaggcttaggtccttttgtagtccataagcatggtgatttggtttcatgctcatgtgtcagatatgcttccctcaaaccttgttacagcatcatcacattacctgtttgatgtaaaaaataaaaaatagaaaggtgtaagta

SEQ ID NO: 159842 - DNA, 1642 bp, Homo sapiens
  Payload ID: 11267
  Gene Symbol: NME7
  Gene Name: NME/NM23 family member 7
  Uniprot ID: Q9Y5B8
  ENST ID: ENST00000367811
  CDS Start-End: 258-1388
ggaagtaaaactgccggaaacagaataatggcgtctcgtagccccaggcgacagcgtggaggggcgggtctgtcgattggatgaacgcagctgagattactcccagccactaaggacgaagaggtggggcggtggcgtcccacgcctcgtgcgacagtgggcggggctttgttgcctgagtaaccgtatgatggtggtggtggtggtgtcttcctgtctcaacgatacctattttctagtgctgagatcctgagacaatgaatcatagtgaaagattcgttttcattgcagagtggtatgatccaaatgcttcacttcttcgacgttatgagcttttattttacccaggggatggatctgttgaaatgcatgatgtaaagaatcatcgcacctttttaaagcggaccaaatatgataacctgcacttggaagatttatttataggcaacaaagtgaatgtcttttctcgacaactggtattaattgactatggggatcaatatacagctcgccagctgggcagtaggaaagaaaaaacgctagccctaattaaaccagatgcaatatcaaaggctggagaaataattgaaataataaacaaagctggatttactataaccaaactcaaaatgatgatgctttcaaggaaagaagcattggattttcatgtagatcaccagtcaagaccctttttcaatgagctgatccagtttattacaactggtcctattattgccatggagattttaagagatgatgctatatgtgaatggaaaagactgctgggacctgcaaactctggagtggcacgcacagatgcttctgaaagcattagagccctctttggaacagatggcataagaaatgcagcgcatggccctgattcttttgcttctgcggccagagaaatggagttgttttttccttcaagtggaggttgtgggccggcaaacactgctaaatttactaattgtacctgttgcattgttaaaccccatgctgtcagtgaaggactgttgggaaagatcctgatggctatccgagatgcaggttttgaaatctcagctatgcagatgttcaatatggatcgggttaatgttgaggaattctatgaagtttataaaggagtagtgaccgaatatcatgacatggtgacagaaatgtattctggcccttgtgtagcaatggagattcaacagaataatgctacaaagacatttcgagaattttgtggacctgctgatcctgaaattgcccggcatttacgccctggaactctcagagcaatctttggtaaaactaagatccagaatgctgttcactgtactgatctgccagaggatggcctattagaggttcaatacttcttcaagatcttggataattagtggtgtggaaagtaaagaagtcacaggttgggacatttagacaagagtgaatcacacacgaggaatgtgttcattcttttattgtccgttgttttaacctgactgaatacaagatcaacaagagcactgtactcctggcaattattacatatgttagaacatggattttgcactgtagacaacatttaacaccagtctatggggtactgcattgctttttataaagttcaaaataaagatttattttcaaacaa

SEQ ID NO: 159843 - DNA, 1678 bp, Homo sapiens
  Payload ID: 11267
  Gene Symbol: NME7
  Gene Name: NME/NM23 family member 7
  ENST ID: ENST00000525440
  CDS Start-End: 237-1256
agaataatggcgtctcgtagccccaggcgacagcgtggaggggcgggtctgtcgattggatgaacgcagctgagattactcccagccactaaggacgaagaggtggggcggtggcgtcccacgcctcgtgcgacagtgggcggggctttgttgcctgagtaaccgtatgatggtggtggtggtggtgtcttcctgtctcaacgatacctattttctagtgctgagatcctgagacaatgaatcatagtgaaagattcgttttcattgcagagtggtatgatccaaatgcttcacttcttcgacgttatgagcttttattttacccaggggatggatctgttgaaatgcatgatgtaaagaatcatcgcacctttttaaagcggaccaaatatgataacctgcacttggaagatttatttataggcaacaaagtgaatgtcttttctcgacaactggtattaattgactatggggatcaatatacagctcgccagctgggcagtaggaaagaaaaaacgctagccctaattaaaccagatgcaatatcaaaggctggagaaataattgaaataataaacaaagctggatttactataaccaaactcaaaatgatgatgctttcaaggaaagaagcattggattttcatgtagatcaccagtcaagaccctttttcaatgagctgatccagtttattacaactggtcctattattgccatggagattttaagagatgatgctatatgtgaatggaaaagactgctgggacctgcaaactctggagtggcacgcacagatgcttctgaaagcattagagccctctttggaacagatggcataagaaatgcagcgcatggccctgattcttttgcttctgcggccagagaaatggagttgttttttccttcaagtggaggttgtgggccggcaaacactgctaaatttactaattgtacctgttgcattgttaaaccccatgctgtcagtgaaggactgttgggaaagatcctgatggctatccgagatgcaggttttgaaatctcagctatgcagatgttcaatatggatcgggttaatgttgaggaattctatgaagtttataaaggagtagtgaccgaatatcatgacatggtgacagaaatgtattctggcccttgtgtagcaatggagattcaacagaataatgctacaaagacatttcgagaattttgtggacctgctgatcctacccccaaatctccaatttctcacaagtgaatttaggcaaactaaagaagacatctctgttccgaaattgcccggcatttacgccctggaactctcagagcaatctttggtaaaactaagatccagaatgctgttcactgtactgatctgccagaggatggcctattagaggttcaatacttcttcaagatcttggataattagtggtgtggaaagtaaagaagtcacaggttgggacatttagacaagagtgaatcacacacgaggaatgtgttcattcttttattgtccgttgttttaacctgactgaatacaagatcaacaagagcactgtactcctggcaattattacatatgttagaacatggattttgcactgtagacaacatttaacaccagtctatggggtactgcattgctttttataaagttcaaaataaagatttattttc

SEQ ID NO: 159844 - DNA, 1087 bp, Homo sapiens
  Payload ID: 11267
  Gene Symbol: NME7
  Gene Name: NME/NM23 family member 7
  ENST ID: ENST00000528517
  CDS Start-End: 21-791
agtgctgagatcctgagacaatgaatcatagtgaaagattcgttttcattgcagagtggtatgatccaaatgcttcacttcttcgacgttatgagcttttattttacccaggggatggatctgttgaaatgcatgatgtaaagaatcatcgcacctttttaaagcggaccaaatatgataacctgcacttggaagatttatttataggcaacaaagtgaatgtcttttctcgacaactggtattaattgactatggggatcaatatacagctcgccagctgggcagtaggaaagaaaaaacgctagccctaattaaaccagatgcaatatcaaaggctggagaaataattgaaataataaacaaagctggatttactataaccaaactcaaaatgatgatgctttcaaggaaagaagcattggattttcatgtagatcaccagtcaagaccctttttcaatgagctgatccagtttattacaactggtcctattattgccatggagattttaagagatgatgctatatgtgaatggaaaagactgctgggacctgcaaactctggagtggcacgcacagatgcttctgaaagcattagagccctctttggaacagatggcataagaaatgcagcgcatggccctgattcttttgcttctgcggccagagaaatggagttgttttttccttcaagtggaggttgtgggccggcaaacactgctaaatttactaattgtacctgttgcattgttaaaccccatgctgtcagtgaagtgaggaggaacccctgactactctttcctggaaatcttcattcccataggtcttctctgctgtccctatgatggactgttgggaaagatcctgatggctatccgagatgcaggttttgaaatctcagctatgcagatgttcaatatggatcgggttaatgttgaggaattctatgaagtttataaaggagtagtgaccgaatatcatgacatggtgacagaaatgtattctggcccttgtgtagcaatggagattcaacagaataatgctacaaagacatttcgagaattttgtggacctgctgatcctgtaa

SEQ ID NO: 159845 - DNA, 1590 bp, Homo sapiens
  Payload ID: 11267
  Gene Symbol: NME7
  Gene Name: NME/NM23 family member 7
  Uniprot ID: Q9Y5B8
  ENST ID: ENST00000472647
  CDS Start-End: 314-1336
agaataatggcgtctcgtagccccaggcgacagcgtggaggggcgggtctgtcgattggatgaacgcagctgagattactcccagccactaaggacgaagaggtggggcggtggcgtcccacgcctcgtgcgacagtgggcggggctttgttgcctgagtaaccgtatgatggtggtggtggtggtgtcttcctgtctcaacgatacctattttctagtgctgagatcctgagacaatgagtggtatgatccaaatgcttcacttcttcgacgttatgagcttttattttacccaggggatggatctgttgaaatgcatgatgtaaagaatcatcgcacctttttaaagcggaccaaatatgataacctgcacttggaagatttatttataggcaacaaagtgaatgtcttttctcgacaactggtattaattgactatggggatcaatatacagctcgccagctgggcagtaggaaagaaaaaacgctagccctaattaaaccagatgcaatatcaaaggctggagaaataattgaaataataaacaaagctggatttactataaccaaactcaaaatgatgatgctttcaaggaaagaagcattggattttcatgtagatcaccagtcaagaccctttttcaatgagctgatccagtttattacaactggtcctattattgccatggagattttaagagatgatgctatatgtgaatggaaaagactgctgggacctgcaaactctggagtggcacgcacagatgcttctgaaagcattagagccctctttggaacagatggcataagaaatgcagcgcatggccctgattcttttgcttctgcggccagagaaatggagttgttttttccttcaagtggaggttgtgggccggcaaacactgctaaatttactaattgtacctgttgcattgttaaaccccatgctgtcagtgaaggactgttgggaaagatcctgatggctatccgagatgcaggttttgaaatctcagctatgcagatgttcaatatggatcgggttaatgttgaggaattctatgaagtttataaaggagtagtgaccgaatatcatgacatggtgacagaaatgtattctggcccttgtgtagcaatggagattcaacagaataatgctacaaagacatttcgagaattttgtggacctgctgatcctgaaattgcccggcatttacgccctggaactctcagagcaatctttggtaaaactaagatccagaatgctgttcactgtactgatctgccagaggatggcctattagaggttcaatacttcttcaagatcttggataattagtggtgtggaaagtaaagaagtcacaggttgggacatttagacaagagtgaatcacacacgaggaatgtgttcattcttttattgtccgttgttttaacctgactgaatacaagatcaacaagagcactgtactcctggcaattattacatatgttagaacatggattttgcactgtagacaacatttaacaccagtctatggggtactgcattgctttttataaagttcaaaataaagatttattttcaaacaa

SEQ ID NO: 159846 - DNA, 2312 bp, Homo sapiens
  Payload ID: 11268
  Gene Symbol: NME8
  Gene Name: NME/NM23 family member 8
  Uniprot ID: Q8N427
  ENST ID: ENST00000199447
  CDS Start-End: 373-2139
ggagtttggggatgaggcagctgaagaacagagtcttgtgatggtggaaccaggacttcgttgttccttcattgtgtgggcagaagaggtggaggattttaggcgccacctggtcttgtccccactgcccagacaggcagggaatccctcttcttccttttgctgaatcagctggagaagaaagcccagcaggaggcctgctagcctcagcctcgggccctaccagggtcctaggtactggaatggaacttcgccgaggtcaccgctcaaacggccacaacgagggagccgatttagatcctctgggcctgttccttccttttctttaaacgtcccagtctagcttagaggaggacctgttttgttagataaatggcaagcaaaaaacgagaagtccagttacagacagtcatcaataatcaaagcctgtgggatgagatgttgcagaacaaaggcttaacagtgattgatgtttaccaagcctggtgtggaccttgcagagcaatgcaacctttattcagaaaattgaaaaatgaactgaacgaagacgaaattctgcattttgctgtcgcagaagctgacaacattgtgactttgcagccatttagagataaatgtgaacctgtttttctctttagtgttaatggcaaaattatcgaaaagattcagggtgcaaatgcaccgcttgttaataaaaaagttattaatttgatcgatgaggagagaaaaattgcagcaggtgaaatggctcgacctcagtatcctgaaattccattagtagactcagattcagaagttagtgaagaatcaccatgtgaaagtgttcaggaattatacagtattgctattatcaaaccggatgctgtgattagtaaaaaagttctagaaattaaaagaaaaattaccaaagctggatttattatagaagcagagcataagacagtgctcactgaagaacaagttgtcaacttctatagtcgaatagcagaccagtgtgacttcgaagagtttgtctcttttatgacaagtggcttaagctatattctagttgtatctcaaggaagtaaacacaatcctccctctgaagaaaccgaaccacagactgacaccgaacctaacgaacgatctgaggatcaacctgaggtcgaagcccaggttacacctggaatgatgaagaacaaacaagacagtttacaagaatatctggaaagacaacatttagctcagctctgtgacattgaagaggatgcagctaatgttgctaagttcatggatgctttcttccccgattttaaaaaaatgaaaagcatgaaattagaaaagacattggcattacttcgaccaaatctctttcatgaaaggaaagatgatgttttgcgtattattaaagatgaagacttcaaaatactggagcaaagacaagtagtattatcggaaaaagaagcacaagcactgtgcaaggaatatgaaaatgaagactattttaataaacttatagaaaacatgaccagtggtccatctctagcccttgttttattgagagacaatggcttgcaatactggaaacaattactgggaccaagaactgttgaagaagccattgaatattttccagagagtttatgtgcacagtttgcgatggacagtttgccggtcaaccagttgtatggcagcgattcattagaaaccgctgaaagggaaatacagcatttctttcctcttcaaagcactttaggcttgattaaacctcatgcaacaagtgaacaaagagagcagatcctgaagatagttaaggaggctggatttgatctgacacaggtgaagaaaatgttcctaactcctgagcaaatagagaaaatttatccaaaagtaacaggaaaagacttttataaagatttattggaaatgttatctgtgggtccatctatggtcatgattctgaccaagtggaatgctgttgcagaatggagacgattgatgggcccaacagacccagaagaagcaaaattactttcccctgactccatccgagcccagtttggaataagtaaattgaaaaacattgtccatggagcatctaacgcctatgaagcaaaagaggttgttaatagactctttgaggatcctgaggaaaactaaagtatatactgtgaaaactttgagaagataatacatatgttcacgtcaatatacaaccatttggcacagcttcctgggaggaataataagaaaaacatgctttggaggaaaactcaagatacaaaaatgaatggctatgcataataacaataaaaatgtattccccaaacaaa

SEQ ID NO: 159847 - DNA, 473 bp, Homo sapiens
  Payload ID: 11268
  Gene Symbol: NME8
  Gene Name: NME/NM23 family member 8
  ENST ID: ENST00000455500
  CDS Start-End: 127-473
gaggcagctgaagaacagagtcttgtgatggtggaaccaggacttcgttgttccttcattgtgtgggcagaagaggtggaggattttaggcgccacctggtcttgtccccactgcccagtagataaatggcaagcaaaaaacgagaagtccagttacaggcagaagctgacaacattgtgactttgcagccatttagagataaatgtgaacctgtttttctctttagtgttaatggcaaaattatcgaaaagattcagggtgcaaatgcaccgcttgttaataaaaaagttattaatttgatcgatgaggagagaaaaattgcagcaggtgaaatggctcgacctcagtatcctgaaattccattagtagactcagattcagaagttagtgaagaatcaccatgtgaaagtgttcaggaattatacagtattgctattatcaaaccggatgctgtgattagtaaaaaagttct

SEQ ID NO: 159848 - DNA, 561 bp, Homo sapiens
  Payload ID: 11268
  Gene Symbol: NME8
  Gene Name: NME/NM23 family member 8
  ENST ID: ENST00000444718
  CDS Start-End: 112-561
accgctcaaacggccacaacgagggagccgatttagatcctctgggcctgttccttccttttctttaaacgtcccagtctagcttagaggaggacctgttttgttagataaatggcaagcaaaaaacgagaagtccagttacaggcagaagctgacaacattgtgactttgcagccatttagagataaatgtgaacctgtttttctctttagtgttaatggcaaaattatcgaaaagattcagggtgcaaatgcaccgcttgttaataaaaaagttattaatttgatcgatgaggagagaaaaattgcagcaggtgaaatggctcgacctcagtatcctgaaattccattagtagactcagattcagaagttagtgaagaatcaccatgtgaaagtgttcaggaattatacagtattgctattatcaaaccggatgctgtgattagtaaaaaagttctagaaattaaaagaaaaattaccaaagctggatttattatagaagcagagcataagacagtgctcactgaagaacaagttgtcaacttctatagtcgaatagca

SEQ ID NO: 159849 - DNA, 1879 bp, Homo sapiens
  Payload ID: 11268
  Gene Symbol: NME8
  Gene Name: NME/NM23 family member 8
  Uniprot ID: Q8N427
  ENST ID: ENST00000440017
  CDS Start-End: 113-1879
aaacgtcccagtctagcttagaggaggacctgttttgtgtaaggcttgccggagcaaccagcacctttcctggaatacagtcttgtttgtggcttttcctttgtttagataaatggcaagcaaaaaacgagaagtccagttacagacagtcatcaataatcaaagcctgtgggatgagatgttgcagaacaaaggcttaacagtgattgatgtttaccaagcctggtgtggaccttgcagagcaatgcaacctttattcagaaaattgaaaaatgaactgaacgaagacgaaattctgcattttgctgtcgcagaagctgacaacattgtgactttgcagccatttagagataaatgtgaacctgtttttctctttagtgttaatggcaaaattatcgaaaagattcagggtgcaaatgcaccgcttgttaataaaaaagttattaatttgatcgatgaggagagaaaaattgcagcaggtgaaatggctcgacctcagtatcctgaaattccattagtagactcagattcagaagttagtgaagaatcaccatgtgaaagtgttcaggaattatacagtattgctattatcaaaccggatgctgtgattagtaaaaaagttctagaaattaaaagaaaaattaccaaagctggatttattatagaagcagagcataagacagtgctcactgaagaacaagttgtcaacttctatagtcgaatagcagaccagtgtgacttcgaagagtttgtctcttttatgacaagtggcttaagctatattctagttgtatctcaaggaagtaaacacaatcctccctctgaagaaaccgaaccacagactgacaccgaacctaacgaacgatctgaggatcaacctgaggtcgaagcccaggttacacctggaatgatgaagaacaaacaagacagtttacaagaatatctggaaagacaacatttagctcagctctgtgacattgaagaggatgcagctaatgttgctaagttcatggatgctttcttccccgattttaaaaaaatgaaaagcatgaaattagaaaagacattggcattacttcgaccaaatctctttcatgaaaggaaagatgatgttttgcgtattattaaagatgaagacttcaaaatactggagcaaagacaagtagtattatcggaaaaagaagcacaagcactgtgcaaggaatatgaaaatgaagactattttaataaacttatagaaaacatgaccagtggtccatctctagcccttgttttattgagagacaatggcttgcaatactggaaacaattactgggaccaagaactgttgaagaagccattgaatattttccagagagtttatgtgcacagtttgcgatggacagtttgccggtcaaccagttgtatggcagcgattcattagaaaccgctgaaagggaaatacagcatttctttcctcttcaaagcactttaggcttgattaaacctcatgcaacaagtgaacaaagagagcagatcctgaagatagttaaggaggctggatttgatctgacacaggtgaagaaaatgttcctaactcctgagcaaatagagaaaatttatccaaaagtaacaggaaaagacttttataaagatttattggaaatgttatctgtgggtccatctatggtcatgattctgaccaagtggaatgctgttgcagaatggagacgattgatgggcccaacagacccagaagaagcaaaattactttcccctgactccatccgagcccagtttggaataagtaaattgaaaaacattgtccatggagcatctaacgcctatgaagcaaaagaggttgttaatagactctttgaggatcctgaggaaaactaa

SEQ ID NO: 159850 - DNA, 495 bp, Homo sapiens
  Payload ID: 11268
  Gene Symbol: NME8
  Gene Name: NME/NM23 family member 8
  ENST ID: ENST00000426106
  CDS Start-End: 15-179
atgatagtagataaatggcaagcaaaaaacgagaagtccagttacaggcagaagctgacaacattgtgactttgcagccatttagagataaatgtgaacctgtttttctctttagtgttatgatgttttgcgtattattaaagatgaagacttcaaaatactggagcaaagacaagtagtattatcggaaaaagaagcacaagcactgtgcaaggaatatgaaaatgaagactattttaataaacttatagaaaacatgaccagtggtccatctctagcccttgttttattgagagacaatggcttgcaatactggaaacaattactgggaccaagaactgttgaagaagccattgaatattttccagagagtttatgtgcacagtttgcgatggacagtttgccggtcaaccagttgtatggcagcgattcattagaaaccgctgaaagggaaatacagcatttctttcctcttcaaagcactttaggcttgat

SEQ ID NO: 159851 - DNA, 1930 bp, Homo sapiens
  Payload ID: 11269
  Gene Symbol: NME9
  Gene Name: NME/NM23 family member 9
  Uniprot ID: Q86XW9
  ENST ID: ENST00000317876
  CDS Start-End: 36-827
aggtcaacatcagcacccaagagctttgggaggaaatgctcagttccaaaggactaactgttgttgatgtctatcaaggctggtgtggcccctgcaaacctgtggtgagcctcttccagaagatgaggatcgaggtcggcctggaccttctgcactttgcattagcagaggcagatcgtcttgatgtcctcgaaaagtacagagggaagtgcgagccaacctttctgttttatgcaattaaagatgaggctctttctgatgaagatgaatgtgtttcccatggaaagaataatggtgaagatgaggacatggtttcatcagagaggacctgtaccttggccatcattaaaccagatgcagtggcccatggaaagactgatgagattatcatgaagattcaggaagctgggtttgaaattctaacaaatgaagagagaaccatgacagaggcagaagtgcgacttttctaccaacacaaagctggagaggaggcatttgagaagctggtacatcacatgtgcagtggaccaagccacctcctgatcctcaccaggactgagggcttcgaggacgtggtcactacctggcgaaccgtcatgggcccccgtgaccccaatgtggccaggagggagcagccagaaagtctccgagctcagtacggcacagaaatgcccttcaatgccgtccatggaagccgggacagagaagatgctgacagagaactggcattgctcttccccagtttgaaattttcagacaaagatacagaagcccctcagggtgagtccagtacacagccaaggttgaagatcactgacctagactaaaatgagaggattcagaagtctgaccttagaacatgagagagtggaaaacctcaggatgtttcagccaaacaagaagagaagaaaatattgttgaaattaacaatgatcagggaaaatatcatctattaagaacagggaaccacattttagctgtagattaggaatggtaatttttatctggtgttttagtttccaaaacatttacatattgatctactcctcgccctagaccaaacctaattccattcttactgatatgcacaatcactctctgtcctcattgtcacctctagcccctaaattcctccctttctcagtctacctactctttgtgactccctcatatcttttccccctggcatggatgtcctgctcagacactccacttagaagacagtttccctttttcactgtcctcccaccattcattactcctcctccagataccaactgctgatgttgctctagaaaaaccaccaaacatgactgttctttccgtgtaagctatcccacctcagcggcaccctcactgctggtgaccagccttgtaaccccctggagatgcccatgttccttatggtagctacctcttacttcaaattcttctgcctccctcatgctcgcagccactctgtgcccacctcatcttcgtagggaccttgattttggggacacacattgcaacttcccacttctgacgaaaggtctccatgcttttgctgttttctttactcttgtcaaggttgggtacttcaagctcaaagcctatctaccttgatccaaaaactacctttccataatgttctcacatctttactctgtcctacctctcattttcaatcctgtttaaaagacgtttaagtgtccaaactttaacctcttgaagctagtcctctccccactttccatctttaaatgggcatatatacaataaaggctctgtccatctccatctcttatatataacaatactgtgacttaaaaaccaactcagtattggaaattttctaaagttctgtcctagagttctttcctgacctctagctccatacttctgattgcctaataaatatgacatggatgttcagtggaacttcccatct

SEQ ID NO: 159852 - DNA, 1281 bp, Homo sapiens
  Payload ID: 11269
  Gene Symbol: NME9
  Gene Name: NME/NM23 family member 9
  Uniprot ID: Q86XW9
  ENST ID: ENST00000333911
  CDS Start-End: 29-1021
aacagggcttcgtcttctttgcagagccatgggcagcaggaagaaggaaattgccctgcaggtcaacatcagcacccaagagctttgggaggaaatgctcagttccaaaggactaactgttgttgatgtctatcaaggctggtgtggcccctgcaaacctgtggtgagcctcttccagaagatgaggatcgaggtcggcctggaccttctgcactttgcattagcagaggcagatcgtcttgatgtcctcgaaaagtacagagggaagtgcgagccaacctttctgttttatgcaggaggagaactggtggctgtggttagaggagcaaatgccccactgctgcagaaaaccatcctagaccagctggaggccgaaaagaaagtgctggctgaaggcagagaacggaaagtgattaaagatgaggctctttctgatgaagatgaatgtgtttcccatggaaagaataatggtgaagatgaggacatggtttcatcagagaggacctgtaccttggccatcattaaaccagatgcagtggcccatggaaagactgatgagattatcatgaagattcaggaagctgggtttgaaattctaacaaatgaagagagaaccatgacagaggcagaagtgcgacttttctaccaacacaaagctggagaggaggcatttgagaagctggtacatcacatgtgcagtggaccaagccacctcctgatcctcaccaggactgagggcttcgaggacgtggtcactacctggcgaaccgtcatgggcccccgtgaccccaatgtggccaggagggagcagccagaaagtctccgagctcagtacggcacagaaatgcccttcaatgccgtccatggaagccgggacagagaagatgctgacagagaactggcattgctcttccccagtttgaaattttcagacaaagatacagaagcccctcagggcggtgaggctgaagcaacagcggggcccactgaggcgctttgctttcctgaggatgtggattgagatggctgtgctgctcttccagagcacgtgaccaggggtctactgcacaaaacagacctccggaatcggaacttactcttttgagtaccaatactttttggtttagctgtcttttgtagacaatgaaaataatatggctgggcgcagtgactcacacctgtaatcccagcactttgggaggccgaggcaggtggatcacctgagattaggagtttgacaccagcctagccaacatggtgaaaccctgtctctactaaaaa

SEQ ID NO: 159853 - DNA, 2133 bp, Homo sapiens
  Payload ID: 11269
  Gene Symbol: NME9
  Gene Name: NME/NM23 family member 9
  Uniprot ID: Q86XW9
  ENST ID: ENST00000383180
  CDS Start-End: 239-1030
ggctttcctggcaggcctggcgggggggccaggttgccatgacgaccgcggctaggtcgcggcagactcgagccatgggcagcaggaagaaggaaattgccctgcaggctggaatgcagcggcatgatctcatctcagtgcaacctccacctctcacgttcaagcagttctcatgtctcagcctcccgagtagctggtaaaacaggtcaacatcagcacccaagagctttgggaggaaatgctcagttccaaaggactaactgttgttgatgtctatcaaggctggtgtggcccctgcaaacctgtggtgagcctcttccagaagatgaggatcgaggtcggcctggaccttctgcactttgcattagcagaggcagatcgtcttgatgtcctcgaaaagtacagagggaagtgcgagccaacctttctgttttatgcaattaaagatgaggctctttctgatgaagatgaatgtgtttcccatggaaagaataatggtgaagatgaggacatggtttcatcagagaggacctgtaccttggccatcattaaaccagatgcagtggcccatggaaagactgatgagattatcatgaagattcaggaagctgggtttgaaattctaacaaatgaagagagaaccatgacagaggcagaagtgcgacttttctaccaacacaaagctggagaggaggcatttgagaagctggtacatcacatgtgcagtggaccaagccacctcctgatcctcaccaggactgagggcttcgaggacgtggtcactacctggcgaaccgtcatgggcccccgtgaccccaatgtggccaggagggagcagccagaaagtctccgagctcagtacggcacagaaatgcccttcaatgccgtccatggaagccgggacagagaagatgctgacagagaactggcattgctcttccccagtttgaaattttcagacaaagatacagaagcccctcagggtgagtccagtacacagccaaggttgaagatcactgacctagactaaaatgagaggattcagaagtctgaccttagaacatgagagagtggaaaacctcaggatgtttcagccaaacaagaagagaagaaaatattgttgaaattaacaatgatcagggaaaatatcatctattaagaacagggaaccacattttagctgtagattaggaatggtaatttttatctggtgttttagtttccaaaacatttacatattgatctactcctcgccctagaccaaacctaattccattcttactgatatgcacaatcactctctgtcctcattgtcacctctagcccctaaattcctccctttctcagtctacctactctttgtgactccctcatatcttttccccctggcatggatgtcctgctcagacactccacttagaagacagtttccctttttcactgtcctcccaccattcattactcctcctccagataccaactgctgatgttgctctagaaaaaccaccaaacatgactgttctttccgtgtaagctatcccacctcagcggcaccctcactgctggtgaccagccttgtaaccccctggagatgcccatgttccttatggtagctacctcttacttcaaattcttctgcctccctcatgctcgcagccactctgtgcccacctcatcttcgtagggaccttgattttggggacacacattgcaacttcccacttctgacgaaaggtctccatgcttttgctgttttctttactcttgtcaaggttgggtacttcaagctcaaagcctatctaccttgatccaaaaactacctttccataatgttctcacatctttactctgtcctacctctcattttcaatcctgtttaaaagacgtttaagtgtccaaactttaacctcttgaagctagtcctctccccactttccatctttaaatgggcatatatacaataaaggctctgtccatctccatctcttatatataacaatactgtgacttaaaaaccaactcagtattggaaattttctaaagttctgtcctagagttctttcctgacctctagctccatacttctgattgcctaataaatatgacatggatgttcagtggaacttcccatct

SEQ ID NO: 159854 - DNA, 660 bp, Homo sapiens
  Payload ID: 11269
  Gene Symbol: NME9
  Gene Name: NME/NM23 family member 9
  ENST ID: ENST00000475751
  CDS Start-End: 55-660
gggcgcgtcgaagatcttgtacctgtcgttcgcagtggctcactttcccaagccatgggcagcaggaagaaggaaattgccctgcaggtcaacatcagcacccaagagctttgggaggaaatgctcagttccaaaggactaactgttgttgatgtctatcaaggctggtgtggcccctgcaaacctgtggtgagcctcttccagaagatgaggatcgaggtcggcctggaccttctgcactttgcattagcagaggcagatcgtcttgatgtcctcgaaaagtacagagggaagtgcgagccaacctttctgttttatgcaggaggagaactggtggctgtggttagaggagcaaatgccccactgctgcagaaaaccatcctagaccagctggaggccgaaaagaaagtgctggctgaaggcagagaacggaaagtgattaaagatgaggctctttctgatgaagatgaatgtgtttcccatggaaagaataatggtgaagatgaggacatggtttcatcagagaggacctgtaccttggccatcattaaaccagatgcagtggcccatggaaagactgatgagattatcatgaagattcaggaagctgggtttgaaattctaacaaatgaagagagaaccatgacagaggcagaagtg

SEQ ID NO: 159855 - DNA, 1118 bp, Homo sapiens
  Payload ID: 11269
  Gene Symbol: NME9
  Gene Name: NME/NM23 family member 9
  ENST ID: ENST00000492993
  CDS Start-End: 33-557
tcaacatcagcacccaagagctttgggaggaaatgctcagttccaaaggactaactgttgttgatgtctatcaaggctggtgtggcccctgcaaacctgtggtgagcctcttccagaagatgaggatcgaggtcggcctggaccttctgcactttgcattagcagaggcagatcgtcttgatgtcctcgaaaagtacagagggaagtgcgagccaacctttctgttttatgcaattaaagatgaggctctttctgatgaagatgaatgtgtttcccatggaaagaataatggtgaagatgaggacatggtttcatcagagaggacctgtaccttggccatcattaaaccagatgcagtggcccatggaaagactgatgagattatcatgaagattcaggaagctgggtttgaaattctaacaaatgaagagagaaccatgacagaggcagaagtgcgacttttctaccaacacaaagctggagagtctccgagctcagtacggcacagaaatgcccttcaatgccgtccatggaagccgggacagagaagatgctgacagagaactggcattgctcttccccagtttgaaattttcagacaaagatacagaagcccctcagggtgagtccagtacacagccaaggttgaagatcactgacctagactaaaatgagaggattcagaagtctgaccttagaacatgagagagtggaaaacctcaggatgtttcagccaaacaagaagagaagaaaatattgttgaaattaacaatgatcagggaaaatatcatctattaagaacagggaaccacattttagctgtagattaggaatggtaatttttatctggtgttttagtttccaaaacatttacatattgatctactcctcgccctagaccaaacctaattccattcttactgatatgcacaatcactctctgtcctcattgtcacctctagcccctaaattcctccctttctcagtctacctactctttgtgactccctcatatcttttccccctggcatggatgtcctgctcagacactccacttagaagacagtttccctttttcactgtcctcccaccattcattactcctcctccagatacca

SEQ ID NO: 159856 - DNA, 825 bp, Homo sapiens
  Payload ID: 11269
  Gene Symbol: NME9
  Gene Name: NME/NM23 family member 9
  Uniprot ID: Q86XW9
  ENST ID: ENST00000484930
  CDS Start-End: 40-825
cttgtacctgtcgttcgcagtggctcactttcccaagccatgggcagcaggaagaaggaaattgccctgcaggtcaacatcagcacccaagagctttgggaggaaatgctcagttccaaaggactaactgttgttgatgtctatcaaggctggtgtggcccctgcaaacctgtggtgagcctcttccagaagatgaggatcgaggtcggcctggaccttctgcactttgcattaattaaagatgaggctctttctgatgaagatgaatgtgtttcccatggaaagaataatggtgaagatgaggacatggtttcatcagagaggacctgtaccttggccatcattaaaccagatgcagtggcccatggaaagactgatgagattatcatgaagattcaggaagctgggtttgaaattctaacaaatgaagagagaaccatgacagaggcagaagtgcgacttttctaccaacacaaagctggagaggaggcatttgagaagctggtacatcacatgtgcagtggaccaagccacctcctgatcctcaccaggactgagggcttcgaggacgtggtcactacctggcgaaccgtcatgggcccccgtgaccccaatgtggccaggagggagcagccagaaagtctccgagctcagtacggcacagaaatgcccttcaatgccgtccatggaagccgggacagagaagatgctgacagagaactggcattgctcttccccagtttgaaattttcagacaaagatacagaagcccctcagggtgagtccagtacacagccaaggttgaagatcactgacctagactaa

SEQ ID NO: 159857 - DNA, 579 bp, Homo sapiens
  Payload ID: 11269
  Gene Symbol: NME9
  Gene Name: NME/NM23 family member 9
  ENST ID: ENST00000460099
  CDS Start-End: 489-579
agactcggttggtgactccgggcgcgtcgaagatcttgtacctgtcgttcgcagtggctcactttcccagtaatccataagaacagcagggataacagggtcccatgtcgtttttttgtcagaattcctcgactggcgaccctgtgcccgacaggctgcaccgcgcccggcgcactgactccggcctctgcgcgcgccccctggccggctccggggtggggagggggcttcgcagatccccagaaaaccgcccggcgagccacgagcccgtggactgcaggctccgcttcctcgcggggtgttcactttgtatcagtgtgctgatttgccgccagttagaagcaccttaaaaaggggccgggggccgtaggaggggggcttgtctgaaggaggctctgggcttgctgatccacgcagcggtttgtcgcgaggctgcgggggaacggcccacggccgcggtaacagggcttcgtcttctttgcagagccatgggcagcaggaagaaggaaattgccctgcaggtcaacatcagcacccaagagctttgggaggaaatgctcagttccaaaggactaactg

SEQ ID NO: 159858 - DNA, 800 bp, Homo sapiens
  Payload ID: 11269
  Gene Symbol: NME9
  Gene Name: NME/NM23 family member 9
  ENST ID: ENST00000474690
  CDS Start-End: 1-499
tgttgatgtctatcaaggctggtgtggcccctgcaaacctgtggtgagcctcttccagaagatgaggatcgaggtcggcctggaccttctgcactttgcattagcagaggcagatcgtcttgatgtcctcgaaaagtacagagggaagtgcgagccaacctttctgttttatgcaattaaagatgaggctctttctgatgaagatgaatgtgtttcccatggaaagaataatggtgaagatgaggacatggtttcatcagagaggacctgtaccttggccatcattaaaccagatgcagtggcccatggaaagactgatgagattatcatgaagattcaggaagctgggtttgaaattctaacaaatgaagagagaaccatgacagaggcagaagtgcgacttttctaccaacacaaagctggagagtctccgagctcagtacggcacagaaatgcccttcaatgccgtccatggaagccgggacagagaagatgctgacagagaactggcattgctcttccccagtttgaaattttcagacaaagatacagaagcccctcagggtaagtcatcaaggcagacttggtctttattaaatcatagatacaaggaatttgtaactatgtgcttgagtgtgtgggggattgataatttttggtaactaagtcttcaacctaatacagtcctgttctgaaaatacaggtcattatataacttgattatcaatactaaactgttttgtgttctcatagagcaacagtgttgctttttaatacctcattaaattttttgctgctta

SEQ ID NO: 159859 - DNA, 688 bp, Homo sapiens
  Payload ID: 11269
  Gene Symbol: NME9
  Gene Name: NME/NM23 family member 9
  ENST ID: ENST00000488716
  CDS Start-End: 74-343
agactcggttggtgactccgggcgcgtcgaagatcttgtacctgtcgttcgcagtggctcactttcccaagccatgggcagcaggaagaaggaaattgccctgcaggtcaacatcagcacccaagagctttgggaggaaatgctcagttccaaaggactaactggcactaaaggagaatgcattggaaggaatacagggatctcttggaactcaaaggatggaaggagagccaggcatcactgggacttgaacctgggactgcagtcattaggaaacagcaggccactgtctatgggcctcctcatccctatcctcctggcatcagttatttgttgcacttagcaatttacccagaaacttagtgctttacaacaacaaacattgattatcccagtttctgtgggtcaggagtccaggtatagcttagttggatacctctggctcagagtgtctcaccacggtagttaaggtatcagacgggatctcaaggctcaacgaggagcagatttgcttccaagttcttttgtgtggctgttggcagacctaagaagatccacttccaagctcactcatgaggctgtggttgttgatgtctatcaaggctggtgtggcccctgcaaacctgtggtgagcctcttccagaagatgaggatcgaggtcggcctggaccttctgcactttgcatta

SEQ ID NO: 159860 - DNA, 796 bp, Homo sapiens
  Payload ID: 11270
  Gene Symbol: NME1
  Gene Name: NME/NM23 nucleoside diphosphate kinase 1
  Uniprot ID: P15531
  ENST ID: ENST00000013034
  CDS Start-End: 210-743
aagaggtgttcgggatcctgagaggaaaaagaaaggagtgtagtcgcgggagtgggttaggccctgtggctaggtaccatagagtctctacacaggactaagtcagcctggtgtgcaggggaggcagacacacaaacagaaaattggactacagtgctaagatgctgtaagaagaggttaactaaaggacaggaagatggggccaagagatggtgctactgtctactttagggatcgtctttcaaggcgaggggcctcctatctcaagctgtgatacaggaaccatggccaactgtgagcgtaccttcattgcgatcaaaccagatggggtccagcggggtcttgtgggagagattatcaagcgttttgagcagaaaggattccgccttgttggtctgaaattcatgcaagcttccgaagatcttctcaaggaacactacgttgacctgaaggaccgtccattctttgccggcctggtgaaatacatgcactcagggccggtagttgccatggtctgggaggggctgaatgtggtgaagacgggccgagtcatgctcggggagaccaaccctgcagactccaagcctgggaccatccgtggagacttctgcatacaagttggcaggaacattatacatggcagtgattctgtggagagtgcagagaaggagatcggcttgtggtttcaccctgaggaactggtagattacacgagctgtgctcagaactggatctatgaatgacaggagggcagaccacattgcttttcacatccatttcccctccttcccatggg

SEQ ID NO: 159861 - DNA, 986 bp, Homo sapiens
  Payload ID: 11270
  Gene Symbol: NME1
  Gene Name: NME/NM23 nucleoside diphosphate kinase 1
  Uniprot ID: P15531
  ENST ID: ENST00000336097
  CDS Start-End: 237-770
gtgcaagtgctgcgaaccacgtgggtcccgggcgcgtttcgggtgctggcggctgcagccggagttcaaacctaagcagctggaagggccctgtggctaggtaccatagagtctctacacaggactaagtcagcctggtgtgcaggggaggcagacacacaaacagaaaattggactacagtgctaagatgctgtaagaagaggttaactaaaggacaggaagatggggccaagagatggtgctactgtctactttagggatcgtctttcaaggcgaggggcctcctatctcaagctgtgatacaggaaccatggccaactgtgagcgtaccttcattgcgatcaaaccagatggggtccagcggggtcttgtgggagagattatcaagcgttttgagcagaaaggattccgccttgttggtctgaaattcatgcaagcttccgaagatcttctcaaggaacactacgttgacctgaaggaccgtccattctttgccggcctggtgaaatacatgcactcagggccggtagttgccatggtctgggaggggctgaatgtggtgaagacgggccgagtcatgctcggggagaccaaccctgcagactccaagcctgggaccatccgtggagacttctgcatacaagttggcaggaacattatacatggcagtgattctgtggagagtgcagagaaggagatcggcttgtggtttcaccctgaggaactggtagattacacgagctgtgctcagaactggatctatgaatgacaggagggcagaccacattgcttttcacatccatttcccctccttcccatgggcagaggaccaggctgtaggaaatctagttatttacaggaacttcatcataatttggagggaagctcttggagctgtgagttctccctgtacagtgttaccatccccgaccatctgattaaaatgcttcctcccagcataggattcattgagttggttacttca

SEQ ID NO: 159862 - DNA, 940 bp, Homo sapiens
  Payload ID: 11270
  Gene Symbol: NME1
  Gene Name: NME/NM23 nucleoside diphosphate kinase 1
  Uniprot ID: P15531
  ENST ID: ENST00000393196
  CDS Start-End: 132-590
gggctctccggcagcggatctgcgcagaagcgttccgtgcgtgcaagtgctgcgaaccacgtgggtcccgggcgcgtttcgggtgctggcggctgcagccggagttcaaacctaagcagctggaaggaaccatggccaactgtgagcgtaccttcattgcgatcaaaccagatggggtccagcggggtcttgtgggagagattatcaagcgttttgagcagaaaggattccgccttgttggtctgaaattcatgcaagcttccgaagatcttctcaaggaacactacgttgacctgaaggaccgtccattctttgccggcctggtgaaatacatgcactcagggccggtagttgccatggtctgggaggggctgaatgtggtgaagacgggccgagtcatgctcggggagaccaaccctgcagactccaagcctgggaccatccgtggagacttctgcatacaagttggcaggaacattatacatggcagtgattctgtggagagtgcagagaaggagatcggcttgtggtttcaccctgaggaactggtagattacacgagctgtgctcagaactggatctatgaatgacaggagggcagaccacattgcttttcacatccatttcccctccttcccatgggcagaggaccaggctgtaggaaatctagttatttacaggaacttcatcataatttggagggaagctcttggagctgtgagttctccctgtacagtgttaccatccccgaccatctgattaaaatgcttcctcccagcataggattcattgagttggttacttcatattgttgcattgcttttttttccttcttttcatgtacactgaataacctgacctaatagagagtgtaaatactataaaaatgatttattttgaggtctcacatacacacaggcattctttgcctgcccttctt

SEQ ID NO: 159863 - DNA, 510 bp, Homo sapiens
  Payload ID: 11270
  Gene Symbol: NME1
  Gene Name: NME/NM23 nucleoside diphosphate kinase 1
  ENST ID: ENST00000456492
  CDS Start-End: 331-510
ggacatttttagggtgtatttctggcgctttagtcctgttttctcctggacaatttatgcttgccccgcaccccatcgtgcgattctccgcagtctttgggctttgtctctctctctttttttttttttggaagttgcagaatggtgataaatgattttctttgctcctattgactgctaggccctgtggctaggtaccatagagtctctacacaggactaagtcagcctggtgtgcaggggaggcagacacacaaacagaaaattggactacagtgctaagatgctgtaagaagaggttaactaaaggacaggaagatggggccaagagatggtgctactgtctactttagggatcgtctttcaaggcgaggggcctcctatctcaagctgtgatacaggaaccatggccaactgtgagcgtaccttcattgcgatcaaaccagatggggtccagcggggtcttgtgggagagattatcaagcgttttgagcagaaaggattccgcctt

SEQ ID NO: 159864 - DNA, 1645 bp, Homo sapiens
  Payload ID: 11270
  Gene Symbol: NME1
  Gene Name: NME/NM23 nucleoside diphosphate kinase 1
  ENST ID: ENST00000511355
  CDS Start-End: 87-335
agtgctgcgaaccacgtgggtcccgggcgcgtttcgggtgctggcggctgcagccggagttcaaacctaagcagctggaaggaaccatggccaactgtgagcgtaccttcattgcgatcaaaccagatggggtccagcggggtcttgtgggagagattatcaagcgttttgagcagaaaggattccgccttgttggtctgaaattcatgcaagcttccgaagatcttctcaaggaacactacgttgacctgaaggaccgtccattctttgccggcctggtgaaatacatgcactcagggccggtagttgccatgttgccagattttctgctgtgattggttttcttctttgaccatatcttcttctgtccttggaggtctgggaggggctgaatgtggtgaagacgggccgagtcatgctcggggagaccaaccctgcagactccaagcctgggaccatccgtggagacttctgcatacaagttggcaggtgagattttggtatttttcccccttttccaaaatctgatttagttgccacaaggatttgggtttccgaggctggaggtagacatgataccatatgcaggttgattttatcggagtttattgttttcctccctcttaagttggcgtttggctttggttgttaacatcacttagtcgtacctctgttacacgaagtgtagaacctggtacaacacactttgctggccagtctttcctgaaggctctcactgtttgcaccagcgtggccgggagggctggatgtggggagggcatttttcagccttaagtgaatggccattgtaggctttttcttttaacatggtctaatgtccatggagcttcagcttttatgctgctgtggctgtagatttctggcaatgggcgcattttaatccttctggtcttggtcatgtgactatctctttctccacccaggaacattatacatggcagtgattctgtggagagtgcagagaaggagatcggcttgtggtttcaccctgaggaactggtagattacacgagctgtgctcagaactggatctatgaatgacaggagggcagaccacattgcttttcacatccatttcccctccttcccatgggcagaggaccaggctgtaggaaatctagttatttacaggaacttcatcataatttggagggaagctcttggagctgtgagttctccctgtacagtgttaccatccccgaccatctgattaaaatgcttcctcccagcataggattcattgagttggttacttcatattgttgcattgcttttttttccttcttttcatgtacactgaataacctgacctaatagagagtgtaaatactataaaaatgatttattttgaggtctcacatacacacaggcattctttgcctgcccttcttaacccccgcatcccttccactcttggcactgagctattcaacaggcatctatggagcatgtgctacgtggccaagactggactaggtgcagaggattcatcagaaatgaaagaaaacatgagggctgggtgtgctggcttgtgcttgtgataccagctacttgggaggctgagatgggagaccagcctgggtaacatagcaagaccctgtctcactaaaaaaaaaaaaagaaa

SEQ ID NO: 159865 - DNA, 964 bp, Homo sapiens
  Payload ID: 11270
  Gene Symbol: NME1
  Gene Name: NME/NM23 nucleoside diphosphate kinase 1
  ENST ID: ENST00000480143
  CDS Start-End: 235-654
gcaagtgctgcgaaccacgtgggtcccgggcgcgtttcgggtgctggcggctgcagccggagttcaaacctaagcagctggaagggccctgtggctaggtaccatagagtctctacacaggactaagtcagcctggtgtgcaggggaggcagacacacaaacagaaaattggactacagtgctaagatgctgtaagaagaggttaactaaaggacaggaagatggggccaagagatggtgctactgtctactttagggatcgtctttcaaggcgaggggcctcctatctcaagctgtgatacaggaaccatggccaactgtgagcgtaccttcattgcgatcaaaccagatggggtccagcggggtcttgtgggagagattatcaagcgttttgagcagaaaggattccgccttgttggtctgaaattcatgcaagcttccgaagatcttctcaaggaacactacgttgacctgaaggaccgtccattctttgccggcctggtgaaatacatgcactcagggccggtagttgccatggtctgggaggggctgaatgtggtgaagacgggccgagtcatgctcggggagaccaaccctgcagactccaagcctgggaccatccgtggagacttctgcatacaagttggcaggtgagattttggtatttttcccccttttccaaaatctgatttagttgccacaaggatttgggtttccgaggctggaggtagacatgataccatatgcaggttgattttatcggagtttattgttttcctccctcttaagttggcgtttggctttggttgttaacatcacttagtcgtacctctgttacacgaagtgtagaacctggtacaacacactttgctggccagtctttcctgaaggctctcactgtttgcaccagcgtggccgggagggctggatgtggggagggcatttttcagccttaagtgaatgg

SEQ ID NO: 159866 - DNA, 781 bp, Homo sapiens
  Payload ID: 11270
  Gene Symbol: NME1
  Gene Name: NME/NM23 nucleoside diphosphate kinase 1
  ENST ID: ENST00000475573
  CDS Start-End: 71-319
tgggtcccgggcgcgtttcgggtgctggcggctgcagccggagttcaaacctaagcagctggaaggaaccatggccaactgtgagcgtaccttcattgcgatcaaaccagatggggtccagcggggtcttgtgggagagattatcaagcgttttgagcagaaaggattccgccttgttggtctgaaattcatgcaagcttccgaagatcttctcaaggaacactacgttgacctgaaggaccgtccattctttgccggcctggtgaaatacatgcactcagggccggtagttgccatgttgccagattttctgctgtgattggttttcttctttgaccatatcttcttctgtccttggaggtctgggaggggctgaatgtggtgaagacgggccgagtcatgctcggggagaccaaccctgcagactccaagcctgggaccatccgtggagacttctgcatacaagttggcaggaacattatacatggcagtgattctgtggagagtgcagagaaggagatcggcttgtggtttcaccctgaggaactggtagattacacgagctgtgctcagaactggatctatgaatgacaggagggcagaccacattgcttttcacatccatttcccctccttcccatgggcagaggaccaggctgtaggaaatctagttatttacaggaacttcatcataatttggagggaagctcttggagctgtgagttctccctgtacagtgttaccatccccgaccatctgattaaaatgcttcctcccagca

SEQ ID NO: 159867 - DNA, 568 bp, Homo sapiens
  Payload ID: 11271
  Gene Symbol: NME2
  Gene Name: NME/NM23 nucleoside diphosphate kinase 2
  ENST ID: ENST00000393183
  CDS Start-End: 83-331
cggctcccgggtgtggtggtcgcaccagctctctgctctcccagcgcagcgccgccgcccggcccctccagcttcccggaccatggccaacctggagcgcaccttcatcgccatcaagccggacggcgtgcagcgcggcctggtgggcgagatcatcaagcgcttcgagcagaagggattccgcctcgtggccatgaagttcctccgggcctctgaagaacacctgaagcagcactacattgacctgaaagaccgaccattcttccctgggctggtgaagtacatgaactcagggccggttgtggccatggaacatcattcatggcagtgattcagtaaaaagtgctgaaaaagaaatcagcctatggtttaagcctgaagaactggttgactacaagtcttgtgctcatgactgggtctatgaataagaggtggacacaacagcagtctccttcagcacggcgtggtgtgtccctggacacagctcttcattccattgacttagaggcaacaggattgatcattcttttatagagcatatttgccaataaagcttttggaagccgga

SEQ ID NO: 159868 - DNA, 866 bp, Homo sapiens
  Payload ID: 11271
  Gene Symbol: NME2
  Gene Name: NME/NM23 nucleoside diphosphate kinase 2
  ENST ID: ENST00000393190
  CDS Start-End: 268-726
gtgggcccggtctgtgggcgccccccgatttcccgcaggtcccgcgcggcgtcggagcgggagattcccttgcagcttgcgccccgcgggccttcgggctccgcagagggacgccggccctgcgcggggcggaagcggccgggaagccacgtgtccccgcggccgcgcgtggtgggggaggagggaccggcggcgcccacgtggcctccgcgggccccgccagagcctgcgcccgggccctgaccgcacctctcgccccgcaggaccatggccaacctggagcgcaccttcatcgccatcaagccggacggcgtgcagcgcggcctggtgggcgagatcatcaagcgcttcgagcagaagggattccgcctcgtggccatgaagttcctccgggcctctgaagaacacctgaagcagcactacattgacctgaaagaccgaccattcttccctgggctggtgaagtacatgaactcagggccggttgtggccatggtctgggaggggctgaacgtggtgaagacaggccgagtgatgcttggggagaccaatccagcagattcaaagccaggcaccattcgtggggacttctgcattcaggttggcaggaacatcattcatggcagtgattcagtaaaaagtgctgaaaaagaaatcagcctatggtttaagcctgaagaactggttgactacaagtcttgtgctcatgactgggtctatgaataagaggtggacacaacagcagtctccttcagcacggcgtggtgtgtccctggacacagctcttcattccattgacttagaggcaacaggattgatcattcttttatagagcatatttgccaataaagcttttggaagccgga

SEQ ID NO: 159869 - DNA, 826 bp, Homo sapiens
  Payload ID: 11271
  Gene Symbol: NME2
  Gene Name: NME/NM23 nucleoside diphosphate kinase 2
  ENST ID: ENST00000512737
  CDS Start-End: 225-683
gcgagggcgcgccccggctgggcgtggacactgttctccggccgcgtcgggccgggcgggtggggcgttcctgcgggttgggcggctgggccctccggggtgtggccaccccgcgctccgccctgcgcccctcctccgccgccggctcccgggtgtggtggtcgcaccagctctctgctctcccagcgcagcgccgccgcccggcccctccagcttcccggaccatggccaacctggagcgcaccttcatcgccatcaagccggacggcgtgcagcgcggcctggtgggcgagatcatcaagcgcttcgagcagaagggattccgcctcgtggccatgaagttcctccgggcctctgaagaacacctgaagcagcactacattgacctgaaagaccgaccattcttccctgggctggtgaagtacatgaactcagggccggttgtggccatggtctgggaggggctgaacgtggtgaagacaggccgagtgatgcttggggagaccaatccagcagattcaaagccaggcaccattcgtggggacttctgcattcaggttggcaggaacatcattcatggcagtgattcagtaaaaagtgctgaaaaagaaatcagcctatggtttaagcctgaagaactggttgactacaagtcttgtgctcatgactgggtctatgaataagaggtggacacaacagcagtctccttcagcacggcgtggtgtgtccctggacacagctcttcattccattgacttagaggcaacaggattgatcattcttttatagagcatatttgccaataaagcttttggaagccggacac

SEQ ID NO: 159870 - DNA, 692 bp, Homo sapiens
  Payload ID: 11271
  Gene Symbol: NME2
  Gene Name: NME/NM23 nucleoside diphosphate kinase 2
  ENST ID: ENST00000513177
  CDS Start-End: 95-553
ctgtaggcgggggagtcatcaaggcagggcagaggcaggaccagatggccgtttgaggtgctgagcaaagctcccggtttgcgcggagaggaccatggccaacctggagcgcaccttcatcgccatcaagccggacggcgtgcagcgcggcctggtgggcgagatcatcaagcgcttcgagcagaagggattccgcctcgtggccatgaagttcctccgggcctctgaagaacacctgaagcagcactacattgacctgaaagaccgaccattcttccctgggctggtgaagtacatgaactcagggccggttgtggccatggtctgggaggggctgaacgtggtgaagacaggccgagtgatgcttggggagaccaatccagcagattcaaagccaggcaccattcgtggggacttctgcattcaggttggcaggaacatcattcatggcagtgattcagtaaaaagtgctgaaaaagaaatcagcctatggtttaagcctgaagaactggttgactacaagtcttgtgctcatgactgggtctatgaataagaggtggacacaacagcagtctccttcagcacggcgtggtgtgtccctggacacagctcttcattccattgacttagaggcaacaggattgatcattcttttatagagcatatttgccaataaagcttttggaagccgg

SEQ ID NO: 159871 - DNA, 749 bp, Homo sapiens
  Payload ID: 11271
  Gene Symbol: NME2
  Gene Name: NME/NM23 nucleoside diphosphate kinase 2
  ENST ID: ENST00000503064
  CDS Start-End: 151-609
gccggctcccgggtgtggtggtcgcaccagctctctgctctcccagcgcagcgccgccgcccggcccctccagcttcccggtaaggcggtgggggcgcatcccctggcgactcctcccgttccctcttccgcttgcgctgccgcaggaccatggccaacctggagcgcaccttcatcgccatcaagccggacggcgtgcagcgcggcctggtgggcgagatcatcaagcgcttcgagcagaagggattccgcctcgtggccatgaagttcctccgggcctctgaagaacacctgaagcagcactacattgacctgaaagaccgaccattcttccctgggctggtgaagtacatgaactcagggccggttgtggccatggtctgggaggggctgaacgtggtgaagacaggccgagtgatgcttggggagaccaatccagcagattcaaagccaggcaccattcgtggggacttctgcattcaggttggcaggaacatcattcatggcagtgattcagtaaaaagtgctgaaaaagaaatcagcctatggtttaagcctgaagaactggttgactacaagtcttgtgctcatgactgggtctatgaataagaggtggacacaacagcagtctccttcagcacggcgtggtgtgtccctggacacagctcttcattccattgacttagaggcaacaggattgatcattcttttatagagcatatttgccaataaagcttttggaagccgga

SEQ ID NO: 159872 - DNA, 850 bp, Homo sapiens
  Payload ID: 11271
  Gene Symbol: NME2
  Gene Name: NME/NM23 nucleoside diphosphate kinase 2
  ENST ID: ENST00000514264
  CDS Start-End: 252-710
atctcagggcagtaccactgctgtgcggctgtcagtcagtgctgcaggcgccgagaggaggggcttgtgaccgccccagggaagctgggcatcaccaaagggagcttgtttgccagggacactgcaagtaggaagtgtctacaggtcgatgacaggcctaatctctatgacagggtctagactttcctcagggtccaggggcgcacctcagggtgaactggaaaactcgaccgcactttagtgccaggaccatggccaacctggagcgcaccttcatcgccatcaagccggacggcgtgcagcgcggcctggtgggcgagatcatcaagcgcttcgagcagaagggattccgcctcgtggccatgaagttcctccgggcctctgaagaacacctgaagcagcactacattgacctgaaagaccgaccattcttccctgggctggtgaagtacatgaactcagggccggttgtggccatggtctgggaggggctgaacgtggtgaagacaggccgagtgatgcttggggagaccaatccagcagattcaaagccaggcaccattcgtggggacttctgcattcaggttggcaggaacatcattcatggcagtgattcagtaaaaagtgctgaaaaagaaatcagcctatggtttaagcctgaagaactggttgactacaagtcttgtgctcatgactgggtctatgaataagaggtggacacaacagcagtctccttcagcacggcgtggtgtgtccctggacacagctcttcattccattgacttagaggcaacaggattgatcattcttttatagagcatatttgccaataaagcttttggaagccgga

SEQ ID NO: 159873 - DNA, 1069 bp, Homo sapiens
  Payload ID: 11272
  Gene Symbol: NME3
  Gene Name: NME/NM23 nucleoside diphosphate kinase 3
  Uniprot ID: Q13232
  ENST ID: ENST00000219302
  CDS Start-End: 197-706
agttagtgtccgagctgctggaggagacttggcctccgcagctgccctccggccccccacggctgccgggttccggggtgcaagtgaagcagcctccccgcggaggccgcagcgccccgaccaggcctctttaagcgcaggccccgccccgggcgccaccgccccgccccgcggatcccgctcccgcaccgccatcatgatctgcctggtgctgaccatcttcgctaacctcttccccgcggcctgcaccggcgcacacgaacgcaccttcctggccgtgaagccggacggcgtgcagcggcggctggtgggcgagattgtgcggcgcttcgagaggaagggcttcaagttggtggcgctgaagctggtgcaggcctccgaggagctgctgcgtgagcactacgccgagctgcgtgaacgcccgttctacggccgccttgtcaagtatatggcctccgggccggtggtggccatggtatggcaggggctggacgtggtgcgcacctcgcgggcgctcatcggagccacgaacccggccgacgccccgcccggcaccatccgcggggatttctgcatcgaggttggcaagaacctgattcacggcagcgactcggtggagagtgcccgccgcgagatcgctctctggttccgcgcagacgagctcctctgctgggaggacagcgctgggcactggctgtatgagtagcccggcagatgcgcgtcacagaggctctcacactccagcctcctccagggcccaggtgggcgggcttctggccccaccccacagcgcttggagcatccctttggacgggctgctgaacatccacctgtctggacgttgcatggagggtggcgcaggcctctccaatccctggcgtacagggtttcctgcccgaggagctgctccaggagcctgcgcggctcgcctggaaacgtgccaggacactgtcctggtgcccagcccaacgtggtccaacgtttttttataataaagtcctcgttttcgtttcgatttgggcccaggaacaggcagctacgacgttaagacatttattacatacagagc

SEQ ID NO: 159874 - DNA, 583 bp, Homo sapiens
  Payload ID: 11272
  Gene Symbol: NME3
  Gene Name: NME/NM23 nucleoside diphosphate kinase 3
  ENST ID: ENST00000563854
  CDS Start-End: 1-174
atcttcgctaacctcttccccgcggcctgcaccggcgcacacgaacgcaccttcctggccgtgaagccggacggcgtgcagcggcggctggtgggcgagattgtgcggcgcttcgagaggaagggcttcaagcggcctgacccttccgcaggcctccgaggagctgctgcgtgagcactacgccgagctgcgtgaacgcccgttctacggccgccttgtcaagtatatggcctccgggccggtggtggccatggtatggcaggggctggacgtggtgcgcacctcgcgggcgctcatcggagccacgaacccggccgacgccccgcccggcaccatccgcggggatttctgcatcgaggaacctgattcacggcagcgactcggtggagagtgcccgccgcgagatcgctctctggttccgcgcagacgagctcctctgctgggaggacagcgctgggcactggctgtatgagtagcccggcagatgcgcgtcacagaggctctcacactccagcctcctccagggcccaggtgggcgggcttctggccccaccccacagcgcttggagcatccctttggacg

SEQ ID NO: 159875 - DNA, 813 bp, Homo sapiens
  Payload ID: 11272
  Gene Symbol: NME3
  Gene Name: NME/NM23 nucleoside diphosphate kinase 3
  ENST ID: ENST00000568561
  CDS Start-End: 1-162
ttcgctaacctcttccccgcggcctgcaccggcgcacacgaacgcaccttcctggccgtgaagccggacggcgtgcagcggcggctggtgggcgagattgtgcggcgcttcgagaggaagggcttcaagttggtggcgctgaagctggtgcaggcggcctgacccttccgcaggcctccgaggagctgctgcgtgagcactacgccgagctgcgtgaacgcccgttctacggccgccttgtcaagtatatggcctccgggccggtggtggccatggtatggcaggggctggacgtggtgcgcacctcgcgggcgctcatcggagccacgaacccggccgacgccccgcccggcaccatccgcggggatttctgcatcgaggttggcaagaacctgattcacggcagcgactcggtggagagtgcccgccgcgagatcgctctctggttccgcgcagacgagctcctctgctgggaggacagcgctgggcactggctgtatgagtagcccggcagatgcgcgtcacagaggctctcacactccagcctcctccagggcccaggtgggcgggcttctggccccaccccacagcgcttggagcatccctttggacgggctgctgaacatccacctgtctggacgttgcatggagggtggcgcaggcctctccaatccctggcgtacagggtttcctgcccgaggagctgctccaggagcctgcgcggctcgcctggaaacgtgccaggacactgtcctggtgcccagcccaacgtggtccaacgtttttttataataaagtcctcgttttcgtttc

SEQ ID NO: 159876 - DNA, 920 bp, Homo sapiens
  Payload ID: 11272
  Gene Symbol: NME3
  Gene Name: NME/NM23 nucleoside diphosphate kinase 3
  ENST ID: ENST00000563498
  CDS Start-End: 358-615
cgcggatcccgctcccgcaccgccatcatgatctgcctggtgctgaccatcttcgctaacctcttccccgcgggtgagccgcgcggcgcgggccgggggcgggtggccggtgctgggccggcctgacggcccgtccccgcctgccccgcagcctgcaccggcgcacacgaacgcaccttcctggccgtgaagccggacggcgtgcagcggcggctggtgggcgagattgtgcggcgcttcgagaggaagggcttcaagttggtggcgctgaagctggtgcaggcctccgaggagctgctgcgtgagcactacgccgagctgcgtgaacgcccgttctacggccgccttgtcaagtatatggcctccgggccggtggtggccatggtatggcaggggctggacgtggtgcgcacctcgcgggcgctcatcggagccacgaacccggccgacgccccgcccggcaccatccgcggggatttctgcatcgaggttggcaagaacctgattcacggcagcgactcggtggagagtgcccgccgcgagatcgctctctggttccgcgcagacgagctcctctgctgggaggacagcgctgggcactggctgtatgagtagcccggcagatgcgcgtcacagaggctctcacactccagcctcctccagggcccaggtgggcgggcttctggccccaccccacagcgcttggagcatccctttggacgggctgctgaacatccacctgtctggacgttgcatggagggtggcgcaggcctctccaatccctggcgtacagggtttcctgcccgaggagctgctccaggagcctgcgcggctcgcctggaaacgtgccaggacactgtcctggtgcccagcccaacgtggtccaacgtttttttataataaagtcctcgttttcgtt

SEQ ID NO: 159877 - DNA, 811 bp, Homo sapiens
  Payload ID: 11272
  Gene Symbol: NME3
  Gene Name: NME/NM23 nucleoside diphosphate kinase 3
  ENST ID: ENST00000564628
  CDS Start-End: 1-372
cccgcggcctgcaccggcgcacacgaacgcaccttcctggccgtgaagccggacggcgtgcagcggcggctggtgggcgagattgtgcggcgcttcgagaggaagggcttcaagttggtggcgctgaagctggtgcaggtgggggcgcggcctccgaggagctgctgcgtgagcactacgccgagctgcgtgaacgcccgttctacggccgccttgtcaagtatatggcctccgggccggtggtggccatggtatggcaggggctggacgtggtgcgcacctcgcgggcgctcatcggagccacgaacccggccgacgccccgcccggcaccatccgcggggatttctgcatcgaggttggcaagaacctgattcacggcagcgactcggtggagagtgcccgccgcgagatcgctctctggttccgcgcagacgagctcctctgctgggaggacagcgctgggcactggctgtatgagtagcccggcagatgcgcgtcacagaggctctcacactccagcctcctccagggcccaggtgggcgggcttctggccccaccccacagcgcttggagcatccctttggacgggctgctgaacatccacctgtctggacgttgcatggagggtggcgcaggcctctccaatccctggcgtacagggtttcctgcccgaggagctgctccaggagcctgcgcggctcgcctggaaacgtgccaggacactgtcctggtgcccagcccaacgtggtccaacgtttttttataataaagtcctcgttttcgtttcgatttgggcccaggaacaggca

SEQ ID NO: 159878 - DNA, 995 bp, Homo sapiens
  Payload ID: 11273
  Gene Symbol: NME4
  Gene Name: NME/NM23 nucleoside diphosphate kinase 4
  Uniprot ID: O00746
  ENST ID: ENST00000219479
  CDS Start-End: 15-578
gcgggccgggcgtcatgggcggcctcttctggcgctccgcgctgcgggggctgcgctgcggcccgcgggccccgggcccgagcctgctagtgcgccacggctcgggagggccctcctggacccgggagcggaccctggtggcggtgaagcccgatggcgtgcaacggcggctcgttggggacgtgatccagcgctttgagaggcggggcttcacgctggtggggatgaagatgctgcaggcaccagagagcgtccttgccgagcactaccaggacctgcggaggaagcccttctaccctgccctcatccgctacatgagctctgggcctgtggtggccatggtctgggaagggtacaatgtcgtccgcgcctcgagggccatgattggacacaccgactcggctgaggctgccccaggaaccataaggggtgacttcagcgtccacatcagcaggaatgtcatccacgccagcgactccgtggagggggcccagcgggagatccagctgtggttccagagcagtgagctggtgagctgggcagacgggggccagcacagcagcatccacccagcctgaggctcaagctgcccttaccaccccatcccccacgcaggaccaactacctccgtcagcaagaacccaagcccacatccaaacctgcctgtcccaaaccacttacttccctgttcacctctgccccaccccagcccagaggagtttgagccaccaacttcagtgcctttctgtaccccaagccagcacaagattggaccaatcctttttgcaccaaagtgccggacaacctttgtggtgggggggggtcttcacattatcataacctctcctctaaaggggaggcattaaaattcactgtgcccagcacatgggtggtacactaattatgacttcccccagctctgaggtagaaatgacgcctttatgcaagttgtaaggagttgaacagtaaagaggaagttttgcacacccagttcc

SEQ ID NO: 159879 - DNA, 766 bp, Homo sapiens
  Payload ID: 11273
  Gene Symbol: NME4
  Gene Name: NME/NM23 nucleoside diphosphate kinase 4
  ENST ID: ENST00000382940
  CDS Start-End: 15-602
gcgggccgggcgtcatgggcggcctcttctggcgctccgcgctgcgggggctgcgctgcggcccgcgggccccgggcccgagcctgctagtgcgccacggctcggggctccctccatcggctctgaaaagagggccctcctggacccgggagcggaccctggtggcggtgaagcccgatggcgtgcaacggcggctcgttggggacgtgatccagcgctttgagaggcggggcttcacgctggtggggatgaagatgctgcaggcaccagagagcgtccttgccgagcactaccaggacctgcggaggaagcccttctaccctgccctcatccgctacatgagctctgggcctgtggtggccatggtctgggaagggtacaatgtcgtccgcgcctcgagggccatgattggacacaccgactcggctgaggctgccccaggaaccataaggggtgacttcagcgtccacatcagcaggaatgtcatccacgccagcgactccgtggagggggcccagcgggagatccagctgtggttccagagcagtgagctggtgagctgggcagacgggggccagcacagcagcatccacccagcctgaggctcaagctgcccttaccaccccatcccccacgcaggaccaactacctccgtcagcaagaacccaagcccacatccaaacctgcctgtcccaaaccacttacttccctgttcacctctgccccaccccagcccagaggagtttgagccaccaacttcagtgcc

SEQ ID NO: 159880 - DNA, 1232 bp, Homo sapiens
  Payload ID: 11273
  Gene Symbol: NME4
  Gene Name: NME/NM23 nucleoside diphosphate kinase 4
  Uniprot ID: O00746
  ENST ID: ENST00000397722
  CDS Start-End: 475-828
cctccttctcccgccctggggctcacgtgggaatttcaccctccattggagggggctcagaccagggcttctagacctccttttggtccgtgaatttatttttgagacagagtcttgctctattgctcaggctggagtgcagcggtgcagtcacagctcactgcagcctcaatctcctgggctcacgcgatcctcctgcctcagcctcccgagtgggccttcctccgtgggaaagcgttaaaacgatagttaacggttgcgtcggtgtaaagacgaatgcaattcgagaaggattcattattattttgttttttcttctgatttttaacagaaattggcgttgaacatttcccccgagggccctcctggacccgggagcggaccctggtggcggtgaagcccgatggcgtgcaacggcggctcgttggggacgtgatccagcgctttgagaggcggggcttcacgctggtggggatgaagatgctgcaggcaccagagagcgtccttgccgagcactaccaggacctgcggaggaagcccttctaccctgccctcatccgctacatgagctctgggcctgtggtggccatggtctgggaagggtacaatgtcgtccgcgcctcgagggccatgattggacacaccgactcggctgaggctgccccaggaaccataaggggtgacttcagcgtccacatcagcaggaatgtcatccacgccagcgactccgtggagggggcccagcgggagatccagctgtggttccagagcagtgagctggtgagctgggcagacgggggccagcacagcagcatccacccagcctgaggctcaagctgcccttaccaccccatcccccacgcaggaccaactacctccgtcagcaagaacccaagcccacatccaaacctgcctgtcccaaaccacttacttccctgttcacctctgccccaccccagcccagaggagtttgagccaccaacttcagtgcctttctgtaccccaagccagcacaagattggaccaatcctttttgcaccaaagtgccggacaacctttgtggtgggggggggtcttcacattatcataacctctcctctaaaggggaggcattaaaattcactgtgcccagcacatgggtggtacactaattatgacttcccccagctctgaggtagaaatgacgcctttatgcaagttgtaaggagttgaacagtaaagaggaagttttg

SEQ ID NO: 159881 - DNA, 985 bp, Homo sapiens
  Payload ID: 11273
  Gene Symbol: NME4
  Gene Name: NME/NM23 nucleoside diphosphate kinase 4
  Uniprot ID: O00746
  ENST ID: ENST00000450036
  CDS Start-End: 558-911
ggggagccgctccgctggggcgttcgctgaaggccaagttaggccagaatctgactgggacgtcaggccccaagtccccggccccgccgctgcccggcccccccagctgccacctcacaggacgatccatgtcccagggctccctccatcggctctgaaaagtgagccgccgcctgcaatgcccgcaccagccgcagcagagccccaggctacacaaggcgccctgcaaactgggttttgggggaacaaaccaaccagggggtcttcctcccgtgggcttcagccgcctgctggggttaacttttcctcctggcctggcggagcccctttggctctgtccagattctgtgggacatacagggtctgggctcctctggaaaccagggacccgatgccggagggtagcttggctctggagcagcctgggactataggaaggagggccctcctggacccgggagcggaccctggtggcggtgaagcccgatggcgtgcaacggcggctcgttggggacgtgatccagcgctttgagaggcggggcttcacgctggtggggatgaagatgctgcaggcaccagagagcgtccttgccgagcactaccaggacctgcggaggaagcccttctaccctgccctcatccgctacatgagctctgggcctgtggtggccatggtctgggaagggtacaatgtcgtccgcgcctcgagggccatgattggacacaccgactcggctgaggctgccccaggaaccataaggggtgacttcagcgtccacatcagcaggaatgtcatccacgccagcgactccgtggagggggcccagcgggagatccagctgtggttccagagcagtgagctggtgagctgggcagacgggggccagcacagcagcatccacccagcctgaggctcaagctgcccttaccaccccatcccccacgcaggaccaactacctccgtcagcaagaacccaagcccaca

SEQ ID NO: 159882 - DNA, 1111 bp, Homo sapiens
  Payload ID: 11273
  Gene Symbol: NME4
  Gene Name: NME/NM23 nucleoside diphosphate kinase 4
  ENST ID: ENST00000444498
  CDS Start-End: 24-725
cagcggcccgcgggccgggcgtcatgggcggcctcttctggcgctccgcgctgcgggggctgcgctgcggcccgcgggccccgggcccgagcctgctagtgcgccacggctcgggagggccctcctggacccgggagcggaccctggtggcggtgaagcccgatggcgtgcaacggcggctcgttggggacgtgatccagcgctttgagaggcggggcttcacgctggtggggatgaagatgctgcaggcaccagagagcgtccttgccgagcactaccaggacctgcggaggaagcccttctaccctgccctcatccgctacatgagctctgggcctgtggtggccatggtctgggaagggtacaatgtcgtccgcgcctcgagggccatgattggacacaccgactcggctgaggctgccccaggaaccataaggggtgacttcagcgtccacatcagcaggaatgtcatccacgccagcgactccgtggagggggcccagcgggagatccagctgtggttccagagcagtgagctgtccccgacgggagcgccatggcccagccgccgcccgacgtggagggggacgactgtctccccgcgtaccgccacctcttctgcccggacctgctgcgggacaaagtggccttcatcacaggaggcggctctgggattgggttccggattgctgagattttcatgcggcacggctgccatacggtgattgccagtaggagcctgccgcgagtgctgacgagatgggttttcaccacgttgaccaggctggtctcgaattcctgacctcaggtgatccgcccacctcagcctcccaaagtgccaggattacaggccgccaggaagctggctggggccaccggccggcgctgcctccctctctctatggacgtccgagcgcccccagctgtcatggccgccgtggaccaggctctgaaggagtttggcagaatcgacattctcattaactgtgcggccgggaacttcctgtgccccgctggcgccttgtccttcaacgccttcaagaccgtgatggacatcgataccagcggcaccttcaatgtgtctcgtgtgctctatgagaagttcttccgg

SEQ ID NO: 159883 - DNA, 966 bp, Homo sapiens
  Payload ID: 11273
  Gene Symbol: NME4
  Gene Name: NME/NM23 nucleoside diphosphate kinase 4
  ENST ID: ENST00000433358
  CDS Start-End: 1-508
ctggcgctccgcgctgcgggggctgcgctgcggcccgcgggccccgggcccgagcctgctagtgcgccacggctcgggagggccctcctggacccgggagcggaccctggtggcggtgaagcccgatggcgtgcaacggcggctcgttggggacgtgatccagcgctttgagaggcggggcttcacgctggtggggatgaagatgctgcaggcaccagagagcgtccttgccgagcactaccaggacctgcggaggaagcccttctaccctgccctcatccgctacatgagctctgggcctgtggtggccatggtctgggaagggtacaatgtcgtccgcgcctcgagggccatgattggacacaccgactcggctgaggctgccccaggaaccataaggggtgacttcagcgtccacatcagcagtcacaggcttgctcccctagacagagggcaacgggagcagcagatggtccctgggattcctcagggtgcacatgaagcctgagcctcacattgctcctgtcctggcacaggaatgtcatccacgccagcgactccgtggagggggcccagcgggagatccagctgtggttccagagcagtgagctggtgagctgggcagacgggggccagcacagcagcatccacccagcctgaggctcaagctgcccttaccaccccatcccccacgcaggaccaactacctccgtcagcaagaacccaagcccacatccaaacctgcctgtcccaaaccacttacttccctgttcacctctgccccaccccagcccagaggagtttgagccaccaacttcagtgcctttctgtaccccaagccagcacaagattggaccaatcctttttgcaccaaagtgccggacaacctttgtggtgggggggggtcttcacattatcataacctctcctctaaaggggaggcattaaaattcactgtgcccagca

SEQ ID NO: 159884 - DNA, 719 bp, Homo sapiens
  Payload ID: 11273
  Gene Symbol: NME4
  Gene Name: NME/NM23 nucleoside diphosphate kinase 4
  ENST ID: ENST00000454619
  CDS Start-End: 609-719
attggagggggctcagaccagggcttctagacctccttttggtccgtgaatttatttttgagacagagtcttgctctattgctcaggctggagtgcagcggtgcagtcacagctcactgcagcctcaatctcctgggctcacgcgatcctcctgcctcagcctcccgagtgggccttcctccgtgggaaagcgttaaaacgatagttaacggttgcgtcggtgtaaagacgaatgcaattcgagaaggattcattattattttgttttttcttctgatttttaacagaaattggcgttgaacatttccccccgtcccctccagaggaggacggctggggcggagctcagcgctgaccctgggtctggaagcgacaggccttgaaactccacagcagcacaggccccgtctcctggctcggacagaaccctgctaccttccctcttcaatcttcaggcccctttttgtccgtgtttccagggctcacctggagggccctcctggacccgggagcggaccctggtggcggtgaagcccgatggcgtgcaacggcggctcgttggggacgtgatccagcgctttgagaggcggggcttcacgctggtggggatgaagatgctgcaggcaccagagagcgtccttgccgagcactaccaggacctgcggaggaagcccttctaccctgccctcatccgctacatgagctctgggcctgtggtg

SEQ ID NO: 159885 - DNA, 1167 bp, Homo sapiens
  Payload ID: 11273
  Gene Symbol: NME4
  Gene Name: NME/NM23 nucleoside diphosphate kinase 4
  ENST ID: ENST00000448828
  CDS Start-End: 25-159
acagcggcccgcgggccgggcgtcatgggcggcctcttctggcgctccgcgctgcgggggctgcgctgcggcccgcgggccccgggcccgagcctgctagtgcgccacggctcggcgtcccctccagaggaggacggctggggcggagctcagcgctgaccctgggtctggaagcgacaggccttgaaactccacagcagcacaggccccgtctcctggctcggacagaaccctgctaccttccctcttcaatcttcaggcccctttttgtccgtgtttccagggctcacctggtggggaaagagggccctcctggacccgggagcggaccctggtggcggtgaagcccgatggcgtgcaacggcggctcgttggggacgtgatccagcgctttgagaggcggggcttcacgctggtggggatgaagatgctgcaggcaccagagagcgtccttgccgagcactaccaggacctgcggaggaagcccttctaccctgccctcatccgctacatgagctctgggcctgtggtggccatggtctgggaagggtacaatgtcgtccgcgcctcgagggccatgattggacacaccgactcggctgaggctgccccaggaaccataaggggtgacttcagcgtccacatcagcaggaatgtcatccacgccagcgactccgtggagggggcccagcgggagatccagctgtggttccagagcagtgagctggtgagctgggcagacgggggccagcacagcagcatccacccagcctgaggctcaagctgcccttaccaccccatcccccacgcaggaccaactacctccgtcagcaagaacccaagcccacatccaaacctgcctgtcccaaaccacttacttccctgttcacctctgccccaccccagcccagaggagtttgagccaccaacttcagtgcctttctgtaccccaagccagcacaagattggaccaatcctttttgcaccaaagtgccggacaacctttgtggtgggggggggtcttcacattatcataacctctcctctaaaggggaggcattaaaattcactgtgcccagcacatgggtggtacactaattatgacttcccccagctctgaggtagaaatgacgcctttatgcaagttgtaaggagttgaacagtaaa

SEQ ID NO: 159886 - DNA, 904 bp, Homo sapiens
  Payload ID: 11273
  Gene Symbol: NME4
  Gene Name: NME/NM23 nucleoside diphosphate kinase 4
  ENST ID: ENST00000621774
  CDS Start-End: 32-493
cgcgctcacagcggcccgcgggccgggcgtcatgggcggcctcttctggcgctccgcgctgcgggggctgcgctgcggcccgcgggccccgggcccgagcctgctagtgcgccacggctcgggagggccctcctggacccgggagcggaccctggtggcggtgaagcccgatggcgtgcaacggcggctcgttggggacgtgatccagcgctttgagaggcggggcttcacgctggtggggatgaagatgctgcaggtctgggaagggtacaatgtcgtccgcgcctcgagggccatgattggacacaccgactcggctgaggctgccccaggaaccataaggggtgacttcagcgtccacatcagcaggaatgtcatccacgccagcgactccgtggagggggcccagcgggagatccagctgtggttccagagcagtgagctggtgagctgggcagacgggggccagcacagcagcatccacccagcctgaggctcaagctgcccttaccaccccatcccccacgcaggaccaactacctccgtcagcaagaacccaagcccacatccaaacctgcctgtcccaaaccacttacttccctgttcacctctgccccaccccagcccagaggagtttgagccaccaacttcagtgcctttctgtaccccaagccagcacaagattggaccaatcctttttgcaccaaagtgccggacaacctttgtggtgggggggggtcttcacattatcataacctctcctctaaaggggaggcattaaaattcactgtgcccagcacatgggtggtacactaattatgacttcccccagctctgaggtagaaatgacgcctttatgcaagttgtaaggagttgaacagtaaagaggaagttttgcacaccc

SEQ ID NO: 159887 - DNA, 1193 bp, Homo sapiens
  Payload ID: 11273
  Gene Symbol: NME4
  Gene Name: NME/NM23 nucleoside diphosphate kinase 4
  Uniprot ID: O00746
  ENST ID: ENST00000620944
  CDS Start-End: 429-782
cgcgctcacagcggcccgcgggccgggcgtcatgggcggcctcttctggcgctccgcgctgcgggggctgcgctgcggcccgcgggccccgggcccgagcctgctagtgcgccacggctcggcgtcccctccagaggaggacggctggggcggagctcagcgctgaccctgggtctggaagcgacaggccttgaaactccacagcagcacaggccccgtctcctggctcggacagaaccctgctaccttccctcttcaatcttcaggcccctttttgtccgtgtttccagggctcacctggtggggaaagagggccctcctggacccgggagcggaccctggtggcggtgaagcccgatggcgtgcaacggcggctcgttggggacgtgatccagcgctttgagaggcggggcttcacgctggtggggatgaagatgctgcaggcaccagagagcgtccttgccgagcactaccaggacctgcggaggaagcccttctaccctgccctcatccgctacatgagctctgggcctgtggtggccatggtctgggaagggtacaatgtcgtccgcgcctcgagggccatgattggacacaccgactcggctgaggctgccccaggaaccataaggggtgacttcagcgtccacatcagcaggaatgtcatccacgccagcgactccgtggagggggcccagcgggagatccagctgtggttccagagcagtgagctggtgagctgggcagacgggggccagcacagcagcatccacccagcctgaggctcaagctgcccttaccaccccatcccccacgcaggaccaactacctccgtcagcaagaacccaagcccacatccaaacctgcctgtcccaaaccacttacttccctgttcacctctgccccaccccagcccagaggagtttgagccaccaacttcagtgcctttctgtaccccaagccagcacaagattggaccaatcctttttgcaccaaagtgccggacaacctttgtggtgggggggggtcttcacattatcataacctctcctctaaaggggaggcattaaaattcactgtgcccagcacatgggtggtacactaattatgacttcccccagctctgaggtagaaatgacgcctttatgcaagttgtaaggagttgaacagtaaagaggaagttttgcacaccc

SEQ ID NO: 159888 - DNA, 1353 bp, Homo sapiens
  Payload ID: 11274
  Gene Symbol: NME6
  Gene Name: NME/NM23 nucleoside diphosphate kinase 6
  Uniprot ID: O75414
  ENST ID: ENST00000452211
  CDS Start-End: 239-799
agaatctggggtgggcttaggccccgggccgcgtgttcttgccacgagaacccctagcagcctggccttggaatggctggatgaggtgcattcgttggttcattcagatactgttaagagccagctgtgtgctaggtactgcttacaccttctggtggtgaagacggaactgaagggaacttgcaaggagctgtgagaaagtgtaacgggaagtgagctaagatcactaaggagtgagatggcctcaatcttgcgaagccctcaggctctccagctcactctagccctgatcaagcctgacgcagtcgcccatccactgattctggaggctgttcatcagcagattctaagcaacaagttcctgattgtacgaatgagagaactactgtggagaaaggaagattgccagaggttttaccgagagcatgaagggcgttttttctatcagaggctggtggagttcatggccagcgggccaatccgagcctacatccttgcccacaaggatgccatccagctctggaggacgctcatgggacccaccagagtgttccgagcacgccatgtggccccagattctatccgtgggagtttcggcctcactgacacccgcaacaccacccatggttcggactctgtggtttcagccagcagagagattgcagccttcttccctgacttcagtgaacagcgctggtatgaggaggaagagccccagttgcgctgtggccctgtgtgctatagcccagagggaggtgtccactatgtagctggaacaggaggcctaggaccagcctgatgcaggtctatgaagaccagtggtagtgcccagacttctcctagacatctagtctaaaacattctcctaggaccagggaagcctggcttacagtgccatttctgctgggcaccaccacctgcctgagggcctagctcaccacagcacatcctccaggatctagccttctatctacctcttctctggaatgtttatggtggttcagaagaatgatgactcctctttgctgagaactgttcatccttcttcaagaagaagcttgccaggccgggcacggtggctcacgcctataatcccagcactttgggaggccgaggcaggcggatcacaaggtcaggaattcgagaccagcctgaccaacatggtgaaaccccatctctactaaaaatacaacaattagccaggcatggtggtgcatgcctgtaatcccagctactcagaggctgaggcaggagaattgcttgaacctgggaggcagagggtgcagtgagccgagatcgtgccattgcactccagcctgggcgacattctgtctcaaaaaaaaaaaaaaagaa

SEQ ID NO: 159889 - DNA, 638 bp, Homo sapiens
  Payload ID: 11274
  Gene Symbol: NME6
  Gene Name: NME/NM23 nucleoside diphosphate kinase 6
  ENST ID: ENST00000456495
  CDS Start-End: 305-638
ggaggacaaggtgaacccgcagccggacttctgctgcactggggctccgaatgacccagaatctggggtgggcttaggccccgggtacgaggggccgcgtgttcttgccacgagaacccctagcagcctggccttggaatggctggatgaggtgcattcgttggttcattcagatactgttaagagccagctgtgtgctaggtactgcttacaccttctggtggtgaagacggaactgaagggaacttgcaaggagctgtgagaaagtgtaacgggaagtgagctaagatcactaaggagtgagatggcctcaatcttgcgaagccctcaggctctccagctcactctagccctgatcaagcctgacgcagtcgcccatccactgattctggaggctgttcatcagcagattctaagcaacaagttcctgattgtacgaatgagagaactactgtggagaaaggaagattgccagaggttttaccgagagcatgaagggcgttttttctatcagaggctggtggagttcatggccagcgggccaatccgagcctacatccttgcccacaaggatgccatccagctctggaggacgctcatgggacccaccagagtgttccgagcacgccatgtggccc

SEQ ID NO: 159890 - DNA, 599 bp, Homo sapiens
  Payload ID: 11274
  Gene Symbol: NME6
  Gene Name: NME/NM23 nucleoside diphosphate kinase 6
  Uniprot ID: O75414
  ENST ID: ENST00000435684
  CDS Start-End: 97-588
gtgccggaggacaaggtgaacccgcagccggacttctgctgcactggggctccgaatgacccagaatctggggtgggcttaggccccgggagtgagatggcctcaatcttgcgaagccctcaggctctccagctcactctagccctgatcaagcctgacgcagtcgcccatccactgattctggaggctgttcatcagcagattctaagcaacaagttcctgattgtacgaatgagagaactactgtggagaaaggaagattgccagaggttttaccgagagcatgaagcgggccaatccgagcctacatccttgcccacaaggatgccatccagctctggaggacgctcatgggacccaccagagtgttccgagcacgccatgtggccccagattctatccgtgggagtttcggcctcactgacacccgcaacaccacccatggttcggactctgtggtttcagccagcagagagattgcagccttcttccctgacttcagtgaacagcgctggtatgaggaggaagagccccagttgcgctgtggccctgtgtgctatagcccagagggaggtgtccactatgtagctggaacagga

SEQ ID NO: 159891 - DNA, 794 bp, Homo sapiens
  Payload ID: 11274
  Gene Symbol: NME6
  Gene Name: NME/NM23 nucleoside diphosphate kinase 6
  ENST ID: ENST00000418431
  CDS Start-End: 43-291
gcgcctggtggccgggccctgtgccggaggacaaggagtgagatggcctcaatcttgcgaagccctcaggctctccagctcactctagccctgatcaagcctgacgcagtcgcccatccactgattctggaggctgttcatcagcagattctaagcaacaagttcctgattgtacgaatgagagaactactgtggagaaaggaagattgccagaggttttaccgagagcatgaaggtaaggaggtagaagtacagaaagttgccttgggcaccaggatgaaggtatcttgatgaaggtcctctctctttgcagggcgttttttctatcagaggctggtggagttcatggccagcgggccaatccgagcctacatccttgcccacaaggatgccatccagctctggaggacgctcatgggacccaccagagtgttccgagcacgccatgtggccccagattctatccgtgggagtttcggcctcactgacacccgcaacaccacccatggttcggactctgtggtttcagccagcagagagattgcagccttcttccctgacttcagtgaacagcgctggtatgaggaggaagagccccagttgcgctgtggccctgtgtgctatagcccagagggaggtgtccactatgtagctggaacaggaggcctaggaccagcctgatgcaggtctatgaagaccagtggtagtgcccagacttctcctagacatctagtctaaaacattctcctaggaccagggaagcctggcttacagtgccatttctgctgggcacc

SEQ ID NO: 159892 - DNA, 849 bp, Homo sapiens
  Payload ID: 11274
  Gene Symbol: NME6
  Gene Name: NME/NM23 nucleoside diphosphate kinase 6
  Uniprot ID: O75414
  ENST ID: ENST00000415644
  CDS Start-End: 50-409
cagcgtggcgcctggtggccgggccctgtgccggaggacaaggagtgagatggcctcaatcttgcgaagccctcaggctctccagctcactctagccctgatcaagcctgacgcagtcgcccatccactgattctggaggctgttcatcagcagattctaagcaacaagttcctgattgtacgaatgagagaactactgtggagaaaggaagattgccagaggttttaccgagagcatgaagactctgtggtttcagccagcagagagattgcagccttcttccctgacttcagtgaacagcgctggtatgaggaggaagagccccagttgcgctgtggccctgtgtgctatagcccagagggaggtgtccactatgtagctggaacaggaggcctaggaccagcctgatgcaggtctatgaagaccagtggtagtgcccagacttctcctagacatctagtctaaaacattctcctaggaccagggaagcctggcttacagtgccatttctgctgggcaccaccacctgcctgagggcctagctcaccacagcacatcctccaggatctagccttctatctacctcttctctggaatgtttatggtggttcagaagaatgatgactcctctttgctgagaactgttcatccttcttcaagaagaagcttgccaggccgggcacggtggctcacgcctataatcccagcactttgggaggccgaggcaggcggatcacaaggtcaggaattcgagaccagcctgaccaacatggtgaaaccccatctctactaaaaatacaacaattagccaggcatggtggtgcatgcctgtaatcccagctactcag

SEQ ID NO: 159893 - DNA, 913 bp, Homo sapiens
  Payload ID: 11274
  Gene Symbol: NME6
  Gene Name: NME/NM23 nucleoside diphosphate kinase 6
  Uniprot ID: O75414
  ENST ID: ENST00000415053
  CDS Start-End: 163-723
actggggctccgaatgacccagaatctggggtgggcttaggccccgggccgcgtgttcttgccacgagaacccctagcagcctggccttggaatggctggatgaggtgcattcgttggttcattcagatactgttaagagccagctgtgtgctaggagtgagatggcctcaatcttgcgaagccctcaggctctccagctcactctagccctgatcaagcctgacgcagtcgcccatccactgattctggaggctgttcatcagcagattctaagcaacaagttcctgattgtacgaatgagagaactactgtggagaaaggaagattgccagaggttttaccgagagcatgaagggcgttttttctatcagaggctggtggagttcatggccagcgggccaatccgagcctacatccttgcccacaaggatgccatccagctctggaggacgctcatgggacccaccagagtgttccgagcacgccatgtggccccagattctatccgtgggagtttcggcctcactgacacccgcaacaccacccatggttcggactctgtggtttcagccagcagagagattgcagccttcttccctgacttcagtgaacagcgctggtatgaggaggaagagccccagttgcgctgtggccctgtgtgctatagcccagagggaggtgtccactatgtagctggaacaggaggcctaggaccagcctgatgcaggtctatgaagaccagtggtagtgcccagacttctcctagacatctagtctaaaacattctcctaggaccagggaagcctggcttacagtgccatttctgctgggcaccaccacctgcctgagggcctagctcaccacagcacatcctccaggatctagccttctatctacctcttctctggaatg

SEQ ID NO: 159894 - DNA, 668 bp, Homo sapiens
  Payload ID: 11274
  Gene Symbol: NME6
  Gene Name: NME/NM23 nucleoside diphosphate kinase 6
  ENST ID: ENST00000447724
  CDS Start-End: 484-668
gctccgaatgacccagaatctggggtgggcttaggccccgggtacgaggggattctcgacttgtcagtttgttgtaaaccaagagtcaagacagccacaacttagctgcgttagtaaaggaaccatgtcctccctacaggccgcgtgttcttgccacgagaacccctagcagcctggccttggaatggctggatgaggtgcattcgttggttcattcagatactgttaagagccagctgtgtgctaggtactgcttacaccttctggtggtgaagacggaactgaagggaacttgcaaggagctgtgagaaagtgtaacgggaagtgagctaagatcactaaggtgggcaggaggcaaccagagaaagcacattcaggactgcgaaaactactcacacaaaggctgtcaagccagaaattctttcaaaactgaaaggcccatgaggttggagctagagaaacttaaggagtgtggggttccagatgaggctagagaggagtgagatggcctcaatcttgcgaagccctcaggctctccagctcactctagccctgatcaagcctgacgcagtcgcccatccactgattctggaggctgttcatcagcagattctaagcaacaagttcctgattgtacgaatgagagaactactgtggagaaaggaaga

SEQ ID NO: 159895 - DNA, 757 bp, Homo sapiens
  Payload ID: 11274
  Gene Symbol: NME6
  Gene Name: NME/NM23 nucleoside diphosphate kinase 6
  Uniprot ID: O75414
  ENST ID: ENST00000442597
  CDS Start-End: 79-639
gaaggaccctgcgagggccgcaggctatccagcgtggcgcctggtggccgggccctgtgccggaggacaaggagtgagatggcctcaatcttgcgaagccctcaggctctccagctcactctagccctgatcaagcctgacgcagtcgcccatccactgattctggaggctgttcatcagcagattctaagcaacaagttcctgattgtacgaatgagagaactactgtggagaaaggaagattgccagaggttttaccgagagcatgaagggcgttttttctatcagaggctggtggagttcatggccagcgggccaatccgagcctacatccttgcccacaaggatgccatccagctctggaggacgctcatgggacccaccagagtgttccgagcacgccatgtggccccagattctatccgtgggagtttcggcctcactgacacccgcaacaccacccatggttcggactctgtggtttcagccagcagagagattgcagccttcttccctgacttcagtgaacagcgctggtatgaggaggaagagccccagttgcgctgtggccctgtgtgctatagcccagagggaggtgtccactatgtagctggaacaggaggcctaggaccagcctgatgcaggtctatgaagaccagtggtagtgcccagacttctcctagacatctagtctaaaacattctcctaggaccagggaagcctggcttacagtgccatttctgctgggcaccaccac

SEQ ID NO: 159896 - DNA, 871 bp, Homo sapiens
  Payload ID: 11274
  Gene Symbol: NME6
  Gene Name: NME/NM23 nucleoside diphosphate kinase 6
  Uniprot ID: O75414
  ENST ID: ENST00000451657
  CDS Start-End: 341-832
cgtagcgctgcgccagcacccggcccagcactccctcccgccgagggcgcccaggccggcttccgagggcgcccaggccggcttccgaggggcggttcccacaagcgagttccggcgcccagaacggcttcatcctctcgtcccgtccgcggcaaatgcatgcgcctggaaaacccgccaccctccagggcaactcacacctcacctcacgccgcggcgcaaccggactaggaccccgagcagggctgcccagggagcgcctgaaggaccctgcgagggccgcaggctatccagcgtggcgcctggtggccgggccctgtgccggaggacaaggagtgagatggcctcaatcttgcgaagccctcaggctctccagctcactctagccctgatcaagcctgacgcagtcgcccatccactgattctggaggctgttcatcagcagattctaagcaacaagttcctgattgtacgaatgagagaactactgtggagaaaggaagattgccagaggttttaccgagagcatgaagcgggccaatccgagcctacatccttgcccacaaggatgccatccagctctggaggacgctcatgggacccaccagagtgttccgagcacgccatgtggccccagattctatccgtgggagtttcggcctcactgacacccgcaacaccacccatggttcggactctgtggtttcagccagcagagagattgcagccttcttccctgacttcagtgaacagcgctggtatgaggaggaagagccccagttgcgctgtggccctgtgtgctatagcccagagggaggtgtccactatgtagctggaacaggaggcctaggaccagcctgatgcaggtcta

SEQ ID NO: 159897 - DNA, 552 bp, Homo sapiens
  Payload ID: 11274
  Gene Symbol: NME6
  Gene Name: NME/NM23 nucleoside diphosphate kinase 6
  ENST ID: ENST00000454531
  CDS Start-End: 151-399
gcgcctggtggccgggccctgtgccggaggacaaggccgcgtgttcttgccacgagaacccctagcagcctggccttggaatggctggatgaggtgcattcgttggttcattcagatactgttaagagccagctgtgtgctaggagtgagatggcctcaatcttgcgaagccctcaggctctccagctcactctagccctgatcaagcctgacgcagtcgcccatccactgattctggaggctgttcatcagcagattctaagcaacaagttcctgattgtacgaatgagagaactactgtggagaaaggaagattgccagaggttttaccgagagcatgaaggtaaggaggtagaagtacagaaagttgccttgggcaccaggatgaaggtatcttgatgaaggtcctctctctttgcagggcgttttttctatcagaggctggtggagttcatggccagcgggccaatccgagcctacatccttgcccacaaggatgccatccagctctggaggacgctcatgggacccaccagagtgttccgagcacgc

SEQ ID NO: 159898 - DNA, 613 bp, Homo sapiens
  Payload ID: 11274
  Gene Symbol: NME6
  Gene Name: NME/NM23 nucleoside diphosphate kinase 6
  ENST ID: ENST00000425930
  CDS Start-End: 92-613
ggtgaacccgcagccggacttctgctgcactggggctccgaatgacccagaatctggggtgggcttaggccccgggtacgaggggagtgagatggcctcaatcttgcgaagccctcaggctctccagctcactctagccctgatcaagcctgacgcagtcgcccatccactgattctggaggctgttcatcagcagattctaagcaacaagttcctgattgtacgaatgagagaactactgtggagaaaggaagattgccagaggttttaccgagagcatgaagggcgttttttctatcagaggctggtggagttcatggccagcgggccaatccgagcctacatccttgcccacaaggatgccatccagctctggaggacgctcatgggacccaccagagtgttccgagcacgccatgtggccccagattctatccgtgggagtttcggcctcactgacacccgcaacaccacccatggttcggactctgtggtttcagccagcagagagattgcagccttcttccctgacttcagtgaacagcgctggtatgaggaggaagagccccagttgcgctgtggccctgtgtgctatagcccagagggaggtgtc

SEQ ID NO: 159899 - DNA, 621 bp, Homo sapiens
  Payload ID: 11274
  Gene Symbol: NME6
  Gene Name: NME/NM23 nucleoside diphosphate kinase 6
  ENST ID: ENST00000447314
  CDS Start-End: 81-506
gcgcctggtggccgggccctgtgccggaggacaaggctgttcatcagcagattctaagcaacaagttcctgattgtacgaatgagagaactactgtggagaaaggaagattgccagaggttttaccgagagcatgaagggcgttttttctatcagaggctggtggagttcatggccagcgggccaatccgagcctacatccttgcccacaaggatgccatccagctctggaggacgctcatgggacccaccagagtgttccgagcacgccatgtggccccagattctatccgtgggagtttcggcctcactgacacccgcaacaccacccatggttcggactctgtggtttcagccagcagagagattgcagccttcttccctgacttcagtgaacagcgctggtatgaggaggaagagccccagttgcgctgtggccctgtgtgctatagcccagagggaggtgtccactatgtagctggaacaggaggcctaggaccagcctgatgcaggtctatgaagaccagtggtagtgcccagacttctcctagacatctagtctaaaacattctcctaggaccagggaagcctggcttacagtgccatttctgctgggcaccac

SEQ ID NO: 159900 - DNA, 2004 bp, Homo sapiens
  Payload ID: 11274
  Gene Symbol: NME6
  Gene Name: NME/NM23 nucleoside diphosphate kinase 6
  ENST ID: ENST00000421967
  CDS Start-End: 47-631
gacaaggtgaacccgcagccggacttctgctgcactggggctccgaatgacccagaatctggggagtgagatggcctcaatcttgcgaagccctcaggctctccagctcactctagccctgatcaagcctgacgcagtcgcccatccactgattctggaggctgttcatcagcagattctaagcaacaagttcctgattgtacgaatgagagaactactgtggagaaaggaagattgccagaggttttaccgagagcatgaagggcgttttttctatcagaggctggtggagttcatggccagcgggccaatccgagcctacatccttgcccacaaggatgccatccagctctggaggacgctcatgggacccaccagagtgttccgagcacgccatgtggccccagattctatccgtgggagtttcggcctcactgacacccgcaacaccacccatggttcggactctgtggtttcagccagcagagagattgcagccttcttccctgacttcagtgaacagcgctggtatgaggaggaagagccccagttgcgctgtggccctgtgtgctatagcccagagggaggtgtccactatgtagctggaacaggaggcctaggaccagcctgatgcaggtctatgaagaccagtggtagtgcccagacttctcctagacatctagtctaaaacattctcctaggaccagggaagcctggcttacagtgccatttctgctgggcaccaccacctgcctgagggcctagctcaccacagcacatcctccaggatctagccttctatctacctcttctctggaatgtttatggtggttcagaagaatgatgactcctctttgctgagaactgttcatccttcttcaagaagaagcttgccaggccgggcacggtggctcacgcctataatcccagcactttgggaggccgaggcaggcggatcacaaggtcaggaattcgagaccagcctgaccaacatggtgaaaccccatctctactaaaaatacaacaattagccaggcatggtggtgcatgcctgtaatcccagctactcagaggctgaggcaggagaattgcttgaacctgggaggcagagggtgcagtgagccgagatcgtgccattgcactccagcctgggcgacattctgtctcaaaaaaaaaaaaaaagaagcttgtctaattgacttgcctaaaaaatgcagtgactccaaacaacatttgacctgtcttcctcaataaaagtcagtgttctcctgaatcctttatgctgccacatttaggggaaacttttcaggcttcatcattctgacttctcagcagcattcagttattgcttcattctccagaaacactctcttctcttggattttctgatcccacacccttggttttctccttctgtgtgtttttcttcatctcctttatcagcttatgcaaacatttattttcataaattctctattcaagacatactgaaaaatgcaaagatggttaagacatgattgggtcctcaagttgctaattatgaatttgggtggtcagccagctataacgtggcagagatggagaagtgccctaacagaggtataaagtcctgtgggagaacagaggaaagaaggtttcctttggctgggtgaggaggtgaaggagatagggtggaaagtcttttataaaagatatagctggctttggaactaagcctgaaggtcaaatagggtatccatagcaggggtctggggcactagacagtctgttcattttcaggaatatatgggtcagttttgtatgtgtgacctaagaaacctgtgacacttcttacaggtcttgacttttctttctcagtacatgtgtatttctctttttggtggccttgaaacctttgagttgaaaattgccttcaccatctgccactttcactaatggtagaccaggaaatttggacccactgaacatagagaacaactagaaaagctgtgcaaaatataaaca

SEQ ID NO: 159901 - DNA, 1209 bp, Homo sapiens
  Payload ID: 11274
  Gene Symbol: NME6
  Gene Name: NME/NM23 nucleoside diphosphate kinase 6
  Uniprot ID: O75414
  ENST ID: ENST00000426689
  CDS Start-End: 9-569
ggagtgagatggcctcaatcttgcgaagccctcaggctctccagctcactctagccctgatcaagcctgacgcagtcgcccatccactgattctggaggctgttcatcagcagattctaagcaacaagttcctgattgtacgaatgagagaactactgtggagaaaggaagattgccagaggttttaccgagagcatgaagggcgttttttctatcagaggctggtggagttcatggccagcgggccaatccgagcctacatccttgcccacaaggatgccatccagctctggaggacgctcatgggacccaccagagtgttccgagcacgccatgtggccccagattctatccgtgggagtttcggcctcactgacacccgcaacaccacccatggttcggactctgtggtttcagccagcagagagattgcagccttcttccctgacttcagtgaacagcgctggtatgaggaggaagagccccagttgcgctgtggccctgtgtgctatagcccagagggaggtgtccactatgtagctggaacaggaggcctaggaccagcctgatgcaggtctatgaagaccagtggtagtgcccagacttctcctagacatctagtctaaaacattctcctaggaccagggaagcctggcttacagtgccatttctgctgggcaccaccacctgcctgagggcctagctcaccacagcacatcctccaggatctagccttctatctacctcttctctggaatgtttatggtggttcagaagaatgatgactcctctttgctgagaactgttcatccttcttcaagaagaagcttgccaggccgggcacggtggctcacgcctataatcccagcactttgggaggccgaggcaggcggatcacaaggtcaggaattcgagaccagcctgaccaacatggtgaaaccccatctctactaaaaatacaacaattagccaggcatggtggtgcatgcctgtaatcccagctactcagaggctgaggcaggagaattgcttgaacctgggaggcagagggtgcagtgagccgagatcgtgccattgcactccagcctgggcgacattctgtctcaaaaaaaaaaaaaaagaagcttgtctaattgacttgcctaaaaaatgcagtgactccaaacaacatttgacctgtcttcctcaataaaagtcagtgttctcctg

SEQ ID NO: 159902 - DNA, 894 bp, Homo sapiens
  Payload ID: 11275
  Gene Symbol: NME1-NME2
  Gene Name: NME1-NME2 readthrough
  ENST ID: ENST00000376392
  CDS Start-End: 64-657
cgggcgcgtttcgggtgctggcggctgcagccggagttcaaacctaagcagctggaaggaaccatggccaactgtgagcgtaccttcattgcgatcaaaccagatggggtccagcggggtcttgtgggagagattatcaagcgttttgagcagaaaggattccgccttgttggtctgaaattcatgcaagcttccgaagatcttctcaaggaacactacgttgacctgaaggaccgtccattctttgccggcctggtgaaatacatgcactcagggccggtagttgccatggtctgggaggggctgaatgtggtgaagacgggccgagtcatgctcggggagaccaaccctgcagactccaagcctgggaccatccgtggagacttctgcatacaagttggcaggaccatggccaacctggagcgcaccttcatcgccatcaagccggacggcgtgcagcgcggcctggtgggcgagatcatcaagcgcttcgagcagaagggattccgcctcgtggccatgaagttcctccgggcctctgaagaacacctgaagcagcactacattgacctgaaagaccgaccattcttccctgggctggtgaagtacatgaactcagggccggttgtggccatggaacatcattcatggcagtgattcagtaaaaagtgctgaaaaagaaatcagcctatggtttaagcctgaagaactggttgactacaagtcttgtgctcatgactgggtctatgaataagaggtggacacaacagcagtctccttcagcacggcgtggtgtgtccctggacacagctcttcattccattgacttagaggcaacaggattgatcattcttttatagagcatatttgccaataaagcttttggaagccgga

SEQ ID NO: 159903 - DNA, 1021 bp, Homo sapiens
  Payload ID: 11275
  Gene Symbol: NME1-NME2
  Gene Name: NME1-NME2 readthrough
  Uniprot ID: P22392
  ENST ID: ENST00000393193
  CDS Start-End: 78-881
aaccacgtgggtcccgggcgcgtttcgggtgctggcggctgcagccggagttcaaacctaagcagctggaaggaaccatggccaactgtgagcgtaccttcattgcgatcaaaccagatggggtccagcggggtcttgtgggagagattatcaagcgttttgagcagaaaggattccgccttgttggtctgaaattcatgcaagcttccgaagatcttctcaaggaacactacgttgacctgaaggaccgtccattctttgccggcctggtgaaatacatgcactcagggccggtagttgccatggtctgggaggggctgaatgtggtgaagacgggccgagtcatgctcggggagaccaaccctgcagactccaagcctgggaccatccgtggagacttctgcatacaagttggcaggaccatggccaacctggagcgcaccttcatcgccatcaagccggacggcgtgcagcgcggcctggtgggcgagatcatcaagcgcttcgagcagaagggattccgcctcgtggccatgaagttcctccgggcctctgaagaacacctgaagcagcactacattgacctgaaagaccgaccattcttccctgggctggtgaagtacatgaactcagggccggttgtggccatggtctgggaggggctgaacgtggtgaagacaggccgagtgatgcttggggagaccaatccagcagattcaaagccaggcaccattcgtggggacttctgcattcaggttggcaggaacatcattcatggcagtgattcagtaaaaagtgctgaaaaagaaatcagcctatggtttaagcctgaagaactggttgactacaagtcttgtgctcatgactgggtctatgaataagaggtggacacaacagcagtctccttcagcacggcgtggtgtgtccctggacacagctcttcattccattgacttagaggcaacaggattgatcattcttttatagagcatatttgccaataaagcttttggaagccgga

SEQ ID NO: 159904 - DNA, 1193 bp, Homo sapiens
  Payload ID: 11275
  Gene Symbol: NME1-NME2
  Gene Name: NME1-NME2 readthrough
  ENST ID: ENST00000555572
  CDS Start-End: 177-1055
ggagttcaaacctaagcagctggaagggccctgtggctaggtaccatagagtctctacacaggactaagtcagcctggtgtgcaggggaggcagacacacaaacagaaaattggactacagtgctaagatgctgtaagaagaggttaactaaaggacaggaagatggggccaagagatggtgctactgtctactttagggatcgtctttcaaggcgaggggcctcctatctcaagctgtgatacaggaaccatggccaactgtgagcgtaccttcattgcgatcaaaccagatggggtccagcggggtcttgtgggagagattatcaagcgttttgagcagaaaggattccgccttgttggtctgaaattcatgcaagcttccgaagatcttctcaaggaacactacgttgacctgaaggaccgtccattctttgccggcctggtgaaatacatgcactcagggccggtagttgccatggtctgggaggggctgaatgtggtgaagacgggccgagtcatgctcggggagaccaaccctgcagactccaagcctgggaccatccgtggagacttctgcatacaagttggcaggaccatggccaacctggagcgcaccttcatcgccatcaagccggacggcgtgcagcgcggcctggtgggcgagatcatcaagcgcttcgagcagaagggattccgcctcgtggccatgaagttcctccgggcctctgaagaacacctgaagcagcactacattgacctgaaagaccgaccattcttccctgggctggtgaagtacatgaactcagggccggttgtggccatggtctgggaggggctgaacgtggtgaagacaggccgagtgatgcttggggagaccaatccagcagattcaaagccaggcaccattcgtggggacttctgcattcaggttggcaggaacatcattcatggcagtgattcagtaaaaagtgctgaaaaagaaatcagcctatggtttaagcctgaagaactggttgactacaagtcttgtgctcatgactgggtctatgaataagaggtggacacaacagcagtctccttcagcacggcgtggtgtgtccctggacacagctcttcattccattgacttagaggcaacaggattgatcattcttttatagagcatatttgccaataaagcttttggaagccg

SEQ ID NO: 159905 - DNA, 1193 bp, Homo sapiens
  Payload ID: 11276
  Gene Symbol: MPG
  Gene Name: N-methylpurine DNA glycosylase
  Uniprot ID: P29372
  ENST ID: ENST00000219431
  CDS Start-End: 232-1128
ctgggctccgcgccggggtccgagtcccacgaagccccggcccgagccgccggatgcccgcgcgcagcggggcccaggtcatgcagcctgggcccccatgccgtgcagctcgcacatatgtggggcagagcagccaccctgcccccagcagcagccgtccatcgtcagacgtgatcatttcctgaggcctcgagtgtgtcagggtgtttgtgcctcataacaacccacaggatggtcacccccgctttgcagatgaagaaaccaaagcagttttgccgacggatggggcaaaagaagcagcgaccagctagagcagggcagccacacagctcgtccgacgcagcccaggcacctgcagagcagccacacagctcgtccgatgcagcccaggcaccttgccccagggagcgctgcttgggaccgcccaccactccgggcccataccgcagcatctatttctcaagcccaaagggccaccttacccgactggggttggagttcttcgaccagccggcagtccccctggcccgggcatttctgggacaggtcctagtccggcgacttcctaatggcacagaactccgaggccgcatcgtggagaccgaggcatacctggggccagaggatgaagccgcccactcaaggggtggccggcagaccccccgcaaccgaggcatgttcatgaagccggggaccctgtacgtgtacatcatttacggcatgtacttctgcatgaacatctccagccagggggacggggcttgcgtcttgctgcgagcactggagcccctggaaggtctggagaccatgcgtcagcttcgcagcaccctccggaaaggcaccgccagccgtgtcctcaaggaccgcgagctctgcagtggcccctccaagctgtgccaggccctggccatcaacaagagctttgaccagagggacctggcacaggatgaagctgtatggctggagcgtggtcccctggagcccagtgagccggctgtagtggcagcagcccgggtgggcgtcggccatgcaggggagtgggcccggaaacccctccgcttctatgtccggggcagcccctgggtcagtgtggtcgacagagtggctgagcaggacacacaggcctgagcaaagggcctgcccagacaagattttttaattgtttaaaaaccgaataaatgttttatttctag

SEQ ID NO: 159906 - DNA, 1205 bp, Homo sapiens
  Payload ID: 11276
  Gene Symbol: MPG
  Gene Name: N-methylpurine DNA glycosylase
  Uniprot ID: P29372
  ENST ID: ENST00000356432
  CDS Start-End: 248-1129
cgcatcgggcccgggaatcggtccggacctggcggtgggcgctgggaagaggatccacctccacgtggcccgccccgccccgggggcgcagccagttcccggcgctcactgccccccttctcccggcttccgtccccttctgcgcaggcgccgctccgccccggtcctaggggtgcttccgtggtcggcggctgctgggctccgcgccggggtccgagtcccacgaagccccggcccgagccgccggatgcccgcgcgcagcggggcccagttttgccgacggatggggcaaaagaagcagcgaccagctagagcagggcagccacacagctcgtccgacgcagcccaggcacctgcagagcagccacacagctcgtccgatgcagcccaggcaccttgccccagggagcgctgcttgggaccgcccaccactccgggcccataccgcagcatctatttctcaagcccaaagggccaccttacccgactggggttggagttcttcgaccagccggcagtccccctggcccgggcatttctgggacaggtcctagtccggcgacttcctaatggcacagaactccgaggccgcatcgtggagaccgaggcatacctggggccagaggatgaagccgcccactcaaggggtggccggcagaccccccgcaaccgaggcatgttcatgaagccggggaccctgtacgtgtacatcatttacggcatgtacttctgcatgaacatctccagccagggggacggggcttgcgtcttgctgcgagcactggagcccctggaaggtctggagaccatgcgtcagcttcgcagcaccctccggaaaggcaccgccagccgtgtcctcaaggaccgcgagctctgcagtggcccctccaagctgtgccaggccctggccatcaacaagagctttgaccagagggacctggcacaggatgaagctgtatggctggagcgtggtcccctggagcccagtgagccggctgtagtggcagcagcccgggtgggcgtcggccatgcaggggagtgggcccggaaacccctccgcttctatgtccggggcagcccctgggtcagtgtggtcgacagagtggctgagcaggacacacaggcctgagcaaagggcctgcccagacaagattttttaattgtttaaaaaccgaataaatgttttatttctagaaaactgtgcc

SEQ ID NO: 159907 - DNA, 1039 bp, Homo sapiens
  Payload ID: 11276
  Gene Symbol: MPG
  Gene Name: N-methylpurine DNA glycosylase
  Uniprot ID: P29372
  ENST ID: ENST00000397817
  CDS Start-End: 120-965
gtcacactcatctgagggctccagacacatggcctgtgcgtctgtcctgcccagcgtctcccacctgacgcggccaggtgcccagttgctcttcaaggccttttcagttttgccgacggatggggcaaaagaagcagcgaccagctagagcagggcagccacacagctcgtccgacgcagcccaggcacctgcagagcagccacacagctcgtccgatgcagcccaggcaccttgccccagggagcgctgcttgggaccgcccaccactccgggcccataccgcagcatctatttctcaagcccaaagggccaccttacccgactggggttggagttcttcgaccagccggcagtccccctggcccgggcatttctgggacaggtcctagtccggcgacttcctaatggcacagaactccgaggccgcatcgtggagaccgaggcatacctggggccagaggatgaagccgcccactcaaggggtggccggcagaccccccgcaaccgaggcatgttcatgaagccggggaccctgtacgtgtacatcatttacggcatgtacttctgcatgaacatctccagccagggggacggggcttgcgtcttgctgcgagcactggagcccctggaaggtctggagaccatgcgtcagcttcgcagcaccctccggaaaggcaccgccagccgtgtcctcaaggaccgcgagctctgcagtggcccctccaagctgtgccaggccctggccatcaacaagagctttgaccagagggacctggcacaggatgaagctgtatggctggagcgtggtcccctggagcccagtgagccggctgtagtggcagcagcccgggtgggcgtcggccatgcaggggagtgggcccggaaacccctccgcttctatgtccggggcagcccctgggtcagtgtggtcgacagagtggctgagcaggacacacaggcctgagcaaagggcctgcccagacaagattttttaattgtttaaaaaccgaataaatgttttatttctagaaaactgtg

SEQ ID NO: 159908 - DNA, 884 bp, Homo sapiens
  Payload ID: 11276
  Gene Symbol: MPG
  Gene Name: N-methylpurine DNA glycosylase
  ENST ID: ENST00000436333
  CDS Start-End: 132-884
gtaggaccaggtgtcacactcatctgagggctccagacacatggcctgtgcgtctgtcctgcccagcgtctcccacctgacgcggccaggtgcccagttgctcttcaaggccttttcagttttgccgacggatggggcaaaagaagcagcgaccagctagagcagggcagccacacagctcgtccgacgcagcccaggcacctgcagagcagccacacagctcgtccgatgcagcccaggcaccttgccccagggagcgctgcttgggaccgcccaccactccgggcccataccgcagcatctatttctcaagcccaaagggccaccttacccgactggggttggagttcttcgaccagccggcagtccccctggcccgggcatttctgggacaggtcctagtccggcgacttcctaatggcacagaactccgaggccgcatcgtggagaccgaggcatacctggggccagaggatgaagccgcccactcaaggggtggccggcagaccccccgcaaccgaggcatgttcatgaagccggggaccctgtacgtgtacatcatttacggcatgtacttctgcatgaacatctccagccagggggacggggcttgcgtcttgctgcgagcactggagcccctggaaggtctggagaccatgcgtcagcttcgcagcaccctccggaaaggcaccgccagccgtgtcctcaaggaccgcgagctctgcagtggcccctccaagctgtgccaggccctggccatcaacaagagctttgaccagagggacctggcacaggatgaagctgtatggctggagcgtggtcccctggagcccagtgagccggctgtagtggcagcagcccgggtgggcgtcggccatgcaggg

SEQ ID NO: 159909 - DNA, 1376 bp, Homo sapiens
  Payload ID: 11277
  Gene Symbol: NMRAL1
  Gene Name: NmrA-like family domain containing 1
  Uniprot ID: Q9HBL8
  ENST ID: ENST00000283429
  CDS Start-End: 377-1276
taagactcatggacatagctttaattatctttgcctgacgcccaatacctgaaaattaagatgttcatgcaagataaagaggtaatttttctcctcctcccagtcatcacccgtagcatccggttaagaggctctccacctcgctcattttggtctaactggatttacacaaactcactgtgcacgtgcctggggcgggcaaacccggaaacgacgccgagtcccgcgggatccaggaggagccaactgcgccggaggaggggtttcggccgacacgtcgggattggcggctgcagccaggggtcctccgacgctgggcttccgtgagcggcgctctgccagatctctggaccggattcgtcccattctcgtcctcatggtggacaagaaactggtggtggttttcggaggcacaggtgcccagggtggctccgtggcccgcacactcctggaagatgggacattcaaggttcgagtggtgacccgaaaccctaggaagaaggcagcaaaggagctgaggctgcaaggtgcagaagtagtgcagggagaccaagatgaccaggtcatcatggagctggccctgaatggggcttacgccaccttcatcgtgaccaattactgggagagctgcagccaggagcaggaggtcaagcaggggaagctgctcgctgatctggccaggcgcctgggcctccactatgtggtctacagcggcctggagaacatcaagaagctgacggcagggagattggccgccgcgcactttgacggcaaaggggaggtggaggaatatttccgggacattggcgttcccatgaccagtgtgcggctgccctgctattttgagaacctcctctcccacttcttgccccagaaagccccagacggaaagagctacttgctgagcttgcccacaggtgacgttcccatggatggcatgtccgtgtctgacctgggtcctgtggtgctcagccttttgaagatgccagaaaaatacgtcggccagaacatcgggctgagcacttgcaggcacacggccgaggagtacgctgccctgctcaccaagcacacccgcaaggtcgtgcacgatgccaagatgactcctgaggactacgaaaagcttggctttcccggtgcccgggacctggccaacatgttccgtttctatgccctgagacccgaccgtgacatcgagctgaccctgagactcaaccccaaggccctgacgctggaccagtggctggaacagcacaaaggggacttcaacctgctgtgacctgcccgcctcgcggccccttgtggggatcgggggcaccagaggggcagaggcaccaacatctgaataaagccattgttctcccagatggcttccagga

SEQ ID NO: 159910 - DNA, 1233 bp, Homo sapiens
  Payload ID: 11277
  Gene Symbol: NMRAL1
  Gene Name: NmrA-like family domain containing 1
  Uniprot ID: Q9HBL8
  ENST ID: ENST00000404295
  CDS Start-End: 248-1147
cacgtcgggattggcggctgcagccaggggtcctccgacgctgggcttccgtgagcggcgctctgccaggtggggccggagctgcggggagggagttggcgcctagcgcgcagctccatccccgcctctgcagtggactcggccgcagaatcggggtcccgggctcctggaacttgtcccgcccaggccgcggcgaggaggtcactccagccgatctctggaccggattcgtcccattctcgtcctcatggtggacaagaaactggtggtggttttcggaggcacaggtgcccagggtggctccgtggcccgcacactcctggaagatgggacattcaaggttcgagtggtgacccgaaaccctaggaagaaggcagcaaaggagctgaggctgcaaggtgcagaagtagtgcagggagaccaagatgaccaggtcatcatggagctggccctgaatggggcttacgccaccttcatcgtgaccaattactgggagagctgcagccaggagcaggaggtcaagcaggggaagctgctcgctgatctggccaggcgcctgggcctccactatgtggtctacagcggcctggagaacatcaagaagctgacggcagggagattggccgccgcgcactttgacggcaaaggggaggtggaggaatatttccgggacattggcgttcccatgaccagtgtgcggctgccctgctattttgagaacctcctctcccacttcttgccccagaaagccccagacggaaagagctacttgctgagcttgcccacaggtgacgttcccatggatggcatgtccgtgtctgacctgggtcctgtggtgctcagccttttgaagatgccagaaaaatacgtcggccagaacatcgggctgagcacttgcaggcacacggccgaggagtacgctgccctgctcaccaagcacacccgcaaggtcgtgcacgatgccaagatgactcctgaggactacgaaaagcttggctttcccggtgcccgggacctggccaacatgttccgtttctatgccctgagacccgaccgtgacatcgagctgaccctgagactcaaccccaaggccctgacgctggaccagtggctggaacagcacaaaggggacttcaacctgctgtgacctgcccgcctcgcggccccttgtggggatcgggggcaccagaggggcagaggcaccaacatctgaataaagccattgttctccca

SEQ ID NO: 159911 - DNA, 731 bp, Homo sapiens
  Payload ID: 11277
  Gene Symbol: NMRAL1
  Gene Name: NmrA-like family domain containing 1
  ENST ID: ENST00000573571
  CDS Start-End: 168-731
gctgcggggagggagttggcgcctagcgcgcagctccatccccgcctctgcagtggactcggccgcagaatcggggtcccgggctcctggaacttgtcccgcccaggccgcggcgaggaggtcactccagccgatctctggaccggattcgtcccattctcgtcctcatggtggacaagaaactggtggtggttttcggaggcacagagatatggtttcaccatgttgcccaggctggtctcaaactcctgagctcaagagatctgcgtgcctcagcctcccaaagtgtctggattacaggtgcccagggtggctccgtggcccgcacactcctggaagatgggacattcaaggttcgagtggtgacccgaaaccctaggaagaaggcagcaaaggagctgaggctgcaaggtgcagaagtagtgcagggagaccaagatgaccaggtcatcatggagctggccctgaatggggcttacgccaccttcatcgtgaccaattactgggagagctgcagccaggagcaggaggtcaagcaggggaagctgctcgctgatctggccaggcgcctgggcctccactatgtggtctacagcggcctggagaacatcaagaagctgacggcagggagattggccgccgcgcactttgacggcaaaggggaggtggaggaatatttccgggacattggcgttcccatgaccagtgtgcggctgccctgctattttgag

SEQ ID NO: 159912 - DNA, 1719 bp, Homo sapiens
  Payload ID: 11277
  Gene Symbol: NMRAL1
  Gene Name: NmrA-like family domain containing 1
  Uniprot ID: Q9HBL8
  ENST ID: ENST00000574733
  CDS Start-End: 731-1630
gggcgggaagcggagtatgtggctttccccaggtctctggaggttgcaggctcaggctctgctcagcgggtcatcacccgtagcatccggttaagaggctctccacctcgctcattttggtctaactggatttacacaaactcactgtgcacgtgcctggggcgggcaaacccggaaacgacgccgagtcccgcgggatccaggaggagccaactgcgccggaggaggggtttcggccgacacgtcgggattggcggctgcagccaggggtcctccgacgctgggcttccgtgagcggcgctctgccaggtggggccggagctgcggggagggagttggcgcctagcgcgcagctccatccccgcctctgcagtggactcggccgcagaatcggggtcccgggctcctggaacttgtcccgcccaggccgcggcgaggaggtcactccagccggtgggacccgggccggggggcgggtgactggaaccgggggaggcgggaaggaggaggggatcgggcccaagggacacgaggtgggtcgcgggaccccgatatctcgggacaggcgtcttgccgctccgggcccagccgcccccttcgacacatactcgatgcatagacaatgggggtgtcctttgtcgctcctggcgggaaccccggccccacccccaactccacgcctcccattacccccagatctctggaccggattcgtcccattctcgtcctcatggtggacaagaaactggtggtggttttcggaggcacaggtgcccagggtggctccgtggcccgcacactcctggaagatgggacattcaaggttcgagtggtgacccgaaaccctaggaagaaggcagcaaaggagctgaggctgcaaggtgcagaagtagtgcagggagaccaagatgaccaggtcatcatggagctggccctgaatggggcttacgccaccttcatcgtgaccaattactgggagagctgcagccaggagcaggaggtcaagcaggggaagctgctcgctgatctggccaggcgcctgggcctccactatgtggtctacagcggcctggagaacatcaagaagctgacggcagggagattggccgccgcgcactttgacggcaaaggggaggtggaggaatatttccgggacattggcgttcccatgaccagtgtgcggctgccctgctattttgagaacctcctctcccacttcttgccccagaaagccccagacggaaagagctacttgctgagcttgcccacaggtgacgttcccatggatggcatgtccgtgtctgacctgggtcctgtggtgctcagccttttgaagatgccagaaaaatacgtcggccagaacatcgggctgagcacttgcaggcacacggccgaggagtacgctgccctgctcaccaagcacacccgcaaggtcgtgcacgatgccaagatgactcctgaggactacgaaaagcttggctttcccggtgcccgggacctggccaacatgttccgtttctatgccctgagacccgaccgtgacatcgagctgaccctgagactcaaccccaaggccctgacgctggaccagtggctggaacagcacaaaggggacttcaacctgctgtgacctgcccgcctcgcggccccttgtggggatcgggggcaccagaggggcagaggcaccaacatctgaataaagccattgttctcccagat

SEQ ID NO: 159913 - DNA, 787 bp, Homo sapiens
  Payload ID: 11277
  Gene Symbol: NMRAL1
  Gene Name: NmrA-like family domain containing 1
  ENST ID: ENST00000573520
  CDS Start-End: 133-306
aactgcgccggaggaggggtttcggccgacacgtcgggattggcggctgcagccaggggtcctccgacgctgggcttccgtgagcggcgctctgccagatctctggaccggattcgtcccattctcgtcctcatggtggacaagaaactggtggtggttttcggaggcacagagatatggtttcaccatgttgcccaggctggtctcaaactcctgagctcaagagatctgcgtgcctcagcctcccaaagtgtctggattacaggcatgagcccctgggcccagctgcaacgcgcaaaatcttaagggtgcccagggtggctccgtggcccgcacactcctggaagatgggacattcaaggttcgagtggtgacccgaaaccctaggaagaaggcagcaaaggagctgaggctgcaaggtgcagaagtagtgcagggagaccaagatgaccaggtcatcatggagctggccctgaatggggcttacgccaccttcatcgtgaccaattactgggagagctgcagccaggagcaggaggtcaagcaggggaagctgctcgctgatctggccaggcgcctgggcctccactatgtggtctacagcggcctggagaacatcaagaagctgacggcagggagattggccgccgcgcactttgacggcaaaggggaggtggaggaatatttccgggacattggcgttcccatgaccagtgtgcggctgccctgctattttgagaacctcctctcccacttcttgccccagaaagccccagacggaaagagc

SEQ ID NO: 159914 - DNA, 659 bp, Homo sapiens
  Payload ID: 11277
  Gene Symbol: NMRAL1
  Gene Name: NmrA-like family domain containing 1
  ENST ID: ENST00000572232
  CDS Start-End: 1-573
aacatcaagaagctgacggcagggagattggccgccgcgcactttgacggcaaaggggaggtggaggaatatttccgggacattggcgttcccatgaccagtgtgcggctgccctgctattttgagaacctcctctcccacttcttgccccagaaagccccagacggaaagagctacttgctgagcttgcccacaggtgacgttcccatggatggcatgtccgtgtctgacctgggtcctgtggtgctcagccttttgaagatgccagaaaaatacgtcggccagaacatcgggctgagcacttgcaggcacacggccgaggagtacgctgccctgctcaccaagcacacccgcaaggtcgtgcacgatgccaaggtgggcctcccgccccagatgactcctgaggactacgaaaagcttggctttcccggtgcccgggacctggccaacatgttccgtttctatgccctgagacccgaccgtgacatcgagctgaccctgagactcaaccccaaggccctgacgctggaccagtggctggaacagcacaaaggggacttcaacctgctgtgacctgcccgcctcgcggccccttgtggggatcgggggcaccagaggggcagaggcaccaacatctgaataaagccattgttctccca

SEQ ID NO: 159915 - DNA, 927 bp, Homo sapiens
  Payload ID: 11277
  Gene Symbol: NMRAL1
  Gene Name: NmrA-like family domain containing 1
  ENST ID: ENST00000571291
  CDS Start-End: 335-460
gcggagtatgtggctttccccaggtctctggaggttgcaggctcaggctctgctcagcgggtcatcacccgtagcatccggttaagaggctctccacctcgctcattttggtctaactggatttacacaaactcactgtgcacgtgcctggggcgggcaaacccggaaacgacgccgagtcccgcgggatccaggaggagccaactgcgccggaggaggggtttcggccgacacgtcgggattggcggctgcagccaggggtcctccgacgctgggcttccgtgagcggcgctctgccagatctctggaccggattcgtcccattctcgtcctcatggtggacaagaaactggtggtggttttcggaggcacagaggcggggtttcaccaagccaagatcgtgccactgcacttcagcctgggtgatagagtgagactccatctcaaaaaaataaaataaagaaaataaaaatacctgaatgagaatcgtcgttgagaaggtttcctggatgctccttgctgtggtggagcactcccttcggggtttcgcccttcagtgggactttcaggggaagctgctcgctgatctggccaggcgcctgggcctccactatgtggtctacagcggcctggagaacatcaagaagctgacggcagggagattggccgccgcgcactttgacggcaaaggggaggtggaggaatatttccgggacattggcgttcccatgaccagtgtgcggctgccctgctattttgagaacctcctctcccacttcttgccccagaaagccccagacggaaagagctacttgctgagcttgcccacaggtgacgttcccatggatggcatgtccgtgtctgacctgggtcctgtggtgctcagccttttgaagatgccagaaaaatacgtcggccagaacatcg

SEQ ID NO: 159916 - DNA, 1240 bp, Homo sapiens
  Payload ID: 11277
  Gene Symbol: NMRAL1
  Gene Name: NmrA-like family domain containing 1
  Uniprot ID: Q9HBL8
  ENST ID: ENST00000574425
  CDS Start-End: 256-1155
cggaggaggggtttcggccgacacgtcgggattggcggctgcagccaggggtcctccgacgctgggcttccgtgagcggcgctctgccaggtggggccggagctgcggggagggagttggcgcctagcgcgcagctccatccccgcctctgcagtggactcggccgcagaatcggggtcccgggctcctggaacttgtcccgcccaggccgcggcgaggagatctctggaccggattcgtcccattctcgtcctcatggtggacaagaaactggtggtggttttcggaggcacaggtgcccagggtggctccgtggcccgcacactcctggaagatgggacattcaaggttcgagtggtgacccgaaaccctaggaagaaggcagcaaaggagctgaggctgcaaggtgcagaagtagtgcagggagaccaagatgaccaggtcatcatggagctggccctgaatggggcttacgccaccttcatcgtgaccaattactgggagagctgcagccaggagcaggaggtcaagcaggggaagctgctcgctgatctggccaggcgcctgggcctccactatgtggtctacagcggcctggagaacatcaagaagctgacggcagggagattggccgccgcgcactttgacggcaaaggggaggtggaggaatatttccgggacattggcgttcccatgaccagtgtgcggctgccctgctattttgagaacctcctctcccacttcttgccccagaaagccccagacggaaagagctacttgctgagcttgcccacaggtgacgttcccatggatggcatgtccgtgtctgacctgggtcctgtggtgctcagccttttgaagatgccagaaaaatacgtcggccagaacatcgggctgagcacttgcaggcacacggccgaggagtacgctgccctgctcaccaagcacacccgcaaggtcgtgcacgatgccaagatgactcctgaggactacgaaaagcttggctttcccggtgcccgggacctggccaacatgttccgtttctatgccctgagacccgaccgtgacatcgagctgaccctgagactcaaccccaaggccctgacgctggaccagtggctggaacagcacaaaggggacttcaacctgctgtgacctgcccgcctcgcggccccttgtggggatcgggggcaccagaggggcagaggcaccaacatctgaataaagccattgttctccc

SEQ ID NO: 159917 - DNA, 672 bp, Homo sapiens
  Payload ID: 11277
  Gene Symbol: NMRAL1
  Gene Name: NmrA-like family domain containing 1
  ENST ID: ENST00000576176
  CDS Start-End: 1-672
gaggctgcaaggtgcagaagtagtgcagggagaccaagatgaccaggtcatcatggagctggccctgaatggggcttacgccaccttcatcgtgaccaattactgggagagctgcagccaggagcaggaggtcaagcaggggaagctgctcgctgatctggccaggcgcctgggcctccactatgtggtctacagcggcctggagaacatcaagaagctgacggcagggagattggccgccgcgcactttgacggcaaaggggaggtggaggaatatttccgggacattggcgttcccatgaccagtgtgcggctgccctgctattttgagaacctcctctcccacttcttgccccagaaagccccagacggaaagagctacttgctgagcttgcccacaggtgacgttcccatggatggcatgtccgtgtctgacctgggtcctgtggtgctcagccttttgaagatgccagaaaaatacgtcggccagaacatcgggctgagcacttgcaggcacacggccgaggagtacgctgccctgctcaccaagcacacccgcaaggtcgtgcacgatgccaaggtgggcctcccgccccaggtgactcaggcatccttgtcagggctttctagctcccgtagggagggtgtgtccagggctgcccacacctctgg

SEQ ID NO: 159918 - DNA, 456 bp, Homo sapiens
  Payload ID: 11277
  Gene Symbol: NMRAL1
  Gene Name: NmrA-like family domain containing 1
  ENST ID: ENST00000572110
  CDS Start-End: 1-375
gacggaaagagctacttgctgagcttgcccacaggtgacgttcccatggatggcatgtccgtgtctgacctgggtcctgtggtgctcagccttttgaagatgccagaaaaatacgtcggccagaacatcgggctgagcacttgcaggcacacggccgaggagtacgctgccctgctcaccaagcacacccgcaagatgactcctgaggactacgaaaagcttggctttcccggtgcccgggacctggccaacatgttccgtttctatgccctgagacccgaccgtgacatcgagctgaccctgagactcaaccccaaggccctgacgctggaccagtggctggaacagcacaaaggggacttcaacctgctgtgacctgcccgcctcgcggccccttgtggggatcgggggcaccagaggggcagaggcaccaacatctgaataaagccattgttc

SEQ ID NO: 159919 - DNA, 805 bp, Homo sapiens
  Payload ID: 11277
  Gene Symbol: NMRAL1
  Gene Name: NmrA-like family domain containing 1
  ENST ID: ENST00000571448
  CDS Start-End: 1-480
caggggaagctgctcgctgatctggccaggcgcctgggcctccactatgtggtctacagcggcctggagaacatcaagaagctgacggcagggagattggccgccgcgcactttgacggcaaaggggaggtggaggaatatttccgggacattggcgttcccatgaccagtgtgcggctgccctgctattttgagaacctcctctcccacttcttgccccagaaagccccagacggaaagagctacttgctgagcttgcccacaggtgacgttcccatggatggcatgtccgtgtctgacctgggtcctgtggtgctcagccttttgaagatgccagaaaaatacgtcggccagaacatcgggctgagcacttgcaggcacacggccgaggagtacgctgccctgctcaccaagcacacccgcaaggtcgtgcacgatgccaaggagctaactggccacagagtgaaatttctggcttagatgttttgaccaaatagagagaaaagcttccaggaggagagggccataggagccaagatgactcctgaggactacgaaaagcttggctttcccggtgcccgggacctggccaacatgttccgtttctatgccctgagacccgaccgtgacatcgagctgaccctgagactcaaccccaaggccctgacgctggaccagtggctggaacagcacaaaggggacttcaacctgctgtgacctgcccgcctcgcggccccttgtggggatcgggggcaccagaggggcagaggcaccaacatctgaataaagccattgttctcccaga

SEQ ID NO: 159920 - DNA, 1376 bp, Homo sapiens; identical to SEQ ID NO: 159909
  Payload ID: 11277
  Gene Symbol: NMRAL1
  Gene Name: NmrA-like family domain containing 1
  Uniprot ID: Q9HBL8
  ENST ID: ENST00000621810
  CDS Start-End: 377-1276

SEQ ID NO: 159921 - DNA, 1233 bp, Homo sapiens; identical to SEQ ID NO: 159910
  Payload ID: 11277
  Gene Symbol: NMRAL1
  Gene Name: NmrA-like family domain containing 1
  Uniprot ID: Q9HBL8
  ENST ID: ENST00000616587
  CDS Start-End: 248-1147

SEQ ID NO: 159922 - DNA, 456 bp, Homo sapiens; identical to SEQ ID NO: 159918
  Payload ID: 11277
  Gene Symbol: NMRAL1
  Gene Name: NmrA-like family domain containing 1
  ENST ID: ENST00000631933
  CDS Start-End: 1-375

SEQ ID NO: 159923 - DNA, 787 bp, Homo sapiens; identical to SEQ ID NO: 159913
  Payload ID: 11277
  Gene Symbol: NMRAL1
  Gene Name: NmrA-like family domain containing 1
  ENST ID: ENST00000633905
  CDS Start-End: 133-306

SEQ ID NO: 159924 - DNA, 672 bp, Homo sapiens; identical to SEQ ID NO: 159917
  Payload ID: 11277
  Gene Symbol: NMRAL1
  Gene Name: NmrA-like family domain containing 1
  ENST ID: ENST00000631694
  CDS Start-End: 1-672

SEQ ID NO: 159925 - DNA, 805 bp, Homo sapiens; identical to SEQ ID NO: 159919
  Payload ID: 11277
  Gene Symbol: NMRAL1
  Gene Name: NmrA-like family domain containing 1
  ENST ID: ENST00000631867
  CDS Start-End: 1-480

SEQ ID NO: 159926 - DNA, 731 bp, Homo sapiens; identical to SEQ ID NO: 159911
  Payload ID: 11277
  Gene Symbol: NMRAL1
  Gene Name: NmrA-like family domain containing 1
  ENST ID: ENST00000633784
  CDS Start-End: 168-731

SEQ ID NO: 159927 - DNA, 1240 bp, Homo sapiens; identical to SEQ ID NO: 159916
  Payload ID: 11277
  Gene Symbol: NMRAL1
  Gene Name: NmrA-like family domain containing 1
  Uniprot ID: Q9HBL8
  ENST ID: ENST00000633085
  CDS Start-End: 256-1155

SEQ ID NO: 159928 - DNA, 927 bp, Homo sapiens; identical to SEQ ID NO: 159915
  Payload ID: 11277
  Gene Symbol: NMRAL1
  Gene Name: NmrA-like family domain containing 1
  ENST ID: ENST00000632279
  CDS Start-End: 335-460

SEQ ID NO: 159929 - DNA, 1719 bp, Homo sapiens; identical to SEQ ID NO: 159912
  Payload ID: 11277
  Gene Symbol: NMRAL1
  Gene Name: NmrA-like family domain containing 1
  Uniprot ID: Q9HBL8
  ENST ID: ENST00000632013
  CDS Start-End: 731-1630

SEQ ID NO: 159930 - DNA, 659 bp, Homo sapiens; identical to SEQ ID NO: 159914
  Payload ID: 11277
  Gene Symbol: NMRAL1
  Gene Name: NmrA-like family domain containing 1
  ENST ID: ENST00000632312
  CDS Start-End: 1-573

SEQ ID NO: 159931 - DNA, 1623 bp, Homo sapiens
  Payload ID: 11278
  Gene Symbol: NMI
  Gene Name: N-myc (and STAT) interactor
  Uniprot ID: Q13287
  ENST ID: ENST00000243346
  CDS Start-End: 472-1395
taccttataaaatacatgcaaaaaactggttttagaaagcgttccctaaaattagtgtgtacggaaacttcaggtatacttctgctttcctccgcaaaaccacccctttttaaaaatcgaaagtgaaattagtttttttttctgttagtgactaatcattggagacaaccatgtttagtatttgagcattggttaaatgctaaagaaaaatcgccgttaaagcagttttctttttcactgtctttttcttttcgcggggaacccagctgttcctgcgagggccacctcctcaggaagaccccgcagctctcccgcggcgcttctgcaggaggcagcgacagtttcgagaacccgggccttcccctcccagtgcctcccggggttccggcgtttcaggcgctgctgttttccgggaagggcaggcgcgctgggccttggggagctgcgctcggcgggcggacgcgggggatcatggaagctgataaagatgacacacaacaaattcttaaggagcattcgccagatgaatttataaaagatgaacaaaataagggactaattgatgaaattacaaagaaaaatattcaactaaagaaggagatccaaaagcttgaaacggagttacaagaggctaccaaagaattccagattaaagaggatattcctgaaacaaagatgaaattcttatcagttgaaactcctgagaatgacagccagttgtcaaatatctcctgttcgtttcaagtgagctcgaaagttccttatgagatacaaaaaggacaagcacttatcacctttgaaaaagaagaagttgctcaaaatgtggtaagcatgagtaaacatcatgtacagataaaagatgtaaatctggaggttacggccaagccagttccattaaattcaggagtcagattccaggtttatgtagaagtttctaaaatgaaaatcaatgttactgaaattcctgacacattgcgtgaagatcaaatgagagacaaactagagctgagcttttcaaagtcccgaaatggaggcggagaggtggaccgcgtggactatgacagacagtccgggagtgcagtcatcacgtttgtggagattggagtggctgacaagattttgaaaaagaaagaataccctctttatataaatcaaacctgccatagagttactgtttctccatacacagaaatacacttgaaaaagtatcagatattttcaggaacatctaagaggacagtgcttctgacaggaatggaaggcattcaaatggatgaagaaattgtggaggatttaattaacattcactttcaacgggcaaagaatggaggtggagaagtagatgtggtcaagtgttctctaggtcaacctcacatagcatactttgaagaatagacttaacagaatcatgaaaactatagctttttaacccggattactgtaaatgtttgacaaaaatgaatatgcttttccttaaaaaatgaaaactttaatttttaccatccatttatgtttagatacaaaacttatttccatgtttctgaatcttctttgtttcaaatggtgctgcatgttttcaactacaataagtgcactgtaataaaaagttttgtttatagatta

SEQ ID NO: 159932 - DNA, 581 bp, Homo sapiens
  Payload ID: 11278
  Gene Symbol: NMI
  Gene Name: N-myc (and STAT) interactor
  ENST ID: ENST00000414946
  CDS Start-End: 496-581
gacaaccatgtttagtatttgagcattggttaaatgctaaagaaaaatcgccgttaaagcagttttctttttcactgtctttttcttttcgcggggaacccagctgttcctgcgagggccacctcctcaggaagaccccgcagctctcccgcggcgcttctgcaggaggcagcgacagtttcgagaacccgggccttcccctcccagtgcctcccggggttccggcgtttcaggcgctgctgttttccgggaagggcaggcgcgctgggccttggggagctgcgctcggcgggcggacgcggtagagacggggtttcaccgtgttaaccaggatggatacgatctcctgacctcgtgatccgcacgcctcggcctcccaaagtgctgggattacaggcgtgagccaccgcgcccggccctcgctgttttctccgagtgtctctggagatagtccttaggaaaacggatttcttaagaaaacgattcttggggatcatggaagctgataaagatgacacacaacaaattcttaaggagcattcgccagatgaatttataaaagatgaacaaaataagggact

SEQ ID NO: 159933 - DNA, 3014 bp, Homo sapiens
  Payload ID: 11279
  Gene Symbol: NDRG1
  Gene Name: N-myc downstream regulated 1
  Uniprot ID: Q92597
  ENST ID: ENST00000323851
  CDS Start-End: 123-1307
cccagctggtgctgaagctcgtcagttcaccatccgccctcggcttccgcggggcgctgggccgccagcctcggcaccgtcctttcctttctccctcgcgttaggcaggtgacagcagggacatgtctcgggagatgcaggatgtagacctcgctgaggtgaagcctttggtggagaaaggggagaccatcaccggcctcctgcaagagtttgatgtccaggagcaggacatcgagactttacatggctctgttcacgtcacgctgtgtgggactcccaagggaaaccggcctgtcatcctcacctaccatgacatcggcatgaaccacaaaacctgctacaaccccctcttcaactacgaggacatgcaggagatcacccagcactttgccgtctgccacgtggacgcccctggccagcaggacggcgcagcctccttccccgcagggtacatgtacccctccatggatcagctggctgaaatgcttcctggagtccttcaacagtttgggctgaaaagcattattggcatgggaacaggagcaggcgcctacatcctaactcgatttgctctaaacaaccctgagatggtggagggccttgtccttatcaacgtgaacccttgtgcggaaggctggatggactgggccgcctccaagatctcaggatggacccaagctctgccggacatggtggtgtcccacctttttgggaaggaagaaatgcagagtaacgtggaagtggtccacacctaccgccagcacattgtgaatgacatgaaccccggcaacctgcacctgttcatcaatgcctacaacagccggcgcgacctggagattgagcgaccaatgccgggaacccacacagtcaccctgcagtgccctgctctgttggtggttggggacagctcgcctgcagtggatgccgtggtggagtgcaactcaaaattggacccaacaaagaccactctcctcaagatggcggactgtggcggcctcccgcagatctcccagccggccaagctcgctgaggccttcaagtacttcgtgcagggcatgggatacatgccctcggctagcatgacccgcctgatgcggtcccgcacagcctctggttccagcgtcacttctctggatggcacccgcagccgctcccacaccagcgagggcacccgaagccgctcccacaccagcgagggcacccgcagccgctcgcacaccagcgagggggcccacctggacatcacccccaactcgggtgctgctgggaacagcgccgggcccaagtccatggaggtctcctgctaggcggcctgcccagctgccgcccccggactctgatctctgtagtggccccctcctccccggccccttttcgccccctgcctgccatactgcgcctaactcggtattaatccaaagcttattttgtaagagtgagctctggtggagacaaatgaggtctattacgtgggtgccctctccaaaggcggggtggcggtggaccaaaggaaggaagcaagcatctccgcatcgcatcctcttccattaaccagtggccggttgccactctcctcccctccctcagagacaccaaactgccaaaaacaagacgcgtagcagcacacacttcacaaagccaagcctaggccgccctgagcatcctggttcaaacgggtgcctggtcagaaggccagccgcccacttcccgtttcctctttaactgaggagaagctgatccagtttccggaaacaaaatccttttctcatttggggaggggggtaatagtgacatgcaggcacctcttttaaacaggcaaaacaggaagggggaaaaggtgggattcatgtcgaggctagaggcatttggaacaacaaatctacgtagttaacttgaagaaaccgatttttaaagttggtgcatctagaaagctttgaatgcagaagcaaacaagcttgatttttctagcatcctcttaatgtgcagcaaaagcaggcgacaaaatctcctggctttacagacaaaaatatttcagcaaacgttgggcatcatggtttttgaaggctttagttctgctttctgcctctcctccacagccccaacctcccacccctgatacatgagccagtgattattcttgttcagggagaagatcatttagatttgttttgcattccttagaatggagggcaacattccacagctgccctggctgtgatgagtgtccttgcaggggccggagtaggagcactggggtgggggtggaattggggttactcgatgtaagggattccttgttgttgtgttgagatccagtgcagttgtgatttctgtggatcccagcttggttccaggaattttgtgtgattggcttaaatccagttttcaatcttcgacagctgggctggaacgtgaactcagtagctgaacctgtctgacccggtcacgttcttggatcctcagaactctttgctcttgtcggggtgggggtgggaactcacgtggggagcggtggctgagaaaatgtaaggattctggaatacatattccatgggactttccttccctctcctgcttcctcttttcctgctccctaacctttcgccgaatggggcagcaccactgacgtttctgggcggccagtgcggctgccaggttcctgtactactgccttgtacttttcattttggctcaccgtggattttctcataggaagtttggtcagagtgaattgaatattgtaagtcagccactgggacccgaggatttctgggaccccgcagttgggaggaggaagtagtccagccttccaggtggcgtgagaggcaatgactcgttacctgccgcccatcaccttggaggccttccctggccttgagtagaaaagtcggggatcggggcaagagaggctgagtacggatgggaaactattgtgcacaagtctttccagaggagtttcttaatgagatatttgtatttatttccagaccaataaatttgtaactttgcagcgg

SEQ ID NO: 159934 - DNA, 3755 bp, Homo sapiens
  Payload ID: 11279
  Gene Symbol: NDRG1
  Gene Name: N-myc downstream regulated 1
  Uniprot ID: Q92597
  ENST ID: ENST00000414097
  CDS Start-End: 869-2053
acacaaacgcctcctccgggcagggcacacgcgcccgctgcacaggccgaggccctggactcggaggggactgcagagccgacccacaacccgggccccgatgcccctcccggccgcgcccctacgactgcttgcgcaacaggcggcggctccagtgggcgcccgccgcgcgctgccggagcccagcccagcccggcgcgcccgggaggagggagcagggagcggggaaggggtgtgtcccggctgcgtgctgggactgcgagggtctgggaggggcgaggcgcgggggcggggccgcggcgcctataaagtcgccctccgcccggacgtaaacaaacctcgcctggctcccagctggtgctgaagctcgtcagttcaccatccgccctcggcttccgcggggcgctgggccgccagcctcggcaccgtcctttcctttctccctcgcgttaggtaagcccgcgccctcttctcccaggcgcgacgcggagcagaaaggggccgcccgtgcggtgccgctggagcgccaggaccgccctttgtagccccgcgtactccaggagtaagcgccccggagctgcaagtgcgcggtcaccccggggcgcgggcgcgagggggctttgggtgcagacaccgctgaagtggggggttcaattacggaaagggaggaaaaaaagacagggtcccattcatctcccccctagctggggattggggttctggaggtcgggaagggggcgatgagacggtccgaaaaaataccaggatagcgtttcctggcgtcgtctccgaatcccagctggcgccgctggcaggggtgcgcgctggacgtgggtgcagaagggactaggcaggtgacagcagggacatgtctcgggagatgcaggatgtagacctcgctgaggtgaagcctttggtggagaaaggggagaccatcaccggcctcctgcaagagtttgatgtccaggagcaggacatcgagactttacatggctctgttcacgtcacgctgtgtgggactcccaagggaaaccggcctgtcatcctcacctaccatgacatcggcatgaaccacaaaacctgctacaaccccctcttcaactacgaggacatgcaggagatcacccagcactttgccgtctgccacgtggacgcccctggccagcaggacggcgcagcctccttccccgcagggtacatgtacccctccatggatcagctggctgaaatgcttcctggagtccttcaacagtttgggctgaaaagcattattggcatgggaacaggagcaggcgcctacatcctaactcgatttgctctaaacaaccctgagatggtggagggccttgtccttatcaacgtgaacccttgtgcggaaggctggatggactgggccgcctccaagatctcaggatggacccaagctctgccggacatggtggtgtcccacctttttgggaaggaagaaatgcagagtaacgtggaagtggtccacacctaccgccagcacattgtgaatgacatgaaccccggcaacctgcacctgttcatcaatgcctacaacagccggcgcgacctggagattgagcgaccaatgccgggaacccacacagtcaccctgcagtgccctgctctgttggtggttggggacagctcgcctgcagtggatgccgtggtggagtgcaactcaaaattggacccaacaaagaccactctcctcaagatggcggactgtggcggcctcccgcagatctcccagccggccaagctcgctgaggccttcaagtacttcgtgcagggcatgggatacatgccctcggctagcatgacccgcctgatgcggtcccgcacagcctctggttccagcgtcacttctctggatggcacccgcagccgctcccacaccagcgagggcacccgaagccgctcccacaccagcgagggcacccgcagccgctcgcacaccagcgagggggcccacctggacatcacccccaactcgggtgctgctgggaacagcgccgggcccaagtccatggaggtctcctgctaggcggcctgcccagctgccgcccccggactctgatctctgtagtggccccctcctccccggccccttttcgccccctgcctgccatactgcgcctaactcggtattaatccaaagcttattttgtaagagtgagctctggtggagacaaatgaggtctattacgtgggtgccctctccaaaggcggggtggcggtggaccaaaggaaggaagcaagcatctccgcatcgcatcctcttccattaaccagtggccggttgccactctcctcccctccctcagagacaccaaactgccaaaaacaagacgcgtagcagcacacacttcacaaagccaagcctaggccgccctgagcatcctggttcaaacgggtgcctggtcagaaggccagccgcccacttcccgtttcctctttaactgaggagaagctgatccagtttccggaaacaaaatccttttctcatttggggaggggggtaatagtgacatgcaggcacctcttttaaacaggcaaaacaggaagggggaaaaggtgggattcatgtcgaggctagaggcatttggaacaacaaatctacgtagttaacttgaagaaaccgatttttaaagttggtgcatctagaaagctttgaatgcagaagcaaacaagcttgatttttctagcatcctcttaatgtgcagcaaaagcaggcgacaaaatctcctggctttacagacaaaaatatttcagcaaacgttgggcatcatggtttttgaaggctttagttctgctttctgcctctcctccacagccccaacctcccacccctgatacatgagccagtgattattcttgttcagggagaagatcatttagatttgttttgcattccttagaatggagggcaacattccacagctgccctggctgtgatgagtgtccttgcaggggccggagtaggagcactggggtgggggtggaattggggttactcgatgtaagggattccttgttgttgtgttgagatccagtgcagttgtgatttctgtggatcccagcttggttccaggaattttgtgtgattggcttaaatccagttttcaatcttcgacagctgggctggaacgtgaactcagtagctgaacctgtctgacccggtcacgttcttggatcctcagaactctttgctcttgtcggggtgggggtgggaactcacgtggggagcggtggctgagaaaatgtaaggattctggaatacatattccatgggactttccttccctctcctgcttcctcttttcctgctccctaacctttcgccgaatggggcagcaccactgacgtttctgggcggccagtgcggctgccaggttcctgtactactgccttgtacttttcattttggctcaccgtggattttctcataggaagtttggtcagagtgaattgaatattgtaagtcagccactgggacccgaggatttctgggaccccgcagttgggaggaggaagtagtccagccttccaggtggcgtgagaggcaatgactcgttacctgccgcccatcaccttggaggccttccctggccttgagtagaaaagtcggggatcggggcaagagaggctgagtacggatgggaaactattgtgcacaagtctttccagaggagtttcttaatgagatatttgtatttatttccagaccaataaatttgtaactttgc

SEQ ID NO: 159935 - DNA, 1385 bp, Homo sapiens
  Payload ID: 11279
  Gene Symbol: NDRG1
  Gene Name: N-myc downstream regulated 1
  Uniprot ID: Q92597
  ENST ID: ENST00000522476
  CDS Start-End: 219-1205
aaacctcgcctggctcccagctggtgctgaagctcgtcagttcaccatccgccctcggcttccgcggggcgctgggccgccagcctcggcaccgtcctttcctttctccctcgcgttaggagcaggacatcgagactttacatggctctgttcacgtcacgctgtgtgggactcccaagggaaaccggcctgtcatcctcacctaccatgacatcggcatgaaccacaaaacctgctacaaccccctcttcaactacgaggacatgcaggagatcacccagcactttgccgtctgccacgtggacgcccctggccagcaggacggcgcagcctccttccccgcagggtacatgtacccctccatggatcagctggctgaaatgcttcctggagtccttcaacagtttgggctgaaaagcattattggcatgggaacaggagcaggcgcctacatcctaactcgatttgctctaaacaaccctgagatggtggagggccttgtccttatcaacgtgaacccttgtgcggaaggctggatggactgggccgcctccaagatctcaggatggacccaagctctgccggacatggtggtgtcccacctttttgggaaggaagaaatgcagagtaacgtggaagtggtccacacctaccgccagcacattgtgaatgacatgaaccccggcaacctgcacctgttcatcaatgcctacaacagccggcgcgacctggagattgagcgaccaatgccgggaacccacacagtcaccctgcagtgccctgctctgttggtggttggggacagctcgcctgcagtggatgccgtggtggagtgcaactcaaaattggacccaacaaagaccactctcctcaagatggcggactgtggcggcctcccgcagatctcccagccggccaagctcgctgaggccttcaagtacttcgtgcagggcatgggatacatgccctcggctagcatgacccgcctgatgcggtcccgcacagcctctggttccagcgtcacttctctggatggcacccgcagccgctcccacaccagcgagggcacccgaagccgctcccacaccagcgagggcacccgcagccgctcgcacaccagcgagggggcccacctggacatcacccccaactcgggtgctgctgggaacagcgccgggcccaagtccatggaggtctcctgctaggcggcctgcccagctgccgcccccggactctgatctctgtagtggccccctcctccccggccccttttcgccccctgcctgccatactgcgcctaactcggtattaatccaaagcttattttgtaagagtgagctctggtggagacaaatgaggtctattacgtgggtgccctctccaaa

SEQ ID NO: 159936 - DNA, 582 bp, Homo sapiens
  Payload ID: 11279
  Gene Symbol: NDRG1
  Gene Name: N-myc downstream regulated 1
  ENST ID: ENST00000520230
  CDS Start-End: 3-582
agatggcagtccctccacctgggatcatgaagcaggcaggtgacagcagggacatgtctcgggagatgcaggatgtagacctcgctgaggtgaagcctttggtggagaaaggggagaccatcaccggcctcctgcaagagtttgatgtccaggagcaggacatcgagactttacatggctctgttcacgtcacgctgtgtgggactcccaagggaaaccggcctgtcatcctcacctaccatgacatcggcatgaaccacaaaacctgctacaaccccctcttcaactacgaggacatgcaggagatcacccagcactttgccgtctgccacgtggacgcccctggccagcaggacggcgcagcctccttccccgcagggtacatgtacccctccatggatcagctggctgaaatgcttcctggagtccttcaacagtttgggctgaaaagcattattggcatgggaacaggagcaggcgcctacatcctaactcgatttgctctaaacaaccctgagatggtggagggccttgtccttatcaacgtgaacccttgtgcggaaggctggatggactgggccg

SEQ ID NO: 159937 - DNA, 581 bp, Homo sapiens
  Payload ID: 11279
  Gene Symbol: NDRG1
  Gene Name: N-myc downstream regulated 1
  ENST ID: ENST00000522890
  CDS Start-End: 108-581
aaaggggccgcccgtgcggtgccgctggagcgccaggaccgccctttgtagccccgcgtactccaggagtaagcgccccggagctgcaagcaggtgacagcagggacatgtctcgggagatgcaggatgtagacctcgctgaggtgaagcctttggtggagaaaggggagaccatcaccggcctcctgcaagagtttgatgtccaggagcaggacatcgagactttacatggctctgttcacgtcacgctgtgtgggactcccaagggaaaccggcctgtcatcctcacctaccatgacatcggcatgaaccacaaaacctgctacaaccccctcttcaactacgaggacatgcaggagatcacccagcactttgccgtctgccacgtggacgcccctggccagcaggacggcgcagcctccttccccgcagggtacatgtacccctccatggatcagctggctgaaatgcttcctggagtccttcaacagtttgggctgaaaagcattattggcatgggaacaggagcaggcgcctacatcctaactcgatttgctctaaacaaccctgagatggtggag

SEQ ID NO: 159938 - DNA, 558 bp, Homo sapiens
  Payload ID: 11279
  Gene Symbol: NDRG1
  Gene Name: N-myc downstream regulated 1
  ENST ID: ENST00000518480
  CDS Start-End: 259-558
aaacaaacctcgcctggctcccagctggtgctgaagctcgtcagttcaccatccgccctcggcttccgcggggcgctgggccgccagcctcggcaccgtcctttcctttctccctcgcgttagaccatcaccggcctcctgcaagagtttgatgtccaggagcaggacatcgagactttacatggctctgttcacgtcacgctgtgtgggactcccaagggaaaccggcctgtcatcctcacctaccatgacatcggcatgaaccacaaaacctgctacaaccccctcttcaactacgaggacatgcaggagatcacccagcactttgccgtctgccacgtggacgcccctggccagcaggacggcgcagcctccttccccgcagggtacatgtacccctccatggatcagctggctgaaatgcttcctggagtccttcaacagtttgggctgaaaagcattattggcatgggaacaggagcaggcgcctacatcctaactcgatttgctctaaacaaccctgagatggtggagggccttgtccttatcaacgtgaac

SEQ ID NO: 159939 - DNA, 530 bp, Homo sapiens
  Payload ID: 11279
  Gene Symbol: NDRG1
  Gene Name: N-myc downstream regulated 1
  ENST ID: ENST00000522738
  CDS Start-End: 30-530
agtcccgtagcacacacagggcggtgtgcatgtcaggcagccgagagtcctgcaccgtggggtgtgtatgtgtgttcacgcgcatgcgtgtgcctgtgtgtctgtgcgtctgcatcaccaaccttctgttagggctaactgtgaggctgaagcttgcactatgcctatacgtggcaggtgacagcagggacatgtctcgggagatgcaggatgtagacctcgctgaggtgaagcctttggtggagaaaggggagaccatcaccggcctcctgcaagagtttgatgtccaggagcaggacatcgagactttacatggctctgttcacgtcacgctgtgtgggactcccaagggaaaccggcctgtcatcctcacctaccatgacatcggcatgaaccacaaaacctgctacaaccccctcttcaactacgaggacatgcaggagatcacccagcactttgccgtctgccacgtggacgcccctggccagcaggacggcgcagcctccttccccgcagggtacatgtacccc

SEQ ID NO: 159940 - DNA, 888 bp, Homo sapiens
  Payload ID: 11279
  Gene Symbol: NDRG1
  Gene Name: N-myc downstream regulated 1
  ENST ID: ENST00000518176
  CDS Start-End: 123-548
cccagctggtgctgaagctcgtcagttcaccatccgccctcggcttccgcggggcgctgggccgccagcctcggcaccgtcctttcctttctccctcgcgttaggcaggtgacagcagggacatgtctcgggagatgcaggatgtagacctcgctgaggtgaagcctttggtggagtgcaactcaaaattggacccaacaaagaccactctcctcaagatggcggactgtggcggcctcccgcagatctcccagccggccaagctcgctgaggccttcaagtacttcgtgcagggcatgggatacatgccctcggctagcatgacccgcctgatgcggtcccgcacagcctctggttccagcgtcacttctctggatggcacccgcagccgctcccacaccagcgagggcacccgaagccgctcccacaccagcgagggcacccgcagccgctcgcacaccagcgagggggcccacctggacatcacccccaactcgggtgctgctgggaacagcgccgggcccaagtccatggaggtctcctgctaggcggcctgcccagctgccgcccccggactctgatctctgtagtggccccctcctccccggccccttttcgccccctgcctgccatactgcgcctaactcggtattaatccaaagcttattttgtaagagtgagctctggtggagacaaatgaggtctattacgtgggtgccctctccaaaggcggggtggcggtggaccaaaggaaggaagcaagcatctccgcatcgcatcctcttccattaaccagtggccggttgccactctcctcccctccctcagagacaccaaactgccaaaaacaagacgcgtagcagcacacacttcacaaagccaagccta

SEQ ID NO: 159941 - DNA, 2918 bp, Homo sapiens
  Payload ID: 11279
  Gene Symbol: NDRG1
  Gene Name: N-myc downstream regulated 1
  ENST ID: ENST00000517599
  CDS Start-End: 138-425
aaacctcgcctggctcccagctggtgctgaagctcgtcagttcaccatccgccctcggcttccgcggggcgctgggccgccagcctcggcaccgtcctttcctttctccctcgcgttaggcaggtgacagcagggacatgtctcgggagatgcaggatgtagacctcgctgaggtgaagcctttggtggagaaaggggagaccatcaccggcctcctgcaagagtttgatgtccagacaaaacctgctacaaccccctcttcaactacgaggacatgcaggagatcacccagcactttgccgtctgccacgtggacgcccctggccagcaggacggcgcagcctccttccccgcagggtacatgtacccctccatggatcagctggctgaaatgcttcctggagtccttcaacagtttgggctgaaaagcattattggcatgggaacaggagcaggcgcctacatcctaactcgatttgctctaaacaaccctgagatggtggagggccttgtccttatcaacgtgaacccttgtgcggaaggctggatggactgggccgcctccaagatctcaggatggacccaagctctgccggacatggtggtgtcccacctttttgggaaggaagaaatgcagagtaacgtggaagtggtccacacctaccgccagcacattgtgaatgacatgaaccccggcaacctgcacctgttcatcaatgcctacaacagccggcgcgacctggagattgagcgaccaatgccgggaacccacacagtcaccctgcagtgccctgctctgttggtggttggggacagctcgcctgcagtggatgccgtggtggagtgcaactcaaaattggacccaacaaagaccactctcctcaagatggcggactgtggcggcctcccgcagatctcccagccggccaagctcgctgaggccttcaagtacttcgtgcagggcatgggatacatgccctcggctagcatgacccgcctgatgcggtcccgcacagcctctggttccagcgtcacttctctggatggcacccgcagccgctcccacaccagcgagggcacccgaagccgctcccacaccagcgagggcacccgcagccgctcgcacaccagcgagggggcccacctggacatcacccccaactcgggtgctgctgggaacagcgccgggcccaagtccatggaggtctcctgctaggcggcctgcccagctgccgcccccggactctgatctctgtagtggccccctcctccccggccccttttcgccccctgcctgccatactgcgcctaactcggtattaatccaaagcttattttgtaagagtgagctctggtggagacaaatgaggtctattacgtgggtgccctctccaaaggcggggtggcggtggaccaaaggaaggaagcaagcatctccgcatcgcatcctcttccattaaccagtggccggttgccactctcctcccctccctcagagacaccaaactgccaaaaacaagacgcgtagcagcacacacttcacaaagccaagcctaggccgccctgagcatcctggttcaaacgggtgcctggtcagaaggccagccgcccacttcccgtttcctctttaactgaggagaagctgatccagtttccggaaacaaaatccttttctcatttggggaggggggtaatagtgacatgcaggcacctcttttaaacaggcaaaacaggaagggggaaaaggtgggattcatgtcgaggctagaggcatttggaacaacaaatctacgtagttaacttgaagaaaccgatttttaaagttggtgcatctagaaagctttgaatgcagaagcaaacaagcttgatttttctagcatcctcttaatgtgcagcaaaagcaggcgacaaaatctcctggctttacagacaaaaatatttcagcaaacgttgggcatcatggtttttgaaggctttagttctgctttctgcctctcctccacagccccaacctcccacccctgatacatgagccagtgattattcttgttcagggagaagatcatttagatttgttttgcattccttagaatggagggcaacattccacagctgccctggctgtgatgagtgtccttgcaggggccggagtaggagcactggggtgggggtggaattggggttactcgatgtaagggattccttgttgttgtgttgagatccagtgcagttgtgatttctgtggatcccagcttggttccaggaattttgtgtgattggcttaaatccagttttcaatcttcgacagctgggctggaacgtgaactcagtagctgaacctgtctgacccggtcacgttcttggatcctcagaactctttgctcttgtcggggtgggggtgggaactcacgtggggagcggtggctgagaaaatgtaaggattctggaatacatattccatgggactttccttccctctcctgcttcctcttttcctgctccctaacctttcgccgaatggggcagcaccactgacgtttctgggcggccagtgcggctgccaggttcctgtactactgccttgtacttttcattttggctcaccgtggattttctcataggaagtttggtcagagtgaattgaatattgtaagtcagccactgggacccgaggatttctgggaccccgcagttgggaggaggaagtagtccagccttccaggtggcgtgagaggcaatgactcgttacctgccgcccatcaccttggaggccttccctggccttgagtagaaaagtcggggatcggggcaagagaggctgagtacggatgggaaactattgtgcacaagtctttccagaggagtttcttaatgagatatttgtatttatttccagaccaataaatttgtaactttgc

SEQ ID NO: 159942 - DNA, 550 bp, Homo sapiens
  Payload ID: 11279
  Gene Symbol: NDRG1
  Gene Name: N-myc downstream regulated 1
  ENST ID: ENST00000519580
  CDS Start-End: 77-550
gagaggctggtggcgcttcagtcccgtagcacacacagggcggtgtgcatgtgtgagtgcaggtgacagcagggacatgtctcgggagatgcaggatgtagacctcgctgaggtgaagcctttggtggagaaaggggagaccatcaccggcctcctgcaagagtttgatgtccaggagcaggacatcgagactttacatggctctgttcacgtcacgctgtgtgggactcccaagggaaaccggcctgtcatcctcacctaccatgacatcggcatgaaccacaaaacctgctacaaccccctcttcaactacgaggacatgcaggagatcacccagcactttgccgtctgccacgtggacgcccctggccagcaggacggcgcagcctccttccccgcagggtacatgtacccctccatggatcagctggctgaaatgcttcctggagtccttcaacagtttgggctgaaaagcattattggcatgggaacaggagcaggcgcctacatcctaactcgatttgctctaaacaaccctgagatggtggag

SEQ ID NO: 159943 - DNA, 1103 bp, Homo sapiens
  Payload ID: 11279
  Gene Symbol: NDRG1
  Gene Name: N-myc downstream regulated 1
  ENST ID: ENST00000522377
  CDS Start-End: 125-775
ctcccagctggtgctgaagctcgtcagttcaccatccgccctcggcttccgcggggcgctgggccgccagcctcggcaccgtcctttcctttctccctcgcgttaggcaggtgacagcagggacatgtctcgggagatgcaggatgtagacctcgctgaggtgaagcctttggtggagaaaggggagaccatcaccggcctcctgcaagagtttgatgtccaggagcaggacatcgagactttacatggctctgttcacgtcacgctgtgtgggactcccaagggaaaccggcctgtcatcctcacctaccatgacatcggcatgaaccacaaaacctgctacaaccccctcttcaactacgaggacatgcaggagatcacccagcactttgccgtctgccacgtggacgcccctggccagcaggacggcgcagcctccttccccgcagggtacatgtacccctccatggatcagctggctgaaatgcttcctggagtccttcaacagtttgggctgaaaagcattattggcatgggaacaggagcaggcgcctacatcctaactcgatttgctctaaacaaccctgagatggtggagggccttgtccttatcaacgtgaacccttgtgcggaaggctggatggactgggccgcctccaagcctttcgattaccaggcattggtattagatactgtgatgtgtgcagttacttcttgcagtccttcccttgaccttgtggccttgaagttcctggcactcccagttccagattagaagtctgagacccagagatctcaggatggacccaagctctgccggacatggtggtgtcccacctttttgggaaggaagaaatgcagagtaacgtggaagtggtccacacctaccgccagcacattgtgaatgacatgaaccccggcaacctgcacctgttcatcaatgcctacaacagccggcgcgacctggagattgagcgaccaatgccgggaacccacacagtcaccctgcagtgccctgctctgttggtggttggggacagctcgcctgcagtggatgccgtggtggagtgcaactcaaaattggacccaacaaagaccactct

SEQ ID NO: 159944 - DNA, 709 bp, Homo sapiens
  Payload ID: 11279
  Gene Symbol: NDRG1
  Gene Name: N-myc downstream regulated 1
  ENST ID: ENST00000521544
  CDS Start-End: 310-709
aaacctcgcctggctcccagctggtgctgaagctcgtcagttcaccatccgccctcggcttccgcggggcgctgggccgccagcctcggcaccgtcctttcctttctccctcgcgttagaaggagatcacagacaccagaagacagcagcttctgccagaactgggtccttccatgattctcaggtggtgactttgaatcccagaaaaagtgttttggggagagtggagtgaaggaagagtgtgaacattggatctgactccactccagcccctgtgctgcagccagcagggcaggtgacagcagggacatgtctcgggagatgcaggatgtagacctcgctgaggtgaagcctttggtggagaaaggggagaccatcaccggcctcctgcaagagtttgatgtccaggagcaggacatcgagactttacatggctctgttcacgtcacgctgtgtgggactcccaagggaaaccggcctgtcatcctcacctaccatgacatcggcatgaaccacaaaacctgctacaaccccctcttcaactacgaggacatgcaggagatcacccagcactttgccgtctgccacgtggacgcccctggccagcaggacggcgcagcctccttccccgcagggtacatgtacccctccatggatcagctggctgaaatgcttcctggagtccttcaacagtttgggctgaaaagca

SEQ ID NO: 159945 - DNA, 536 bp, Homo sapiens
  Payload ID: 11279
  Gene Symbol: NDRG1
  Gene Name: N-myc downstream regulated 1
  ENST ID: ENST00000520943
  CDS Start-End: 67-536
agcttgccctgggtctggtcctgggctcagtggcaaattcaacgctgggcaggtggcctgaggacaatgacggtgccagctgcaggtgacagcagggacatgtctcgggagatgcaggatgtagacctcgctgaggtgaagcctttggtggagaaaggggagaccatcaccggcctcctgcaagagtttgatgtccaggagcaggacatcgagactttacatggctctgttcacgtcacgctgtgtgggactcccaagggaaaccggcctgtcatcctcacctaccatgacatcggcatgaaccacaaaacctgctacaaccccctcttcaactacgaggacatgcaggagatcacccagcactttgccgtctgccacgtggacgcccctggccagcaggacggcgcagcctccttccccgcagggtacatgtacccctccatggatcagctggctgaaatgcttcctggagtccttcaacagtttgggctgaaaagcattattggcatgggaacaggagcaggcgcctacatcct

SEQ ID NO: 159946 - DNA, 729 bp, Homo sapiens
  Payload ID: 11279
  Gene Symbol: NDRG1
  Gene Name: N-myc downstream regulated 1
  ENST ID: ENST00000519228
  CDS Start-End: 235-729
agtgggcaaggtccagtgagtgtgcttagaactgggaagatgaggggaagggtaagcgctgggcggcggtgggcaagatggacgagattaaacgggagcgaggatttcagcgagagctttggcgacacggaaggctgagaatcggagggagcctgtcgggcgaaagcgaaggcggctgctgggcaggcagccgaatccggctggagagccgagctggcaggtgacagcagggacatgtctcgggagatgcaggatgtagacctcgctgaggtgaagcctttggtggagaaaggggagaccatcaccggcctcctgcaagagtttgatgtccaggagcaggacatcgagactttacatggctctgttcacgtcacgctgtgtgggactcccaagggaaaccggcctgtcatcctcacctaccatgacatcggcatgaaccacaaaacctgctacaaccccctcttcaactacgaggacatgcaggagatcacccagcactttgccgtctgccacgtggacgcccctggccagcaggacggcgcagcctccttccccgcagggtacatgtacccctccatggatcagctggctgaaatgcttcctggagtccttcaacagtttgggctgaaaagcattattggcatgggaacaggagcaggcgcctacatcctaactcgatttgctctaaacaaccctgagatggtggagggccttgtccttatcaacgtg

SEQ ID NO: 159947 - DNA, 562 bp, Homo sapiens
  Payload ID: 11279
  Gene Symbol: NDRG1
  Gene Name: N-myc downstream regulated 1
  ENST ID: ENST00000523892
  CDS Start-End: 435-562
aaacaaacctcgcctggctcccagctggtgctgaagctcgtcagttcaccatccgccctcggcttccgcggggcgctgggccgccagcctcggcaccgtcctttcctttctccctcgcgttaggcaggtgacagcagggacatgtctcgggagatgcaggatgtagacctcgctgaggtgaagcctttggtggagaaaggggagattgagggaaatgcttagaggtctccactgcctcttctactcacaagagactgaaatttaatccaggtccagatgacagcagccatggaaaaaataccatcaccggcctcctgcaagagtttgatgtccaggagcaggacatcgagactttacatggctctgttcacgtcacgctgtgtgggactcccaagggaaaccggcctgtcatcctcacctaccatgacatcggcatgaaccacaaaacctgctacaaccccctcttcaactacgaggacatgcaggagatcacccagcactttgccgtctgccacgtggacgcccctggccagcaggacggcgcagcctccttccccgcagg

SEQ ID NO: 159948 - DNA, 560 bp, Homo sapiens
  Payload ID: 11279
  Gene Symbol: NDRG1
  Gene Name: N-myc downstream regulated 1
  ENST ID: ENST00000518066
  CDS Start-End: 138-449
aaacctcgcctggctcccagctggtgctgaagctcgtcagttcaccatccgccctcggcttccgcggggcgctgggccgccagcctcggcaccgtcctttcctttctccctcgcgttaggcaggtgacagcagggacatgtctcgggagatgcaggatgtagacctcgctgaggccttcaagtacttcgtgcagggcatgggatacatgccctcggctagcatgacccgcctgatgcggtcccgcacagcctctggttccagcgtcacttctctggatggcacccgcagccgctcccacaccagcgagggcacccgaagccgctcccacaccagcgagggcacccgcagccgctcgcacaccagcgagggggcccacctggacatcacccccaactcgggtgctgctgggaacagcgccgggcccaagtccatggaggtctcctgctaggcggcctgcccagctgccgcccccggactctgatctctgtagtggccccctcctccccggccccttttcgccccctgcctgccatactgcgcctaactcggtattaatcca

SEQ ID NO: 159949 - DNA, 2975 bp, Homo sapiens
  Payload ID: 11279
  Gene Symbol: NDRG1
  Gene Name: N-myc downstream regulated 1
  Uniprot ID: Q92597
  ENST ID: ENST00000537882
  CDS Start-End: 327-1268
gcgggggcggggccgcggcgcctataaagtcgccctccgcccggacgtaaacaaacctcgcctggctcccagctggtgctgaagctcgtcagttcaccatccgccctcggcttccgcggggcgctgggccgccagcctcggcaccgtcctttcctttctccctcgcgttaggcaggtgacagcagggacatgtctcgggagatgcaggatgtagacctcgctgaggtgaagcctttggtggagaaaggggagaccatcaccggcctcctgcaagagtttgatgtccagacaaaacctgctacaaccccctcttcaactacgaggacatgcaggagatcacccagcactttgccgtctgccacgtggacgcccctggccagcaggacggcgcagcctccttccccgcagggtacatgtacccctccatggatcagctggctgaaatgcttcctggagtccttcaacagtttgggctgaaaagcattattggcatgggaacaggagcaggcgcctacatcctaactcgatttgctctaaacaaccctgagatggtggagggccttgtccttatcaacgtgaacccttgtgcggaaggctggatggactgggccgcctccaagatctcaggatggacccaagctctgccggacatggtggtgtcccacctttttgggaaggaagaaatgcagagtaacgtggaagtggtccacacctaccgccagcacattgtgaatgacatgaaccccggcaacctgcacctgttcatcaatgcctacaacagccggcgcgacctggagattgagcgaccaatgccgggaacccacacagtcaccctgcagtgccctgctctgttggtggttggggacagctcgcctgcagtggatgccgtggtggagtgcaactcaaaattggacccaacaaagaccactctcctcaagatggcggactgtggcggcctcccgcagatctcccagccggccaagctcgctgaggccttcaagtacttcgtgcagggcatgggatacatgccctcggctagcatgacccgcctgatgcggtcccgcacagcctctggttccagcgtcacttctctggatggcacccgcagccgctcccacaccagcgagggcacccgaagccgctcccacaccagcgagggcacccgcagccgctcgcacaccagcgagggggcccacctggacatcacccccaactcgggtgctgctgggaacagcgccgggcccaagtccatggaggtctcctgctaggcggcctgcccagctgccgcccccggactctgatctctgtagtggccccctcctccccggccccttttcgccccctgcctgccatactgcgcctaactcggtattaatccaaagcttattttgtaagagtgagctctggtggagacaaatgaggtctattacgtgggtgccctctccaaaggcggggtggcggtggaccaaaggaaggaagcaagcatctccgcatcgcatcctcttccattaaccagtggccggttgccactctcctcccctccctcagagacaccaaactgccaaaaacaagacgcgtagcagcacacacttcacaaagccaagcctaggccgccctgagcatcctggttcaaacgggtgcctggtcagaaggccagccgcccacttcccgtttcctctttaactgaggagaagctgatccagtttccggaaacaaaatccttttctcatttggggaggggggtaatagtgacatgcaggcacctcttttaaacaggcaaaacaggaagggggaaaaggtgggattcatgtcgaggctagaggcatttggaacaacaaatctacgtagttaacttgaagaaaccgatttttaaagttggtgcatctagaaagctttgaatgcagaagcaaacaagcttgatttttctagcatcctcttaatgtgcagcaaaagcaggcgacaaaatctcctggctttacagacaaaaatatttcagcaaacgttgggcatcatggtttttgaaggctttagttctgctttctgcctctcctccacagccccaacctcccacccctgatacatgagccagtgattattcttgttcagggagaagatcatttagatttgttttgcattccttagaatggagggcaacattccacagctgccctggctgtgatgagtgtccttgcaggggccggagtaggagcactggggtgggggtggaattggggttactcgatgtaagggattccttgttgttgtgttgagatccagtgcagttgtgatttctgtggatcccagcttggttccaggaattttgtgtgattggcttaaatccagttttcaatcttcgacagctgggctggaacgtgaactcagtagctgaacctgtctgacccggtcacgttcttggatcctcagaactctttgctcttgtcggggtgggggtgggaactcacgtggggagcggtggctgagaaaatgtaaggattctggaatacatattccatgggactttccttccctctcctgcttcctcttttcctgctccctaacctttcgccgaatggggcagcaccactgacgtttctgggcggccagtgcggctgccaggttcctgtactactgccttgtacttttcattttggctcaccgtggattttctcataggaagtttggtcagagtgaattgaatattgtaagtcagccactgggacccgaggatttctgggaccccgcagttgggaggaggaagtagtccagccttccaggtggcgtgagaggcaatgactcgttacctgccgcccatcaccttggaggccttccctggccttgagtagaaaagtcggggatcggggcaagagaggctgagtacggatgggaaactattgtgcacaagtctttccagaggagtttcttaatgagatatttgtatttatttccagaccaataaatttgtaactttgcagcgg

SEQ ID NO: 159950 - DNA, 4879 bp, Homo sapiens
  Payload ID: 11280
  Gene Symbol: NMT1
  Gene Name: N-myristoyltransferase 1
  Uniprot ID: P30419
  ENST ID: ENST00000258960
  CDS Start-End: 19-1509
ctgctctcgcaactcaagatggcggacgagagtgagacagcagtgaagccgccggcacctccgctgccgcagatgatggaagggaacgggaacggccatgagcactgcagcgattgcgagaatgaggaggacaacagctacaaccggggtggtttgagtccagccaatgacactggagccaaaaagaagaaaaagaaacaaaaaaagaagaaagaaaaaggcagtgagacagattcagcccaggatcagcctgtgaagatgaactctttgccagcagagaggatccaggaaatacagaaggccattgagctgttctcagtgggtcagggacctgccaaaaccatggaggaggctagcaagcgaagctaccagttctgggatacgcagcccgtccccaagctgggcgaagtggtgaacacccatggccccgtggagcctgacaaggacaatatccgccaggagccctacaccctgccccagggcttcacctgggatgctttggacctgggcgatcgtggtgtgctaaaagaactgtacaccctcctgaatgagaactatgtggaagatgatgacaacatgttccgatttgattattccccggagtttcttttgtgggctctccggccacccggctggctcccccagtggcactgtggggttcgagtggtctcaagtcggaaattggttgggttcattagcgccatcccagcaaacatccatatctatgacacagagaagaagatggtagagatcaacttcctgtgtgtccacaagaagctgcgttccaagagggttgctccagttctgatccgagagatcaccaggcgggttcacctggagggcatcttccaagcagtttacactgccggggtggtactaccaaagcccgttggcacctgcaggtattggcatcggtccctaaacccacggaagctgattgaagtgaagttctcccacctgagcagaaatatgaccatgcagcgcaccatgaagctctaccgactgccagagactcccaagacagctgggctgcgaccaatggaaacaaaggacattccagtagtgcaccagctcctcaccaggtacttgaagcaatttcaccttacgcccgtcatgagccaggaggaggtggagcactggttctacccccaggagaatatcatcgacactttcgtggtggagaacgcaaacggagaggtgacagatttcctgagcttttatacgctgccctccaccatcatgaaccatccaacccacaagagtctcaaagctgcttattctttctacaacgttcacacccagacccctcttctagacctcatgagcgacgcccttgtcctcgccaaaatgaaagggtttgatgtgttcaatgcactggatctcatggagaacaaaaccttcctggagaagctcaagtttggcataggggacggcaacctgcagtattacctttacaattggaaatgccccagcatgggggcagagaaggttggactggtgctacaataaccagtcaccagtgcgattctggataaagccactgaaaattcgaaccaggaaatggaaccccaccactgttggtccaattttcacacacgtgagaatccctggcaaagggagcagaactgaaccggctttaccaaaccgccagcgaacttgacaattgtattgcgatggcgtgggctgcgtgacgtcacctccggtcgtgtctctggtctccgtgttttccagttaattacatcctcatgcagccgtgatcaagggaatgtaactgctgaaaactagctcgtgattggcatataatggagttaacgggtgaataataaaagtatatatatatattatatatatataaatattttaaatatctttcatgttccaaatgtacaaggatgtttggtctttaatgaaaagctgaatccagatcattcctcagaatgaggacccgaggacagtggcagacagacgcgttggcacagttcatggtttcctccagaggagacattggcttatcatggggaaaaagaggatctggagaacctcatccagctccccttctgaatcagctgggatgactggctttgagaaggaagggaagatggaacaggctcagatctcatgggatagcacgtggagctcttggctggggctgaccctgggcagggactttcctgcagggccagacctgcctgcattctgagacaaagcaatggacggtccgcagaagcagacctcattgattgagtcctttcttccatccccttggcctgctccctgtaggaagtcatcctgccaactgatttaaaagggctctttagccagttgttgccaaccttatagggatgagtcccctgtgagattttgcttttccactgcctgggatgatgcagtttgaagaggcccttggacctccttgtaacatcagggacctttggagaccattatcagtgtaagccctgcttagctcatcttagagcaaagagccagcaccctgatgtccctggggtggctaggcaggagtggcgtggggccaatacccagaccccttcagccaccagcccctggcctgtgccttccaacccattagccatttcttgttgtgcccctttccaagatacagcctgcaagtggtagcaagaagtgattagaggcagatctggacttggcaacagaagtggtttcccatctccattgtctgagtctgattttcgctgatgctgttttgtggatttttgtggtagtgatggttgtcagtgctgccagtttcccaaaacgtaatcaagcctctggtcacatggctgtcgatgtaggcattctggagtggtgttcagccaagtgaccgggcaaaattgggctgtgaaattgtacttccaggcttggatgtaatttttgctctagagagaagcaagtggtgggaaggaggtagcatgacgtgtggtgtgcgggtttccttgctgccgtcacctctccgctcatacaggaatgaagccttagccaggaggccaggctcagccctgtgccactcaccgaagccactttctacaggccagcaggggcttgttgcaggctgtgggttttggtgtggtttgtcagaggctaattctgcagagtttccaaaaccagaagacatcgtatgcttgggatgggggccgtgccacccgtgggaatgctgcccgctctgcagactgctgctagagccagcaactccactaaggtggattttcatcaggggcctgcagggccctcccttttcccattgttcctgcgctgcaaattgcaggccccagcaatcgtgactgacgtttgctccttgactccaagaaactgagaccaaagaagctgctgttcttagcaagatgcgcactgcattccacaggtgggaggagtcggagaggcaggggcttgctttgcagccccacagacaacagttgcacagtgcctcaagccccagagtggctcaccctgtccagacctttgaggatatcaaaggacaaagtgcccaagtctttcctaccttgggggaacctggaacttggaaaggctccctgtcctagtcttgatctgttctgggccaggtcccagcttgagctgcctctgagatttgggctgtgcggatctctggagtgagctctgtttcggttgacccaggtcatggaatggaaacggtgaggccccagtggctgttctggaagaaacagatctcctggcaaaggccccagcatctccctcactgaaaccaggtggccggctcctcggactctgctttatgttgcggtgagaactctgcccaggtgtgcagggtttggcttgtgggctgcttgctgctcatctgatttttgtcccagtagtccctgcgttcttcattcaaccccttctgggacttcagctcagagagcaccatcccgggggtcagggcctccccacaggagccctgcagtgtggtagcgccatggctgtctcaaaccaagcaaaggaaggaccctgaggccttcacgctaaccgtcctcgagcaactgctgttggaaggcctccctgggcctggcccccaccctctgccacccagtcctcccagctgccatgtttcaaagacgacctttacctcctgcctttggattgactctgcatttgaccacggactccagtctgtgtgtagggagagagctgagtaggaggcctccactccggatcgaggcctgtatagggctcgtttccccacacatgcctatttctgaagaggcttctgtcttatttgaaggccagcccacacccagctactttaacaccaggtttatggaaaatgtcaggccttccccacaactcctgtctaactgctgtcgcccccctacttgctggctctcagaagcctaggggagtccctgtggtcctgaattctttccccaaagacgaccagcatttaaccaacctaagggcccaaaggccttggacaactgcatggagctgcactctaggagaaggaggggaaccagatgttagatcaggggagggagcaggagtgtccctcccgtcagtgcctacccacctgtgaggcagccttctgatggcctggcccaccttccccagaaccaggggaggcctgaggcttcagttttactctgctgcaaaatgaaggcgggcctgcaagccgactacacctacggaggctgttgaggacaatttcattccattaaattaaaaaatactgactggctggcaggcaggtgccatgtctgggaacagggacgggggagcttcacctttttgtcttggcttttctttgggctgtgggggggcatccatttccagggtcggggaggaaataccaaatgcattgttgttctgctcaatacatctcacttgtttctaataaagaaagcagctg

SEQ ID NO: 159951 - DNA, 1066 bp, Homo sapiens
  Payload ID: 11280
  Gene Symbol: NMT1
  Gene Name: N-myristoyltransferase 1
  ENST ID: ENST00000543908
  CDS Start-End: 11-424
gcaactcaagatggcggacgagagtgagacagcagtgaagccgccggcacctccgctgccgcagatgatggaagggaacgggaacggccatgagcactgcagcgattgcgagaatgaggaggacaacagctacaaccggggtggtttgagtccagccaatgacactggagccaaaaagaagaaaaagaaacaaaaaaagaagaaagaaaaaggcagtgagacagattcagcccaggatcagcctgtgaagatgaactctttgccagcagagaggatccaggaaatacagaaggccattgagctgttctcagtgggtcagggacctgccaaaaccatggaggaggctagcaagcgaagctaccagttctgggatacgcagcccgtccccaagctggctaaaagaactgtacaccctcctgaatgagaactatgtggaagatgatgacaacatgttccgatttgattattccccggagtttcttttgtgggctctccggccacccggctggctcccccagtggcactgtggggttcgagtggtctcaagtcggaaattggttgggttcattagcgccatcccagcaaacatccatatctatgacacagagaagaagatggtagagatcaacttcctgtgtgtccacaagaagctgcgttccaagagggttgctccagttctgatccgagagatcaccaggcgggttcacctggagggcatcttccaagcagtttacactgccggggtggtactaccaaagcccgttggcacctgcaggtaaaactgtcttcctgtaaggccccaaaaatgcgggtgtctgcactgtagttgaggagcatgtgccactgtgagtcacagctccgcccttagcatcccacctctggcgtatctggtaaggcgggcacttggtgcctgcaggagccagatggggagcatggagagggcgggagggttgtagggatggcagattggcaagtccctgccttgtctggagggctcttggtgtctgctggctgctgccatttggagatggtggggggcggtactggtggtttgtttttgttttta

SEQ ID NO: 159952 - DNA, 807 bp, Homo sapiens
  Payload ID: 11280
  Gene Symbol: NMT1
  Gene Name: N-myristoyltransferase 1
  ENST ID: ENST00000585561
  CDS Start-End: 1-266
cggacgagagtgagacagcagtgaagccgccggcacctccgctgccgcagatgatggaagggaacgggaacggccatgagcactgcagcgattgcgagaatgaggaggacaacagctacaaccggggtggtttgagtccagccaatgacactggagccaaaaagaagaaaaagaaacaaaaaaagaagaaagaaaaaggcagtgagacagattcagcccaggatcagcctgtgaaggttggagtgcagaagtacgaacatggctgaccgcagcctcaacctcctgggctcaagcaatcttcccacctcagcctcccgagtagccaggactacagatgaactctttgccagcagagaggatccaggaaatacagaaggccattgagctgttctcagtgggtcagggacctgccaaaaccatggaggaggctagcaagcgaagctaccagttctgggatacgcagcccgtccccaagctgggcgaagtggtgaacacccatggccccgtggagcctgacaaggacaatatccgccaggagccctacaccctgccccagggcttcacctgggatgctttggacctgggcgatcgtggtgtgctaaaagaactgtacaccctcctgaatgagaactatgtggaagatgatgacaacatgttccgatttgattattccccggagtttcttttgtgggctctccggccacccggctggctcccccagtggcactgtggggttcgagtggtctcaagtcggaaattggttgggttcattagcgccatcccagcaaacatccatatctatgacac

SEQ ID NO: 159953 - DNA, 558 bp, Homo sapiens
  Payload ID: 11280
  Gene Symbol: NMT1
  Gene Name: N-myristoyltransferase 1
  ENST ID: ENST00000592654
  CDS Start-End: 342-558
taaaagttctatgcagtgttccactcgtgtgcttcaggccattcctgggaaaagagcatgttggacgatggttttcgatggtacaacacaggacagtctagtaacagtacagttcaaagggaacgttacttatagacgtgttgtttgaacaacgtgactagcaataaacgaatcataaaacatttcgcagcagttcaccctcagtgaggaaactcatcagactatacaaacttggtttgagtccagccaatgacactggagccaaaaagaagaaaaagaaacaaaaaaagaagaaagaaaaaggcagtgagacagattcagcccaggatcagcctgtgaagatgaactctttgccagcagagaggatccaggaaatacagaaggccattgagctgttctcagtgggtcagggacctgccaaaaccatggaggaggctagcaagcgaagctaccagttctgggatacgcagcccgtccccaagctgggcgaagtggtgaacacccatggccccgtggagcctgacaaggacaatatccgccaggagccctacaccctgc

SEQ ID NO: 159954 - DNA, 4999 bp, Homo sapiens
  Payload ID: 11280
  Gene Symbol: NMT1
  Gene Name: N-myristoyltransferase 1
  Uniprot ID: P30419
  ENST ID: ENST00000592782
  CDS Start-End: 132-1622
caggccggctcagcgggcgaggcgggacctcgggagcgcgcgcctgcagaccggacgtccggccagcaggcggggccgggagaggaaccccccatgtagtggggcgcggagccctgctctcgcaactcaagatggcggacgagagtgagacagcagtgaagccgccggcacctccgctgccgcagatgatggaagggaacgggaacggccatgagcactgcagcgattgcgagaatgaggaggacaacagctacaaccggggtggtttgagtccagccaatgacactggagccaaaaagaagaaaaagaaacaaaaaaagaagaaagaaaaaggcagtgagacagattcagcccaggatcagcctgtgaagatgaactctttgccagcagagaggatccaggaaatacagaaggccattgagctgttctcagtgggtcagggacctgccaaaaccatggaggaggctagcaagcgaagctaccagttctgggatacgcagcccgtccccaagctgggcgaagtggtgaacacccatggccccgtggagcctgacaaggacaatatccgccaggagccctacaccctgccccagggcttcacctgggatgctttggacctgggcgatcgtggtgtgctaaaagaactgtacaccctcctgaatgagaactatgtggaagatgatgacaacatgttccgatttgattattccccggagtttcttttgtgggctctccggccacccggctggctcccccagtggcactgtggggttcgagtggtctcaagtcggaaattggttgggttcattagcgccatcccagcaaacatccatatctatgacacagagaagaagatggtagagatcaacttcctgtgtgtccacaagaagctgcgttccaagagggttgctccagttctgatccgagagatcaccaggcgggttcacctggagggcatcttccaagcagtttacactgccggggtggtactaccaaagcccgttggcacctgcaggtattggcatcggtccctaaacccacggaagctgattgaagtgaagttctcccacctgagcagaaatatgaccatgcagcgcaccatgaagctctaccgactgccagagactcccaagacagctgggctgcgaccaatggaaacaaaggacattccagtagtgcaccagctcctcaccaggtacttgaagcaatttcaccttacgcccgtcatgagccaggaggaggtggagcactggttctacccccaggagaatatcatcgacactttcgtggtggagaacgcaaacggagaggtgacagatttcctgagcttttatacgctgccctccaccatcatgaaccatccaacccacaagagtctcaaagctgcttattctttctacaacgttcacacccagacccctcttctagacctcatgagcgacgcccttgtcctcgccaaaatgaaagggtttgatgtgttcaatgcactggatctcatggagaacaaaaccttcctggagaagctcaagtttggcataggggacggcaacctgcagtattacctttacaattggaaatgccccagcatgggggcagagaaggttggactggtgctacaataaccagtcaccagtgcgattctggataaagccactgaaaattcgaaccaggaaatggaaccccaccactgttggtccaattttcacacacgtgagaatccctggcaaagggagcagaactgaaccggctttaccaaaccgccagcgaacttgacaattgtattgcgatggcgtgggctgcgtgacgtcacctccggtcgtgtctctggtctccgtgttttccagttaattacatcctcatgcagccgtgatcaagggaatgtaactgctgaaaactagctcgtgattggcatataatggagttaacgggtgaataataaaagtatatatatatattatatatatataaatattttaaatatctttcatgttccaaatgtacaaggatgtttggtctttaatgaaaagctgaatccagatcattcctcagaatgaggacccgaggacagtggcagacagacgcgttggcacagttcatggtttcctccagaggagacattggcttatcatggggaaaaagaggatctggagaacctcatccagctccccttctgaatcagctgggatgactggctttgagaaggaagggaagatggaacaggctcagatctcatgggatagcacgtggagctcttggctggggctgaccctgggcagggactttcctgcagggccagacctgcctgcattctgagacaaagcaatggacggtccgcagaagcagacctcattgattgagtcctttcttccatccccttggcctgctccctgtaggaagtcatcctgccaactgatttaaaagggctctttagccagttgttgccaaccttatagggatgagtcccctgtgagattttgcttttccactgcctgggatgatgcagtttgaagaggcccttggacctccttgtaacatcagggacctttggagaccattatcagtgtaagccctgcttagctcatcttagagcaaagagccagcaccctgatgtccctggggtggctaggcaggagtggcgtggggccaatacccagaccccttcagccaccagcccctggcctgtgccttccaacccattagccatttcttgttgtgcccctttccaagatacagcctgcaagtggtagcaagaagtgattagaggcagatctggacttggcaacagaagtggtttcccatctccattgtctgagtctgattttcgctgatgctgttttgtggatttttgtggtagtgatggttgtcagtgctgccagtttcccaaaacgtaatcaagcctctggtcacatggctgtcgatgtaggcattctggagtggtgttcagccaagtgaccgggcaaaattgggctgtgaaattgtacttccaggcttggatgtaatttttgctctagagagaagcaagtggtgggaaggaggtagcatgacgtgtggtgtgcgggtttccttgctgccgtcacctctccgctcatacaggaatgaagccttagccaggaggccaggctcagccctgtgccactcaccgaagccactttctacaggccagcaggggcttgttgcaggctgtgggttttggtgtggtttgtcagaggctaattctgcagagtttccaaaaccagaagacatcgtatgcttgggatgggggccgtgccacccgtgggaatgctgcccgctctgcagactgctgctagagccagcaactccactaaggtggattttcatcaggggcctgcagggccctcccttttcccattgttcctgcgctgcaaattgcaggccccagcaatcgtgactgacgtttgctccttgactccaagaaactgagaccaaagaagctgctgttcttagcaagatgcgcactgcattccacaggtgggaggagtcggagaggcaggggcttgctttgcagccccacagacaacagttgcacagtgcctcaagccccagagtggctcaccctgtccagacctttgaggatatcaaaggacaaagtgcccaagtctttcctaccttgggggaacctggaacttggaaaggctccctgtcctagtcttgatctgttctgggccaggtcccagcttgagctgcctctgagatttgggctgtgcggatctctggagtgagctctgtttcggttgacccaggtcatggaatggaaacggtgaggccccagtggctgttctggaagaaacagatctcctggcaaaggccccagcatctccctcactgaaaccaggtggccggctcctcggactctgctttatgttgcggtgagaactctgcccaggtgtgcagggtttggcttgtgggctgcttgctgctcatctgatttttgtcccagtagtccctgcgttcttcattcaaccccttctgggacttcagctcagagagcaccatcccgggggtcagggcctccccacaggagccctgcagtgtggtagcgccatggctgtctcaaaccaagcaaaggaaggaccctgaggccttcacgctaaccgtcctcgagcaactgctgttggaaggcctccctgggcctggcccccaccctctgccacccagtcctcccagctgccatgtttcaaagacgacctttacctcctgcctttggattgactctgcatttgaccacggactccagtctgtgtgtagggagagagctgagtaggaggcctccactccggatcgaggcctgtatagggctcgtttccccacacatgcctatttctgaagaggcttctgtcttatttgaaggccagcccacacccagctactttaacaccaggtttatggaaaatgtcaggccttccccacaactcctgtctaactgctgtcgcccccctacttgctggctctcagaagcctaggggagtccctgtggtcctgaattctttccccaaagacgaccagcatttaaccaacctaagggcccaaaggccttggacaactgcatggagctgcactctaggagaaggaggggaaccagatgttagatcaggggagggagcaggagtgtccctcccgtcagtgcctacccacctgtgaggcagccttctgatggcctggcccaccttccccagaaccaggggaggcctgaggcttcagttttactctgctgcaaaatgaaggcgggcctgcaagccgactacacctacggaggctgttgaggacaatttcattccattaaattaaaaaatactgactggctggcaggcaggtgccatgtctgggaacagggacgggggagcttcacctttttgtcttggcttttctttgggctgtgggggggcatccatttccagggtcggggaggaaataccaaatgcattgttgttctgctcaatacatctcacttgtttctaataaagaaagcagctgaacaaaa

SEQ ID NO: 159955 - DNA, 2457 bp, Homo sapiens
  Payload ID: 11281
  Gene Symbol: NMT2
  Gene Name: N-myristoyltransferase 2
  ENST ID: ENST00000378150
  CDS Start-End: 99-1556
agccagcgccgccgcgatggcggaggacagcgagtctgcggccagccagcagagcctggaactggacgaccaggacacgtgcgggatagacggggacaatgaggaggagacggagcacgccaaaggaagtcctggagggtatttgggagccaaaaagaaaaagaagaaacagaagagaaaaaaggagaaaccaaattccggaggcaccaagtcagactcggcatctgattcccaggagattaaaattcagcagccttcgaaacacaacaccatctggcagcagatttcagcgggagcagccatggaatcccagtgttccaatgcagaagttgcaggatatccagagagcaatggagctgctatccgcatgccagggcccagccaggaacattgatgaggctgcaaagcacagataccagttttgggacacacaaccggtaccaaaactagatgaagtcataacatctcatggtgcaattgaaccagataaagacaacgtacgccaagaaccgtattctttgccacagggttttatgtgggacactttagacttgagtgatgccgaagtgctcaaggagttatacacgttgttaaatgagaattacgtagaagatgatgacaatatgttccgatttgactattcacccgagttcctgttgtgggctctgcgtccaccaggctggctcctgcagtggcactgtggggtcagagtgtcttcaaataaaaaactggtcgggttcataagtgccatcccagcaaacattcggatttatgacagtgtgaagaagatggtagaaatcaactttctttgtgttcataagaagttgagatcgaaacgggtagccccagtgctaatccgagagatcactagaagagtgaacctggaagggatcttccaggctgtgtacaccgcgggagtggttcttcctaagcccatagccacatgcagatactggcatcgatcactaaaccccagaaaattggtagaagtgaaattttctcacttgagtagaaatatgactttacagagaacaatgaagctatacagacttccagatgttacaaagacttcaggtttgagaccaatggaaccaaaagatatcaaatcagttcgagaattaatcaacacttacctgaagcagtttcatctggctccagtgatggatgaagaggaagtagcccactggttcctcccccgggagcacattattgacacgtttgtagtggagagccccaacggtaaactgactgatttcctgagcttctatacgctcccctccacggtgatgcaccaccctgctcacaagagcctcaaagccgcctactcattctacaacatccacacagagacgcccctgctggacctcatgagcgacgcgctcatcctggctaaatcgaaaggatttgatgtattcaatgcactggatttgatggaaaataagacattcttggaaaaactcaagtttggtataggagatggcaatttgcagtattacctgtacaattggaggtgtccaggtacagattctgaaaaggttggactagtactacaatagatggatatttttatttctagaactctgacatcatcatttgttaatatttaatgatttctggaactgccattccaaagaagaataaaagcacaactcaagtgaaattgaagtagtcgataatcagaaaagatgacaaaagtccacatgtgacatttgtacgtttctagctagaatgttaaacttcatcctttttttactgttgacctatttgtgggagggatgaaaggctacaaagagcacattcttgtaattttcaaatttttgcctgtctcttgaagaggtattttttcacccttagaaaagggactgtttttctatggactaagtagaagttacagagtcatgtaagaaaatctttgctattgtgtggagagaaattgctgcatttctgtttcttaagtgatggtacatttgtccatgtaacagaacaaaagatccatttggaaattttttttactggtatcaccttacatggtatcactgggaacatttatggaatcaacacttctgtagctcagtgacaggtggtggttgtttaagtgcagagcaatattaaaatgtactggtgactagtacatgtatttctccataagcagagttgccgaatcaataaacatgcaagtttgtactttgatctttaccaggtcagtggattgcttcaaaagcagagttttgtgcaagcactcactgtgctctctgaaagagcctgaggccgggcgtggtggctcacgcctgtaatcccagcactttgggaggccaaggtgggcagatcatgaggtcaggagatcgagaccattctggccaacatagtgaaaccccatctctactaaaaatacaaaaattagccgggcgtggtggcgtgtgcctgtagtcccagctgcttgggaggctgaggcaggag

SEQ ID NO: 159956 - DNA, 2907 bp, Homo sapiens
  Payload ID: 11281
  Gene Symbol: NMT2
  Gene Name: N-myristoyltransferase 2
  Uniprot ID: O60551
  ENST ID: ENST00000378165
  CDS Start-End: 82-1578
agtacggcgggaggcactagagggagctgcggccgctccggcccggccccgagcaccgcctccccagccagcgccgccgcgatggcggaggacagcgagtctgcggccagccagcagagcctggaactggacgaccaggacacgtgcgggatagacggggacaatgaggaggagacggagcacgccaaaggaagtcctggagggtatttgggagccaaaaagaaaaagaagaaacagaagagaaaaaaggagaaaccaaattccggaggcaccaagtcagactcggcatctgattcccaggagattaaaattcagcagccttcgaaaaatcccagtgttccaatgcagaagttgcaggatatccagagagcaatggagctgctatccgcatgccagggcccagccaggaacattgatgaggctgcaaagcacagataccagttttgggacacacaaccggtaccaaaactagatgaagtcataacatctcatggtgcaattgaaccagataaagacaacgtacgccaagaaccgtattctttgccacagggttttatgtgggacactttagacttgagtgatgccgaagtgctcaaggagttatacacgttgttaaatgagaattacgtagaagatgatgacaatatgttccgatttgactattcacccgagttcctgttgtgggctctgcgtccaccaggctggctcctgcagtggcactgtggggtcagagtgtcttcaaataaaaaactggtcgggttcataagtgccatcccagcaaacattcggatttatgacagtgtgaagaagatggtagaaatcaactttctttgtgttcataagaagttgagatcgaaacgggtagccccagtgctaatccgagagatcactagaagagtgaacctggaagggatcttccaggctgtgtacaccgcgggagtggttcttcctaagcccatagccacatgcagatactggcatcgatcactaaaccccagaaaattggtagaagtgaaattttctcacttgagtagaaatatgactttacagagaacaatgaagctatacagacttccagatgttacaaagacttcaggtttgagaccaatggaaccaaaagatatcaaatcagttcgagaattaatcaacacttacctgaagcagtttcatctggctccagtgatggatgaagaggaagtagcccactggttcctcccccgggagcacattattgacacgtttgtagtggagagccccaacggtaaactgactgatttcctgagcttctatacgctcccctccacggtgatgcaccaccctgctcacaagagcctcaaagccgcctactcattctacaacatccacacagagacgcccctgctggacctcatgagcgacgcgctcatcctggctaaatcgaaaggatttgatgtattcaatgcactggatttgatggaaaataagacattcttggaaaaactcaagtttggtataggagatggcaatttgcagtattacctgtacaattggaggtgtccaggtacagattctgaaaaggttggactagtactacaatagatggatatttttatttctagaactctgacatcatcatttgttaatatttaatgatttctggaactgccattccaaagaagaataaaagcacaactcaagtgaaattgaagtagtcgataatcagaaaagatgacaaaagtccacatgtgacatttgtacgtttctagctagaatgttaaacttcatcctttttttactgttgacctatttgtgggagggatgaaaggctacaaagagcacattcttgtaattttcaaatttttgcctgtctcttgaagaggtattttttcacccttagaaaagggactgtttttctatggactaagtagaagttacagagtcatgtaagaaaatctttgctattgtgtggagagaaattgctgcatttctgtttcttaagtgatggtacatttgtccatgtaacagaacaaaagatccatttggaaattttttttactggtatcaccttacatggtatcactgggaacatttatggaatcaacacttctgtagctcagtgacaggtggtggttgtttaagtgcagagcaatattaaaatgtactggtgactagtacatgtatttctccataagcagagttgccgaatcaataaacatgcaagtttgtactttgatctttaccaggtcagtggattgcttcaaaagcagagttttgtgcaagcactcactgtgctctctgaaagagcctgaggccgggcgtggtggctcacgcctgtaatcccagcactttgggaggccaaggtgggcagatcatgaggtcaggagatcgagaccattctggccaacatagtgaaaccccatctctactaaaaatacaaaaattagccgggcgtggtggcgtgtgcctgtagtcccagctgcttgggaggctgaggcaggagaatcgcttgaacctgagaggtgaggttgcagtgagccgagatcgagccactgcactccagcctgggtgacagagcgtgagactccgtctcaaaaaaaaaaaaaaagaaagagcctgtacccgcgactaactagacttttctgctgttgtgcaaagttcagtttcttctcagcaacatcaaggatatatgaagaaaaggaaataaaaaactgtaaagtcaaaagagatgcctggtggaacttattcgtgctatcagggcattgatagtttgaatgtttttattacttatgcaaaattgcacatactcctctatgctgattttatcatgaaaactgtcatgtgtcatgctaatggaaaatgtcttatttgtaaataagtattcataattttgttactgatggtgtttttaatctagaatttgaaaaactt

SEQ ID NO: 159957 - DNA, 2076 bp, Homo sapiens
  Payload ID: 11282
  Gene Symbol: NOBOX
  Gene Name: NOBOX oogenesis homeobox
  Uniprot ID: O60393
  ENST ID: ENST00000467773
  CDS Start-End: 1-2076
atggctctccttttgacactaacatcaccagacctggagggtacctgggacaccagagacaaggatggcttcaaagcccaggaggggccgcccctggctgtacctgaatttcctgtgtgtggactgtaccggatctacggagtctgtggctctttcagctccttcttcatcatccggtgcagcctttgtgctctggagaccctcaaatcaccccaacatgatcccttagagatacctgaacagtccctcaaactcatacccctggtgtctgggaaaagggaactcacaaggggccagaaagctggagagaagcccctggctgcaggacccggggaggaggaactgctccggggctcagcccctcatgctcaggacactcagagtgaggaactgccaccctcctgcaccatctcaggagagaagaagccgccagcagtctctggagaagccaccggggctgatgctgggagactgtgcccgcccccccgctccagggctccccacaaagacagaactctagcccgctccaggccccagactcagggggaagattgttccctcccagtgggagaggtgaagataggaaagaggtcctattctccagcccccgggaagcagaaaaagcctaatgccatgggtctggccccaacatcatctccgggtgcccctaactcagcccgtgccacacacaacccagtgccctgtgggtcaggccgggggccctgccacctggccaatctcctcagtacattggcgcagagcaaccaaaacagagaccacaagcaggggcccccggaagtgacctgccaaattaggaaaaagacacgaaccctataccgctcagatcagctggaggagctagagaagatattccaagaagaccactatcctgacagtgataaacgccgagagattgcccagacggtgggggtgaccccccagcgcatcatggtaaagggggccggctcactggtggcagggtggagtggcggagggcccaccattgaaacactcgaattgcagagtgagcgctcagcggtagcctgggtgtggttccagaatcgccgggccaagtggcgaaaaatggagaaactgaatgggaaagaaagcaaggacaatcctgcagcccctggccctgccagcagtcaatgcagctctgcagctgagatcctacctgctgtgcccatggagccaaagcctgaccctttccctcaggagtcccctctggatacctttccagagccccccatgctgctgacttctgaccagactttggcccccacccaacccagtgagggtgctcagagggtggtgacccccccactcttcagccccccacctgtgcgaagggccgatcttcctttcccccttggccctgtccacaccccccaactgatgccactgctgatggatgttgctggcagtgacagcagccacaaggacggcccctgtgggtcctgggggacaagcatcaccctgccacccccctgttcatatttggaggagctggagccccaggattaccaacagagcaaccagccaggacccttccagttctcccaggctccacagcccccgcttttccagtcccctcagcccaagttgccctacctccccactttccccttctccatgcccagttcactgacgcttccaccgcccgaagactctctctttatgtttccctgtggccccagcgggggcacatcgcagggctattgcccaggtgcctcctcaggacagatcctgatgcaaccacctgctgggaatataggtacagcctcctggagtgacccctgtttgccagagctgcccttccctggtccgttctgcccacaagctctggggcatcccccaggaggggatggctactttcctgatctatttccaactccctgcccccaggctctgggcaggcagccttcgtcagctctctcatggatgcctgaaggggccagaccagggactgggcccttactcagcaaggcaaaagaggaaccaccagctgcttccctggatcagccctcagcactggaggaggccagaggggatgacaagaatagccatgtcccctag

SEQ ID NO: 159958 - DNA, 1980 bp, Homo sapiens
  Payload ID: 11282
  Gene Symbol: NOBOX
  Gene Name: NOBOX oogenesis homeobox
  Uniprot ID: O60393
  ENST ID: ENST00000483238
  CDS Start-End: 1-1980
atggctctccttttgacactaacatcaccagacctggagggtacctgggacaccagagacaaggatggcttcaaagcccaggaggggccgcccctggctgtacctgaatttcctgtgtgtggactgtaccggatctacggagtctgtggctctttcagctccttcttcatcatccggtgcagcctttgtgctctggagaccctcaaatcaccccaacatgatcccttagagatacctgaacagtccctcaaactcatacccctggtgtctgggaaaagggaactcacaaggggccagaaagctggagagaagcccctggctgcaggacccggggaggaggaactgctccggggctcagcccctcatgctcaggacactcagagtgaggaactgccaccctcctgcaccatctcaggagagaagaagccgccagcagtctctggagaagccaccggggctgatgctgggagactgtgcccgcccccccgctccagggctccccacaaagacagaactctagcccgctccaggccccagactcagggggaagattgttccctcccagtgggagaggtgaagataggaaagaggtcctattctccagcccccgggaagcagaaaaagcctaatgccatgggtctggccccaacatcatctccgggtgcccctaactcagcccgtgccacacacaacccagtgccctgtgggtcaggccgggggccctgccacctggccaatctcctcagtacattggcgcagagcaaccaaaacagagaccacaagcaggggcccccggaagtgacctgccaaattaggaaaaagacacgaaccctataccgctcagatcagctggaggagctagagaagatattccaagaagaccactatcctgacagtgataaacgccgagagattgcccagacggtgggggtgaccccccagcgcatcatggtgtggttccagaatcgccgggccaagtggcgaaaaatggagaaactgaatgggaaagaaagcaaggacaatcctgcagcccctggccctgccagcagtcaatgcagctctgcagctgagatcctacctgctgtgcccatggagccaaagcctgaccctttccctcaggagtcccctctggatacctttccagagccccccatgctgctgacttctgaccagactttggcccccacccaacccagtgagggtgctcagagggtggtgacccccccactcttcagccccccacctgtgcgaagggccgatcttcctttcccccttggccctgtccacaccccccaactgatgccactgctgatggatgttgctggcagtgacagcagccacaaggacggcccctgtgggtcctgggggacaagcatcaccctgccacccccctgttcatatttggaggagctggagccccaggattaccaacagagcaaccagccaggacccttccagttctcccaggctccacagcccccgcttttccagtcccctcagcccaagttgccctacctccccactttccccttctccatgcccagttcactgacgcttccaccgcccgaagactctctctttatgtttccctgtggccccagcgggggcacatcgcagggctattgcccaggtgcctcctcaggacagatcctgatgcaaccacctgctgggaatataggtacagcctcctggagtgacccctgtttgccagagctgcccttccctggtccgttctgcccacaagctctggggcatcccccaggaggggatggctactttcctgatctatttccaactccctgcccccaggctctgggcaggcagccttcgtcagctctctcatggatgcctgaaggggccagaccagggactgggcccttactcagcaaggcaaaagaggaaccaccagctgcttccctggatcagccctcagcactggaggaggccagaggggatgacaagaatagccatgtcccctag

SEQ ID NO: 159959 - DNA, 2790 bp, Homo sapiens
  Payload ID: 11283
  Gene Symbol: NOC2L
  Gene Name: NOC2-like nucleolar associated transcriptional repressor
  Uniprot ID: Q9Y3T9
  ENST ID: ENST00000327044
  CDS Start-End: 51-2300
cgcgcggcattctggggccggaagtggggtgcacgcttcgggttggtgtcatggcagctgcggggagccgcaagaggcgcctggcggagctgacggtggacgagttcctagcttcgggctttgactccgagtccgaatccgagtccgaaaattctccacaagcggagacacgggaagcacgcgaggctgcccggagtccggataagccgggcgggagcccctcggccagccggcgtaaaggccgtgcctctgagcacaaagaccagctctctcggctgaaggacagagaccccgagttctacaagttcctgcaggagaatgaccagagcctgctaaacttcagcgactcggacagctctgaggaggaagaggggccgttccactccctgccagatgtgctggaggaagccagtgaggaggaggatggagcggaggaaggagaagatggggacagagtccccagagggctgaaggggaagaagaattctgttcctgtgaccgtcgccatggttgagagatggaagcaggcagcaaagcaacgcctcactccaaagctgttccatgaagtggtacaggcgttccgagcagctgtggccaccacccgaggggaccaggaaagtgctgaggccaacaaattccaggtcacggacagtgctgcattcaatgctctggttaccttctgcatcagagacctcattggctgtctccagaagctgctgtttggaaaggtggcaaaggatagcagcaggatgctgcagccgtccagcagcccgctctgggggaagcttcgtgtggacatcaaggcttacctgggctcggccatacagctggtgtcctgtctgtcggagacgacggtgttggcggccgtgctgcggcacatcagcgtgctggtgccctgcttcctgaccttccccaagcagtgccgcatgctgctcaagagaatggtgatcgtatggagcactggggaagagtctctgcgggtgctggctttcctggtcctcagcagagtctgccggcacaagaaggacactttccttggccccgtcctcaagcaaatgtacatcacgtatgtgaggaactgcaagttcacctcgcctggtgccctccccttcatcagtttcatgcagtggaccttgacggagctgctggccctggagccgggtgtggcctaccagcacgccttcctctacatccgccagctcgccatacacctgcgcaacgccatgaccactcgcaagaaggaaacataccagtctgtgtacaactggcagtatgtgcactgcctcttcctgtggtgccgggtcctgagcactgcgggccccagcgaagccctccagcccttggtctacccccttgcccaagtcatcattggctgtatcaagctcatccccactgcccgcttctacccgctgcgaatgcactgcatccgtgccctgacgctgctctcggggagctcgggggccttcatcccggtgctgcctttcatcctggagatgttccagcaggtcgacttcaacaggaagccagggcgcatgagctccaagcccatcaacttctccgtgatcctgaagctgtccaatgtcaacctgcaggagaaggcgtaccgggacggcctggtggagcagctgtacgacctcaccctggagtacctgcacagccaggcacactgcatcggcttcccggagctggtgctgcctgtggtcctgcagctgaagtcgttcctccgggagtgcaaggtggccaactactgccggcaggtgcagcagctgcttgggaaggttcaggagaactcggcatacatctgcagccgccgccagagggtttccttcggcgtctctgagcagcaggcagtggaagcctgggagaagctgacccgggaagaggggacacccctgaccttgtactacagccactggcgcaagctgcgtgaccgggagatccagctggagatcagtggcaaagagcggctggaagacctgaacttccctgagatcaaacgaaggaagatggctgacaggaaggatgaggacaggaagcaatttaaagacctctttgacctgaacagctctgaagaggacgacaccgagggattctcggagagagggatactgaggcccctgagcactcggcatggggtggaagacgatgaagaggacgaggaggagggcgaggaggacagcagcaactcggaggatggagacccagacgcagaggcggggctggcccctggggagctgcagcagctggcccaggggccggaggacgagctggaggatctgcagctctcagaggacgactgaggcagcccatctggggggcctgtaggggctgccgggctggtggccagtgtttccacctccctggcagtcaggcctagaggctggcgtctgtgcagttgggggaggcagtagacacgggacaggctttattatttatttttcagcatgaaagaccaaacgtatcgagagctgggctgggctgggctggtgtggctgctgaagccccacagctgtgggctgctgaagtcagctccgcgggggagctgaccctgacgtcagcagaccgagaccagtcccagttccagggggaggcctgcaggcccctggccccttccaccacctctgccctccgtctgcagacctcgtccatctgcaccaggctctgccttcactcccccaagtctttgaaaatttgttcctttcctttgaagtcacattttcttttaaaattttttgttttgcatccgaaaccgaaagaaataaagcggtgggaggcagggccattgtgttg

SEQ ID NO: 159960 - DNA, 3455 bp, Homo sapiens
  Payload ID: 11284
  Gene Symbol: NOC3L
  Gene Name: NOC3-like DNA replication regulator
  Uniprot ID: Q8WTT2
  ENST ID: ENST00000371361
  CDS Start-End: 102-2504
ggtagtgtagggacttcggcacgtgtgtcattccccgggatttctgtagtaaccctgcttctggtgaacttgtctggccggcattcatttaaggcctaaggatgaaggcgagaagaaataaaaaacagatcccaagctttcgcaagttaataaaaactagtaaagtcaaacttgaaaacaagctaaaaaataagcagtttaaacaacaaagcactctcaagaagtaccgaaaagaacagaggaaactaaggcaagctgtgaaagatgctgtgtctaagaaacccattccattggagaacccaaaggaaaagcgaccaggtaaaaggattgagagggaagaagaggaagaagaagaagcccttcctttagatatgatggatgaagatgacttacagttaatgaaggatttaggacaaagagtatcttttctaacaagagatctttcttctagtgagcctgttcatgcgaagaaacggaagcatgaacgcattatagataaatatgaaaaaataccaagaactctgcaaactgcaccagagaaggaactgattcatttacttcctatcaaagataaaagtggtataatcccacagactagggagaagccagttactgatagtaacaaagatgaagaggatcaagaagaagagagggaacttgaggaagagatcattgaagatcctattcaagagctgaccatagaagaacatttgattgagagaaagaagaaattacaggagaagaagatgcatattgcagccttggcatctgccatattatcagatccagaaaataatattaaaaaattgaaagaattacgttctatgttgatggaacaagatcctgatgtggctgttactgttcgaaagctggtaattgtttctctgatggagttatttaaagatattactccttcatataaaatccggcccctcacagaagcagaaaaatctactaagacccgaaaagaaacccagaagttaagagaatttgaagaaggcctggttagccaatacaagttttatttggaaaatctggaacaaatggttaaagattggaagcagaggaagctgaagaaaagtaatgtagtttccttaaaggcatacaaaggactggcagaagtcgctgtgaagagcttgtgtgagctgttggtggcactacctcattttaactttcacaacaacatcatcgtattgattgtccctctcatgaatgacatgtcaaaattgatatctgaaatgtgttgtgaagctgtgaagaaactctttaagcaagataaattaggccaagcttctcttggtgtaattaaagtgatttctggttttgtgaagggcagaaattacgaagttaggccagagatgttaaaaacatttttatgcctaagaatcaaggaagtagaagtgaaaaaagatacagaagacattaataaaccaaaaaaatttatgactttcaaagaaaagagaaaatctctatcaagaatgcagagaaagtggaagaaagcagaagagaaactagagcgagagcttcgagaggcagaagcttcagagagtactgagaaaaaacttaaactgcacacagagactctgaatattgtgtttgtaacctacttcagaatattgaagaaggcccagaggtcacctctcctgccagcagttctagaaggtcttgccaagtttgctcaccttataaatgtggaattttttgatgatctgttagtagttcttcatactctcattgagtctggtgacctaagctatcaagaaagtcttcactgtgtccagactgcttttcatattctttctggacaaggtgatgttctgaatattgatccattgaaattctacacacatctctacaaaacactgttcaaattacatgcaggtgctaccaatgaaggtgttgagattgtactccagtgccttgatgtcatgctaactaagcgcagaaagcaagtttctcagcagcgagctcttgccttcatcaaacgcctttgtacccttgctcttcatgttcttccaaattcaagtattggcattttagcaactaccagaatattaatgcatactttccccaaaacagatctactgcttgacagtgaatctcagggaagtggagttttccttcctgaactggatgagcctgagtactgcaatgctcagaacactgctctgtgggaactgcatgctctgcggaggcattatcatcccatagtgcagagatttgcagcccacctgatcgctggagcaccttctgaaggctctggagcactcaaaccagagttgagtcgaagatctgctactgaactttttgaggcatatagcatggcagaaatgacattcaatcctcctgttgaatcttcaaaccccaaaataaagggtaaatttttacaaggggattcatttttgaatgaagatttaaatcagctaatcaaaagatactccagtgaagttgctactgaatcgcctctggatttcacgaaatatttgaaaacatcactacactagtagaggaatgaagtcagtggactttcttgtatatttgtgtgtgcagatgtacataaagatgagttgttaacttaggatcttttctttttatacaaggaaagcttcctaagaatgtctaggaagaagaggaagaatgaccctttgcatggcacagggttctgcccctattctgaatatgtcattccatcaaggagatcaaaagcctttttttctccccagtatttggaaattactttcttgatgatgctgccttttaaaagcttcacgtacattatagttttttaaaaaaatctttggactggatcttactgaagtgcagttgctatattaaaattagggcatagagcacagaaaaatcaagaccatgagaagacattttaccatttagctactttttataactaaatactctttaaatatttttatttcaatactgtggatggaaatgagaagcattctaaatttgagttaatatatttttatgaagatatttgagaaaagaaaaaaatagcttgtattcaggttcattggcttttgctggatgatccacctaaagaagttacctaatttggccttttaaaaaaggtgttagtgtttattatagctactttcaaggaaagtttgaatatgattctagtctctaaagttcttcacgttttctgacattccctggagggtgactggggaagaattgctccagggtagaagaaccaggcccaagactttaccattctgatctagagacaaaggatactcaatgaggagcttttttcccctcttggaacaggtaaaatgctttttcttattaatataattataaaacagtattttatgtaacagctattcccatattctaggagtggcctaagaaatgcgtgtttcagtgactagattataaatattctctattgtgaatagttgaataaaacagctgtttttttctgcttccta

SEQ ID NO: 159961 - DNA, 1952 bp, Homo sapiens
  Payload ID: 11285
  Gene Symbol: NOCT
  Gene Name: nocturnin
  Uniprot ID: Q9UK39
  ENST ID: ENST00000280614
  CDS Start-End: 194-1489
ccgacgcagcggtgttgcacctccctctccggctctgctgcccgggatttccccagaacctgcgccgcgcgagaaggagcctgggagcatccgcccacactgcccggacagtcggctcgactcggtgccctcggccccagccgggctccgctcctcgggcgcgcgaggggccgtggtggcggcggcgcccggcatgtttcatagtccgcggcggctctgctcggccctgctgcagagggacgcgcccggcctgcgccgcctgcccgccccagggctgcgccgcccgttgtccccgccggctgctgttcccaggcccgcatccccccggctgctggcggcggcctcggcggcctcgggcgccgcgaggtcgtgttcccgaacagtgtgttccatgggaaccggtacaagcagactctatagtgctctcgccaagacactgaacagcagcgctgcctcccagcacccagagtatttggtgtcacctgacccagagcatctggagcccattgatcctaaagagcttcttgaggaatgcagggccgtcctgcacacccgacctccccggttccagagggattttgtggatctgaggacagattgccctagtacccacccacctatcagggttatgcaatggaacatcctcgcccaagctcttggagaaggcaaagacaactttgtacagtgccctgttgaagcactcaaatgggaagaaaggaaatgtctcatcctggaagaaatcctggcctaccagcctgatatattgtgcctccaagaggtggaccactattttgacaccttccagccactcctcagtagactaggctatcaaggcacgtttttccccaaaccctggtcaccttgtctagatgtagaacacaacaatggaccagatggttgtgccttattttttcttcaaaaccgattcaagctagtcaacagtgccaatattaggctgacagccatgacattgaaaaccaaccaggtggccattgcacagaccctggagtgcaaggagtcaggccgacagttctgcatcgctgttacccatctaaaagcacgcactggctgggagcggtttcgatcagctcaaggctgtgacctccttcagaacctgcaaaacatcacccaaggagccaagattccccttattgtgtgtggggacttcaatgcagagccaacagaagaggtctacaaacactttgcttcctccagcctcaacctgaacagcgcctacaagctgctgagtgctgatgggcagtcagaacccccatacactacctggaagatccggacctcaggggagtgcaggcacaccctggattacatctggtattctaaacatgctctaaatgtaaggtcagctctcgatctgctcactgaagaacagattggacccaacaggttaccttccttcaattatccttcagaccacctgtctctagtgtgtgacttcagctttactgaggaatctgatggactttcataaatacttgcttttgtctttttaatcacaggagtctatttttttttttttttttttttttttgagacagagtctcgctctgttgcctaggctggagtacagtggcctgatctcggctcactgcaagatccgcctcccgggttcatggcattctcctgcctcagcctccagagcaactgggacaacaggcgcccgtcaccacgcccagctaattttttgtatttttagtagagacggggtttcaccgtgttagccaggatggtctcgatctcctgaccttgaatcacaagagtcttaacagggaatgtttcaggaaacaaataggataagacaatgccagaggaaggatagaaacatgggaagtttctatcatttcattttctgcgtttccagcatgcccttggaaaagactccctttagtccctttttcaattaaaacctatggtgaaaaaggcgtttgcactcc

SEQ ID NO: 159962 - DNA, 1572 bp, Homo sapiens
  Payload ID: 11285
  Gene Symbol: NOCT
  Gene Name: nocturnin
  ENST ID: ENST00000630479
  CDS Start-End: 187-690
agcggtgttgcacctccctctccggctctgctgcccgggatttccccagaacctgcgccgcgcgagaaggagcctgggagcatccgcccacactgcccggacagtcggctcgactcggtgccctcggccccagccgggctccgctcctcgggcgcgcgaggggccgtggtggcggcggcgcccggcatgtttcatagtccgcggcggctctgctcggccctgctgcagagggacgcgcccggcctgcgccgcctgcccgccccagggctgcgccgcccgttgtccccgccggctgctgttcccaggcccgcatccccccggctgctggcggcggcctcggcggcctcgggcgccgcgaggtcgtgttcccgaacagtgtgttccatgggaaccggtacaagcagactctatagtgctctcgccaagacactgaacagcagcgctgcctcccagcacccagagtatttggtgtcacctgacccagagcatctggagcccattgatcctaaagagcttcttgaggaatgcagggccgtcctgcacacccgacctccccggttccagagggattttgtggatctgaggacagattgccctagtacccacccacctatcagggttatgcaatggaacatcctcgcccaaggtatgctggatgcttttgtgcctctgcagtcaagtttgctgtgactgcctttctgcttctgcacatccacagtgcactgttttatgtggaaggaagaggtgtgggcagatggaggtgactgcagcagcatggagagctcctagaagaggttaagacagggaatcatctggttttcactttttttttttttttagaaagaaaaaagacactttaattgttcttggatagtctacaaacatggaaggtgtaaagaataaaccacgagttacttgctttaattgtaaaaaccaagtcaggtgcagtggctcacacctgtaatcccagcactttgggaggccgaggtgggtggatcacctgtggtcaggagttcgagaccagcctgaccaacatggagaaaccccgtttctactaaaaatacaaaattagccgggtgtggtggcgcatgcctgtaatcccagctactcgggaggctgaggcaggagaatcgcttgaacccagaaagtggtggttgcagtgagctgagattgcgccattgcactgcagcctgggctggagtacagtggcctgatctcggctcactgcaagatccgcctcccgggttcatggcattctcctgcctcagcctccagagcaactgggacaacaggcgcccgtcaccacgcccagctaattttttgtatttttagtagagacggggtttcaccgtgttagccaggatggtctcgatctcctgaccttgaatcacaagagtcttaacagggaatgtttcaggaaacaaataggataagacaatgccagaggaaggatagaaacatgggaagtttctatcatttcattttctgcgtttccagcatgcccttggaaaagactccctttagtccctttttcaattaaaacctatggtgaaaaaggcgtttgcactccaa

SEQ ID NO: 159963 - DNA, 1665 bp, Homo sapiens
  Payload ID: 11286
  Gene Symbol: NODAL
  Gene Name: nodal growth differentiation factor
  Uniprot ID: Q96S42
  ENST ID: ENST00000287139
  CDS Start-End: 1-1044
atgcacgcccactgcctgcccttccttctgcacgcctggtgggccctactccaggcgggtgctgcgacggtggccactgcgctcctgcgtacgcgggggcagccctcgtcgccatcccctctggcgtacatgctgagcctctaccgcgacccgctgccgagggcagacatcatccgcagcctacaggcagaagatgtggcagtggatgggcagaactggacgtttgcttttgacttctccttcctgagccaacaagaggatctggcatgggctgagctccggctgcagctgtccagccctgtggacctccccactgagggctcacttgccattgagattttccaccagccaaagcccgacacagagcaggcttcagacagctgcttagagcggtttcagatggacctattcactgtcactttgtcccaggtcaccttttccttgggcagcatggttttggaggtgaccaggcctctctccaagtggctgaagcaccctggggccctggagaagcagatgtccagggtagctggagagtgctggccgcggccccccacaccgcctgccaccaatgtgctccttatgctctactccaacctctcgcaggagcagaggcagctgggtgggtccaccttgctgtgggaagccgagagctcctggcgggcccaggagggacagctgtcctgggagtggggcaagaggcaccgtcgacatcacttgccagacagaagtcaactgtgtcggaaggtcaagttccaggtggacttcaacctgatcggatggggctcctggatcatctaccccaagcagtacaacgcctatcgctgtgagggcgagtgtcctaatcctgttggggaggagtttcatccgaccaaccatgcatacatccagagtctgctgaaacgttaccagccccaccgagtcccttccacttgttgtgccccagtgaagaccaagccgctgagcatgctgtatgtggataatggcagagtgctcctagatcaccataaagacatgatcgtggaagaatgtgggtgcctctgatgacatcctggagggagactggatttgcctgcactctggaaggctgggaaactcctggaagacatgataaccatctaatccagtaaggagaaacagagaggggcaaagttgctctgcccaccagaactgaagaggaggggctgcccactctgtaaatgaagggctcagtggagtctggccaagcacagaggctgctgtcaggaagagggaggaagaagcctgtgcagggggctggctggatgttctctttactgaaaagacagtggcaaggaaaagcacaagtgcatgagttctttactggattttttaaaaacctgtgaaccccccgaaactgtatgtgaaagttgagacatatgtgcatgtattttggaggtgggatgaagtcacctatagctttcatgtattctccaaagtagtctgtgtgtgacctgtccccctccccaaagattaaggatcactgtatagattaaaaagagtccgtcaatctcattgcctcaggctgggttgggggagccccacagctttctggctggccagtggcaatctactggccttgtccagaggctcactggagtggttctctgctaatgagctgtacaacaataaagccattgtctagtt

SEQ ID NO: 159964 - DNA, 1066 bp, Homo sapiens
  Payload ID: 11286
  Gene Symbol: NODAL
  Gene Name: nodal growth differentiation factor
  ENST ID: ENST00000414871
  CDS Start-End: 1-879
gaccaacagttggggatacagactaaagatgtggcagtggatgggcagaactggacgtttgcttttgacttctccttcctgagccaacaagaggatctggcatgggctgagctccggctgcagctgtccagccctgtggacctccccactgagggctcacttgccattgagattttccaccagccaaagcccgacacagagcaggcttcagacagctgcttagagcggtttcagatggacctattcactgtcactttgtcccaggtcaccttttccttgggcagcatggttttggaggtgaccaggcctctctccaagtggctgaagcaccctggggccctggagaagcagatgtccagggtagctggagagtgctggccgcggccccccacaccgcctgccaccaatgtgctccttatgctctactccaacctctcgcaggagcagaggcagctgggtgggtccaccttgctgtgggaagccgagagctcctggcgggcccaggagggacagctgtcctgggagtggggcaagaggcaccgtcgacatcacttgccagacagaagtcaactgtgtcggaaggtcaagttccaggtggacttcaacctgatcggatggggctcctggatcatctaccccaagcagtacaacgcctatcgctgtgagggcgagtgtcctaatcctgttggggaggagtttcatccgaccaaccatgcatacatccagagtctgctgaaacgttaccagccccaccgagtcccttccacttgttgtgccccagtgaagaccaagccgctgagcatgctgtatgtggataatggcagagtgctcctagatcaccataaagacatgatcgtggaagaatgtgggtgcctctgatgacatcctggagggagactggatttgcctgcactctggaaggctgggaaactcctggaagacatgataaccatctaatccagtaaggagaaacagagaggggcaaagttgctctgcccaccagaactgaagaggaggggctgcccactctgtaaatgaagggctcagtggagtctggccaagcaca

SEQ ID NO: 159965 - DNA, 4355 bp, Homo sapiens
  Payload ID: 11287
  Gene Symbol: NOMO1
  Gene Name: NODAL modulator 1
  Uniprot ID: Q15155
  ENST ID: ENST00000287667
  CDS Start-End: 172-3840
ctggggctgtgaacgtggggtcgaagcgcgcgtgcgcggcggctctggcggcggcggtggggcggggcctgggctgtcagccggcctaggaggaggaaggagcctgcggcgtgcagtgtgaggggcgggacccggctgccggcggtgggtctagctgggggaggtcgggccatgctggtgggccagggcgcggggccgctggggcccgcggtggtcaccgccgcggtggtgctgctgctgagcggcgtggggccggcgcacggctcggaggacatcgtggtgggctgcggtggcttcgtcaagtcggacgtggagatcaactactctctcatcgagataaagctgtacaccaagcatgggactttgaaataccagacagactgtgcccctaataatggttactttatgatccctttgtatgataagggggatttcattctgaagattgagcctcccctagggtggagttttgagccgacgaccgtggagctccatgtggatggagtcagtgacatctgcacaaagggtggggacatcaactttgtcttcactgggttctctgtgaatggcaaggtcctcagcaaagggcagcccctgggtcctgcgggagttcaggtgtctctgagaaacactgggaccgaagcaaagatccagtccacagttacacagcctggcggaaagtttgcattttttaaagttctgcctggagattatgaaatcctcgcaactcatccaacctgggcgttgaaagaggcaagcaccacagtgcgtgtaaccaactccaatgccaatgcggccagtcccctcatagttgctggctacaatgtgtctggctctgtccgaagtgatggggagcccatgaaaggcgtgaagtttcttctcttttcttctttagtaactaaagaggatgtcctgggctgcaatgtctcaccagtgcctgggttccagccccaagacgagagtctggtgtatttgtgctacacggtctccagagaagatggctcgttctctttctattccttgccaagtgggggctacactgtgattccgttctatcgaggggagaggattacctttgatgtggcgccttccagacttgacttcacagtggagcatgacagcttgaaaatcgagcccgtgttccacgtcatgggattctccgtcaccgggagggtcttgaacggacccgaaggagatggtgttccagaagcagtagtcaccctgaataaccaaatcaaagttaaaacaaaagctgatggctcattccgccttgagaacataaccacagggacatacaccatccatgctcagaaagagcacctctactttgaaacggtcaccatcaaaattgcaccgaacacacctcagctggctgacattattgcaacagggttcagtgtctgtggtcagatatcaatcattcgcttccccgacaccgtcaagcagatgaataaatacaaagttgtcctgtcatctcaagacaaggacaagtctttggtcaccgtggagacagatgctcatggatcattttgttttaaagcaaaaccagggacttacaaagtgcaggtgatggttcctgaggcagaaaccagagcagggctgacgttgaaaccccagacatttcctcttactgtgaccaacaggcccatgatggatgtggcctttgtacagttcttggcatcagtttctgggaaagtctcttgtttggacacctgtggtgacttgctggtgactctacagtccctgagccgccagggtgagaagcggagcctccagctctccggcaaggtcaacgccatgactttcacctttgacaacgtgctccctggaaaatacaaaataagcatcatgcatgaggattggtgctggaagaacaagagcctggaggtggaagtgctggaggatgacatgtctgcagttgagttcaggcagacgggctacatgctgagatgttccctgtctcacgccatcactctggaattttatcaggatggaaatgggcgtgagaatgtggggatttataacctctccaaaggagtcaaccgattctgcctgtccaagcctggtgtgtacaaagtgacccctcgctcctgccaccggtttgagcaagcgttctacacctatgacacgtcttcacctagtatcttgacattgacagccattcgccaccatgtccttggaactatcaccaccgacaaaatgatggatgtcactgtgactatcaagtcttccatcgacagtgaacccgccttggtcttaggccctctgaagtctgtgcaggagctgcggagggagcagcagctggctgagatcgaggcccgcaggcaggagagggagaaaaacggcaatgaggaaggcgaagaaagaatgaccaagcctcccgtgcaggagatggtagatgagttacaaggccccttctcgtatgatttctcttactgggcgcggtctggagagaaaatcactgttacaccgtcatctaaagagctgctcttttatcccccttcaatggaagccgttgtcagtggagaaagctgcccagggaagctgatcgagatccatgggaaggcaggcctgtttttagaaggccagatccaccccgagttggaaggagtcgagattgtcatcagtgaaaagggggcaagttcaccgctgatcacagtctttactgatgacaaaggtgcctacagtgttggccccctgcacagtgacctggagtacacggtgacctcacagaaggagggctatgttctgactgcggtggaaggaaccatcggagacttcaaggcctatgccctggcaggcgtaagctttgagataaaagctgaggatgaccagcccctcccgggagtcctcttatccctgagcggtggcctgtttcgttccaacctcttgacccaggacaacggcattctgacattctcaaacctgagccctggccagtattacttcaaacccatgatgaaggagttccggtttgagccatcctcacagatgatcgaggtgcaggaaggccagaacctgaagatcaccatcacggggtaccgaaccgcttacagttgctatggcacagtgtcttccttaaacggagagcccgaacaaggggttgccatggaagcggtgggccagaacgactgcagcatttacggagaagacaccgtgacagacgaagagggcaagttcagattacgtggattgctgccgggatgtgtgtaccacgttcagctcaaggcagaaggcaacgaccacattgagcgggcgctcccccaccatagggtgattgaggttgggaataatgacatcgatgatgtaaacatcatagttttccggcagattaatcaatttgatttaagtggaaatgtgatcacttcctctgaataccttcctacattatgggtcaagctttacaaaagcgaaaacctcgacaatccaatccagacagtttcccttggccagtccctgttcttccatttccccccactgctcagagacggcgagaactatgttgtgcttctggactccacactccccagatcccagtatgactacatcttgcctcaagtttctttcaccgcagtgggctaccataaacacatcaccttgatttttaatcccacgaggaagctgcctgaacaggacatcgcacaaggatcctacattgccctgccattgacgctgctggttctgctggccggttacaaccatgacaagctcattcctttgctgctgcagttgacaagccggctacagggagtccgcgcgctcggccaggcagcctctgacaatagcggcccagaagatgcaaagagacaagccaagaaacagaagacaaggcggacttgaggaggaaggggacagttgcagtctcacttgggacaggccacagccaggggtccggccactacccgcccgtgggataaaagccaaaagcatgcgtcagctaacttcagcctgtgctgctgggcccgcaccccatgtcccttgtcactgtggcatcctgcacccatcctcacccctccgtagagcccctcgtgcaatgcaatgaatggaccctcctgtcactctgctgaacagaatttattttctgagtcaaatataatttattattatttttgtcaaagaagtatttaagctgtgctgtggtgtgagaatgtcattcttgatcttcagccttcgtttgcaaggagagttccagttgacgtggtgtttggttccatggcggggtaccctagggattcatctgttttcttcacttccctttgcatctgagatcctgctggaaaccacagcaacctgtatccactattaggaggtaaaaatcaataaaatggcccattcatttgtgttgtagctcatca

SEQ ID NO: 159966 - DNA, 666 bp, Homo sapiens
  Payload ID: 11287
  Gene Symbol: NOMO1
  Gene Name: NODAL modulator 1
  ENST ID: ENST00000565655
  CDS Start-End: 1-433
aagcgaaaacctcgacaatccaatccagacagtttcccttggccagtccctgttcttccatttccccccactgctcagagacggcgagaactatgttgtgcttctggactccacactccccagatcccagtatgactacatcttgcctcaagtttctttcaccgcagtgggctaccataaacacatcaccttgatttttaatcccacgaggaagctgcctgaacaggacatcgcacaaggatcctacattgccctgccattgacgctgctggttctgctggccggttacaaccatgacaagctcattcctttgctgctgcagttgacaagccggctacagggagtccgcgcgctcggccaggcagcctctgacaatagcggcccagaagatgcaaagagacaagccaagaaacagaagacaaggcggacttgaggaggaaggggacagttgcagtctcacttgggacaggccacagccagggccttcgtttgcaaggagagttccagttgacgtggtgtttggttccatggcggggtaccctagggattcatctgttttcttcacttccctttgcatctgagatcctgctggaaaccacagcaacctgtatccactattaggaggtaaaaatcaataaaatggcccattcatttgtgttgtagctc

SEQ ID NO: 159967 - DNA, 3765 bp, Homo sapiens
  Payload ID: 11287
  Gene Symbol: NOMO1
  Gene Name: NODAL modulator 1
  ENST ID: ENST00000610363
  CDS Start-End: 429-3731
gccggcggtgggtctagctgggggaggtcgggccatgctggtgggccagggcgcggggccgctggggcccgcggtggtcaccgccgcggtggtgctgctgctgagcggcgtggggccggcgcacggctcggaggacatcgtggtgggctgcggtggcttcgtcaagtcggacgtggagatcaactactctctcatcgagataaagctgtacaccaagcatgggactttgaaataccagacagactgtgcccctaataatggttactttatgatccctttgtatgataagggggatttcattctgaagattgagcctcccctagggtggagttttgagccgacgaccgtggagctccatgtggatggagtcagtgacatctgcacaaagggtggggacatcaactttgtcttcactgggttctctgtgaatggcaaggtttgcattttttaaagttctgcctggagattatgaaatcctcgcaactcatccaacctgggcgttgaaagaggcaagcaccacagtgcgtgtaaccaactccaatgccaatgcggccagtcccctcatagttgctggctacaatgtgtctggctctgtccgaagtgatggggagcccatgaaaggcgtgaagtttcttctcttttcttctttagtaactaaagaggatgtcctgggctgcaatgtctcaccagtgcctgggttccagccccaagacgagagtctggtgtatttgtgctacacggtctccagagaagatggctcgttctctttctattccttgccaagtgggggctacactgtgattccgttctatcgaggggagaggattacctttgatgtggcgccttccagacttgacttcacagtggagcatgacagcttgaaaatcgagcccgtgttccacgtcatgggattctccgtcaccgggagggtcttgaacggacccgaaggagatggtgttccagaagcagtagtcaccctgaataaccaaatcaaagttaaaacaaaagctgatggctcattccgccttgagaacataaccacagggacatacaccatccatgctcagaaagagcacctctactttgaaacggtcaccatcaaaattgcaccgaacacacctcagctggctgacattattgcaacagggttcagtgtctgtggtcagatatcaatcattcgcttccccgacaccgtcaagcagatgaataaatacaaagttgtcctgtcatctcaagacaaggacaagtctttggtcaccgtggagacagatgctcatggatcattttgttttaaagcaaaaccagggacttacaaagtgcaggtgatggttcctgaggcagaaaccagagcagggctgacgttgaaaccccagacatttcctcttactgtgaccaacaggcccatgatggatgtggcctttgtacagttcttggcatcagtttctgggaaagtctcttgtttggacacctgtggtgacttgctggtgactctacagtccctgagccgccagggtgagaagcggagcctccagctctccggcaaggtcaacgccatgactttcacctttgacaacgtgctccctggaaaatacaaaataagcatcatgcatgaggattggtgctggaagaacaagagcctggaggtggaagtgctggaggatgacatgtctgcagttgagttcaggcagacgggctacatgctgagatgttccctgtctcacgccatcactctggaattttatcaggatggaaatgggcgtgagaatgtggggatttataacctctccaaaggagtcaaccgattctgcctgtccaagcctggtgtgtacaaagtgacccctcgctcctgccaccggtttgagcaagcgttctacacctatgacacgtcttcacctagtatcttgacattgacagccattcgccaccatgtccttggaactatcaccaccgacaaaatgatggatgtcactgtgactatcaagtcttccatcgacagtgaacccgccttggtcttaggccctctgaagtctgtgcaggagctgcggagggagcagcagctggctgagatcgaggcccgcaggcaggagagggagaaaaacggcaatgaggaaggcgaagaaagaatgaccaagcctcccgtgcaggagatggtagatgagttacaaggccccttctcgtatgatttctcttactgggcgcggtctggagagaaaatcactgttacaccgtcatctaaagagctgctcttttatcccccttcaatggaagccgttgtcagtggagaaagctgcccagggaagctgatcgagatccatgggaaggcaggcctgtttttagaaggccagatccaccccgagttggaaggagtcgagattgtcatcagtgaaaagggggcaagttcaccgctgatcacagtctttactgatgacaaaggtgcctacagtgttggccccctgcacagtgacctggagtacacggtgacctcacagaaggagggctatgttctgactgcggtggaaggaaccatcggagacttcaaggcctatgccctggcaggcgtaagctttgagataaaagctgaggatgaccagcccctcccgggagtcctcttatccctgagcggtggcctgtttcgttccaacctcttgacccaggacaacggcattctgacattctcaaacctgagccctggccagtattacttcaaacccatgatgaaggagttccggtttgagccatcctcacagatgatcgaggtgcaggaaggccagaacctgaagatcaccatcacggggtaccgaaccgcttacagttgctatggcacagtgtcttccttaaacggagagcccgaacaaggggttgccatggaagcggtgggccagaacgactgcagcatttacggagaagacaccgtgacagacgaagagggcaagttcagattacgtggattgctgccgggatgtgtgtaccacgttcagctcaaggcagaaggcaacgaccacattgagcgggcgctcccccaccatagggtgattgaggttgggaataatgacatcgatgatgtaaacatcatagttttccggcagattaatcaatttgatttaagtggaaatgtgatcacttcctctgaataccttcctacattatgggtcaagctttacaaaagcgaaaacctcgacaatccaatccagacagtttcccttggccagtccctgttcttccatttccccccactgctcagagacggcgagaactatgttgtgcttctggactccacactccccagatcccagtatgactacatcttgcctcaagtttctttcaccgcagtgggctaccataaacacatcaccttgatttttaatcccacgaggaagctgcctgaacaggacatcgcacaaggatcctacattgccctgccattgacgctgctggttctgctggccggttacaaccatgacaagctcattcctttgctgctgcagttgacaagccggctacagggagtccgcgcgctcggccaggcagcctctgacaatagcggcccagaagatgcaaagagacaagccaagaaacagaagacaaggcggacccttcgtttgcaaggagagttccagttgacgtggtgtttggttccatggcggggtaccctagggattcatctgttttcttcacttccctttgcatctgagatcctgctggaaaccacagcaacctgtatccactattaggaggtaaaaatcaataaaatggcccattcatttg

SEQ ID NO: 159968 - DNA, 3921 bp, Homo sapiens
  Payload ID: 11287
  Gene Symbol: NOMO1
  Gene Name: NODAL modulator 1
  ENST ID: ENST00000620839
  CDS Start-End: 73-3876
gagcctgcggcgtgcagtgtgaggggcgggacccggctgccggcggtgggtctagctgggggaggtcgggccatgctggtgggccagggcgcggggccgctggggcccgcggtggtcaccgccgcggtggtgctgctgctgagcggcgtggggccggcgcacggctcggaggacatcgtggtgggctgcggtggcttcgtcaagtcggacgtggagatcaactactctctcatcgagataaagctgtacaccaagcatgggactttgaaataccagacagactgtgcccctaataatggttactttatgatccctttgtatgataagggggatttcattctgaagattgagcctcccctagggtggagttttgagccgacgaccgtggagctccatgtggatggagtcagtgacatctgcacaaagggtggggacatcaactttgtcttcactgggttctctgtgaatggcaaggtcctcagcaaagggcagcccctgggtcctgcgggagttcaggtgtctctgagaaacactgggaccgaagcaaagatccagtccacagttacacagcctggcggaaagtttgcattttttaaagttctgcctggagattatgaaatcctcgcaactcatccaacctgggcgttgaaagaggcaagcaccacagtgcgtgtaaccaactccaatgccaatgcggccagtcccctcatagttgctggctacaatgtgtctggctctgtccgaagtgatggggagcccatgaaaggcgtgaagtttcttctcttttcttctttagtaactaaagaggatgtcctgggctgcaatgtctcaccagtgcctgggttccagccccaagacgagagtctggtgtatttgtgctacacggtctccagagaagatggctcgttctctttctattccttgccaagtgggggctacactgtgattccgttctatcgaggggagaggattacctttgatgtggcgccttccagacttgacttcacagtggagcatgacagcttgaaaatcgagcccgtgttccacgtcatgggattctccgtcaccgggagggtcttgaacggacccgaaggagatggtgttccagaagcagtagtcaccctgaataaccaaatcaaagttaaaacaaaagctgatggctcattccgccttgagaacataaccacagggacatacaccatccatgctcagaaagagcacctctactttgaaacggtcaccatcaaaattgcaccgaacacacctcagctggctgacattattgcaacagggttcagtgtctgtggtcagatatcaatcattcgcttccccgacaccgtcaagcagatgaataaatacaaagttgtcctgtcatctcaagacaaggacaagtctttggtcaccgtggagacagatgctcatggatcattttgttttaaagcaaaaccagggacttacaaagtgcaggtgatggttcctgaggcagaaaccagagcagggctgacgttgaaaccccagacatttcctcttactgtgaccaacaggcccatgatggatgtggcctttgtacagttcttggcatcagtttctgggaaagtctcttgtttggacacctgtggtgacttgctggtgactctacagtccctgagccgccagggtgagaagcggagcctccagctctccggcaaggtcaacgccatgactttcacctttgacaacgtgctccctggaaaatacaaaataagcatcatgcatgaggattggtgctggaagaacaagagcctggaggtggaagtgctggaggatgacatgtctgcagttgagttcaggcagacgggctacatgctgagatgttccctgtctcacgccatcactctggaattttatcaggatggaaatgggcgtgagaatgtggggatttataacctctccaaaggagtcaaccgattctgcctgtccaagcctggtgtgtacaaagtgacccctcgctcctgccaccggtttgagcaagcgttctacacctatgacacgtcttcacctagtatcttgacattgacagccattcgccaccatgtccttggaactatcaccaccgacaaaatgatggatgtcactgtgactatcaagtcttccatcgacagtgaacccgccttggtcttaggccctctgaagtctgtgcaggagctgcggagggagcagcagctggctgagatcgaggcccgcaggcaggagagggagaaaaacggcaatgaggaaggcgaagaaagaatgaccaagcctcccgtgcaggagatggtagatgagttacaaggccccttctcgtatgatttctcttactgggcgcggtctggagagaaaatcactgttacaccgtcatctaaagagctgctcttttatcccccttcaatggaagccgttgtcagtggagaaagctgcccagggaagctgatcgagatccatgggaaggcaggcctgtttttagaaggccagatccaccccgagttggaaggagtcgagattgtcatcagtgaaaagggggcaagttcaccgctgatcacagtctttactgatgacaaaggtgcctacagtgttggccccctgcacagtgacctggagtacacggtgacctcacagaaggagggctatgttctgactgcggtggaaggaaccatcggagacttcaaggcctatgccctggcaggcgtaagctttgagataaaagctgaggatgaccagcccctcccgggagtcctcttatccctgagcggtggcctgtttcgttccaacctcttgacccaggacaacggcattctgacattctcaaacctgagccctggccagtattacttcaaacccatgatgaaggagttccggtttgagccatcctcacagatgatcgaggtgcaggaaggccagaacctgaagatcaccatcacggggtaccgaaccgcttacagttgctatggcacagtgtcttccttaaacggagagcccgaacaaggggttgccatggaagcggtgggccagaacgactgcagcatttacggagaagacaccgtgacagacgaagagggcaagttcagattacgtggattgctgccgggatgtgtgtaccacgttcagctcaaggcagaaggcaacgaccacattgagcgggcgctcccccaccatagggtgattgaggttgggaataatgacatcgatgatgtaaacatcatagttttccggcagattaatcaatttgatttaagtggaaatgtgatcacttcctctgaataccttcctacattatgggtcaagctttacaaaagcgaaaacctcgacaatccaatccagacagtttcccttggccagtccctgttcttccatttccccccactgctcagagacggcgagaactatgttgtgcttctggactccacactccccagatcccagtatgactacatcttgcctcaagtttctttcaccgcagtgggctaccataaacacatcaccttgatttttaatcccacgaggaagctgcctgaacaggacatcgcacaaggatcctacattgccctgccattgacgctgctggttctgctggccggttacaaccatgacaagctcattcctttgctgctgcagttgacaagccggctacagggagtccgcgcgctcggccaggcagcctctgacaatagcggcccagaagatgcaaagagacaagccaagaaacagaagacaaggcggacccttcgtttgcaagaagagttccagttgacgtggtgtttggttccatggcggggtaccctagggattcatctgttttcttcacttccctttgcatctgagatcctgctggaaaccacagcaacctgtatccactattaggaggtaaaaatcaataaaatggcccattcatttgtgttgtagctc

SEQ ID NO: 159969 - DNA, 4352 bp, Homo sapiens
  Payload ID: 11287
  Gene Symbol: NOMO1
  Gene Name: NODAL modulator 1
  Uniprot ID: Q15155
  ENST ID: ENST00000619292
  CDS Start-End: 172-3840
ctggggctgtgaacgtggggtcgaagcgcgcgtgcgcggcggctctggcggcggcggtggggcggggcctgggctgtcagccggcctaggaggaggaaggagcctgcggcgtgcagtgtgaggggcgggacccggctgccggcggtgggtctagctgggggaggtcgggccatgctggtgggccagggcgcggggccgctggggcccgcggtggtcaccgccgcggtggtgctgctgctgagcggcgtggggccggcgcacggctcggaggacatcgtggtgggctgcggtggcttcgtcaagtcggacgtggagatcaactactctctcatcgagataaagctgtacaccaagcatgggactttgaaataccagacagactgtgcccctaataatggttactttatgatccctttgtatgataagggggatttcattctgaagattgagcctcccctagggtggagttttgagccgacgaccgtggagctccatgtggatggagtcagtgacatctgcacaaagggtggggacatcaactttgtcttcactgggttctctgtgaatggcaaggtcctcagcaaagggcagcccctgggtcctgcgggagttcaggtgtctctgagaaacactgggaccgaagcaaagatccagtccacagttacacagcctggcggaaagtttgcattttttaaagttctgcctggagattatgaaatcctcgcaactcatccaacctgggcgttgaaagaggcaagcaccacagtgcgtgtaaccaactccaatgccaatgcggccagtcccctcatagttgctggctacaatgtgtctggctctgtccgaagtgatggggagcccatgaaaggcgtgaagtttcttctcttttcttctttagtaactaaagaggatgtcctgggctgcaatgtctcaccagtgcctgggttccagccccaagacgagagtctggtgtatttgtgctacacggtctccagagaagatggctcgttctctttctattccttgccaagtgggggctacactgtgattccgttctatcgaggggagaggattacctttgatgtggcgccttccagacttgacttcacagtggagcatgacagcttgaaaatcgagcccgtgttccacgtcatgggattctccgtcaccgggagggtcttgaacggacccgaaggagatggtgttccagaagcagtagtcaccctgaataaccaaatcaaagttaaaacaaaagctgatggctcattccgccttgagaacataaccacagggacatacaccatccatgctcagaaagagcacctctactttgaaacggtcaccatcaaaattgcaccgaacacacctcagctggctgacattattgcaacagggttcagtgtctgtggtcagatatcaatcattcgcttccccgacaccgtcaagcagatgaataaatacaaagttgtcctgtcatctcaagacaaggacaagtctttggtcaccgtggagacagatgctcatggatcattttgttttaaagcaaaaccagggacttacaaagtgcaggtgatggttcctgaggcagaaaccagagcagggctgacgttgaaaccccagacatttcctcttactgtgaccaacaggcccatgatggatgtggcctttgtacagttcttggcatcagtttctgggaaagtctcttgtttggacacctgtggtgacttgctggtgactctacagtccctgagccgccagggtgagaagcggagcctccagctctccggcaaggtcaacgccatgactttcacctttgacaacgtgctccctggaaaatacaaaataagcatcatgcatgaggattggtgctggaagaacaagagcctggaggtggaagtgctggaggatgacatgtctgcagttgagttcaggcagacgggctacatgctgagatgttccctgtctcacgccatcactctggaattttatcaggatggaaatgggcgtgagaatgtggggatttataacctctccaaaggagtcaaccgattctgcctgtccaagcctggtgtgtacaaagtgacccctcgctcctgccaccggtttgagcaagcgttctacacctatgacacgtcttcacctagtatcttgacattgacagccattcgccaccatgtccttggaactatcaccaccgacaaaatgatggatgtcactgtgactatcaagtcttccatcgacagtgaacccgccttggtcttaggccctctgaagtctgtgcaggagctgcggagggagcagcagctggctgagatcgaggcccgcaggcaggagagggagaaaaacggcaatgaggaaggcgaagaaagaatgaccaagcctcccgtgcaggagatggtagatgagttacaaggccccttctcgtatgatttctcttactgggcgcggtctggagagaaaatcactgttacaccgtcatctaaagagctgctcttttatcccccttcaatggaagccgttgtcagtggagaaagctgcccagggaagctgatcgagatccatgggaaggcaggcctgtttttagaaggccagatccaccccgagttggaaggagtcgagattgtcatcagtgaaaagggggcaagttcaccgctgatcacagtctttactgatgacaaaggtgcctacagtgttggccccctgcacagtgacctggagtacacggtgacctcacagaaggagggctatgttctgactgcggtggaaggaaccatcggagacttcaaggcctatgccctggcaggcgtaagctttgagataaaagctgaggatgaccagcccctcccgggagtcctcttatccctgagcggtggcctgtttcgttccaacctcttgacccaggacaacggcattctgacattctcaaacctgagccctggccagtattacttcaaacccatgatgaaggagttccggtttgagccatcctcacagatgatcgaggtgcaggaaggccagaacctgaagatcaccatcacggggtaccgaaccgcttacagttgctatggcacagtgtcttccttaaacggagagcccgaacaaggggttgccatggaagcggtgggccagaacgactgcagcatttacggagaagacaccgtgacagacgaagagggcaagttcagattacgtggattgctgccgggatgtgtgtaccacgttcagctcaaggcagaaggcaacgaccacattgagcgggcgctcccccaccatagggtgattgaggttgggaataatgacatcgatgatgtaaacatcatagttttccggcagattaatcaatttgatttaagtggaaatgtgatcacttcctctgaataccttcctacattatgggtcaagctttacaaaagcgaaaacctcgacaatccaatccagacagtttcccttggccagtccctgttcttccatttccccccactgctcagagacggcgagaactatgttgtgcttctggactccacactccccagatcccagtatgactacatcttgcctcaagtttctttcaccgcagtgggctaccataaacacatcaccttgatttttaatcccacgaggaagctgcctgaacaggacatcgcacaaggatcctacattgccctgccattgacgctgctggttctgctggccggttacaaccatgacaagctcattcctttgctgctgcagttgacaagccggctacagggagtccgcgcgctcggccaggcagcctctgacaatagcggcccagaagatgcaaagagacaagccaagaaacagaagacaaggcggacttgaggaggaaggggacagttgcagtctcacttgggacaggccacagccaggggtccggccactacccgcccgtgggataaaagccaaaagcatgcgtcagctaacttcagcctgtgctgctgggcccgcaccccatgtcccttgtcactgtggcatcctgcacccatcctcacccctccgtagagcccctcgtgcaatgcaatgaatggaccctcctgtcactctgctgaacagaatttattttctgagtcaaatataatttattattatttttgtcaaagaagtatttaagctgtgctgtggtgtgagaatgtcattcttgatcttcagccttcgtttgcaagaagagttccagttgacgtggtgtttggttccatggcggggtaccctagggattcatctgttttcttcacttccctttgcatctgagatcctgctggaaaccacagcaacctgtatccactattaggaggtaaaaatcaataaaatggcccattcatttgtgttgtagctca

SEQ ID NO: 159970 - DNA, 3765 bp, Homo sapiens
  Payload ID: 11287
  Gene Symbol: NOMO1
  Gene Name: NODAL modulator 1
  ENST ID: ENST00000620819
  CDS Start-End: 429-3731
gccggcggtgggtctagctgggggaggtcgggccatgctggtgggccagggcgcggggccgctggggcccgcggtggtcaccgccgcggtggtgctgctgctgagcggcgtggggccggcgcacggctcggaggacatcgtggtgggctgcggtggcttcgtcaagtcggacgtggagatcaactactctctcatcgagataaagctgtacaccaagcatgggactttgaaataccagacagactgtgcccctaataatggttactttatgatccctttgtatgataagggggatttcattctgaagattgagcctcccctagggtggagttttgagccgacgaccgtggagctccatgtggatggagtcagtgacatctgcacaaagggtggggacatcaactttgtcttcactgggttctctgtgaatggcaaggtttgcattttttaaagttctgcctggagattatgaaatcctcgcaactcatccaacctgggcgttgaaagaggcaagcaccacagtgcgtgtaaccaactccaatgccaatgcggccagtcccctcatagttgctggctacaatgtgtctggctctgtccgaagtgatggggagcccatgaaaggcgtgaagtttcttctcttttcttctttagtaactaaagaggatgtcctgggctgcaatgtctcaccagtgcctgggttccagccccaagacgagagtctggtgtatttgtgctacacggtctccagagaagatggctcgttctctttctattccttgccaagtgggggctacactgtgattccgttctatcgaggggagaggattacctttgatgtggcgccttccagacttgacttcacagtggagcatgacagcttgaaaatcgagcccgtgttccacgtcatgggattctccgtcaccgggagggtcttgaacggacccgaaggagatggtgttccagaagcagtagtcaccctgaataaccaaatcaaagttaaaacaaaagctgatggctcattccgccttgagaacataaccacagggacatacaccatccatgctcagaaagagcacctctactttgaaacggtcaccatcaaaattgcaccgaacacacctcagctggctgacattattgcaacagggttcagtgtctgtggtcagatatcaatcattcgcttccccgacaccgtcaagcagatgaataaatacaaagttgtcctgtcatctcaagacaaggacaagtctttggtcaccgtggagacagatgctcatggatcattttgttttaaagcaaaaccagggacttacaaagtgcaggtgatggttcctgaggcagaaaccagagcagggctgacgttgaaaccccagacatttcctcttactgtgaccaacaggcccatgatggatgtggcctttgtacagttcttggcatcagtttctgggaaagtctcttgtttggacacctgtggtgacttgctggtgactctacagtccctgagccgccagggtgagaagcggagcctccagctctccggcaaggtcaacgccatgactttcacctttgacaacgtgctccctggaaaatacaaaataagcatcatgcatgaggattggtgctggaagaacaagagcctggaggtggaagtgctggaggatgacatgtctgcagttgagttcaggcagacgggctacatgctgagatgttccctgtctcacgccatcactctggaattttatcaggatggaaatgggcgtgagaatgtggggatttataacctctccaaaggagtcaaccgattctgcctgtccaagcctggtgtgtacaaagtgacccctcgctcctgccaccggtttgagcaagcgttctacacctatgacacgtcttcacctagtatcttgacattgacagccattcgccaccatgtccttggaactatcaccaccgacaaaatgatggatgtcactgtgactatcaagtcttccatcgacagtgaacccgccttggtcttaggccctctgaagtctgtgcaggagctgcggagggagcagcagctggctgagatcgaggcccgcaggcaggagagggagaaaaacggcaatgaggaaggcgaagaaagaatgaccaagcctcccgtgcaggagatggtagatgagttacaaggccccttctcgtatgatttctcttactgggcgcggtctggagagaaaatcactgttacaccgtcatctaaagagctgctcttttatcccccttcaatggaagccgttgtcagtggagaaagctgcccagggaagctgatcgagatccatgggaaggcaggcctgtttttagaaggccagatccaccccgagttggaaggagtcgagattgtcatcagtgaaaagggggcaagttcaccgctgatcacagtctttactgatgacaaaggtgcctacagtgttggccccctgcacagtgacctggagtacacggtgacctcacagaaggagggctatgttctgactgcggtggaaggaaccatcggagacttcaaggcctatgccctggcaggcgtaagctttgagataaaagctgaggatgaccagcccctcccgggagtcctcttatccctgagcggtggcctgtttcgttccaacctcttgacccaggacaacggcattctgacattctcaaacctgagccctggccagtattacttcaaacccatgatgaaggagttccggtttgagccatcctcacagatgatcgaggtgcaggaaggccagaacctgaagatcaccatcacggggtaccgaaccgcttacagttgctatggcacagtgtcttccttaaacggagagcccgaacaaggggttgccatggaagcggtgggccagaacgactgcagcatttacggagaagacaccgtgacagacgaagagggcaagttcagattacgtggattgctgccgggatgtgtgtaccacgttcagctcaaggcagaaggcaacgaccacattgagcgggcgctcccccaccatagggtgattgaggttgggaataatgacatcgatgatgtaaacatcatagttttccggcagattaatcaatttgatttaagtggaaatgtgatcacttcctctgaataccttcctacattatgggtcaagctttacaaaagcgaaaacctcgacaatccaatccagacagtttcccttggccagtccctgttcttccatttccccccactgctcagagacggcgagaactatgttgtgcttctggactccacactccccagatcccagtatgactacatcttgcctcaagtttctttcaccgcagtgggctaccataaacacatcaccttgatttttaatcccacgaggaagctgcctgaacaggacatcgcacaaggatcctacattgccctgccattgacgctgctggttctgctggccggttacaaccatgacaagctcattcctttgctgctgcagttgacaagccggctacagggagtccgcgcgctcggccaggcagcctctgacaatagcggcccagaagatgcaaagagacaagccaagaaacagaagacaaggcggacccttcgtttgcaagaagagttccagttgacgtggtgtttggttccatggcggggtaccctagggattcatctgttttcttcacttccctttgcatctgagatcctgctggaaaccacagcaacctgtatccactattaggaggtaaaaatcaataaaatggcccattcatttg

SEQ ID NO: 159971 - DNA, 3921 bp, Homo sapiens
  Payload ID: 11287
  Gene Symbol: NOMO1
  Gene Name: NODAL modulator 1
  ENST ID: ENST00000620755
  CDS Start-End: 73-3876
gagcctgcggcgtgcagtgtgaggggcgggacccggctgccggcggtgggtctagctgggggaggtcgggccatgctggtgggccagggcgcggggccgctggggcccgcggtggtcaccgccgcggtggtgctgctgctgagcggcgtggggccggcgcacggctcggaggacatcgtggtgggctgcggtggcttcgtcaagtcggacgtggagatcaactactctctcatcgagataaagctgtacaccaagcatgggactttgaaataccagacagactgtgcccctaataatggttactttatgatccctttgtatgataagggggatttcattctgaagattgagcctcccctagggtggagttttgagccgacgaccgtggagctccatgtggatggagtcagtgacatctgcacaaagggtggggacatcaactttgtcttcactgggttctctgtgaatggcaaggtcctcagcaaagggcagcccctgggtcctgcgggagttcaggtgtctctgagaaacactgggaccgaagcaaagatccagtccacagttacacagcctggcggaaagtttgcattttttaaagttctgcctggagattatgaaatcctcgcaactcatccaacctgggcgttgaaagaggcaagcaccacagtgcgtgtaaccaactccaatgccaatgcggccagtcccctcatagttgctggctacaatgtgtctggctctgtccgaagtgatggggagcccatgaaaggcgtgaagtttcttctcttttcttctttagtaactaaagaggatgtcctgggctgcaatgtctcaccagtgcctgggttccagccccaagacgagagtctggtgtatttgtgctacacggtctccagagaagatggctcgttctctttctattccttgccaagtgggggctacactgtgattccgttctatcgaggggagaggattacctttgatgtggcgccttccagacttgacttcacagtggagcatgacagcttgaaaatcgagcccgtgttccacgtcatgggattctccgtcaccgggagggtcttgaacggacccgaaggagatggtgttccagaagcagtagtcaccctgaataaccaaatcaaagttaaaacaaaagctgatggctcattccgccttgagaacataaccacagggacatacaccatccatgctcagaaagagcacctctactttgaaacggtcaccatcaaaattgcaccgaacacacctcagctggctgacattattgcaacagggttcagtgtctgtggtcagatatcaatcattcgcttccccgacaccgtcaagcagatgaataaatacaaagttgtcctgtcatctcaagacaaggacaagtctttggtcaccgtggagacagatgctcatggatcattttgttttaaagcaaaaccagggacttacaaagtgcaggtgatggttcctgaggcagaaaccagagcagggctgacgttgaaaccccagacatttcctcttactgtgaccaacaggcccatgatggatgtggcctttgtacagttcttggcatcagtttctgggaaagtctcttgtttggacacctgtggtgacttgctggtgactctacagtccctgagccgccagggtgagaagcggagcctccagctctccggcaaggtcaacgccatgactttcacctttgacaacgtgctccctggaaaatacaaaataagcatcatgcatgaggattggtgctggaagaacaagagcctggaggtggaagtgctggaggatgacatgtctgcagttgagttcaggcagacgggctacatgctgagatgttccctgtctcacgccatcactctggaattttatcaggatggaaatgggcgtgagaatgtggggatttataacctctccaaaggagtcaaccgattctgcctgtccaagcctggtgtgtacaaagtgacccctcgctcctgccaccggtttgagcaagcgttctacacctatgacacgtcttcacctagtatcttgacattgacagccattcgccaccatgtccttggaactatcaccaccgacaaaatgatggatgtcactgtgactatcaagtcttccatcgacagtgaacccgccttggtcttaggccctctgaagtctgtgcaggagctgcggagggagcagcagctggctgagatcgaggcccgcaggcaggagagggagaaaaacggcaatgaggaaggcgaagaaagaatgaccaagcctcccgtgcaggagatggtagatgagttacaaggccccttctcgtatgatttctcttactgggcgcggtctggagagaaaatcactgttacaccgtcatctaaagagctgctcttttatcccccttcaatggaagccgttgtcagtggagaaagctgcccagggaagctgatcgagatccatgggaaggcaggcctgtttttagaaggccagatccaccccgagttggaaggagtcgagattgtcatcagtgaaaagggggcaagttcaccgctgatcacagtctttactgatgacaaaggtgcctacagtgttggccccctgcacagtgacctggagtacacggtgacctcacagaaggagggctatgttctgactgcggtggaaggaaccatcggagacttcaaggcctatgccctggcaggcgtaagctttgagataaaagctgaggatgaccagcccctcccgggagtcctcttatccctgagcggtggcctgtttcgttccaacctcttgacccaggacaacggcattctgacattctcaaacctgagccctggccagtattacttcaaacccatgatgaaggagttccggtttgagccatcctcacagatgatcgaggtgcaggaaggccagaacctgaagatcaccatcacggggtaccgaaccgcttacagttgctatggcacagtgtcttccttaaacggagagcccgaacaaggggttgccatggaagcggtgggccagaacgactgcagcatttacggagaagacaccgtgacagacgaagagggcaagttcagattacgtggattgctgccgggatgtgtgtaccacgttcagctcaaggcagaaggcaacgaccacattgagcgggcgctcccccaccatagggtgattgaggttgggaataatgacatcgatgatgtaaacatcatagttttccggcagattaatcaatttgatttaagtggaaatgtgatcacttcctctgaataccttcctacattatgggtcaagctttacaaaagcgaaaacctcgacaatccaatccagacagtttcccttggccagtccctgttcttccatttccccccactgctcagagacggcgagaactatgttgtgcttctggactccacactccccagatcccagtatgactacatcttgcctcaagtttctttcaccgcagtgggctaccataaacacatcaccttgatttttaatcccacgaggaagctgcctgaacaggacatcgcacaaggatcctacattgccctgccattgacgctgctggttctgctggccggttacaaccatgacaagctcattcctttgctgctgcagttgacaagccggctacagggagtccgcgcgctcggccaggcagcctctgacaatagcggcccagaagatgcaaagagacaagccaagaaacagaagacaaggcggacccttcgtttgcaaggagagttccagttgacgtggtgtttggttccatggcggggtaccctagggattcatctgttttcttcacttccctttgcatctgagatcctgctggaaaccacagcaacctgtatccactattaggaggtaaaaatcaataaaatggcccattcatttgtgttgtagctc

SEQ ID NO: 159972 - DNA, 482 bp, Homo sapiens
  Payload ID: 11287
  Gene Symbol: NOMO1
  Gene Name: NODAL modulator 1
  ENST ID: ENST00000633436
  CDS Start-End: 1-433
aagcgaaaacctcgacaatccaatccagacagtttcccttggccagtccctgttcttccatttccccccactgctcagagacggcgagaactatgttgtgcttctggactccacactccccagatcccagtatgactacatcttgcctcaagtttctttcaccgcagtgggctaccataaacacatcaccttgatttttaatcccacgaggaagctgcctgaacaggacatcgcacaaggatcctacattgccctgccattgacgctgctggttctgctggccggttacaaccatgacaagctcattcctttgctgctgcagttgacaagccggctacagggagtccgcgcgctcggccaggcagcctctgacaatagcggcccagaagatgcaaagagacaagccaagaaacagaagacaaggcggacttgaggaggaaggggacagttgcagtctcacttgggacaggccacagccaggg

SEQ ID NO: 159973 - DNA, 4352 bp, Homo sapiens
  Payload ID: 11288
  Gene Symbol: NOMO2
  Gene Name: NODAL modulator 2
  Uniprot ID: Q5JPE7
  ENST ID: ENST00000330537
  CDS Start-End: 172-3840
ctggggctgtgaacgtggcgtcgaagcgcgcgtgcgcggcggctctggcggcggcggtggggcggggcctgggctgtcagccggcctaggaggaggaaggagcctgcggcgtgcagtgtgaggggcgggacccggctgccggcggtgggtctagctgggggaggtcgggccatgctggtgggccagggcgcggggctgctggggcccgcggtggtcaccgccgcggtggtgctgctgctgagcggcgtggggccggcgcacggctcggaggacatcgtggtgggctgcggtggcttcgtcaagtcggacgtggagatcaactactcgctcatcgagataaagctgtacaccaagcatgggactttgaaataccagacagactgtgcccctaataatggttactttatgatccctttgtatgataagggggatttcattctgaagattgagcctcccctagggtggagttttgagccgacgaccgtggagctccatgtggatggagtcagtgacatctgcacaaagggtggggacatcaactttgtcttcactgggttctctgtgaatggcaaggtcctcagcaaagggcagcccctgggtcctgcgggagttcaggtgtctctgagaaacactgggaccgaagcaaagatccagtccacagttacacagcctggcggaaagtttgcattttttaaagttctgcctggagattatgaaatcctcgcaactcatccaacctgggcgttgaaagaggcaagcaccacagtgcgtgtaaccaactccaatgccaatgcggccagtcccctcatagttgctggctacaatgtgtctggctctgtccgaagtgatggggagcccatgaaaggggtgaagtttcttctcttttcttctttagtaactaaagaggatgtcctgggctgcaatgtctcaccagtgcctgggttccagccccaagacgagagtctggtgtatttgtgctacacggtctccagagaagatggctcgttctctttctattccttgccaagtgggggctacactgtgattccgttctatcgaggggagaggattacctttgatgtggcgccttccagacttgacttcacagtggagcatgacagcttgaaaatcgagcccgtgttccacgtcatgggattctccgtcaccgggagggtcttgaacggacccgaaggagatggtgttccagaagcagtagtcaccctgaataaccaaatcaaagttaaaacaaaagctgatggctcattccgccttgagaacataaccacagggacatacaccatccatgctcagaaagagcacctctactttgaaacggtcaccatcaaaattgcaccgaacacacctcagctggctgacattgttgcaacagggttcagtgtctgtggtcggatatcaatcattcgcttcccggacaccgtcaagcagatgaataaatacaaagttgtcctgtcatctcaagacaaggacaagtctttggtcaccgtggagacagatgctcatggatcattttgttttaaagcaaaaccagggacttacaaagtgcaggtgatggttcctgaggcagaaaccagagcagggctgacgttgaaaccccagacatttcctcttactgtgaccgacaggcccgtgatggatgtggcctttgtacagttcttggcatcagtttctgggaaagtctcttgtttggacacctgtggtgacttgctggtgactctacagtccctgagccgccagggtgagaagcggagcctccagctctccggcaaggtcaacgccatgactttcacctttgacaacgtgctccctggaaaatacaaaataagcatcatgcatgaggattggtgctggaagaacaagagcctggaggtggaagtgctggaggatgacgtgtctgcagttgagttcaggcagacgggctacatgctgagatgttccctgtctcacgccatcactctggaattttatcaggatggaaatgggcgtgagaatgtggggatttataacctctccaaaggagtcaaccgattctgcctgtccaagcctggtgtgtacaaagtgacccctcgctcctgccaccggtttgagcaagcgttctacacctatgacacgtcttcacctagtatcttgacattgacagccattcgccaccatgtccttggaactatcaccaccgacaaaatgatggatgtcactgtgactatcaagtcttccatcgacagtgaacccgccttggtcttaggccctctgaagtctgtgcaggagctgcggagggagcagcagctggctgagatcgaggcccgcaggcaggagagggagaaaaacggcaatgaggaaggtgaagaaagaatgaccaagcctcccgtgcaggagatggtagatgagttacaaggccccttctcgtatgatttctcttactgggcgcggtctggagagaaaatcactgttacaccgtcatctaaagagctgctcttttatcccccttcaatggaagccgttgtcagtggagaaagctgcccagggaagctgatcgagatccacgggaaggcaggcctgtttttagaaggccagatccaccccgagttggaaggagtcgagattgtcatcagtgaaaagggggcaagttcaccgctgatcacagtctttactgatgacaaaggtgcctacagtgttggccccctgcacagtgacctggagtacacggtgacctcacagaaggagggctatgttctgactgcagtggaaggaaccatcggagacttcaaggcctatgccctggcaggcgtaagctttgagataaaagctgaggatgaccagcccctcccgggagtcctcttatccctgagtggtggcctgtttcgttccaacctcttgacccaggacaacggcattctgacattctcaaacctgagccctggccagtattacttcaaacccatgatgaaggagttccggtttgagccatcctcacagatgatcgaggtgcaggaaggccagaacctgaagatcaccatcacggggtaccgaaccgcttacagttgctatggcacagtgtcttccttaaacggagagcccgaacaaggggttgccatggaagcggtgggccagaacgactgcagcatttacggagaagacaccgtgacagacgaagagggcaagttcagattacgtggattgctgccgggatgtgtgtaccacgttcagctcaaggcagaaggcaacgaccacattgagcgggcgctcccccaccatagggtgattgaggttgggaataatgacatcgatgatgtaaacatcatagttttccggcagattaatcaatttgatttaagtggaaatgtgatcacttcctctgaataccttcctacgttatgggtcaagctttacaaaagcgaaaacctcgacaatccaatccagacagtttcccttggccagtccctgttcttccatttccccccactgctcagagatggcgagaactatgttgtgcttctggactccacactccccagatcccagtatgactacatcttgcctcaagtttctttcaccgcagtgggctaccataaacacatcaccttgatttttaatcccacgaggaagctgcctgaacaggacatcgcacaaggatcctacattgccctgccattgacgctgctggttctgctggccggttacaaccatgacaagctcattcctttgctgctgcagttgacaagccggctacagggagtcggcgcgctcggccaggcagcctctgacaatagcggcccagaagatgcaaagagacaagccaagaaacagaagacaaggcggacgtgaggaggaaggggacagttgcagtctcacttgggacaggccacagccaggggtccggccactacccgcccgtgggataaaagccaaaagcatgcgtcagctaacttcagcctgtgctgctgggcccgcaccccatgtcccttgtcactgtggcatcctgcacccatcctcacccctccgtagagcccctcgtgcaatgcaatgaatggaccctcctgtcactctgctgaacagaatttattttctgagtcaaatataatttattattatttttgtcaaagaagtatttaagctgtgctgtggtgtgagaatgtcattcttgatcttcagccttcgtttgcaagaagagttccagttgatgtggtgtttggttccatggcggggtaccctagggattcatctgttttcttcacttccctttgcatctgagatcctgctggaaaccacggcaacctgtatccactattaggaggtaaaaatcaataaaatggcccattcatttgtgttgtagctca

SEQ ID NO: 159974 - DNA, 3911 bp, Homo sapiens
  Payload ID: 11288
  Gene Symbol: NOMO2
  Gene Name: NODAL modulator 2
  Uniprot ID: Q5JPE7
  ENST ID: ENST00000381474
  CDS Start-End: 67-3870
gcggcgtgcagtgtgaggggcgggacccggctgccggcggtgggtctagctgggggaggtcgggccatgctggtgggccagggcgcggggctgctggggcccgcggtggtcaccgccgcggtggtgctgctgctgagcggcgtggggccggcgcacggctcggaggacatcgtggtgggctgcggtggcttcgtcaagtcggacgtggagatcaactactcgctcatcgagataaagctgtacaccaagcatgggactttgaaataccagacagactgtgcccctaataatggttactttatgatccctttgtatgataagggggatttcattctgaagattgagcctcccctagggtggagttttgagccgacgaccgtggagctccatgtggatggagtcagtgacatctgcacaaagggtggggacatcaactttgtcttcactgggttctctgtgaatggcaaggtcctcagcaaagggcagcccctgggtcctgcgggagttcaggtgtctctgagaaacactgggaccgaagcaaagatccagtccacagttacacagcctggcggaaagtttgcattttttaaagttctgcctggagattatgaaatcctcgcaactcatccaacctgggcgttgaaagaggcaagcaccacagtgcgtgtaaccaactccaatgccaatgcggccagtcccctcatagttgctggctacaatgtgtctggctctgtccgaagtgatggggagcccatgaaaggggtgaagtttcttctcttttcttctttagtaactaaagaggatgtcctgggctgcaatgtctcaccagtgcctgggttccagccccaagacgagagtctggtgtatttgtgctacacggtctccagagaagatggctcgttctctttctattccttgccaagtgggggctacactgtgattccgttctatcgaggggagaggattacctttgatgtggcgccttccagacttgacttcacagtggagcatgacagcttgaaaatcgagcccgtgttccacgtcatgggattctccgtcaccgggagggtcttgaacggacccgaaggagatggtgttccagaagcagtagtcaccctgaataaccaaatcaaagttaaaacaaaagctgatggctcattccgccttgagaacataaccacagggacatacaccatccatgctcagaaagagcacctctactttgaaacggtcaccatcaaaattgcaccgaacacacctcagctggctgacattgttgcaacagggttcagtgtctgtggtcggatatcaatcattcgcttcccggacaccgtcaagcagatgaataaatacaaagttgtcctgtcatctcaagacaaggacaagtctttggtcaccgtggagacagatgctcatggatcattttgttttaaagcaaaaccagggacttacaaagtgcaggtgatggttcctgaggcagaaaccagagcagggctgacgttgaaaccccagacatttcctcttactgtgaccgacaggcccgtgatggatgtggcctttgtacagttcttggcatcagtttctgggaaagtctcttgtttggacacctgtggtgacttgctggtgactctacagtccctgagccgccagggtgagaagcggagcctccagctctccggcaaggtcaacgccatgactttcacctttgacaacgtgctccctggaaaatacaaaataagcatcatgcatgaggattggtgctggaagaacaagagcctggaggtggaagtgctggaggatgacgtgtctgcagttgagttcaggcagacgggctacatgctgagatgttccctgtctcacgccatcactctggaattttatcaggatggaaatgggcgtgagaatgtggggatttataacctctccaaaggagtcaaccgattctgcctgtccaagcctggtgtgtacaaagtgacccctcgctcctgccaccggtttgagcaagcgttctacacctatgacacgtcttcacctagtatcttgacattgacagccattcgccaccatgtccttggaactatcaccaccgacaaaatgatggatgtcactgtgactatcaagtcttccatcgacagtgaacccgccttggtcttaggccctctgaagtctgtgcaggagctgcggagggagcagcagctggctgagatcgaggcccgcaggcaggagagggagaaaaacggcaatgaggaaggtgaagaaagaatgaccaagcctcccgtgcaggagatggtagatgagttacaaggccccttctcgtatgatttctcttactgggcgcggtctggagagaaaatcactgttacaccgtcatctaaagagctgctcttttatcccccttcaatggaagccgttgtcagtggagaaagctgcccagggaagctgatcgagatccacgggaaggcaggcctgtttttagaaggccagatccaccccgagttggaaggagtcgagattgtcatcagtgaaaagggggcaagttcaccgctgatcacagtctttactgatgacaaaggtgcctacagtgttggccccctgcacagtgacctggagtacacggtgacctcacagaaggagggctatgttctgactgcagtggaaggaaccatcggagacttcaaggcctatgccctggcaggcgtaagctttgagataaaagctgaggatgaccagcccctcccgggagtcctcttatccctgagtggtggcctgtttcgttccaacctcttgacccaggacaacggcattctgacattctcaaacctgagccctggccagtattacttcaaacccatgatgaaggagttccggtttgagccatcctcacagatgatcgaggtgcaggaaggccagaacctgaagatcaccatcacggggtaccgaaccgcttacagttgctatggcacagtgtcttccttaaacggagagcccgaacaaggggttgccatggaagcggtgggccagaacgactgcagcatttacggagaagacaccgtgacagacgaagagggcaagttcagattacgtggattgctgccgggatgtgtgtaccacgttcagctcaaggcagaaggcaacgaccacattgagcgggcgctcccccaccatagggtgattgaggttgggaataatgacatcgatgatgtaaacatcatagttttccggcagattaatcaatttgatttaagtggaaatgtgatcacttcctctgaataccttcctacgttatgggtcaagctttacaaaagcgaaaacctcgacaatccaatccagacagtttcccttggccagtccctgttcttccatttccccccactgctcagagatggcgagaactatgttgtgcttctggactccacactccccagatcccagtatgactacatcttgcctcaagtttctttcaccgcagtgggctaccataaacacatcaccttgatttttaatcccacgaggaagctgcctgaacaggacatcgcacaaggatcctacattgccctgccattgacgctgctggttctgctggccggttacaaccatgacaagctcattcctttgctgctgcagttgacaagccggctacagggagtcggcgcgctcggccaggcagcctctgacaatagcggcccagaagatgcaaagagacaagccaagaaacagaagacaaggcggacccttcgtttgcaagaagagttccagttgatgtggtgtttggttccatggcggggtaccctagggattcatctgttttcttcacttccctttgcatctgagatcctgctggaaaccacggcaacctgtatccactattaggaggtaaaaatcaataaaatggcccattcatttgtgttgta

SEQ ID NO: 159975 - DNA, 3765 bp, Homo sapiens
  Payload ID: 11288
  Gene Symbol: NOMO2
  Gene Name: NODAL modulator 2
  Uniprot ID: Q5JPE7
  ENST ID: ENST00000543392
  CDS Start-End: 429-3731
gccggcggtgggtctagctgggggaggtcgggccatgctggtgggccagggcgcggggctgctggggcccgcggtggtcaccgccgcggtggtgctgctgctgagcggcgtggggccggcgcacggctcggaggacatcgtggtgggctgcggtggcttcgtcaagtcggacgtggagatcaactactcgctcatcgagataaagctgtacaccaagcatgggactttgaaataccagacagactgtgcccctaataatggttactttatgatccctttgtatgataagggggatttcattctgaagattgagcctcccctagggtggagttttgagccgacgaccgtggagctccatgtggatggagtcagtgacatctgcacaaagggtggggacatcaactttgtcttcactgggttctctgtgaatggcaaggtttgcattttttaaagttctgcctggagattatgaaatcctcgcaactcatccaacctgggcgttgaaagaggcaagcaccacagtgcgtgtaaccaactccaatgccaatgcggccagtcccctcatagttgctggctacaatgtgtctggctctgtccgaagtgatggggagcccatgaaaggggtgaagtttcttctcttttcttctttagtaactaaagaggatgtcctgggctgcaatgtctcaccagtgcctgggttccagccccaagacgagagtctggtgtatttgtgctacacggtctccagagaagatggctcgttctctttctattccttgccaagtgggggctacactgtgattccgttctatcgaggggagaggattacctttgatgtggcgccttccagacttgacttcacagtggagcatgacagcttgaaaatcgagcccgtgttccacgtcatgggattctccgtcaccgggagggtcttgaacggacccgaaggagatggtgttccagaagcagtagtcaccctgaataaccaaatcaaagttaaaacaaaagctgatggctcattccgccttgagaacataaccacagggacatacaccatccatgctcagaaagagcacctctactttgaaacggtcaccatcaaaattgcaccgaacacacctcagctggctgacattgttgcaacagggttcagtgtctgtggtcggatatcaatcattcgcttcccggacaccgtcaagcagatgaataaatacaaagttgtcctgtcatctcaagacaaggacaagtctttggtcaccgtggagacagatgctcatggatcattttgttttaaagcaaaaccagggacttacaaagtgcaggtgatggttcctgaggcagaaaccagagcagggctgacgttgaaaccccagacatttcctcttactgtgaccgacaggcccgtgatggatgtggcctttgtacagttcttggcatcagtttctgggaaagtctcttgtttggacacctgtggtgacttgctggtgactctacagtccctgagccgccagggtgagaagcggagcctccagctctccggcaaggtcaacgccatgactttcacctttgacaacgtgctccctggaaaatacaaaataagcatcatgcatgaggattggtgctggaagaacaagagcctggaggtggaagtgctggaggatgacgtgtctgcagttgagttcaggcagacgggctacatgctgagatgttccctgtctcacgccatcactctggaattttatcaggatggaaatgggcgtgagaatgtggggatttataacctctccaaaggagtcaaccgattctgcctgtccaagcctggtgtgtacaaagtgacccctcgctcctgccaccggtttgagcaagcgttctacacctatgacacgtcttcacctagtatcttgacattgacagccattcgccaccatgtccttggaactatcaccaccgacaaaatgatggatgtcactgtgactatcaagtcttccatcgacagtgaacccgccttggtcttaggccctctgaagtctgtgcaggagctgcggagggagcagcagctggctgagatcgaggcccgcaggcaggagagggagaaaaacggcaatgaggaaggtgaagaaagaatgaccaagcctcccgtgcaggagatggtagatgagttacaaggccccttctcgtatgatttctcttactgggcgcggtctggagagaaaatcactgttacaccgtcatctaaagagctgctcttttatcccccttcaatggaagccgttgtcagtggagaaagctgcccagggaagctgatcgagatccacgggaaggcaggcctgtttttagaaggccagatccaccccgagttggaaggagtcgagattgtcatcagtgaaaagggggcaagttcaccgctgatcacagtctttactgatgacaaaggtgcctacagtgttggccccctgcacagtgacctggagtacacggtgacctcacagaaggagggctatgttctgactgcagtggaaggaaccatcggagacttcaaggcctatgccctggcaggcgtaagctttgagataaaagctgaggatgaccagcccctcccgggagtcctcttatccctgagtggtggcctgtttcgttccaacctcttgacccaggacaacggcattctgacattctcaaacctgagccctggccagtattacttcaaacccatgatgaaggagttccggtttgagccatcctcacagatgatcgaggtgcaggaaggccagaacctgaagatcaccatcacggggtaccgaaccgcttacagttgctatggcacagtgtcttccttaaacggagagcccgaacaaggggttgccatggaagcggtgggccagaacgactgcagcatttacggagaagacaccgtgacagacgaagagggcaagttcagattacgtggattgctgccgggatgtgtgtaccacgttcagctcaaggcagaaggcaacgaccacattgagcgggcgctcccccaccatagggtgattgaggttgggaataatgacatcgatgatgtaaacatcatagttttccggcagattaatcaatttgatttaagtggaaatgtgatcacttcctctgaataccttcctacgttatgggtcaagctttacaaaagcgaaaacctcgacaatccaatccagacagtttcccttggccagtccctgttcttccatttccccccactgctcagagatggcgagaactatgttgtgcttctggactccacactccccagatcccagtatgactacatcttgcctcaagtttctttcaccgcagtgggctaccataaacacatcaccttgatttttaatcccacgaggaagctgcctgaacaggacatcgcacaaggatcctacattgccctgccattgacgctgctggttctgctggccggttacaaccatgacaagctcattcctttgctgctgcagttgacaagccggctacagggagtcggcgcgctcggccaggcagcctctgacaatagcggcccagaagatgcaaagagacaagccaagaaacagaagacaaggcggacccttcgtttgcaagaagagttccagttgatgtggtgtttggttccatggcggggtaccctagggattcatctgttttcttcacttccctttgcatctgagatcctgctggaaaccacggcaacctgtatccactattaggaggtaaaaatcaataaaatggcccattcatttg

SEQ ID NO: 159976 - DNA, 682 bp, Homo sapiens
  Payload ID: 11288
  Gene Symbol: NOMO2
  Gene Name: NODAL modulator 2
  ENST ID: ENST00000562312
  CDS Start-End: 137-322
gcggcggctctggcggcggcggtggggcggggcctgggctgtcagccggcctaggaggaggaaggagcctgcggcgtgcagtgtgaggggcgggacccggctgccggcggtgggtctagctgggggaggtcgggccatgctggtgggccagggcgcggggctgctggggcccgcggtggtcaccgccgcggtggtgctgctgctgagcggcgtggggccggcgcacggctcggaggacatcgtggtgggctgcggtggcttcgtcaagtcggacgtggagatcaactactcgctcatcgagcaggtgcttaatatgcattgatgtgaatctgtacaaccacatgaaaaggagcggctctgtgtctacacctgaagaaaccgaacacgagcttgcccaaggccacacaacacgtggaagactcagatggcatttgggcatcttactgggttaacacttcgtgtctggtaatgctcagaatataaagctgtacaccaagcatgggactttgaaataccagacagactgtgcccctaataatggttactttatgatccctttgtatgataagggggatttcattctgaagattgagcctcccctagggtggagttttgagccgacgaccgtggagctccatgtggatggagtcagtgacatctgcacaaagggtggggacatcaa

SEQ ID NO: 159977 - DNA, 551 bp, Homo sapiens
  Payload ID: 11288
  Gene Symbol: NOMO2
  Gene Name: NODAL modulator 2
  ENST ID: ENST00000567831
  CDS Start-End: 1-242
agacgggctacatgctgagatgttccctgtctcacgccatcactctggtatgtacggcttatggagtctcttatttggaaaagcgctcgccttgtggatgtcaagaaagactaacatcccaggaatattgtaaacgtaggaattttatcaggatggaaatgggcgtgagaatgtggggatttataacctctccaaaggagtcaaccgattctgcctgtccaagcctggtgtgtacaaagtgacccctcgctcctgccaccggtttgagcaagcgttctacacctatgacacgtcttcacctagtatcttgacattgacagccattcgccaccatgtccttggaactatcaccaccgacaaaatgatggatgtcactgtgactatcaagtcttccatcgacagtgaacccgccttggtcttaggccctctgaagtctgtgcaggagctgcggagggagcagcagctggctgagatcgaggcccgcaggcaggagagggagaaaaacggcaatgaggaaggtgaagaaagaatgaccaagcctcccgtgcagg

SEQ ID NO: 159978 - DNA, 901 bp, Homo sapiens
  Payload ID: 11288
  Gene Symbol: NOMO2
  Gene Name: NODAL modulator 2
  ENST ID: ENST00000569051
  CDS Start-End: 1-671
tgtcatctcaagacaaggacaagtctttggtcaccgtggagacagatgctcatggatcattttgttttaaagcaaaaccagggacttacaaagtgcaggtgatggttcctgaggcagaaaccagagcagggctgacgttgaaaccccagacatttcctcttactgtgaccgacaggcccgtgatggatgtggcctttgtacagttcttggcatcagtttctgggaaagtctcttgtttggacacctgtggtgacttgctggtgactctacagtccctgagccgccagggtgagaagcggagcctccagctctccggcaaggtcaacgccatgactttcacctttgacaacgtgctccctggaaaatacaaaataagcatcatgcatgaggattggtgctggaagaacaagagcctggaggtggaagtgctggaggatgacgtgtctgcagttgagttcaggcagacgggctacatgctgagatgttccctgtctcacgccatcactctggcgcagccctattgttcaggagagatgtgccctgggaccagcgagctaaagacccctaggaattttatcaggatggaaatgggcgtgagaatgtggggatttataacctctccaaaggagtcaaccgattctgcctgtccaagcctggtgtgtacaaagtgacccctcgctcctgccaccggtttgagcaagcgttctacacctatgacacgtcttcacctagtatcttgacattgacagccattcgccaccatgtccttggaactatcaccaccgacaaaatgatggatgtcactgtgactatcaagtcttccatcgacagtgaacccgccttggtcttaggccctctgaagtctgtgcaggagctgcggagggagcagcagctggctgag

SEQ ID NO: 159979 - DNA, 3765 bp, Homo sapiens; identical to SEQ ID NO: 159975
  Payload ID: 11288
  Gene Symbol: NOMO2
  Gene Name: NODAL modulator 2
  ENST ID: ENST00000564991
  CDS Start-End: 35-451

SEQ ID NO: 159980 - DNA, 3921 bp, Homo sapiens
  Payload ID: 11288
  Gene Symbol: NOMO2
  Gene Name: NODAL modulator 2
  Uniprot ID: Q5JPE7
  ENST ID: ENST00000621364
  CDS Start-End: 73-3876
gagcctgcggcgtgcagtgtgaggggcgggacccggctgccggcggtgggtctagctgggggaggtcgggccatgctggtgggccagggcgcggggctgctggggcccgcggtggtcaccgccgcggtggtgctgctgctgagcggcgtggggccggcgcacggctcggaggacatcgtggtgggctgcggtggcttcgtcaagtcggacgtggagatcaactactcgctcatcgagataaagctgtacaccaagcatgggactttgaaataccagacagactgtgcccctaataatggttactttatgatccctttgtatgataagggggatttcattctgaagattgagcctcccctagggtggagttttgagccgacgaccgtggagctccatgtggatggagtcagtgacatctgcacaaagggtggggacatcaactttgtcttcactgggttctctgtgaatggcaaggtcctcagcaaagggcagcccctgggtcctgcgggagttcaggtgtctctgagaaacactgggaccgaagcaaagatccagtccacagttacacagcctggcggaaagtttgcattttttaaagttctgcctggagattatgaaatcctcgcaactcatccaacctgggcgttgaaagaggcaagcaccacagtgcgtgtaaccaactccaatgccaatgcggccagtcccctcatagttgctggctacaatgtgtctggctctgtccgaagtgatggggagcccatgaaaggggtgaagtttcttctcttttcttctttagtaactaaagaggatgtcctgggctgcaatgtctcaccagtgcctgggttccagccccaagacgagagtctggtgtatttgtgctacacggtctccagagaagatggctcgttctctttctattccttgccaagtgggggctacactgtgattccgttctatcgaggggagaggattacctttgatgtggcgccttccagacttgacttcacagtggagcatgacagcttgaaaatcgagcccgtgttccacgtcatgggattctccgtcaccgggagggtcttgaacggacccgaaggagatggtgttccagaagcagtagtcaccctgaataaccaaatcaaagttaaaacaaaagctgatggctcattccgccttgagaacataaccacagggacatacaccatccatgctcagaaagagcacctctactttgaaacggtcaccatcaaaattgcaccgaacacacctcagctggctgacattgttgcaacagggttcagtgtctgtggtcggatatcaatcattcgcttcccggacaccgtcaagcagatgaataaatacaaagttgtcctgtcatctcaagacaaggacaagtctttggtcaccgtggagacagatgctcatggatcattttgttttaaagcaaaaccagggacttacaaagtgcaggtgatggttcctgaggcagaaaccagagcagggctgacgttgaaaccccagacatttcctcttactgtgaccgacaggcccgtgatggatgtggcctttgtacagttcttggcatcagtttctgggaaagtctcttgtttggacacctgtggtgacttgctggtgactctacagtccctgagccgccagggtgagaagcggagcctccagctctccggcaaggtcaacgccatgactttcacctttgacaacgtgctccctggaaaatacaaaataagcatcatgcatgaggattggtgctggaagaacaagagcctggaggtggaagtgctggaggatgacgtgtctgcagttgagttcaggcagacgggctacatgctgagatgttccctgtctcacgccatcactctggaattttatcaggatggaaatgggcgtgagaatgtggggatttataacctctccaaaggagtcaaccgattctgcctgtccaagcctggtgtgtacaaagtgacccctcgctcctgccaccggtttgagcaagcgttctacacctatgacacgtcttcacctagtatcttgacattgacagccattcgccaccatgtccttggaactatcaccaccgacaaaatgatggatgtcactgtgactatcaagtcttccatcgacagtgaacccgccttggtcttaggccctctgaagtctgtgcaggagctgcggagggagcagcagctggctgagatcgaggcccgcaggcaggagagggagaaaaacggcaatgaggaaggtgaagaaagaatgaccaagcctcccgtgcaggagatggtagatgagttacaaggccccttctcgtatgatttctcttactgggcgcggtctggagagaaaatcactgttacaccgtcatctaaagagctgctcttttatcccccttcaatggaagccgttgtcagtggagaaagctgcccagggaagctgatcgagatccacgggaaggcaggcctgtttttagaaggccagatccaccccgagttggaaggagtcgagattgtcatcagtgaaaagggggcaagttcaccgctgatcacagtctttactgatgacaaaggtgcctacagtgttggccccctgcacagtgacctggagtacacggtgacctcacagaaggagggctatgttctgactgcagtggaaggaaccatcggagacttcaaggcctatgccctggcaggcgtaagctttgagataaaagctgaggatgaccagcccctcccgggagtcctcttatccctgagtggtggcctgtttcgttccaacctcttgacccaggacaacggcattctgacattctcaaacctgagccctggccagtattacttcaaacccatgatgaaggagttccggtttgagccatcctcacagatgatcgaggtgcaggaaggccagaacctgaagatcaccatcacggggtaccgaaccgcttacagttgctatggcacagtgtcttccttaaacggagagcccgaacaaggggttgccatggaagcggtgggccagaacgactgcagcatttacggagaagacaccgtgacagacgaagagggcaagttcagattacgtggattgctgccgggatgtgtgtaccacgttcagctcaaggcagaaggcaacgaccacattgagcgggcgctcccccaccatagggtgattgaggttgggaataatgacatcgatgatgtaaacatcatagttttccggcagattaatcaatttgatttaagtggaaatgtgatcacttcctctgaataccttcctacgttatgggtcaagctttacaaaagcgaaaacctcgacaatccaatccagacagtttcccttggccagtccctgttcttccatttccccccactgctcagagatggcgagaactatgttgtgcttctggactccacactccccagatcccagtatgactacatcttgcctcaagtttctttcaccgcagtgggctaccataaacacatcaccttgatttttaatcccacgaggaagctgcctgaacaggacatcgcacaaggatcctacattgccctgccattgacgctgctggttctgctggccggttacaaccatgacaagctcattcctttgctgctgcagttgacaagccggctacagggagtcggcgcgctcggccaggcagcctctgacaatagcggcccagaagatgcaaagagacaagccaagaaacagaagacaaggcggacccttcgtttgcaagaagagttccagttgatgtggtgtttggttccatggcggggtaccctagggattcatctgttttcttcacttccctttgcatctgagatcctgctggaaaccacggcaacctgtatccactattaggaggtaaaaatcaataaaatggcccattcatttgtgttgtagctc

SEQ ID NO: 159981 - DNA, 1360 bp, Homo sapiens
  Payload ID: 11288
  Gene Symbol: NOMO2
  Gene Name: NODAL modulator 2
  ENST ID: ENST00000620440
  CDS Start-End: 1-849
atgatcgaggtgcaggaaggccagaacctgaagatcaccatcacggggtaccgaaccgcttacagttgctatggcacagtgtcttccttaaacggagagcccgaacaaggggttgccatggaagcggtgggccagaacgactgcagcatttacggagaagacaccgtgacagacgaagagggcaagttcagattacgtggattgctgccgggatgtgtgtaccacgttcagctcaaggcagaaggcaacgaccacattgagcgggcgctcccccaccatagggtgattgaggttgggaataatgacatcgatgatgtaaacatcatagttttccggcagattaatcaatttgatttaagtggaaatgtgatcacttcctctgaataccttcctacgttatgggtcaagctttacaaaagcgaaaacctcgacaatccaatccagacagtttcccttggccagtccctgttcttccatttccccccactgctcagagatggcgagaactatgttgtgcttctggactccacactccccagatcccagtatgactacatcttgcctcaagtttctttcaccgcagtgggctaccataaacacatcaccttgatttttaatcccacgaggaagctgcctgaacaggacatcgcacaaggatcctacattgccctgccattgacgctgctggttctgctggccggttacaaccatgacaagctcattcctttgctgctgcagttgacaagccggctacagggagtcggcgcgctcggccaggcagcctctgacaatagcggcccagaagatgcaaagagacaagccaagaaacagaagacaaggcggacgtgaggaggaaggggacagttgcagtctcacttgggacaggccacagccaggggtccggccactacccgcccgtgggataaaagccaaaagcatgcgtcagctaacttcagcctgtgctgctgggcccgcaccccatgtcccttgtcactgtggcatcctgcacccatcctcacccctccgtagagcccctcgtgcaatgcaatgaatggaccctcctgtcactctgctgaacagaatttattttctgagtcaaatataatttattattatttttgtcaaagaagtatttaagctgtgctgtggtgtgagaatgtcattcttgatcttcagccttcgtttgcaagaagagttccagttgatgtggtgtttggttccatggcggggtaccctagggattcatctgttttcttcacttccctttgcatctgagatcctgctggaaaccacggcaacctgtatccactattaggaggtaaaaatcaataaaatggcccattcatttgtgttgtagctc

SEQ ID NO: 159982 - DNA, 4252 bp, Homo sapiens
  Payload ID: 11288
  Gene Symbol: NOMO2
  Gene Name: NODAL modulator 2
  Uniprot ID: Q5JPE7
  ENST ID: ENST00000622306
  CDS Start-End: 73-3741
gagcctgcggcgtgcagtgtgaggggcgggacccggctgccggcggtgggtctagctgggggaggtcgggccatgctggtgggccagggcgcggggctgctggggcccgcggtggtcaccgccgcggtggtgctgctgctgagcggcgtggggccggcgcacggctcggaggacatcgtggtgggctgcggtggcttcgtcaagtcggacgtggagatcaactactcgctcatcgagataaagctgtacaccaagcatgggactttgaaataccagacagactgtgcccctaataatggttactttatgatccctttgtatgataagggggatttcattctgaagattgagcctcccctagggtggagttttgagccgacgaccgtggagctccatgtggatggagtcagtgacatctgcacaaagggtggggacatcaactttgtcttcactgggttctctgtgaatggcaaggtcctcagcaaagggcagcccctgggtcctgcgggagttcaggtgtctctgagaaacactgggaccgaagcaaagatccagtccacagttacacagcctggcggaaagtttgcattttttaaagttctgcctggagattatgaaatcctcgcaactcatccaacctgggcgttgaaagaggcaagcaccacagtgcgtgtaaccaactccaatgccaatgcggccagtcccctcatagttgctggctacaatgtgtctggctctgtccgaagtgatggggagcccatgaaaggggtgaagtttcttctcttttcttctttagtaactaaagaggatgtcctgggctgcaatgtctcaccagtgcctgggttccagccccaagacgagagtctggtgtatttgtgctacacggtctccagagaagatggctcgttctctttctattccttgccaagtgggggctacactgtgattccgttctatcgaggggagaggattacctttgatgtggcgccttccagacttgacttcacagtggagcatgacagcttgaaaatcgagcccgtgttccacgtcatgggattctccgtcaccgggagggtcttgaacggacccgaaggagatggtgttccagaagcagtagtcaccctgaataaccaaatcaaagttaaaacaaaagctgatggctcattccgccttgagaacataaccacagggacatacaccatccatgctcagaaagagcacctctactttgaaacggtcaccatcaaaattgcaccgaacacacctcagctggctgacattgttgcaacagggttcagtgtctgtggtcggatatcaatcattcgcttcccggacaccgtcaagcagatgaataaatacaaagttgtcctgtcatctcaagacaaggacaagtctttggtcaccgtggagacagatgctcatggatcattttgttttaaagcaaaaccagggacttacaaagtgcaggtgatggttcctgaggcagaaaccagagcagggctgacgttgaaaccccagacatttcctcttactgtgaccgacaggcccgtgatggatgtggcctttgtacagttcttggcatcagtttctgggaaagtctcttgtttggacacctgtggtgacttgctggtgactctacagtccctgagccgccagggtgagaagcggagcctccagctctccggcaaggtcaacgccatgactttcacctttgacaacgtgctccctggaaaatacaaaataagcatcatgcatgaggattggtgctggaagaacaagagcctggaggtggaagtgctggaggatgacgtgtctgcagttgagttcaggcagacgggctacatgctgagatgttccctgtctcacgccatcactctggaattttatcaggatggaaatgggcgtgagaatgtggggatttataacctctccaaaggagtcaaccgattctgcctgtccaagcctggtgtgtacaaagtgacccctcgctcctgccaccggtttgagcaagcgttctacacctatgacacgtcttcacctagtatcttgacattgacagccattcgccaccatgtccttggaactatcaccaccgacaaaatgatggatgtcactgtgactatcaagtcttccatcgacagtgaacccgccttggtcttaggccctctgaagtctgtgcaggagctgcggagggagcagcagctggctgagatcgaggcccgcaggcaggagagggagaaaaacggcaatgaggaaggtgaagaaagaatgaccaagcctcccgtgcaggagatggtagatgagttacaaggccccttctcgtatgatttctcttactgggcgcggtctggagagaaaatcactgttacaccgtcatctaaagagctgctcttttatcccccttcaatggaagccgttgtcagtggagaaagctgcccagggaagctgatcgagatccacgggaaggcaggcctgtttttagaaggccagatccaccccgagttggaaggagtcgagattgtcatcagtgaaaagggggcaagttcaccgctgatcacagtctttactgatgacaaaggtgcctacagtgttggccccctgcacagtgacctggagtacacggtgacctcacagaaggagggctatgttctgactgcagtggaaggaaccatcggagacttcaaggcctatgccctggcaggcgtaagctttgagataaaagctgaggatgaccagcccctcccgggagtcctcttatccctgagtggtggcctgtttcgttccaacctcttgacccaggacaacggcattctgacattctcaaacctgagccctggccagtattacttcaaacccatgatgaaggagttccggtttgagccatcctcacagatgatcgaggtgcaggaaggccagaacctgaagatcaccatcacggggtaccgaaccgcttacagttgctatggcacagtgtcttccttaaacggagagcccgaacaaggggttgccatggaagcggtgggccagaacgactgcagcatttacggagaagacaccgtgacagacgaagagggcaagttcagattacgtggattgctgccgggatgtgtgtaccacgttcagctcaaggcagaaggcaacgaccacattgagcgggcgctcccccaccatagggtgattgaggttgggaataatgacatcgatgatgtaaacatcatagttttccggcagattaatcaatttgatttaagtggaaatgtgatcacttcctctgaataccttcctacgttatgggtcaagctttacaaaagcgaaaacctcgacaatccaatccagacagtttcccttggccagtccctgttcttccatttccccccactgctcagagatggcgagaactatgttgtgcttctggactccacactccccagatcccagtatgactacatcttgcctcaagtttctttcaccgcagtgggctaccataaacacatcaccttgatttttaatcccacgaggaagctgcctgaacaggacatcgcacaaggatcctacattgccctgccattgacgctgctggttctgctggccggttacaaccatgacaagctcattcctttgctgctgcagttgacaagccggctacagggagtcggcgcgctcggccaggcagcctctgacaatagcggcccagaagatgcaaagagacaagccaagaaacagaagacaaggcggacgtgaggaggaaggggacagttgcagtctcacttgggacaggccacagccaggggtccggccactacccgcccgtgggataaaagccaaaagcatgcgtcagctaacttcagcctgtgctgctgggcccgcaccccatgtcccttgtcactgtggcatcctgcacccatcctcacccctccgtagagcccctcgtgcaatgcaatgaatggaccctcctgtcactctgctgaacagaatttattttctgagtcaaatataatttattattatttttgtcaaagaagtatttaagctgtgctgtggtgtgagaatgtcattcttgatcttcagccttcgtttgcaagaagagttccagttgatgtggtgtttggttccatggcggggtaccctagggattcatctgttttcttcacttccctttgcatctgagatcctgctggaaaccacggcaacctgtatccactattaggaggtaaaaatcaataaaatggcccattcatttgtgttgtagctc

SEQ ID NO: 159983 - DNA, 3911 bp, Homo sapiens
  Payload ID: 11289
  Gene Symbol: NOMO3
  Gene Name: NODAL modulator 3
  ENST ID: ENST00000263012
  CDS Start-End: 67-3870
gcggcgtgcagtgtgaggggcgggacccggctgccggcggtgggtctagctgggggaggtcgggccatgctggtgggccagggcgcggggccgctggggcccgcggtggtcaccgccgcggtggtgctgctgctgagcggcgtggggccggcgcacggctcggaggacatcgtggtgggctgcggtggcttcgtcaagtcggacgtggagatcaactactctctcatcgagataaagctgtacaccaagcatgggactttgaaataccagacagactgtgcccctaataatggttactttatgatccctttgtatgataagggggatttcattctgaagattgagcctcccctagggtggagttttgagccgacgaccgtggagctccatgtggatggagtcagtgacatctgcacaaagggtggggacatcaactttgtcttcactgggttctctgtgaatggcaaggtcctcagcaaagggcagcccctgggtcctgcgggagttcaggtgtctctgagaaacactgggaccgaagcaaagatccagtccacagttacacagcctggcggaaagtttgcattttttaaagttctgcctggagattatgaaatcctcgcaactcatccaacctgggcgttgaaagaggcaagcaccacagtgcgtgtaaccaactccaatgccaatgcggccagtcccctcatagttgctggctacaatgtgtctggctctgtccgaagtgatggggagcccatgaaaggcgtgaagtttcttctcttttcttctttagtaactaaagaggatgtcctgggctgcaatgtctcaccagtgcctgggttccagccccaagacgagagtctggtgtatttgtgctacacggtctccagagaagatggctcgttctctttctattccttgccaagtgggggctacactgtgattccgttctatcgaggggagaggattacctttgatgtggcgccttccagacttgacttcacagtggagcatgacagcttgaaaatcgagcccgtgttccacgtcatgggattctccgtcaccgggagggtcttgaacggacccgaaggagatggtgttccagaagcagtagtcaccctgaataaccaaatcaaagttaaaacaaaagctgatggctcattccgccttgagaacataaccacagggacatacaccatccatgctcagaaagagcacctctactttgaaacggtcaccatcaaaattgcaccaaacacacctcagctggctgacattgttgcaacagggttcagtgtctgtggtcagatatcaatcattcgcttccccgacaccgtcaagcagatgaataaatacaaagttgtcctgtcatctcaagacaaggacaagtctttggtcaccgtggagacagatgctcatggatcattttgttttaaagcaaacccagggacttacaaagtgcaggtgatggttcctgaggcagaaaccagagcagggctgacgttgaaaccccagacatttcctcttactgtgaccgacaggcctgtgatggatgtggcctttgtacagttcttggcatcagtttctgggaaagtctcttgtttggacacctgtggtgacttgctggtgactctacagtccctgagccgccagggtgagaagcggagcctccagctctccggcaaggtcaacgccatgactttcacctttgacaacgtgctccctggaaaatacaaaataagcatcatgcatgaggattggtgctggaagaacaagagcctggaggtggaagtgctggaggatgacgtgtctgcagttgagttcaggcagacgggctacatgctgagatgttccctgtctcacgccatcactctggaattttatcaggatggaaatgggcgtgagaatgtggggatttataacctctccaaaggagtcaaccgattctgcctgtccaagcctggtgtgtacaaagtgacccctcgctcctgccaccggtttgagcaagcgttctacacctatgacacgtcttcacctagtatcttgacattgacagccattcgccaccatgtccttggaactatcaccaccgacaaaatgatggatgtcactgtgactatcaagtcttccatcgacagtgaacccgccttggtcttaggccctctgaagtctgtgcaggagctgcggagggagcagcagctggctgagatcgaggcccgcaggcaggagagggagaaaaacggcaatgaggaaggtgaagaaagaatgaccaagcctcctgtgcaggagatggtagatgagttacaaggccccttctcgtatgatttctcttactgggcgcggtctggagagaaaatcactgttacaccgtcatctaaagagctgctcttttatcccccttcaatggaagccgttgtcagtggagaaagctgcccagggaagctgatcgagatccacgggaaggcaggcctgtttttagaaggccagatccaccccgagttggaaggagtcgagattgtcatcagtgaaaagggggcaagttcaccgctgatcacagtctttactgatgacaaaggtgcctacagtgttggccccctgcacagtgacctggagtacacggtgacctcacagaaggagggctatgttctgactgcagtggaaggaaccatcggagacttcaaggcctatgccctggcaggcgtaagctttgagataaaagctgaggatgaccagcccctcccgggagtcctcttatccctgagtggtggcctgtttcgttccaacctcttgacccaggacaacggcattctgacattctcaaacctgagccctggccagtattacttcaaacccatgatgaaggagttccggtttgagccatcctcacagatgatcgaggtgcaggaaggccagaacctgaagatcaccatcacggggtaccgaaccgcttacagttgctatggcacagtgtcttccttaaacggagagcccgaacaaggggttgccatggaagcggtgggccagaacgactgcagcatttacggagaagacaccgtgacagacgaagagggcaagttcagattacgtggattgctgccgggatgtgtgtaccacgttcagctcaaggcagaaggcaacgaccacattgagcgggcgctcccccaccatagggtgattgaggttgggaataatgacatcgatgatgtaaacatcatagttttccggcagattaatcaatttgatttaagtggaaatgtgatcacttcctctgaataccttcctacgttatgggtcaagctttacaaaagcgaaaacctcgacaatccaatccagacagtttcccttggccagtccctgttcttccatttccccccactgctcagagatggcgagaactatgttgtgcttctggactccacactccccagatcccagtatgactacatcttgcctcaagtttctttcaccgcagtgggctaccataaacacatcaccttgatttttaatcccacgaggaagctgcctgaacaggacatcgcacaaggatcctacattgccctgccattgacgctgctggttctgctggccggttacaaccatgacaagctcattcctttgctgctgcagttgacaagccggctacagggagtcggcgcgctcggccaggcagcctctgacaatagcggcccagaagatgcaaagagacaagccaagaaacagaagacaaggcggacccttcgtttgcaagaagagttccagttgatgtggtgtttggttccatggcggggtaccctagggattcatctgttttcttcacttccctttgcatctgagatcctgctggaaaccacggcaacctgtatccactattaggaggtaaaaatcaataaaatggcccattcatttgtgttgta

SEQ ID NO: 159984 - DNA, 4356 bp, Homo sapiens
  Payload ID: 11289
  Gene Symbol: NOMO3
  Gene Name: NODAL modulator 3
  Uniprot ID: P69849
  ENST ID: ENST00000399336
  CDS Start-End: 173-3841
ctggggctgtgaccgtggggtcgaagcgcgcgtgcgcggcggcggctggcggcggcggtggggcggggcctgggctgtcagccggcctaggaggaggaaggagcctgcggcgtgcagtgtgaggggcgggacccggctgccggcggtgggtctagctgggggaggtcgggccatgctggtgggccagggcgcggggccgctggggcccgcggtggtcaccgccgcggtggtgctgctgctgagcggcgtggggccggcgcacggctcggaggacatcgtggtgggctgcggtggcttcgtcaagtcggacgtggagatcaactactctctcatcgagataaagctgtacaccaagcatgggactttgaaataccagacagactgtgcccctaataatggttactttatgatccctttgtatgataagggggatttcattctgaagattgagcctcccctagggtggagttttgagccgacgaccgtggagctccatgtggatggagtcagtgacatctgcacaaagggtggggacatcaactttgtcttcactgggttctctgtgaatggcaaggtcctcagcaaagggcagcccctgggtcctgcgggagttcaggtgtctctgagaaacactgggaccgaagcaaagatccagtccacagttacacagcctggcggaaagtttgcattttttaaagttctgcctggagattatgaaatcctcgcaactcatccaacctgggcgttgaaagaggcaagcaccacagtgcgtgtaaccaactccaatgccaatgcggccagtcccctcatagttgctggctacaatgtgtctggctctgtccgaagtgatggggagcccatgaaaggcgtgaagtttcttctcttttcttctttagtaactaaagaggatgtcctgggctgcaatgtctcaccagtgcctgggttccagccccaagacgagagtctggtgtatttgtgctacacggtctccagagaagatggctcgttctctttctattccttgccaagtgggggctacactgtgattccgttctatcgaggggagaggattacctttgatgtggcgccttccagacttgacttcacagtggagcatgacagcttgaaaatcgagcccgtgttccacgtcatgggattctccgtcaccgggagggtcttgaacggacccgaaggagatggtgttccagaagcagtagtcaccctgaataaccaaatcaaagttaaaacaaaagctgatggctcattccgccttgagaacataaccacagggacatacaccatccatgctcagaaagagcacctctactttgaaacggtcaccatcaaaattgcaccaaacacacctcagctggctgacattgttgcaacagggttcagtgtctgtggtcagatatcaatcattcgcttccccgacaccgtcaagcagatgaataaatacaaagttgtcctgtcatctcaagacaaggacaagtctttggtcaccgtggagacagatgctcatggatcattttgttttaaagcaaacccagggacttacaaagtgcaggtgatggttcctgaggcagaaaccagagcagggctgacgttgaaaccccagacatttcctcttactgtgaccgacaggcctgtgatggatgtggcctttgtacagttcttggcatcagtttctgggaaagtctcttgtttggacacctgtggtgacttgctggtgactctacagtccctgagccgccagggtgagaagcggagcctccagctctccggcaaggtcaacgccatgactttcacctttgacaacgtgctccctggaaaatacaaaataagcatcatgcatgaggattggtgctggaagaacaagagcctggaggtggaagtgctggaggatgacgtgtctgcagttgagttcaggcagacgggctacatgctgagatgttccctgtctcacgccatcactctggaattttatcaggatggaaatgggcgtgagaatgtggggatttataacctctccaaaggagtcaaccgattctgcctgtccaagcctggtgtgtacaaagtgacccctcgctcctgccaccggtttgagcaagcgttctacacctatgacacgtcttcacctagtatcttgacattgacagccattcgccaccatgtccttggaactatcaccaccgacaaaatgatggatgtcactgtgactatcaagtcttccatcgacagtgaacccgccttggtcttaggccctctgaagtctgtgcaggagctgcggagggagcagcagctggctgagatcgaggcccgcaggcaggagagggagaaaaacggcaatgaggaaggtgaagaaagaatgaccaagcctcctgtgcaggagatggtagatgagttacaaggccccttctcgtatgatttctcttactgggcgcggtctggagagaaaatcactgttacaccgtcatctaaagagctgctcttttatcccccttcaatggaagccgttgtcagtggagaaagctgcccagggaagctgatcgagatccacgggaaggcaggcctgtttttagaaggccagatccaccccgagttggaaggagtcgagattgtcatcagtgaaaagggggcaagttcaccgctgatcacagtctttactgatgacaaaggtgcctacagtgttggccccctgcacagtgacctggagtacacggtgacctcacagaaggagggctatgttctgactgcagtggaaggaaccatcggagacttcaaggcctatgccctggcaggcgtaagctttgagataaaagctgaggatgaccagcccctcccgggagtcctcttatccctgagtggtggcctgtttcgttccaacctcttgacccaggacaacggcattctgacattctcaaacctgagccctggccagtattacttcaaacccatgatgaaggagttccggtttgagccatcctcacagatgatcgaggtgcaggaaggccagaacctgaagatcaccatcacggggtaccgaaccgcttacagttgctatggcacagtgtcttccttaaacggagagcccgaacaaggggttgccatggaagcggtgggccagaacgactgcagcatttacggagaagacaccgtgacagacgaagagggcaagttcagattacgtggattgctgccgggatgtgtgtaccacgttcagctcaaggcagaaggcaacgaccacattgagcgggcgctcccccaccatagggtgattgaggttgggaataatgacatcgatgatgtaaacatcatagttttccggcagattaatcaatttgatttaagtggaaatgtgatcacttcctctgaataccttcctacgttatgggtcaagctttacaaaagcgaaaacctcgacaatccaatccagacagtttcccttggccagtccctgttcttccatttccccccactgctcagagatggcgagaactatgttgtgcttctggactccacactccccagatcccagtatgactacatcttgcctcaagtttctttcaccgcagtgggctaccataaacacatcaccttgatttttaatcccacgaggaagctgcctgaacaggacatcgcacaaggatcctacattgccctgccattgacgctgctggttctgctggccggttacaaccatgacaagctcattcctttgctgctgcagttgacaagccggctacagggagtcggcgcgctcggccaggcagcctctgacaatagcggcccagaagatgcaaagagacaagccaagaaacagaagacaaggcggacgtgaggaggaaggggacagttgcagtctcacttgggacaggccacagccaggggtccggccactacccgcccgtgggataaaagccaaaagcatgcgtcagctaacttcagcctgtgctgctgggcccgcaccccatgtcccttgtcactgtggcatcctgcacccatcctcacccctccgtagagcccctcgtgcaatgcaatgaatggaccctcctgtcactctgctgaacagaatttattttctgagtcaaatataatttattattatttttgtcaaagaagtatttaagctgtgctgtggtgtgagaatgtcattcttgatcttcagccttcgtttgcaagaagagttccagttgatgtggtgtttggttccatggcggggtaccctagggattcatctgttttcttcacttccctttgcatctgagatcctgctggaaaccacggcaacctgtatccactattaggaggtaaaaatcaataaaatggcccattcatttgtgttgtagctcatca

SEQ ID NO: 159985 - DNA, 3765 bp, Homo sapiens
  Payload ID: 11289
  Gene Symbol: NOMO3
  Gene Name: NODAL modulator 3
  ENST ID: ENST00000575225
  CDS Start-End: 35-451
gccggcggtgggtctagctgggggaggtcgggccatgctggtgggccagggcgcggggccgctggggcccgcggtggtcaccgccgcggtggtgctgctgctgagcggcgtggggccggcgcacggctcggaggacatcgtggtgggctgcggtggcttcgtcaagtcggacgtggagatcaactactctctcatcgagataaagctgtacaccaagcatgggactttgaaataccagacagactgtgcccctaataatggttactttatgatccctttgtatgataagggggatttcattctgaagattgagcctcccctagggtggagttttgagccgacgaccgtggagctccatgtggatggagtcagtgacatctgcacaaagggtggggacatcaactttgtcttcactgggttctctgtgaatggcaaggtttgcattttttaaagttctgcctggagattatgaaatcctcgcaactcatccaacctgggcgttgaaagaggcaagcaccacagtgcgtgtaaccaactccaatgccaatgcggccagtcccctcatagttgctggctacaatgtgtctggctctgtccgaagtgatggggagcccatgaaaggcgtgaagtttcttctcttttcttctttagtaactaaagaggatgtcctgggctgcaatgtctcaccagtgcctgggttccagccccaagacgagagtctggtgtatttgtgctacacggtctccagagaagatggctcgttctctttctattccttgccaagtgggggctacactgtgattccgttctatcgaggggagaggattacctttgatgtggcgccttccagacttgacttcacagtggagcatgacagcttgaaaatcgagcccgtgttccacgtcatgggattctccgtcaccgggagggtcttgaacggacccgaaggagatggtgttccagaagcagtagtcaccctgaataaccaaatcaaagttaaaacaaaagctgatggctcattccgccttgagaacataaccacagggacatacaccatccatgctcagaaagagcacctctactttgaaacggtcaccatcaaaattgcaccaaacacacctcagctggctgacattgttgcaacagggttcagtgtctgtggtcagatatcaatcattcgcttccccgacaccgtcaagcagatgaataaatacaaagttgtcctgtcatctcaagacaaggacaagtctttggtcaccgtggagacagatgctcatggatcattttgttttaaagcaaacccagggacttacaaagtgcaggtgatggttcctgaggcagaaaccagagcagggctgacgttgaaaccccagacatttcctcttactgtgaccgacaggcctgtgatggatgtggcctttgtacagttcttggcatcagtttctgggaaagtctcttgtttggacacctgtggtgacttgctggtgactctacagtccctgagccgccagggtgagaagcggagcctccagctctccggcaaggtcaacgccatgactttcacctttgacaacgtgctccctggaaaatacaaaataagcatcatgcatgaggattggtgctggaagaacaagagcctggaggtggaagtgctggaggatgacgtgtctgcagttgagttcaggcagacgggctacatgctgagatgttccctgtctcacgccatcactctggaattttatcaggatggaaatgggcgtgagaatgtggggatttataacctctccaaaggagtcaaccgattctgcctgtccaagcctggtgtgtacaaagtgacccctcgctcctgccaccggtttgagcaagcgttctacacctatgacacgtcttcacctagtatcttgacattgacagccattcgccaccatgtccttggaactatcaccaccgacaaaatgatggatgtcactgtgactatcaagtcttccatcgacagtgaacccgccttggtcttaggccctctgaagtctgtgcaggagctgcggagggagcagcagctggctgagatcgaggcccgcaggcaggagagggagaaaaacggcaatgaggaaggtgaagaaagaatgaccaagcctcctgtgcaggagatggtagatgagttacaaggccccttctcgtatgatttctcttactgggcgcggtctggagagaaaatcactgttacaccgtcatctaaagagctgctcttttatcccccttcaatggaagccgttgtcagtggagaaagctgcccagggaagctgatcgagatccacgggaaggcaggcctgtttttagaaggccagatccaccccgagttggaaggagtcgagattgtcatcagtgaaaagggggcaagttcaccgctgatcacagtctttactgatgacaaaggtgcctacagtgttggccccctgcacagtgacctggagtacacggtgacctcacagaaggagggctatgttctgactgcagtggaaggaaccatcggagacttcaaggcctatgccctggcaggcgtaagctttgagataaaagctgaggatgaccagcccctcccgggagtcctcttatccctgagtggtggcctgtttcgttccaacctcttgacccaggacaacggcattctgacattctcaaacctgagccctggccagtattacttcaaacccatgatgaaggagttccggtttgagccatcctcacagatgatcgaggtgcaggaaggccagaacctgaagatcaccatcacggggtaccgaaccgcttacagttgctatggcacagtgtcttccttaaacggagagcccgaacaaggggttgccatggaagcggtgggccagaacgactgcagcatttacggagaagacaccgtgacagacgaagagggcaagttcagattacgtggattgctgccgggatgtgtgtaccacgttcagctcaaggcagaaggcaacgaccacattgagcgggcgctcccccaccatagggtgattgaggttgggaataatgacatcgatgatgtaaacatcatagttttccggcagattaatcaatttgatttaagtggaaatgtgatcacttcctctgaataccttcctacgttatgggtcaagctttacaaaagcgaaaacctcgacaatccaatccagacagtttcccttggccagtccctgttcttccatttccccccactgctcagagatggcgagaactatgttgtgcttctggactccacactccccagatcccagtatgactacatcttgcctcaagtttctttcaccgcagtgggctaccataaacacatcaccttgatttttaatcccacgaggaagctgcctgaacaggacatcgcacaaggatcctacattgccctgccattgacgctgctggttctgctggccggttacaaccatgacaagctcattcctttgctgctgcagttgacaagccggctacagggagtcggcgcgctcggccaggcagcctctgacaatagcggcccagaagatgcaaagagacaagccaagaaacagaagacaaggcggacccttcgtttgcaagaagagttccagttgatgtggtgtttggttccatggcggggtaccctagggattcatctgttttcttcacttccctttgcatctgagatcctgctggaaaccacggcaacctgtatccactattaggaggtaaaaatcaataaaatggcccattcatttg

SEQ ID NO: 159986 - DNA, 516 bp, Homo sapiens
  Payload ID: 11289
  Gene Symbol: NOMO3
  Gene Name: NODAL modulator 3
  ENST ID: ENST00000576460
  CDS Start-End: 1-286
tgaggattggtgctggaagaacaagagcctggaggtggaagtgctggaggatgacgtgtctgcagttgagttcaggcagacgggctacatgctgagatgttccctgtctcacgccatcactctggtgcagccctattgttcaggagagatgtgccctgggaccagcgagctaaagacccctcggaattttatcaggatggaaatgggcgtgagaatgtggggatttataacctctccaaaggagtcaaccgattctgcctgtccaagcctggtgtgtacaaagtgacccctcgctcctgccaccggtttgagcaagcgttctacacctatgacacgtcttcacctagtatcttgacattgacagccattcgccaccatgtccttggaactatcaccaccgacaaaatgatggatgtcactgtgactatcaagtcttccatcgacagtgaacccgccttggtcttaggccctctgaagtctgtgcaggagctgcggagggagcagcagctggctgag

SEQ ID NO: 159987 - DNA, 320 bp, Homo sapiens
  Payload ID: 11289
  Gene Symbol: NOMO3
  Gene Name: NODAL modulator 3
  ENST ID: ENST00000570346
  CDS Start-End: 1-152
gatcctacattgccctgccattgacgctgctggttctgctggccggttacaaccatgacaagggacatattaggcccggagagaggccagcccatccctggggactcattagtaagaggcctgcctcgtttgaactgaaacccacccattagcacgtggcagctgctgatcatgtctgaagaagctcattcctttgctgctgcagttgacaagccggctacagggagtcggcgcgctcggccaggcagcctctgacaatagcggcccagaagatgcaaagagacaagccaagaaacagaagacaaggcggacgtgaggag

SEQ ID NO: 159988 - DNA, 683 bp, Homo sapiens
  Payload ID: 11289
  Gene Symbol: NOMO3
  Gene Name: NODAL modulator 3
  ENST ID: ENST00000576589
  CDS Start-End: 138-323
gcggcggcggctggcggcggcggtggggcggggcctgggctgtcagccggcctaggaggaggaaggagcctgcggcgtgcagtgtgaggggcgggacccggctgccggcggtgggtctagctgggggaggtcgggccatgctggtgggccagggcgcggggccgctggggcccgcggtggtcaccgccgcggtggtgctgctgctgagcggcgtggggccggcgcacggctcggaggacatcgtggtgggctgcggtggcttcgtcaagtcggacgtggagatcaactactctctcatcgagcaggtgcttaatatgcattgatgtgaatctgtacaaccacatgaaaaggagtggctctatgtctgcacctgaagaaaccgaacacgagcttgcccaaggccacgcaacacgtggaagactcagatggcatttgggcatcttactgggttaacacttcgtgtctggtaatgctcagaatataaagctgtacaccaagcatgggactttgaaataccagacagactgtgcccctaataatggttactttatgatccctttgtatgataagggggatttcattctgaagattgagcctcccctagggtggagttttgagccgacgaccgtggagctccatgtggatggagtcagtgacatctgcacaaagggtggggacatcaa

SEQ ID NO: 159989 - DNA, 551 bp, Homo sapiens
  Payload ID: 11289
  Gene Symbol: NOMO3
  Gene Name: NODAL modulator 3
  ENST ID: ENST00000572033
  CDS Start-End: 1-242
agacgggctacatgctgagatgttccctgtctcacgccatcactctggtatgtacggcttatggagtctcttatttggaaaagcgcttgccttgtggatgtcaagaaagactaacatcccaggaatattgtaaacgtaggaattttatcaggatggaaatgggcgtgagaatgtggggatttataacctctccaaaggagtcaaccgattctgcctgtccaagcctggtgtgtacaaagtgacccctcgctcctgccaccggtttgagcaagcgttctacacctatgacacgtcttcacctagtatcttgacattgacagccattcgccaccatgtccttggaactatcaccaccgacaaaatgatggatgtcactgtgactatcaagtcttccatcgacagtgaacccgccttggtcttaggccctctgaagtctgtgcaggagctgcggagggagcagcagctggctgagatcgaggcccgcaggcaggagagggagaaaaacggcaatgaggaaggtgaagaaagaatgaccaagcctcctgtgcagg

SEQ ID NO: 159990 - DNA, 3765 bp, Homo sapiens
  Payload ID: 11289
  Gene Symbol: NOMO3
  Gene Name: NODAL modulator 3
  ENST ID: ENST00000619364
  CDS Start-End: 35-451
gccggcggtgggtctagctgggggaggtcgggccatgctggtgggccagggcgcggggccgctggggcccgcggtggtcaccgccgcggtggtgctgctgctgagcggcgtggggccggcgcacggctcggaggacatcgtggtgggctgcggtggcttcgtcaagtcggacgtggagatcaactactctctcatcgagataaagctgtacaccaagcatgggactttgaaataccagacagactgtgcccctaataatggttactttatgatccctttgtatgataagggggatttcattctgaagattgagcctcccctagggtggagttttgagccgacgaccgtggagctccatgtggatggagtcagtgacatctgcacaaagggtggggacatcaactttgtcttcactgggttctctgtgaatggcaaggtttgcattttttaaagttctgcctggagattatgaaatcctcgcaactcatccaacctgggcgttgaaagaggcaagcaccacagtgcgtgtaaccaactccaatgccaatgcggccagtcccctcatagttgctggctacaatgtgtctggctctgtccgaagtgatggggagcccatgaaaggcgtgaagtttcttctcttttcttctttagtaactaaagaggatgtcctgggctgcaatgtctcaccagtgcctgggttccagccccaagacgagagtctggtgtatttgtgctacacggtctccagagaagatggctcgttctctttctattccttgccaagtgggggctacactgtgattccgttctatcgaggggagaggattacctttgatgtggcgccttccagacttgacttcacagtggagcatgacagcttgaaaatcgagcccgtgttccacgtcatgggattctccgtcaccgggagggtcttgaacggacccgaaggagatggtgttccagaagcagtagtcaccctgaataaccaaatcaaagttaaaacaaaagctgatggctcattccgccttgagaacataaccacagggacatacaccatccatgctcagaaagagcacctctactttgaaacggtcaccatcaaaattgcaccaaacacacctcagctggctgacattgttgcaacagggttcagtgtctgtggtcagatatcaatcattcgcttccccgacaccgtcaagcagatgaataaatacaaagttgtcctgtcatctcaagacaaggacaagtctttggtcaccgtggagacagatgctcatggatcattttgttttaaagcaaacccagggacttacaaagtgcaggtgatggttcctgaggcagaaaccagagcagggctgacgttgaaaccccagacatttcctcttactgtgaccgacaggcctgtgatggatgtggcctttgtacagttcttggcatcagtttctgggaaagtctcttgtttggacacctgtggtgacttgctggtgactctacagtccctgagccgccagggtgagaagcggagcctccagctctccggcaaggtcaacgccatgactttcacctttgacaacgtgctccctggaaaatacaaaataagcatcatgcatgaggattggtgctggaagaacaagagcctggaggtggaagtgctggaggatgacgtgtctgcagttgagttcaggcagacgggctacatgctgagatgttccctgtctcacgccatcactctggaattttatcaggatggaaatgggcgtgagaatgtggggatttataacctctccaaaggagtcaaccgattctgcctgtccaagcctggtgtgtacaaagtgacccctcgctcctgccaccggtttgagcaagcgttctacacctatgacacgtcttcacctagtatcttgacattgacagccattcgccaccatgtccttggaactatcaccaccgacaaaatgatggatgtcactgtgactatcaagtcttccatcgacagtgaacccgccttggtcttaggccctctgaagtctgtgcaggagctgcggagggagcagcagctggctgagatcgaggcccgcaggcaggagagggagaaaaacggcaatgaggaaggtgaagaaagaatgaccaagcctcccgtgcaggagatggtagatgagttacaaggccccttctcgtatgatttctcttactgggcgcggtctggagagaaaatcactgttacaccgtcatctaaagagctgctcttttatcccccttcaatggaagccgttgtcagtggagaaagctgcccagggaagctgatcgagatccacgggaaggcaggcctgtttttagaaggccagatccaccccgagttggaaggagtcgagattgtcatcagtgaaaagggggcaagttcaccgctgatcacagtctttactgatgacaaaggtgcctacagtgttggccccctgcacagtgacctggagtacacggtgacctcacagaaggagggctatgttctgactgcagtggaaggaaccatcggagacttcaaggcctatgccctggcaggcgtaagctttgagataaaagctgaggatgaccagcccctcccgggagtcctcttatccctgagtggtggcctgtttcgttccaacctcttgacccaggacaacggcattctgacattctcaaacctgagccctggccagtattacttcaaacccatgatgaaggagttccggtttgagccatcctcacagatgatcgaggtgcaggaaggccagaacctgaagatcaccatcacggggtaccgaaccgcttacagttgctatggcacagtgtcttccttaaacggagagcccgaacaaggggttgccatggaagcggtgggccagaacgactgcagcatttacggagaagacaccgtgacagacgaagagggcaagttcagattacgtggattgctgccgggatgtgtgtaccacgttcagctcaaggcagaaggcaacgaccacattgagcgggcgctcccccaccatagggtgattgaggttgggaataatgacatcgatgatgtaaacatcatagttttccggcagattaatcaatttgatttaagtggaaatgtgatcacttcctctgaataccttcctacgttatgggtcaagctttacaaaagcgaaaacctcgacaatccaatccagacagtttcccttggccagtccctgttcttccatttccccccactgctcagagatggcgagaactatgttgtgcttctggactccacactccccagatcccagtatgactacatcttgcctcaagtttctttcaccgcagtgggctaccataaacacatcaccttgatttttaatcccacgaggaagctgcctgaacaggacatcgcacaaggatcctacattgccctgccattgacgctgctggttctgctggccggttacaaccatgacaagctcattcctttgctgctgcagttgacaagccggctacagggagtcggcgcgctcggccaggcagcctctgacaatagcggcccagaagatgcaaagagacaagccaagaaacagaagacaaggcggacccttcgtttgcaagaagagttccagttgatgtggtgtttggttccatggcggggtaccctagggattcatctgttttcttcacttccctttgcatctgagatcctgctggaaaccacggcaacctgtatccactattaggaggtaaaaatcaataaaatggcccattcatttg

SEQ ID NO: 159991 - DNA, 4356 bp, Homo sapiens
  Payload ID: 11289
  Gene Symbol: NOMO3
  Gene Name: NODAL modulator 3
  Uniprot ID: P69849
  ENST ID: ENST00000611106
  CDS Start-End: 173-3841
ctggggctgtgaccgtggggtcgaagcgcgcgtgcgcggcggcggctggcggcggcggtggggcggggcctgggctgtcagccggcctaggaggaggaaggagcctgcggcgtgcagtgtgaggggcgggacccggctgccggcggtgggtctagctgggggaggtcgggccatgctggtgggccagggcgcggggccgctggggcccgcggtggtcaccgccgcggtggtgctgctgctgagcggcgtggggccggcgcacggctcggaggacatcgtggtgggctgcggtggcttcgtcaagtcggacgtggagatcaactactctctcatcgagataaagctgtacaccaagcatgggactttgaaataccagacagactgtgcccctaataatggttactttatgatccctttgtatgataagggggatttcattctgaagattgagcctcccctagggtggagttttgagccgacgaccgtggagctccatgtggatggagtcagtgacatctgcacaaagggtggggacatcaactttgtcttcactgggttctctgtgaatggcaaggtcctcagcaaagggcagcccctgggtcctgcgggagttcaggtgtctctgagaaacactgggaccgaagcaaagatccagtccacagttacacagcctggcggaaagtttgcattttttaaagttctgcctggagattatgaaatcctcgcaactcatccaacctgggcgttgaaagaggcaagcaccacagtgcgtgtaaccaactccaatgccaatgcggccagtcccctcatagttgctggctacaatgtgtctggctctgtccgaagtgatggggagcccatgaaaggcgtgaagtttcttctcttttcttctttagtaactaaagaggatgtcctgggctgcaatgtctcaccagtgcctgggttccagccccaagacgagagtctggtgtatttgtgctacacggtctccagagaagatggctcgttctctttctattccttgccaagtgggggctacactgtgattccgttctatcgaggggagaggattacctttgatgtggcgccttccagacttgacttcacagtggagcatgacagcttgaaaatcgagcccgtgttccacgtcatgggattctccgtcaccgggagggtcttgaacggacccgaaggagatggtgttccagaagcagtagtcaccctgaataaccaaatcaaagttaaaacaaaagctgatggctcattccgccttgagaacataaccacagggacatacaccatccatgctcagaaagagcacctctactttgaaacggtcaccatcaaaattgcaccaaacacacctcagctggctgacattgttgcaacagggttcagtgtctgtggtcagatatcaatcattcgcttccccgacaccgtcaagcagatgaataaatacaaagttgtcctgtcatctcaagacaaggacaagtctttggtcaccgtggagacagatgctcatggatcattttgttttaaagcaaacccagggacttacaaagtgcaggtgatggttcctgaggcagaaaccagagcagggctgacgttgaaaccccagacatttcctcttactgtgaccgacaggcctgtgatggatgtggcctttgtacagttcttggcatcagtttctgggaaagtctcttgtttggacacctgtggtgacttgctggtgactctacagtccctgagccgccagggtgagaagcggagcctccagctctccggcaaggtcaacgccatgactttcacctttgacaacgtgctccctggaaaatacaaaataagcatcatgcatgaggattggtgctggaagaacaagagcctggaggtggaagtgctggaggatgacgtgtctgcagttgagttcaggcagacgggctacatgctgagatgttccctgtctcacgccatcactctggaattttatcaggatggaaatgggcgtgagaatgtggggatttataacctctccaaaggagtcaaccgattctgcctgtccaagcctggtgtgtacaaagtgacccctcgctcctgccaccggtttgagcaagcgttctacacctatgacacgtcttcacctagtatcttgacattgacagccattcgccaccatgtccttggaactatcaccaccgacaaaatgatggatgtcactgtgactatcaagtcttccatcgacagtgaacccgccttggtcttaggccctctgaagtctgtgcaggagctgcggagggagcagcagctggctgagatcgaggcccgcaggcaggagagggagaaaaacggcaatgaggaaggtgaagaaagaatgaccaagcctcccgtgcaggagatggtagatgagttacaaggccccttctcgtatgatttctcttactgggcgcggtctggagagaaaatcactgttacaccgtcatctaaagagctgctcttttatcccccttcaatggaagccgttgtcagtggagaaagctgcccagggaagctgatcgagatccacgggaaggcaggcctgtttttagaaggccagatccaccccgagttggaaggagtcgagattgtcatcagtgaaaagggggcaagttcaccgctgatcacagtctttactgatgacaaaggtgcctacagtgttggccccctgcacagtgacctggagtacacggtgacctcacagaaggagggctatgttctgactgcagtggaaggaaccatcggagacttcaaggcctatgccctggcaggcgtaagctttgagataaaagctgaggatgaccagcccctcccgggagtcctcttatccctgagtggtggcctgtttcgttccaacctcttgacccaggacaacggcattctgacattctcaaacctgagccctggccagtattacttcaaacccatgatgaaggagttccggtttgagccatcctcacagatgatcgaggtgcaggaaggccagaacctgaagatcaccatcacggggtaccgaaccgcttacagttgctatggcacagtgtcttccttaaacggagagcccgaacaaggggttgccatggaagcggtgggccagaacgactgcagcatttacggagaagacaccgtgacagacgaagagggcaagttcagattacgtggattgctgccgggatgtgtgtaccacgttcagctcaaggcagaaggcaacgaccacattgagcgggcgctcccccaccatagggtgattgaggttgggaataatgacatcgatgatgtaaacatcatagttttccggcagattaatcaatttgatttaagtggaaatgtgatcacttcctctgaataccttcctacgttatgggtcaagctttacaaaagcgaaaacctcgacaatccaatccagacagtttcccttggccagtccctgttcttccatttccccccactgctcagagatggcgagaactatgttgtgcttctggactccacactccccagatcccagtatgactacatcttgcctcaagtttctttcaccgcagtgggctaccataaacacatcaccttgatttttaatcccacgaggaagctgcctgaacaggacatcgcacaaggatcctacattgccctgccattgacgctgctggttctgctggccggttacaaccatgacaagctcattcctttgctgctgcagttgacaagccggctacagggagtcggcgcgctcggccaggcagcctctgacaatagcggcccagaagatgcaaagagacaagccaagaaacagaagacaaggcggacgtgaggaggaaggggacagttgcagtctcacttgggacaggccacagccaggggtccggccactacccgcccgtgggataaaagccaaaagcatgcgtcagctaacttcagcctgtgctgctgggcccgcaccccatgtcccttgtcactgtggcatcctgcacccatcctcacccctccgtagagcccctcgtgcaatgcaatgaatggaccctcctgtcactctgctgaacagaatttattttctgagtcaaatataatttattattatttttgtcaaagaagtatttaagctgtgctgtggtgtgagaatgtcattcttgatcttcagccttcgtttgcaagaagagttccagttgatgtggtgtttggttccatggcggggtaccctagggattcatctgttttcttcacttccctttgcatctgagatcctgctggaaaccacggcaacctgtatccactattaggaggtaaaaatcaataaaatggcccattcatttgtgttgtagctcatca

SEQ ID NO: 159992 - DNA, 3911 bp, Homo sapiens
  Payload ID: 11289
  Gene Symbol: NOMO3
  Gene Name: NODAL modulator 3
  ENST ID: ENST00000616708
  CDS Start-End: 67-3870
gcggcgtgcagtgtgaggggcgggacccggctgccggcggtgggtctagctgggggaggtcgggccatgctggtgggccagggcgcggggccgctggggcccgcggtggtcaccgccgcggtggtgctgctgctgagcggcgtggggccggcgcacggctcggaggacatcgtggtgggctgcggtggcttcgtcaagtcggacgtggagatcaactactctctcatcgagataaagctgtacaccaagcatgggactttgaaataccagacagactgtgcccctaataatggttactttatgatccctttgtatgataagggggatttcattctgaagattgagcctcccctagggtggagttttgagccgacgaccgtggagctccatgtggatggagtcagtgacatctgcacaaagggtggggacatcaactttgtcttcactgggttctctgtgaatggcaaggtcctcagcaaagggcagcccctgggtcctgcgggagttcaggtgtctctgagaaacactgggaccgaagcaaagatccagtccacagttacacagcctggcggaaagtttgcattttttaaagttctgcctggagattatgaaatcctcgcaactcatccaacctgggcgttgaaagaggcaagcaccacagtgcgtgtaaccaactccaatgccaatgcggccagtcccctcatagttgctggctacaatgtgtctggctctgtccgaagtgatggggagcccatgaaaggcgtgaagtttcttctcttttcttctttagtaactaaagaggatgtcctgggctgcaatgtctcaccagtgcctgggttccagccccaagacgagagtctggtgtatttgtgctacacggtctccagagaagatggctcgttctctttctattccttgccaagtgggggctacactgtgattccgttctatcgaggggagaggattacctttgatgtggcgccttccagacttgacttcacagtggagcatgacagcttgaaaatcgagcccgtgttccacgtcatgggattctccgtcaccgggagggtcttgaacggacccgaaggagatggtgttccagaagcagtagtcaccctgaataaccaaatcaaagttaaaacaaaagctgatggctcattccgccttgagaacataaccacagggacatacaccatccatgctcagaaagagcacctctactttgaaacggtcaccatcaaaattgcaccaaacacacctcagctggctgacattgttgcaacagggttcagtgtctgtggtcagatatcaatcattcgcttccccgacaccgtcaagcagatgaataaatacaaagttgtcctgtcatctcaagacaaggacaagtctttggtcaccgtggagacagatgctcatggatcattttgttttaaagcaaacccagggacttacaaagtgcaggtgatggttcctgaggcagaaaccagagcagggctgacgttgaaaccccagacatttcctcttactgtgaccgacaggcctgtgatggatgtggcctttgtacagttcttggcatcagtttctgggaaagtctcttgtttggacacctgtggtgacttgctggtgactctacagtccctgagccgccagggtgagaagcggagcctccagctctccggcaaggtcaacgccatgactttcacctttgacaacgtgctccctggaaaatacaaaataagcatcatgcatgaggattggtgctggaagaacaagagcctggaggtggaagtgctggaggatgacgtgtctgcagttgagttcaggcagacgggctacatgctgagatgttccctgtctcacgccatcactctggaattttatcaggatggaaatgggcgtgagaatgtggggatttataacctctccaaaggagtcaaccgattctgcctgtccaagcctggtgtgtacaaagtgacccctcgctcctgccaccggtttgagcaagcgttctacacctatgacacgtcttcacctagtatcttgacattgacagccattcgccaccatgtccttggaactatcaccaccgacaaaatgatggatgtcactgtgactatcaagtcttccatcgacagtgaacccgccttggtcttaggccctctgaagtctgtgcaggagctgcggagggagcagcagctggctgagatcgaggcccgcaggcaggagagggagaaaaacggcaatgaggaaggtgaagaaagaatgaccaagcctcccgtgcaggagatggtagatgagttacaaggccccttctcgtatgatttctcttactgggcgcggtctggagagaaaatcactgttacaccgtcatctaaagagctgctcttttatcccccttcaatggaagccgttgtcagtggagaaagctgcccagggaagctgatcgagatccacgggaaggcaggcctgtttttagaaggccagatccaccccgagttggaaggagtcgagattgtcatcagtgaaaagggggcaagttcaccgctgatcacagtctttactgatgacaaaggtgcctacagtgttggccccctgcacagtgacctggagtacacggtgacctcacagaaggagggctatgttctgactgcagtggaaggaaccatcggagacttcaaggcctatgccctggcaggcgtaagctttgagataaaagctgaggatgaccagcccctcccgggagtcctcttatccctgagtggtggcctgtttcgttccaacctcttgacccaggacaacggcattctgacattctcaaacctgagccctggccagtattacttcaaacccatgatgaaggagttccggtttgagccatcctcacagatgatcgaggtgcaggaaggccagaacctgaagatcaccatcacggggtaccgaaccgcttacagttgctatggcacagtgtcttccttaaacggagagcccgaacaaggggttgccatggaagcggtgggccagaacgactgcagcatttacggagaagacaccgtgacagacgaagagggcaagttcagattacgtggattgctgccgggatgtgtgtaccacgttcagctcaaggcagaaggcaacgaccacattgagcgggcgctcccccaccatagggtgattgaggttgggaataatgacatcgatgatgtaaacatcatagttttccggcagattaatcaatttgatttaagtggaaatgtgatcacttcctctgaataccttcctacgttatgggtcaagctttacaaaagcgaaaacctcgacaatccaatccagacagtttcccttggccagtccctgttcttccatttccccccactgctcagagatggcgagaactatgttgtgcttctggactccacactccccagatcccagtatgactacatcttgcctcaagtttctttcaccgcagtgggctaccataaacacatcaccttgatttttaatcccacgaggaagctgcctgaacaggacatcgcacaaggatcctacattgccctgccattgacgctgctggttctgctggccggttacaaccatgacaagctcattcctttgctgctgcagttgacaagccggctacagggagtcggcgcgctcggccaggcagcctctgacaatagcggcccagaagatgcaaagagacaagccaagaaacagaagacaaggcggacccttcgtttgcaagaagagttccagttgatgtggtgtttggttccatggcggggtaccctagggattcatctgttttcttcacttccctttgcatctgagatcctgctggaaaccacggcaacctgtatccactattaggaggtaaaaatcaataaaatggcccattcatttgtgttgta

SEQ ID NO: 159993 - DNA, 516 bp, Homo sapiens; identical to SEQ ID NO: 159986
  Payload ID: 11289
  Gene Symbol: NOMO3
  Gene Name: NODAL modulator 3
  ENST ID: ENST00000633153
  CDS Start-End: 1-286

SEQ ID NO: 159994 - DNA, 551 bp, Homo sapiens
  Payload ID: 11289
  Gene Symbol: NOMO3
  Gene Name: NODAL modulator 3
  ENST ID: ENST00000634143
  CDS Start-End: 1-242
agacgggctacatgctgagatgttccctgtctcacgccatcactctggtatgtacggcttatggagtctcttatttggaaaagcgcttgccttgtggatgtcaagaaagactaacatcccaggaatattgtaaacgtaggaattttatcaggatggaaatgggcgtgagaatgtggggatttataacctctccaaaggagtcaaccgattctgcctgtccaagcctggtgtgtacaaagtgacccctcgctcctgccaccggtttgagcaagcgttctacacctatgacacgtcttcacctagtatcttgacattgacagccattcgccaccatgtccttggaactatcaccaccgacaaaatgatggatgtcactgtgactatcaagtcttccatcgacagtgaacccgccttggtcttaggccctctgaagtctgtgcaggagctgcggagggagcagcagctggctgagatcgaggcccgcaggcaggagagggagaaaaacggcaatgaggaaggtgaagaaagaatgaccaagcctcccgtgcagg

SEQ ID NO: 159995 - DNA, 320 bp, Homo sapiens; identical to SEQ ID NO: 159987
  Payload ID: 11289
  Gene Symbol: NOMO3
  Gene Name: NODAL modulator 3
  ENST ID: ENST00000632143
  CDS Start-End: 1-152

SEQ ID NO: 159996 - DNA, 683 bp, Homo sapiens; identical to SEQ ID NO: 159988
  Payload ID: 11289
  Gene Symbol: NOMO3
  Gene Name: NODAL modulator 3
  ENST ID: ENST00000633882
  CDS Start-End: 138-323

SEQ ID NO: 159997 - DNA, 1892 bp, Homo sapiens
  Payload ID: 11290
  Gene Symbol: NOG
  Gene Name: noggin
  Uniprot ID: Q13253
  ENST ID: ENST00000332822
  CDS Start-End: 526-1224
aaaccggtgccaacgtgcgcggacgccgccgccgccgccgccgctggagtccgccgggcagagccggccgcggagcccggagcaggcggagggaagtgcccctagaaccagctcagccagcggcgcttgcacagagcggccggacgaagagcagcgagaggaggaggggagagcggctcgtccacgcgccctgcgccgccgccggcccgggaaggcagcgaggagccggcgcctcccgcgccccgcggtcgccctggagtaatttcggatgcccagccgcggccgccttccccagtagacccgggagaggagttgcggccaacttgtgtgcctttcttccgccccggtgggagccggcgctgcgcgaagggctctcccggcggctcatgctgccggccctgcgcctgcccagcctcgggtgagccgcctccggagagacgggggagcgcggcggcgccgcgggctcggcgtgctctcctccggggacgcgggacgaagcagcagccccgggcgcgcgccagaggcatggagcgctgccccagcctaggggtcaccctctacgccctggtggtggtcctggggctgcgggcgacaccggccggcggccagcactatctccacatccgcccggcacccagcgacaacctgcccctggtggacctcatcgaacacccagaccctatctttgaccccaaggaaaaggatctgaacgagacgctgctgcgctcgctgctcgggggccactacgacccaggcttcatggccacctcgccccccgaggaccggcccggcgggggcgggggtgcagctgggggcgcggaggacctggcggagctggaccagctgctgcggcagcggccgtcgggggccatgccgagcgagatcaaagggctagagttctccgagggcttggcccagggcaagaagcagcgcctaagcaagaagctgcggaggaagttacagatgtggctgtggtcgcagacattctgccccgtgctgtacgcgtggaacgacctgggcagccgcttttggccgcgctacgtgaaggtgggcagctgcttcagtaagcgctcgtgctccgtgcccgagggcatggtgtgcaagccgtccaagtccgtgcacctcacggtgctgcggtggcgctgtcagcggcgcgggggccagcgctgcggctggattcccatccagtaccccatcatttccgagtgcaagtgctcgtgctagaactcgggggccccctgcccgcacccggacacttgatcgatccccaccgacgccccctgcaccgcctccaaccagttccaccaccctctagcgagggttttcaatgaacttttttttttttttttttttttttttctgggctacagagacctagctttctggttcctgtaatgcactgtttaactgtgtaggaatgtatatgtgtgtgtatatacggtcccagttttaatttacttattaaaaggtcagtattatacgttaaaagttaccggcttctactgtatttttaaaaaaaagtaagcaaaagaaaaaaaaaagaacagagaaaagagagacttattctggttgttgctaataatgttaacctgctatttatattccagtgcccttcgcatggcgaagcaggggggaaaagttatttttttcttgaagtacaaagagacgggggaacttttgtagaggactttttaaaagctattttccattcttcggaaagtgttttggttttccttggacctcgaagaagctatagagttcaatgttattttacagttattgtaaatatagagaacaaatggaatgactaatcattgtaaattaagagtatctgctatttattctttataatatcccgtgtagtaaatgagaaagaagtgcagagcaggatt

SEQ ID NO: 159998 - DNA, 6567 bp, Homo sapiens
  Payload ID: 11291
  Gene Symbol: NIPA1
  Gene Name: non imprinted in Prader-Willi/Angelman syndrome 1
  Uniprot ID: Q7RTP0
  ENST ID: ENST00000337435
  CDS Start-End: 26-1015
ggctcggagggcgggcgcgggcggaatggggactgcagctgcggcagcggcggcggcggcggcggcggcggccggggagggggcgcgtagcccgagccccgccgccgtgtcgctcggcctgggcgtggccgtcgtgtcgagcctggtgaacgggtccacgttcgtgctacagaagaagggcatcgtgcgtgccaagcggcgaggtacttcctatttaacagacattgtgtggtgggctggcacaatcgcaatggctgttggccagattggaaacttcctggcttacacggcggtccccacggtcctggtaacccccctgggcgcccttggagtaccgttcgggtccattttagcttcctatctcctgaaggaaaagctcaacatcttgggcaagttggggtgcctgctaagctgtgcaggctccgtcgtgctgattatccactccccaaagtctgagagtgtgacaactcaggctgagctggaggaaaagctgaccaatccagtgtttgtgggctacctgtgcatcgtgctgctcatgctgctgctgctcatcttctggatcgcgccggcccatgggcccaccaacatcatggtctacatcagcatctgctccttgctgggcagtttcaccgtgccttccaccaagggcatcgggctggcggcccaagacatcttgcataacaacccgtccagtcagagagccctctgcctgtgcctggtactcctggccgtgctcggctgcagcatcatcgtccagttcaggtacatcaacaaggcgctggagtgcttcgactcctcggtgttcggggccatctactacgtcgtgtttaccacgctggtcctgctggcctcagccatcctcttccgggagtggagcaacgtgggcctggtggacttcttggggatggcctgtggattcacgaccgtctccgtggggattgtccttatacaggtgttcaaagagttcaatttcaaccttggggagatgaacaaatctaatatgaaaacagactagattgcaataggagcttggatggttcgaggaataggcattggaggtggtttctggccgtgattggatgtgaagtagaagaggtcctcgatcatggtgttagaattgactggatagtaacaggtggtctggtggatagcggggagcatggctcagcaccagagcagaggcccagccagccctctgcagcccaaacgtccccaacggttgcctggcaccatctctctctgatgagacgaatctcattttcatttccattaacctggaagctttcatgaatattctcttcttttaaaacattttaacattatttaaacagaaaaagatgggctctttctggttagttgttacatgatagcagagatatttttacttagattactttgggaatgagagattgttgtcttgaactctggcactgtacagtgaatgtgtctgtagttgtgttagtttgcattaagcatgtataacattcaagtatgtcatccaaataagaggcatatacattgaattgtttttaatcctctgacaagttgactcttcgacccccacccccacccaagacattttaatagtaaatagagagagagagaagagttaatgaacatgaggtagtgttccactggcaggatgacttttcaatagctcaaatcaatttcagtgcctttatcacttgaattattaacttaatttgactcttaatgtgtatatgttcttagattagaataatgcaacttcgagtatgctttaatatttcaatattcaagttacaaatgtataaggcagttagaaataatacagtcacatgtcacttaatgatagggaaacattctgagaaatgcattgtaaggtgactttattgtgtgaacatcatggagtgcacttatacaaacctagatgggacacctatgacccacccaggccagatggtacagcctgttgctcctgggccacacacctgtacagcatgtgaccgcactgaataccgcaggcaattgtaacacagtggtgagtatttgtgtttacaaacataggaaaggtacagtaaaactatggtattacaatgttatgggaccaccgtcatgtaagtggtatgtctttgacagaaacatggttacgtggttcatgactgtatattcactggaagatagtcaagactaaagacacattagagcaaattgacccctttaacatgtgattattgtccaattaaagacagttgatttaagtagcatgaggtattattttatttgtattcgatctgtgttacctgggatccagtatcaaatatatccacattctttatcagcaagcattcatggccattcagaagaaataaattaggtaacttgataataaggctaagtgggagagtacctgttcaatagctcatatatcgagtaccctgtcatacaggaacaagttaaaggacacaattgaggttaggctagcttctacaaattgcaatatgcagtttttgaaagattttctaacaaaaagccaataaatgtagccatctccttgttgtttgcaatggcagagcatcctagagttcctcagctaacctctcattatgtgtcttaaatgcaaaagagccattaattatgccagtatttgaatcaaagaggtcattctctgtctatagtgttcccatccatgtgttccaaatgggagcatagcatgaagtgatgcacatatttcaccacggtatcatgtacttcatggccagtgttttatctcagcagggaactacgccaagttgaaagatggggttgggtaaagtagattaggtgaagtagaacataaaattgaatagtacccaattaaagttcctcagtaagaaaaaaaatgtgtttttgtaggcaaaaagaacatttctaaagtctcaaggaatagcttcctaaagtgttgagtaaagaggctaaataaaatgagactagtttaatatagagagaaaaatacctttatggagtaaacgtgtacatgatgatcatgggttgtcagtgatttgtgaactgagagcagcaacaacattattttttaaaaatcttaaatcctctcaatggatggttaacaaatgctcaaagtccattactctttttattggctcttgcaggttttgtgttttatcatcagtgcttttagaaatgcaggccttaacttactgaactgaactttctgaaaacgtaatgtagcagtatcaatatacttttgggcataaaaatagtttcctaggtaaggggtgtgagatattcaaagaatacatgtggctaacaagtgtaatgagaaagttcatgtgtcacatgaaaatgatcatgtttgtgttgctacagcttttgtgggaaatttagtttaaaggcagctcttggtgtaccttagtatattttaatccacaattataccattgatactgagaggtgatacccgatgatcttctctataatattcttagagtaaaacaaaatctcaaaagtattaatagctcttctacccttgaaggtgactggtcctgggacagttagaatctttcaggtttacctctgttcagcagatacttcagtaggatacatagcttttcttccagtgaaacaaagttcatatcatccattgtttttcaagcacgtgacaccagcctcaaagtaaatgacatgaccagtggttgaacagtctaattttcaaatttaatatagagcatataacttctgatttgatagtatttattttaaaaaattatgttttcatcattcatttgaaaatgaaaaagccccaaagtgagaactttgggggagggcctagaacatggatagatctcttagtggtctttccaaaagtacatgtacttgaaatattttcattatcatactattctttgaaaaaaaagatgcttactgtatacttgttttcaagcatcctctaaaatcaaaggttttgatcacaatatgcagatttctcttgatagatacttaaataggctatttctctcctcttcttgggcaatgccttgttttctcctctgaatatttgcatttgaaaggattgcttcctgttctgctcattgatcaaaggtagggccaattaaggattctaaccctaacccagcaccacaaagcccccctggagcatcttcccggctggcaggaccatgccatctctgtggagaaggtgctggggagggaagtccttccagtgccacatggagtgaggccctgcccatgctggggactttggggaggaatttggtattctggtggccttgctcagctctcattgagatcttttcctatcagaatgttagtgaatatacttcgcagctctttgttcagcaataaggaatattctttcaattcctgctcttcaagccaatttactacacccagttgtctttccagaagttcatcccagcggtaatatgttggtgtttgttcttctttggatttcacatctgttttctggtagaagtgagcactgttcacttgtgcagtcgtcttattttccttcttcctagatgactcagctctttgtaaatgttgtgctcaacttctaggggccagttctagactttggagatgcagtgtctcccaggtgtgcacggacacctggtccgtggaaacaggtgtgatgggcacaggctgctgcccttctgtctggtcgggggattcctcttcttcaagctgctcagctaacccagaagaggggagagagtactccggtggttcccagagcccctcccgttgtgccgcttcgacctgacacctgctcgatgctgacttaggcttcctgccaccaagcaggaaactagaaagagaacatttcagtgtaaggtctgttcccgacagcatggattagcttccgtgttctgaagttgttcttttcatggtgtctgacaccgagggcgttgttcgtccatcaggcgggattggatggagtcttggtgttttgccttctcagggaccaaaaatgtatcattgactccttaacagtgaccttcctcccaaggacatatccgtgttcatttttcataggttttactcatattcataggtagattctgttaatgtgagttggaaagaaaagaccaatttgtacaccagtcacaccacaagacagtttatcatataaaatacctcaattttttgtattcctcatttccacctcacaattgtactggtgatgaattttaagggtctgtcctttagcttataggtgatgtttcacatctggccagattcttatacctccattgtatacttgaaaaggttcagaattacaggaacagcagtgagaatttggcccactaccacgactcatttgtttcattcacattcctcacgtgcaacaacataattatattttaagaaaatgtaactttgttacatcaaaatatgttgtctagtaaaaagttgatattcagtagaacaaggatcatgtaaataaacatctatttcacatgtacccaaaagcatttaaaaagcagaatccagggcccagagcatgagccagggaggaggatgtttttcttcttttctctatttttccctaaattgtgcaaacataggtgagtctcttaacctttctgtgcctcagtttttctacctctaaaggggtgggatggttcttcaaattgtttctaaaacaccggcactttcagcagtgttctggtggcctgagatgagagcaccgtgttcagaagtgcctgggagtggcacagtggaaactccgcttgcacggaccatggagtctgctcaggaccatgctgtaggacacacagcctcatgcgctgagaaagcaaaggaagtgctgggtgtaaagtttgcatgattccatgaagctttagttttcctttttttgttttaaaagaaagggttttatatgttctattgtaaaatatggaaattaaacagggacttcagaaagccgcacagaaagatcaccttccgatggtgtgatgtgctcctgacattcggccgaggtctgtattctgaaaaagatttaatggcctgtgaaacacgtggattctgttgcactggatttgtaataaatgacgctgaacttcctgcttccaagcagctcaaccctgatgctgaactgacaccaggcgaatgtcagggctcccaaaccactagtgccaaagggtcatgttgaaaagttcagaatatttatttgtcagaatataataattgccccccaccttagtatttttgcactttacagaaatttagatactgtttttcagtggcttgagcgttttgccttttcaaaggataactattattttcttgaaaatggaatataatcatgagaggaagaagatgtaaaaaatgtcaaatgttgattggttgtgtaaaagttttgtcatagacatgtattggggagcttccaattagcatacatagacacatgtgtcagtggccaagacctgcttatattttgctttatagatgtagtcatagcatgttgttattgcctcatgtaaataaaaaggctattaagttttccagtaatatttattaatctgtatgtgttttaaaataaaataacttatttctagctgaaca

SEQ ID NO: 159999 - DNA, 7613 bp, Homo sapiens
  Payload ID: 11291
  Gene Symbol: NIPA1
  Gene Name: non imprinted in Prader-Willi/Angelman syndrome 1
  Uniprot ID: Q7RTP0
  ENST ID: ENST00000437912
  CDS Start-End: 1299-2063
gcaaagtgccaggaatgatgcaggcagcctgccagatccttggaatcttctggaatgagagaggttgagctgcagcccaaaggcctgtgaaagtgccaggttgaagggtgacggggtgcccagattcccaccttcaaatttcctggcagcatcctggctgtcatggagcgctgtctccagttcagttttctgacacataaggattcgtatggtatgatcctgggcctttgggagacaagaaaagcaagtgctgaaagagaagcaaagaaaccttctccagaggacaggagggaacttcacaccctccactcacctctagctgcctccttagggcttgctgatgttggtggcttgccttcttttcctatagaaaagaagaggaagacagagctcttactagagggaggcagagatggcacagcaagagacatgcccccagcatggcaccactgtcccaggacaggcccacccatgggaccaggttatcagggaccctgtggggatggggtggaagctgggaggtgagccttcctccccaggctgggagtaggcgagacgagactggggcctctacatctgagtgccccccaaacccagcggtcatgtcgtgagcaaagaaagaaaccatgttacctctttcagctgagctccgttctgttgtttctgtggggagagtcaaaggaaggtgactgagggtggcccctcgactctattgcccaggccaggaagcggtacgcaggggtcaggaatggattttaagggcaaagttctcagacccaatgggaacacaaactggtcaacttgccttaacgcccaaagaaaaaggatttgggtctttgttggtttttgcccacagccacagaactgaaagtctgaaactagattctctggaaaagacagtaacataaaccttccgacataagagtgtgagaaaagcccacccttctgccagcttgtgatggagaaagatgtgttcattcaacaagcattgagcaagcacataggggccggggacagttcttcacagctgggatataggacggaaaaggcagacaggagcccttggccccaaggtttccattctagtgaatctttaaatctcagactctcagagcaaacagaaccctctgatactctaactctacctcctcaggaaacggaagcccaaagaggaggggagcttacagcaggccctggactagggattaacacaaaaacaacagcaacaaatctgatttaagcttcacacatgtacttcctatttaacagacattgtgtggtgggctggcacaatcgcaatggctgttggccagattggaaacttcctggcttacacggcggtccccacggtcctggtaacccccctgggcgcccttggagtaccgttcgggtccattttagcttcctatctcctgaaggaaaagctcaacatcttgggcaagttggggtgcctgctaagctgtgcaggctccgtcgtgctgattatccactccccaaagtctgagagtgtgacaactcaggctgagctggaggaaaagctgaccaatccagtgtttgtgggctacctgtgcatcgtgctgctcatgctgctgctgctcatcttctggatcgcgccggcccatgggcccaccaacatcatggtctacatcagcatctgctccttgctgggcagtttcaccgtgccttccaccaagggcatcgggctggcggcccaagacatcttgcataacaacccgtccagtcagagagccctctgcctgtgcctggtactcctggccgtgctcggctgcagcatcatcgtccagttcaggtacatcaacaaggcgctggagtgcttcgactcctcggtgttcggggccatctactacgtcgtgtttaccacgctggtcctgctggcctcagccatcctcttccgggagtggagcaacgtgggcctggtggacttcttggggatggcctgtggattcacgaccgtctccgtggggattgtccttatacaggtgttcaaagagttcaatttcaaccttggggagatgaacaaatctaatatgaaaacagactagattgcaataggagcttggatggttcgaggaataggcattggaggtggtttctggccgtgattggatgtgaagtagaagaggtcctcgatcatggtgttagaattgactggatagtaacaggtggtctggtggatagcggggagcatggctcagcaccagagcagaggcccagccagccctctgcagcccaaacgtccccaacggttgcctggcaccatctctctctgatgagacgaatctcattttcatttccattaacctggaagctttcatgaatattctcttcttttaaaacattttaacattatttaaacagaaaaagatgggctctttctggttagttgttacatgatagcagagatatttttacttagattactttgggaatgagagattgttgtcttgaactctggcactgtacagtgaatgtgtctgtagttgtgttagtttgcattaagcatgtataacattcaagtatgtcatccaaataagaggcatatacattgaattgtttttaatcctctgacaagttgactcttcgacccccacccccacccaagacattttaatagtaaatagagagagagagaagagttaatgaacatgaggtagtgttccactggcaggatgacttttcaatagctcaaatcaatttcagtgcctttatcacttgaattattaacttaatttgactcttaatgtgtatatgttcttagattagaataatgcaacttcgagtatgctttaatatttcaatattcaagttacaaatgtataaggcagttagaaataatacagtcacatgtcacttaatgatagggaaacattctgagaaatgcattgtaaggtgactttattgtgtgaacatcatggagtgcacttatacaaacctagatgggacacctatgacccacccaggccagatggtacagcctgttgctcctgggccacacacctgtacagcatgtgaccgcactgaataccgcaggcaattgtaacacagtggtgagtatttgtgtttacaaacataggaaaggtacagtaaaactatggtattacaatgttatgggaccaccgtcatgtaagtggtatgtctttgacagaaacatggttacgtggttcatgactgtatattcactggaagatagtcaagactaaagacacattagagcaaattgacccctttaacatgtgattattgtccaattaaagacagttgatttaagtagcatgaggtattattttatttgtattcgatctgtgttacctgggatccagtatcaaatatatccacattctttatcagcaagcattcatggccattcagaagaaataaattaggtaacttgataataaggctaagtgggagagtacctgttcaatagctcatatatcgagtaccctgtcatacaggaacaagttaaaggacacaattgaggttaggctagcttctacaaattgcaatatgcagtttttgaaagattttctaacaaaaagccaataaatgtagccatctccttgttgtttgcaatggcagagcatcctagagttcctcagctaacctctcattatgtgtcttaaatgcaaaagagccattaattatgccagtatttgaatcaaagaggtcattctctgtctatagtgttcccatccatgtgttccaaatgggagcatagcatgaagtgatgcacatatttcaccacggtatcatgtacttcatggccagtgttttatctcagcagggaactacgccaagttgaaagatggggttgggtaaagtagattaggtgaagtagaacataaaattgaatagtacccaattaaagttcctcagtaagaaaaaaaatgtgtttttgtaggcaaaaagaacatttctaaagtctcaaggaatagcttcctaaagtgttgagtaaagaggctaaataaaatgagactagtttaatatagagagaaaaatacctttatggagtaaacgtgtacatgatgatcatgggttgtcagtgatttgtgaactgagagcagcaacaacattattttttaaaaatcttaaatcctctcaatggatggttaacaaatgctcaaagtccattactctttttattggctcttgcaggttttgtgttttatcatcagtgcttttagaaatgcaggccttaacttactgaactgaactttctgaaaacgtaatgtagcagtatcaatatacttttgggcataaaaatagtttcctaggtaaggggtgtgagatattcaaagaatacatgtggctaacaagtgtaatgagaaagttcatgtgtcacatgaaaatgatcatgtttgtgttgctacagcttttgtgggaaatttagtttaaaggcagctcttggtgtaccttagtatattttaatccacaattataccattgatactgagaggtgatacccgatgatcttctctataatattcttagagtaaaacaaaatctcaaaagtattaatagctcttctacccttgaaggtgactggtcctgggacagttagaatctttcaggtttacctctgttcagcagatacttcagtaggatacatagcttttcttccagtgaaacaaagttcatatcatccattgtttttcaagcacgtgacaccagcctcaaagtaaatgacatgaccagtggttgaacagtctaattttcaaatttaatatagagcatataacttctgatttgatagtatttattttaaaaaattatgttttcatcattcatttgaaaatgaaaaagccccaaagtgagaactttgggggagggcctagaacatggatagatctcttagtggtctttccaaaagtacatgtacttgaaatattttcattatcatactattctttgaaaaaaaagatgcttactgtatacttgttttcaagcatcctctaaaatcaaaggttttgatcacaatatgcagatttctcttgatagatacttaaataggctatttctctcctcttcttgggcaatgccttgttttctcctctgaatatttgcatttgaaaggattgcttcctgttctgctcattgatcaaaggtagggccaattaaggattctaaccctaacccagcaccacaaagcccccctggagcatcttcccggctggcaggaccatgccatctctgtggagaaggtgctggggagggaagtccttccagtgccacatggagtgaggccctgcccatgctggggactttggggaggaatttggtattctggtggccttgctcagctctcattgagatcttttcctatcagaatgttagtgaatatacttcgcagctctttgttcagcaataaggaatattctttcaattcctgctcttcaagccaatttactacacccagttgtctttccagaagttcatcccagcggtaatatgttggtgtttgttcttctttggatttcacatctgttttctggtagaagtgagcactgttcacttgtgcagtcgtcttattttccttcttcctagatgactcagctctttgtaaatgttgtgctcaacttctaggggccagttctagactttggagatgcagtgtctcccaggtgtgcacggacacctggtccgtggaaacaggtgtgatgggcacaggctgctgcccttctgtctggtcgggggattcctcttcttcaagctgctcagctaacccagaagaggggagagagtactccggtggttcccagagcccctcccgttgtgccgcttcgacctgacacctgctcgatgctgacttaggcttcctgccaccaagcaggaaactagaaagagaacatttcagtgtaaggtctgttcccgacagcatggattagcttccgtgttctgaagttgttcttttcatggtgtctgacaccgagggcgttgttcgtccatcaggcgggattggatggagtcttggtgttttgccttctcagggaccaaaaatgtatcattgactccttaacagtgaccttcctcccaaggacatatccgtgttcatttttcataggttttactcatattcataggtagattctgttaatgtgagttggaaagaaaagaccaatttgtacaccagtcacaccacaagacagtttatcatataaaatacctcaattttttgtattcctcatttccacctcacaattgtactggtgatgaattttaagggtctgtcctttagcttataggtgatgtttcacatctggccagattcttatacctccattgtatacttgaaaaggttcagaattacaggaacagcagtgagaatttggcccactaccacgactcatttgtttcattcacattcctcacgtgcaacaacataattatattttaagaaaatgtaactttgttacatcaaaatatgttgtctagtaaaaagttgatattcagtagaacaaggatcatgtaaataaacatctatttcacatgtacccaaaagcatttaaaaagcagaatccagggcccagagcatgagccagggaggaggatgtttttcttcttttctctatttttccctaaattgtgcaaacataggtgagtctcttaacctttctgtgcctcagtttttctacctctaaaggggtgggatggttcttcaaattgtttctaaaacaccggcactttcagcagtgttctggtggcctgagatgagagcaccgtgttcagaagtgcctgggagtggcacagtggaaactccgcttgcacggaccatggagtctgctcaggaccatgctgtaggacacacagcctcatgcgctgagaaagcaaaggaagtgctgggtgtaaagtttgcatgattccatgaagctttagttttcctttttttgttttaaaagaaagggttttatatgttctattgtaaaatatggaaattaaacagggacttcagaaagccgcacagaaagatcaccttccgatggtgtgatgtgctcctgacattcggccgaggtctgtattctgaaaaagatttaatggcctgtgaaacacgtggattctgttgcactggatttgtaataaatgacgctgaacttcctgcttccaagcagctcaaccctgatgctgaactgacaccaggcgaatgtcagggctcccaaaccactagtgccaaagggtcatgttgaaaagttcagaatatttatttgtcagaatataataattgccccccaccttagtatttttgcactttacagaaatttagatactgtttttcagtggcttgagcgttttgccttttcaaaggataactattattttcttgaaaatggaatataatcatgagaggaagaagatgtaaaaaatgtcaaatgttgattggttgtgtaaaagttttgtcatagacatgtattggggagcttccaattagcatacatagacacatgtgtcagtggccaagacctgcttatattttgctttatagatgtagtcatagcatgttgttattgcctcatgtaaataaaaaggctattaagttttccagtaatatttattaatctgtatgtgttttaaaataaaataacttatttctagctgaa

SEQ ID NO: 160000 - DNA, 2799 bp, Homo sapiens
  Payload ID: 11291
  Gene Symbol: NIPA1
  Gene Name: non imprinted in Prader-Willi/Angelman syndrome 1
  ENST ID: ENST00000559448
  CDS Start-End: 1-271
gtcgagcctggtgaacgggtccacgttcgtgctacagaagaagggcatcgtgcgtgccaagcggcgaggtacttcctatttaacagacattgtgtggtgggctggcacaatcgcaatggctgttggccagattggaaacttcctggcttacacggcggtccccacggtcctggtaacccccctgggcgcccttggagtaccgttcggacagatgcccaaatccttgcagagaagtgtgtccatgatgggtgtattgaagtttacaccttagagtcacgtaggcattaaggtccattttagcttcctatctcctgaaggaaaagctcaacatcttgggcaagttggggtgcctgctaagctgtgcaggctccgtcgtgctgattatccactccccaaagtctgagagtgtgacaactcaggctgagctggaggaaaagctgaccaatccagtgtttgtgggctacctgtgcatcgtgctgctcatgctgctgctgctcatcttctggatcgcgccggcccatgggcccaccaacatcatggtctacatcagcatctgctccttgctgggcagtttcaccgtgccttccaccaagggcatcgggctggcggcccaagacatcttgcataacaacccgtccagtcagagagccctctgcctgtgcctggtactcctggccgtgctcggctgcagcatcatcgtccagttcaggtacatcaacaaggcgctggagtgcttcgactcctcggtgttcggggccatctactacgtcgtgtttaccacgctggtcctgctggcctcagccatcctcttccgggagtggagcaacgtgggcctggtggacttcttggggatggcctgtggattcacgaccgtctccgtggggattgtccttatacaggtgttcaaagagttcaatttcaaccttggggagatgaacaaatctaatatgaaaacagactagattgcaataggagcttggatggttcgaggaataggcattggaggtggtttctggccgtgattggatgtgaagtagaagaggtcctcgatcatggtgttagaattgactggatagtaacaggtggtctggtggatagcggggagcatggctcagcaccagagcagaggcccagccagccctctgcagcccaaacgtccccaacggttgcctggcaccatctctctctgatgagacgaatctcattttcatttccattaacctggaagctttcatgaatattctcttcttttaaaacattttaacattatttaaacagaaaaagatgggctctttctggttagttgttacatgatagcagagatatttttacttagattactttgggaatgagagattgttgtcttgaactctggcactgtacagtgaatgtgtctgtagttgtgttagtttgcattaagcatgtataacattcaagtatgtcatccaaataagaggcatatacattgaattgtttttaatcctctgacaagttgactcttcgacccccacccccacccaagacattttaatagtaaatagagagagagagaagagttaatgaacatgaggtagtgttccactggcaggatgacttttcaatagctcaaatcaatttcagtgcctttatcacttgaattattaacttaatttgactcttaatgtgtatatgttcttagattagaataatgcaacttcgagtatgctttaatatttcaatattcaagttacaaatgtataaggcagttagaaataatacagtcacatgtcacttaatgatagggaaacattctgagaaatgcattgtaaggtgactttattgtgtgaacatcatggagtgcacttatacaaacctagatgggacacctatgacccacccaggccagatggtacagcctgttgctcctgggccacacacctgtacagcatgtgaccgcactgaataccgcaggcaattgtaacacagtggtgagtatttgtgtttacaaacataggaaaggtacagtaaaactatggtattacaatgttatgggaccaccgtcatgtaagtggtatgtctttgacagaaacatggttacgtggttcatgactgtatattcactggaagatagtcaagactaaagacacattagagcaaattgacccctttaacatgtgattattgtccaattaaagacagttgatttaagtagcatgaggtattattttatttgtattcgatctgtgttacctgggatccagtatcaaatatatccacattctttatcagcaagcattcatggccattcagaagaaataaattaggtaacttgataataaggctaagtgggagagtacctgttcaatagctcatatatcgagtaccctgtcatacaggaacaagttaaaggacacaattgaggttaggctagcttctacaaattgcaatatgcagtttttgaaagattttctaacaaaaagccaataaatgtagccatctccttgttgtttgcaatggcagagcatcctagagttcctcagctaacctctcattatgtgtcttaaatgcaaaagagccattaattatgccagtatttgaatcaaagaggtcattctctgtctatagtgttcccatccatgtgttccaaatgggagcatagcatgaagtgatgcacatatttcaccacggtatcatgtacttcatggccagtgttttatctcagcagggaactacgccaagttgaaagatggggttgggtaaagtagattaggtgaagtagaacataaaattgaatagtacccaattaaagttcctcagtaa

SEQ ID NO: 160001 - DNA, 1675 bp, Homo sapiens
  Payload ID: 11291
  Gene Symbol: NIPA1
  Gene Name: non imprinted in Prader-Willi/Angelman syndrome 1
  Uniprot ID: Q7RTP0
  ENST ID: ENST00000561183
  CDS Start-End: 398-1162
acccttctcctggctcagcctcccgagtagctgggactacaggcctccgccacgacgcccagctaattttttgtatttttagtagagacggggtttcactgtgttagccaggatggtctcgatctcctgaccttgtgatccacccgcctcggcctcccgaagtgctgggattacaggcgtgagccaccgcgcccggcttgttgtagtttattaaaacgaggaaactagactatgggatcacaagcccagagccccatgtagctgactctagcgccaagggcggaagagaaacgcccagcgccagggctctccttcgatctctgcagcggcgcgccgggcttcgcgctccggtacttcctatttaacagacattgtgtggtgggctggcacaatcgcaatggctgttggccagattggaaacttcctggcttacacggcggtccccacggtcctggtaacccccctgggcgcccttggagtaccgttcgggtccattttagcttcctatctcctgaaggaaaagctcaacatcttgggcaagttggggtgcctgctaagctgtgcaggctccgtcgtgctgattatccactccccaaagtctgagagtgtgacaactcaggctgagctggaggaaaagctgaccaatccagtgtttgtgggctacctgtgcatcgtgctgctcatgctgctgctgctcatcttctggatcgcgccggcccatgggcccaccaacatcatggtctacatcagcatctgctccttgctgggcagtttcaccgtgccttccaccaagggcatcgggctggcggcccaagacatcttgcataacaacccgtccagtcagagagccctctgcctgtgcctggtactcctggccgtgctcggctgcagcatcatcgtccagttcaggtacatcaacaaggcgctggagtgcttcgactcctcggtgttcggggccatctactacgtcgtgtttaccacgctggtcctgctggcctcagccatcctcttccgggagtggagcaacgtgggcctggtggacttcttggggatggcctgtggattcacgaccgtctccgtggggattgtccttatacaggtgttcaaagagttcaatttcaaccttggggagatgaacaaatctaatatgaaaacagactagattgcaataggagcttggatggttcgaggaataggcattggaggtggtttctggccgtgattggatgtgaagtagaagaggtcctcgatcatggtgttagaattgactggatagtaacaggtggtctggtggatagcggggagcatggctcagcaccagagcagaggcccagccagccctctgcagcccaaacgtccccaacggttgcctggcaccatctctctctgatgagacgaatctcattttcatttccattaacctggaagctttcatgaatattctcttcttttaaaacattttaacattatttaaacagaaaaagatgggctctttctggttagttgttacatgatagcagagatatttttacttagattactttgggaatgagagattgttgtcttgaactctggcactgtacagtgaatgtgtctgtagttgtgttagtttgcattaagcatgtataacattcaagtatgtcatccaaataagaggcatatacattgaattgtt

SEQ ID NO: 160002 - DNA, 582 bp, Homo sapiens
  Payload ID: 11291
  Gene Symbol: NIPA1
  Gene Name: non imprinted in Prader-Willi/Angelman syndrome 1
  ENST ID: ENST00000557930
  CDS Start-End: 1-177
atcgtgcgtgccaagcggcgaggtacttcctatttaacagacattgtgtggtgggctggcacaatcgcaatggctgttggccagattggaaacttcctggcttacacggcggtccccacggtcctggtaacccccctgggcgcccttggagtaccgttcgggtgttactcactgtaggaaccatgtcagatggtgttctggataaaaagcctgtcttcaacttggaatcccagtccattttagcttcctatctcctgaaggaaaagctcaacatcttgggcaagttggggtgcctgctaagctgtgcaggctccgtcgtgctgattatccactccccaaagtctgagagtgtgacaactcaggctgagctggaggaaaagctgaccaatccagtgtttgtgggctacctgtgcatcgtgctgctcatgctgctgctgctcatcttctggatcgcgccggcccatgggcccaccaacatcatggtctacatcagcatctgctccttgctgggcagtttcaccgtgccttccaccaagggcatcgggctggcggcccaagacatcttgcataacaacccgtcca

SEQ ID NO: 160003 - DNA, 3233 bp, Homo sapiens
  Payload ID: 11292
  Gene Symbol: NIPA2
  Gene Name: non imprinted in Prader-Willi/Angelman syndrome 2
  Uniprot ID: Q8N8Q9
  ENST ID: ENST00000337451
  CDS Start-End: 614-1696
gttttccggcgccggccctaggtcccggcagcggtggtgacggcggtgccggaggttgtccttggcaggttttcctcggcgcttctccatggaggaggcggtgcgaacggcttcagccccgaatgctcgcatctcccactggacggcgacgaaggcggtggccgtgcgagcgcaggactgggcggcctgtgtgggggtgtgagccgcggtgcccaaggctgcgccggcgaggggaagccgcgcggccggccggccgactagggctggagctactcggccagggtttaagactttaaatgagaataaagggtggtatttacgaggaaatgagagtgaataagtcatctctaacctctcccagcctttttttcataagagagaccatattaaacttacatgctctcccggctgtgatagaccttcagttacagagagagggagcagagtgggaccaggtctgagaatagtgaagcaactcattcctttcaggacattccctctgatgtcctattttcaaactgtttgaagactgcttcattctgcctctagtaccagcggtttctctgttctgtgatcaatgtgattcacaggaactccttaagtaacaaacgaaatgagccaggggcgtggaaaatatgacttctatattggtctgggattggctatgagctccagcattttcattggaggaagtttcattttgaaaaaaaagggcctccttcgacttgccaggaaaggctctatgagagcaggtcaaggtggccatgcatatcttaaggaatggttgtggtgggctggactgctgtcaatgggagctggtgaggtggccaacttcgctgcgtatgcgtttgcaccagccactctagtgactccactaggagctctcagcgtgctagtaagtgccattctttcttcatactttctcaatgaaagacttaatcttcatgggaaaattgggtgtttgctaagtattctaggatctacagttatggtcattcatgctccaaaggaagaggagattgagactttaaatgaaatgtctcacaagctaggtgatccaggttttgtggtctttgcaacccttgtggtcattgtggccttgatattaatcttcgtggtgggtcctcgccatggacagacaaacattcttgtgtacataacaatctgctctgtaatcggcgcgttttcagtctcctgtgtgaagggcctgggcattgctatcaaggagctgtttgcagggaagcctgtgctgcggcatcccctggcttggattctgctgctgagcctcatcgtctgtgtgagcacacagattaattacctaaatagggccctggatatattcaacacttccattgtgactccaatatattatgtattctttacaacatcagttttaacttgttcagctattctttttaaggagtggcaagatatgcctgttgacgatgtcattggtactttgagtggcttctttacaatcattgtggggatattcttgttgcatgcctttaaagacgtcagctttagtctagcaagtctgcctgtgtcttttcgaaaagacgagaaagcaatgaatggcaatctctctaatatgtatgaagttcttaataataatgaagaaagcttaacctgtggaatcgaacaacacactggtgaaaatgtctcccgaagaaatggaaatctgacagctttttaagaaaggtgtaattaaaggttaatctgtgattgttatgaagtgaatttgaatatcatcagaatgtgtctgaaaaaacattgtcctcaaataatgttctttaaaggcaatctttttaaagatttcactaatttggaccaagaaattacttttcttgtatttaaacaaacaatggtagctcactaaaatgacctcagcacatgacgatttctattaacattttattgttgtagaagtattttacattttcatcccttctccaaaagccgaatgcactaatgacagttttaagtctatgaaaatgctttattttttcattggtgatgaaagtctgaaatgtgcatttgtcatccccactccatcaatccctgaccatgtaaggcttttttattttaaaaaaacagagttatcccaatacattatcctgtgatttaccttacctacaaaagtggctcctgtttgtttgatgatgattggttttatttttgaaatatttattaagggaaaactaagttactgaatgaaggaacctctttcttacaaaacaaaaaaaagggcagaaatcaccccaaggaacgatttctcaggttgagatgatcaccgtgaatccggcttcctctgagcattcgatggccttagcacctcatcaagccagcacatcctgcctgctgttgcagcctggctgggtttattcttcagttaccctaatcccatgatgcctggaaccttgattaccgttttacatcagctcttgtacttttcagtatattttcataatgagttatattgtcatttagactttgaacagctctgggaaatagaagactagggttgtttcttaaatttagctcatgttataataaaaagttgaaatgaagttcttattctaaaagtctgaatgcttagaacaaacttaacatgtttatagaatatggtctctttgtaccaagtactttgcttaagagctcctttgggccactacatattttggtttctagaaaatgtttgtttatgaagaagtcgatggaaaactgcaaacatatgcagaaaaggtagaataataaaaaaggtctaatgaactccattcagctttgaacctatccactcataaccattgactggcctttaaaaaaaagtattggcagaattaatttccacctaggtgatgggaagaaagtgttcgcctgttccagcctgtggctcctgcctggaggttacccagtggtgcgccagcgccaagccatcactccccgagggcctcccctgccaatggtgctggtatcccatgcagctcaccactggctgcgtggaaactcccttttttccaactttattattggccttctaaggagctgttttagatgttttttctaactgcctcctcccatgccattttaatactacagatgtactacgtatctgtttatatactgtacctacatctgtgctttgtacataaaagaaccagttttctcccccttgaggacagagactcatttgaacatgcataggttaataaataataaattcttatttaaca

SEQ ID NO: 160004 - DNA, 1531 bp, Homo sapiens
  Payload ID: 11292
  Gene Symbol: NIPA2
  Gene Name: non imprinted in Prader-Willi/Angelman syndrome 2
  Uniprot ID: Q8N8Q9
  ENST ID: ENST00000359727
  CDS Start-End: 506-1531
aggttttccggcgccggccctaggtcccggcagcggtggtgacggcggtgccggaggttgtccttggcaggttttcctcggcgcttctccatggaggaggcggtgcgaacggcttcagccccgaatgctcgcatctcccactggacggcgacgaaggcggtggccgtgcgagcgcaggactgggcggcctgtgtgggggtgtgagccgcggtgcccaaggctgcgccggcgaggggaagccgcgcggccggccggccgactagggtgaggtcgccactccttcctttcaggctctcccggctgtgatagaccttcagttacagagagagggagcagagtgggaccaggtctgagaatagtgaagcaactcattcctttcaggacattccctctgatgtcctattttcaaactgtttgaagactgcttcattctgcctctagtaccagcggtttctctgttctgtgatcaatgtgattcacaggaactccttaagtaacaaacgaaatgagccaggggcgtggaaaatatgacttctatattggtctgggattggctatgagctccagcattttcattggaggaagtttcattttgaaaaaaaagggcctccttcgacttgccaggaaaggctctatgagagcagtgggagctggtgaggtggccaacttcgctgcgtatgcgtttgcaccagccactctagtgactccactaggagctctcagcgtgctagtaagtgccattctttcttcatactttctcaatgaaagacttaatcttcatgggaaaattgggtgtttgctaagtattctaggatctacagttatggtcattcatgctccaaaggaagaggagattgagactttaaatgaaatgtctcacaagctaggtgatccaggttttgtggtctttgcaacccttgtggtcattgtggccttgatattaatcttcgtggtgggtcctcgccatggacagacaaacattcttgtgtacataacaatctgctctgtaatcggcgcgttttcagtctcctgtgtgaagggcctgggcattgctatcaaggagctgtttgcagggaagcctgtgctgcggcatcccctggcttggattctgctgctgagcctcatcgtctgtgtgagcacacagattaattacctaaatagggccctggatatattcaacacttccattgtgactccaatatattatgtattctttacaacatcagttttaacttgttcagctattctttttaaggagtggcaagatatgcctgttgacgatgtcattggtactttgagtggcttctttacaatcattgtggggatattcttgttgcatgcctttaaagacgtcagctttagtctagcaagtctgcctgtgtcttttcgaaaagacgagaaagcaatgaatggcaatctctctaatatgtatgaagttcttaataataatgaagaaagcttaacctgtggaatcgaacaacacactggtgaaaatgtctcccgaagaaatggaaatctgacagctttttaa

SEQ ID NO: 160005 - DNA, 2280 bp, Homo sapiens
  Payload ID: 11292
  Gene Symbol: NIPA2
  Gene Name: non imprinted in Prader-Willi/Angelman syndrome 2
  Uniprot ID: Q8N8Q9
  ENST ID: ENST00000398013
  CDS Start-End: 329-1411
gcagcggtggtgacggcggtgccggaggttgtccttggcaggttttcctcggcgcttctccatggaggaggcggtgcgaacggcttcagccccgaatgctcgcatctcccactggacggcgacgaaggcggtggccgtgcgagcgcaggactgggcggcctgtgtgggggtgtgagccgcggtgcccaaggctgcgccggcgaggggaagccgcgcggccggccggccgactagggtttgaagactgcttcattctgcctctagtaccagcggtttctctgttctgtgatcaatgtgattcacaggaactccttaagtaacaaacgaaatgagccaggggcgtggaaaatatgacttctatattggtctgggattggctatgagctccagcattttcattggaggaagtttcattttgaaaaaaaagggcctccttcgacttgccaggaaaggctctatgagagcaggtcaaggtggccatgcatatcttaaggaatggttgtggtgggctggactgctgtcaatgggagctggtgaggtggccaacttcgctgcgtatgcgtttgcaccagccactctagtgactccactaggagctctcagcgtgctagtaagtgccattctttcttcatactttctcaatgaaagacttaatcttcatgggaaaattgggtgtttgctaagtattctaggatctacagttatggtcattcatgctccaaaggaagaggagattgagactttaaatgaaatgtctcacaagctaggtgatccaggttttgtggtctttgcaacccttgtggtcattgtggccttgatattaatcttcgtggtgggtcctcgccatggacagacaaacattcttgtgtacataacaatctgctctgtaatcggcgcgttttcagtctcctgtgtgaagggcctgggcattgctatcaaggagctgtttgcagggaagcctgtgctgcggcatcccctggcttggattctgctgctgagcctcatcgtctgtgtgagcacacagattaattacctaaatagggccctggatatattcaacacttccattgtgactccaatatattatgtattctttacaacatcagttttaacttgttcagctattctttttaaggagtggcaagatatgcctgttgacgatgtcattggtactttgagtggcttctttacaatcattgtggggatattcttgttgcatgcctttaaagacgtcagctttagtctagcaagtctgcctgtgtcttttcgaaaagacgagaaagcaatgaatggcaatctctctaatatgtatgaagttcttaataataatgaagaaagcttaacctgtggaatcgaacaacacactggtgaaaatgtctcccgaagaaatggaaatctgacagctttttaagaaaggtgtaattaaaggttaatctgtgattgttatgaagtgaatttgaatatcatcagaatgtgtctgaaaaaacattgtcctcaaataatgttctttaaaggcaatctttttaaagatttcactaatttggaccaagaaattacttttcttgtatttaaacaaacaatggtagctcactaaaatgacctcagcacatgacgatttctattaacattttattgttgtagaagtattttacattttcatcccttctccaaaagccgaatgcactaatgacagttttaagtctatgaaaatgctttattttttcattggtgatgaaagtctgaaatgtgcatttgtcatccccactccatcaatccctgaccatgtaaggcttttttattttaaaaaaacagagttatcccaatacattatcctgtgatttaccttacctacaaaagtggctcctgtttgtttgatgatgattggttttatttttgaaatatttattaagggaaaactaagttactgaatgaaggaacctctttcttacaaaacaaaaaaaagggcagaaatcaccccaaggaacgatttctcaggttgagatgatcaccgtgaatccggcttcctctgagcattcgatggccttagcacctcatcaagccagcacatcctgcctgctgttgcagcctggctgggtttattcttcagttaccctaatcccatgatgcctggaaccttgattaccgttttacatcagctcttgtacttttcagtatattttcataatgagttatattgtcatttagactttgaacagctctgggaaatagaagactagggttgtttcttaaatttagctcatgttataataaaaagttgaa

SEQ ID NO: 160006 - DNA, 3130 bp, Homo sapiens
  Payload ID: 11292
  Gene Symbol: NIPA2
  Gene Name: non imprinted in Prader-Willi/Angelman syndrome 2
  Uniprot ID: Q8N8Q9
  ENST ID: ENST00000398014
  CDS Start-End: 511-1593
gtcatttagccgcgcctaggttttccggcgccggccctaggtcccggcagcggtggtgacggcggtgccggaggttgtccttggcaggttttcctcggcgcttctccatggaggaggcggtgcgaacggcttcagccccgaatgctcgcatctcccactggacggcgacgaaggcggtggccgtgcgagcgcaggactgggcggcctgtgtgggggtgtgagccgcggtgcccaaggctgcgccggcgaggggaagccgcgcggccggccggccgactagggctggagctactcggccagggtttaagactttaaatgagaataaagggtggtatttacgaggaaatgagagtgaataagtcatctctaacctctcccagcctttttttcataagagagaccatattaaacttacatgtttgaagactgcttcattctgcctctagtaccagcggtttctctgttctgtgatcaatgtgattcacaggaactccttaagtaacaaacgaaatgagccaggggcgtggaaaatatgacttctatattggtctgggattggctatgagctccagcattttcattggaggaagtttcattttgaaaaaaaagggcctccttcgacttgccaggaaaggctctatgagagcaggtcaaggtggccatgcatatcttaaggaatggttgtggtgggctggactgctgtcaatgggagctggtgaggtggccaacttcgctgcgtatgcgtttgcaccagccactctagtgactccactaggagctctcagcgtgctagtaagtgccattctttcttcatactttctcaatgaaagacttaatcttcatgggaaaattgggtgtttgctaagtattctaggatctacagttatggtcattcatgctccaaaggaagaggagattgagactttaaatgaaatgtctcacaagctaggtgatccaggttttgtggtctttgcaacccttgtggtcattgtggccttgatattaatcttcgtggtgggtcctcgccatggacagacaaacattcttgtgtacataacaatctgctctgtaatcggcgcgttttcagtctcctgtgtgaagggcctgggcattgctatcaaggagctgtttgcagggaagcctgtgctgcggcatcccctggcttggattctgctgctgagcctcatcgtctgtgtgagcacacagattaattacctaaatagggccctggatatattcaacacttccattgtgactccaatatattatgtattctttacaacatcagttttaacttgttcagctattctttttaaggagtggcaagatatgcctgttgacgatgtcattggtactttgagtggcttctttacaatcattgtggggatattcttgttgcatgcctttaaagacgtcagctttagtctagcaagtctgcctgtgtcttttcgaaaagacgagaaagcaatgaatggcaatctctctaatatgtatgaagttcttaataataatgaagaaagcttaacctgtggaatcgaacaacacactggtgaaaatgtctcccgaagaaatggaaatctgacagctttttaagaaaggtgtaattaaaggttaatctgtgattgttatgaagtgaatttgaatatcatcagaatgtgtctgaaaaaacattgtcctcaaataatgttctttaaaggcaatctttttaaagatttcactaatttggaccaagaaattacttttcttgtatttaaacaaacaatggtagctcactaaaatgacctcagcacatgacgatttctattaacattttattgttgtagaagtattttacattttcatcccttctccaaaagccgaatgcactaatgacagttttaagtctatgaaaatgctttattttttcattggtgatgaaagtctgaaatgtgcatttgtcatccccactccatcaatccctgaccatgtaaggcttttttattttaaaaaaacagagttatcccaatacattatcctgtgatttaccttacctacaaaagtggctcctgtttgtttgatgatgattggttttatttttgaaatatttattaagggaaaactaagttactgaatgaaggaacctctttcttacaaaacaaaaaaaagggcagaaatcaccccaaggaacgatttctcaggttgagatgatcaccgtgaatccggcttcctctgagcattcgatggccttagcacctcatcaagccagcacatcctgcctgctgttgcagcctggctgggtttattcttcagttaccctaatcccatgatgcctggaaccttgattaccgttttacatcagctcttgtacttttcagtatattttcataatgagttatattgtcatttagactttgaacagctctgggaaatagaagactagggttgtttcttaaatttagctcatgttataataaaaagttgaaatgaagttcttattctaaaagtctgaatgcttagaacaaacttaacatgtttatagaatatggtctctttgtaccaagtactttgcttaagagctcctttgggccactacatattttggtttctagaaaatgtttgtttatgaagaagtcgatggaaaactgcaaacatatgcagaaaaggtagaataataaaaaaggtctaatgaactccattcagctttgaacctatccactcataaccattgactggcctttaaaaaaaagtattggcagaattaatttccacctaggtgatgggaagaaagtgttcgcctgttccagcctgtggctcctgcctggaggttacccagtggtgcgccagcgccaagccatcactccccgagggcctcccctgccaatggtgctggtatcccatgcagctcaccactggctgcgtggaaactcccttttttccaactttattattggccttctaaggagctgttttagatgttttttctaactgcctcctcccatgccattttaatactacagatgtactacgtatctgtttatatactgtacctacatctgtgctttgtacataaaagaaccagttttctcccccttgaggacagagactcatttgaacatgcataggttaataaataataaattcttatttaaca

SEQ ID NO: 160007 - DNA, 1412 bp, Homo sapiens
  Payload ID: 11292
  Gene Symbol: NIPA2
  Gene Name: non imprinted in Prader-Willi/Angelman syndrome 2
  Uniprot ID: Q8N8Q9
  ENST ID: ENST00000539711
  CDS Start-End: 318-1343
gacggcggtgccggaggttgtccttggcaggttttcctcggcgcttctccatggaggaggcggtgcgaacggcttcagccccgaatgctcgcatctcccactggacggcgacgaaggcggtggccgtgcgagcgcaggactgggcggcctgtgtgggggtgtgagccgcggtgcccaaggctgcgccggcgaggggaagccgcgcggccggccggccgactagggtttgaagactgcttcattctgcctctagtaccagcggtttctctgttctgtgatcaatgtgattcacaggaactccttaagtaacaaacgaaatgagccaggggcgtggaaaatatgacttctatattggtctgggattggctatgagctccagcattttcattggaggaagtttcattttgaaaaaaaagggcctccttcgacttgccaggaaaggctctatgagagcagtgggagctggtgaggtggccaacttcgctgcgtatgcgtttgcaccagccactctagtgactccactaggagctctcagcgtgctagtaagtgccattctttcttcatactttctcaatgaaagacttaatcttcatgggaaaattgggtgtttgctaagtattctaggatctacagttatggtcattcatgctccaaaggaagaggagattgagactttaaatgaaatgtctcacaagctaggtgatccaggttttgtggtctttgcaacccttgtggtcattgtggccttgatattaatcttcgtggtgggtcctcgccatggacagacaaacattcttgtgtacataacaatctgctctgtaatcggcgcgttttcagtctcctgtgtgaagggcctgggcattgctatcaaggagctgtttgcagggaagcctgtgctgcggcatcccctggcttggattctgctgctgagcctcatcgtctgtgtgagcacacagattaattacctaaatagggccctggatatattcaacacttccattgtgactccaatatattatgtattctttacaacatcagttttaacttgttcagctattctttttaaggagtggcaagatatgcctgttgacgatgtcattggtactttgagtggcttctttacaatcattgtggggatattcttgttgcatgcctttaaagacgtcagctttagtctagcaagtctgcctgtgtcttttcgaaaagacgagaaagcaatgaatggcaatctctctaatatgtatgaagttcttaataataatgaagaaagcttaacctgtggaatcgaacaacacactggtgaaaatgtctcccgaagaaatggaaatctgacagctttttaagaaaggtgtaattaaaggttaatctgtgattgttatgaagtgaatttgaatatcatcagaatgtgtctg

SEQ ID NO: 160008 - DNA, 554 bp, Homo sapiens
  Payload ID: 11292
  Gene Symbol: NIPA2
  Gene Name: non imprinted in Prader-Willi/Angelman syndrome 2
  ENST ID: ENST00000560039
  CDS Start-End: 378-554
gcggtggtgacggcggtgccggaggttgtccttggcaggttttcctcggcgcttctccatggaggaggcggtgcgaacggcttcagccccgaatgctcgcatctcccactggacggcgacgaaggcggtggccgtgcgagcgcaggactgggcggcctgtgtgggggtgtgagccgcggtgcccaaggctgcgccggcgaggggaagccgcgcggccggccggccgactagggctctcccggctgtgatagaccttcagttacagagagagggagcagagtgggaccaggtctgagaatagtgaagcaactcattcctttcaggacattccctctgatgtcctattttcaaactgaactccttaagtaacaaacgaaatgagccaggggcgtggaaaatatgacttctatattggtctgggattggctatgagctccagcattttcattggaggaagtttcattttgaaaaaaaagggcctccttcgacttgccaggaaaggctctatgagagcaggtcaaggtggccatgcatatcttaaggaatggttgtgg

SEQ ID NO: 160009 - DNA, 3953 bp, Homo sapiens
  Payload ID: 11293
  Gene Symbol: NCMAP
  Gene Name: noncompact myelin associated protein
  Uniprot ID: Q5T1S8
  ENST ID: ENST00000374392
  CDS Start-End: 67-375
gaccctggctgggagcgcggcggtgccggcgggaggccgagcggggctcgacagagcaggatcgagatgaccacagccacccctctgggggataccaccttcttctcactgaacatgaccaccaggggagaagacttcctgtataagagttctggagccattgttgctgccgttgtggtggttgtcatcatcatcttcaccgtggttctgatcctgctgaagatgtacaacaggaaaatgaggacgaggcgggaactagagcccaagggccccaagccaaccgccccttctgccgtgggcccaaacagcaacggcagccaacacccagcaactgtgaccttcagtcctgttgacgtccaggtggagacgcgatgacctctaccctggcgctatctccaccactgtccaaagagcctctccagagtcaagacccagaggcacactctctggcagcttcacaatgagcttcttctggtcaggtcgacagagacatctttgacgcaatctctgatgcttccagcaatcctcaaccttgtctgccctgccctaccccaactgtgtccacatccctgccgccaccccaccaaaaagctgcagaacattcttttgtcatctgatgaggtagagctatgttgggaatccaccaatgtgggcttggctttcccccacactgtagttagacagatagacagatagcccaggagccaggtgtcagggagcactgctgagagtatcacaataggatctgtcacggggttcatatcagatgaagcgccgtatccactgcttcacagagcaaaacattcaatcccataaccaggcacaggggaactaacttggactaactaaccagaaaaccttgttaacgtataacttgttccagtactacatctctgcctgctggctcatgacaattgctcagcacattttcccctcttgaagaaaggttgcaagaagaactaaattatcctcaaaagatttctgcttcattagtaaagagtcagtgatggaatagggtgactctgcagaatagtggcctctagggtaggagcttgttgtgttgtccgtgggcctggaatgatcctggtggctgatcagggtccttctcccactctgggctgtatcaaccctgacggtcttggtctttggctcccctttatctggattctgagcacgctgactgtcctgttaatgccttccctccaaggaccagtatttggagattaattagattacaactctatctatgttacctttgtccttcctggtcaccttgcagattcaagacatgttcaaagcaacacattcacaacccatttctattctatagcaacctcgtctgtgactccttagcctggagaacaatctaccaagaagagaaagtatctggaattaagaagtcctaccatccaagccctacttcctggttgtgtggccttggaaaagtgactcaacctctttatattcagtttcctaaccatgaagtggaaatgataacacctgcctcattggggcactataacaagtgaaggacttaggaaaacatctggagtatagcgcctggcacccaggagatgcttaataaatgggaaccaggattctttttcttttcttttttcttttcttttttttttttttttgagacagagcctcaatctgtcacctgggctggagtgcagtggcacgctcacagctcgctgcagccttgaactcctgggctcaagggatgctccctcctcagcctccagagtagctgggactacaggtatgtgtcacctcaccaggctaatttttttattttttatttttgtagagatggggtctcgctgtgttgcccaggctggtcttgaacccctggcctcaagtgatccttctgctttggcctcccaaagtgctgggattacaggcatggactatggtgcccagcctaggagccaacattattattattataggcttttttttcaattgcaagatagacatttcttcacattttaatgattctgaaatcagaacatatcttgcaattgatgggttcattaatataattgtagttctttacttcctctcaaaaacttgtgatcttataattgatggcatcttggaaacaaggtaataaatctctattctgttaaagaaagtgacacactttgacatttaacctcaaattttaggagtctctccctcttggggtcagaaatcccttctgaggccaggtgtcgtggctcatgcctgtaatcccagcactttgggaggctgaggcaggcgggtcacttgaggtcaggagtttgagaccagcctggccaacatggcaaaaccctgtctctactaataatacaaaatttagctgggcatggtggcatgcacctgtaatcccactactagggaggctgtggcatgagaatcacttgaacctggaaggcagaggttgcagtgagccaagatcgtgccactgcactccagcctgggcaacagagtgaaactgcatctcaaaaaaagaaaaatccattatgaggggaaatcaagagtcagggaggtaagaggtcttacccagggtcacacagctcatgatatcccactgtaaaaatactctgtggaatagctctggagaaatactggcacattcttcctctctggtcattatttcttcctactgtgtttaaatatccaccaagtgtcaaggactttgtaagatgctttcacataaattatctcataggattaaattttcccaaaaacctggggaggaattattttttccaaaacagatgataatttctgattcaaagagaaagaaaacaaagtacttttccaaagtcacacagctagtaagtcacaaagacaagactcaaaaccaggtctcttgactccaaagtctgtcttttttgtgaagtcacactcctctgctggcccagctcaaagcagcacagattctttatgggctgaacaaggggagtacgggtttgtccatgtgtttgagtagagatcagggttctggcttccaggctgaaggtgagggaaaagccacttctaactcctttgggcatccatgctcacggccaaaagagccccttctcaacacatccaagtgctaaggattcctgcttcattcaagctactacttaggcccaaggagcaaggggtagaatggcatctaaccagagcaaagccatttctttgagggctcaagccataaacaaatatgctcccctaaacatattcggcttgaaaaagttgttttggggcagctgtggtggtgcacccctgtaatcccagccctttgggagtcagaggcagtcagtcacttgagcccaggagttcaagactagcctgggcaacacggcgaaacctcgtctctacaaaaaatacaaaaattaaccaagcgtggtagtgcacgcctgtattcccagctacttgggaggctgaggtaggaggatggcttgagcctgggaggcagaggttgcagtgagctgagatcgcgccactgcactccagccggggtgacagagccagaccctgtctcaaagcatatttcaaccctaaaactagactcttctgcccacagtgcagtcttctaagggttaccctctggtatatgttcttttgctaaatgaaggcttggagttggagggaagaaggggagatggagtggtgagggcgagtcaaataaaaggatttgagtgtctcgtttttgactaatgaagatgattcaataaacatcctgtaagaagggttcctatgtgcaagttgaggtgctactaagtacattaagacacaattgctgctctcaaggagttagcagctggtctcatgcagggatctcaccacgtggttatgtattttgtttctgatgaggtgcctttcttagcagatgctgccttatttggccactgaaacaatcaaagctaataaatgcttaaagaaaaatatctgacaataaaaaggtttaaatc

SEQ ID NO: 160010 - DNA, 2094 bp, Homo sapiens
  Payload ID: 11294
  Gene Symbol: NHEJ1
  Gene Name: nonhomologous end-joining factor 1
  Uniprot ID: Q9H9Q4
  ENST ID: ENST00000356853
  CDS Start-End: 135-1034
cctgtatcccaagaccctgcctcctcttgcggtggggggaaagcggcctcttactctaggcctttcggtttgcgcgagcgggcaggaaagcgtgcgtgcggctaagagagtgggcgctctcgcggccgctgacgatggaagaactggagcaaggcctgttgatgcagccatgggcgtggctacagcttgcagagaactccctcttggccaaggtttttatcaccaagcagggctatgccttgttggtttcagatcttcaacaggtgtggcatgaacaggtggacactagtgtggtcagccagcgagccaaggagctgaacaagcggctcactgctcctcctgcagctttcctctgtcatttggataatctccttcgcccattgttgaaggacgctgctcaccctagcgaagctaccttctcctgtgattgtgtggcagatgcactgattctacgggtgcgaagtgagctctctggcctccccttctattggaatttccactgcatgctagctagtccttccctggtctcccaacatttgattcgtcctctgatgggcatgagtctggcattacagtgccaagtgagggagctagcaacgttacttcatatgaaagacctagagatccaagactaccaggagagtggggctacgctgattcgagatcgattgaagacagaaccatttgaagaaaattccttcttggaacaatttatgatagagaaactgccagaggcatgcagcattggtgatggaaagccctttgtcatgaatctgcaggatctgtatatggcagtcaccacacaagaggtccaagtgggacagaagcatcaaggcgctggagatcctcatacctcaaacagtgcttccctgcaaggaatcgatagccaatgtgtaaaccagccagaacaactggtctcctcagccccaaccctctcagcacctgagaaagagtccacgggtacttcaggccctctgcagagacctcagctgtcaaaggtcaagaggaagaagccaaggggtctcttcagttaatctgttgtggcctcagctgctgaggatggacttggagaacagcttccaagcttcaccttgaaagaagcttacatggcagcaatatttctaaaatagtgatacagtcagaggcctcctgtaagggcgagagaactgaagttgatgttgacaggcccacagggaattggccttccctgttcaagtggaagccagtctctgagaatcccgtgctctcctctcttttggtggaggttctgtaggttcaggtttctaccatggactttaggtatatagggcaagtcagcaagaaagcaccacacactcaggaagccttgtctacctttccctagcgtctctagccagccagccccagatactcctcagagacccacttctctcttttgcatggaataaaaagcactcacagtccctgcttttgggattacttatgctgtggaactcataacccaattcacttccttcactgggtcccaccccattgttgtctctggatgaagtctagccatcagtctggtccttcagattcttcgtaaacttttctgcagttgccagagctaagtctccatttggaaactttgatctcaagaactctcttgatggtgggcacaagacagataggtgattgctgctttcctttgccaaacttggatgcatttttctctttgtttccaaagtataggcaacaggttaaactaccacgtggggtagtttatcaatcctcccgcctcatccttctgcataactgggactaaaggcacacaccaccacacctagctaatttttgtatttttttgtgtgtggagacaaggctttgccatgttgcccaggctggtcttgaactcctggactctagtgatctgcccacctcaacctcccaaagtgctgggattacaggcatgagctaccacgcctatccaatttctggtttatttactttcgatggttaaatgcctccttattcaaatatcctgtatatatactggcgtttctgtcctgatgtcaagtctcgagagaagatgatcaaacaataataaaataattataataagaacaacaataa

SEQ ID NO: 160011 - DNA, 1954 bp, Homo sapiens
  Payload ID: 11294
  Gene Symbol: NHEJ1
  Gene Name: nonhomologous end-joining factor 1
  Uniprot ID: Q9H9Q4
  ENST ID: ENST00000409720
  CDS Start-End: 1-951
atggaagaactggagcaaggcctgttgatgcagccatgggcgtggctacagcttgcagagaactccctcttggccaaggtttttatcaccaagcagggctatgccttgttggtttcagatcttcaacaggtgtggcatgaacaggtggacactagtgtggtcagccagcgagccaaggagctgaacaagcggctcactgctcctcctgcagctttcctctgtcatttggataatctccttcgcccattgttgaaggacgctgctcaccctagcgaagctaccttctcctgtgattgtgtggcagatgcactgattctacgggtgcgaagtgagctctctggcctccccttctattggaatttccactgcatgctagctagtccttccctggtctcccaacatttgattcgtcctctgatgggcatgagtctggcattacagtgccaagtgagggagctagcaacgttacttcatatgaaagacctagagatccaagactaccaggagagtggggctacgctgattcgagatcgattgaagacagaaccatttgaagaaaattccttcttggaacaatttatgatagagaaactgccagaggcatgcagcattggtgatggaaagccctttgtcatgaatctgcaggatctgtatatggcagtcaccacacaagaggtccaagtgggacagaagcatcaaggcgctggagatcctcatacctcaaacagtgcttccctgcaaggaatcgatagccaatgtgtaaaccagccagaacaactggtctcctcagccccaaccctctcagcacctgagaaagagtccacggccctctgcagagacctcagctgtcaaaggtcaagaggaagaagccaaggggtctcttcagttaatctgttgtggcctcagctgctgaggatggacttggagaacagcttccaagcttcaccttgaaagaagcttacatggcagcaatatttctaaaatagtgatacagtcagaggcctcctgtaagggcgagagaactgaagttgatgttgacaggcccacagggaattggccttccctgttcaagtggaagccagtctctgagaatcccgtgctctcctctcttttggtggaggttctgtaggttcaggtttctaccatggactttaggtatatagggcaagtcagcaagaaagcaccacacactcaggaagccttgtctacctttccctagcgtctctagccagccagccccagatactcctcagagacccacttctctcttttgcatggaataaaaagcactcacagtccctgcttttgggattacttatgctgtggaactcataacccaattcacttccttcactgggtcccaccccattgttgtctctggatgaagtctagccatcagtctggtccttcagattcttcgtaaacttttctgcagttgccagagctaagtctccatttggaaactttgatctcaagaactctcttgatggtgggcacaagacagataggtgattgctgctttcctttgccaaacttggatgcatttttctctttgtttccaaagtataggcaacaggttaaactaccacgtggggtagtttatcaatcctcccgcctcatccttctgcataactgggactaaaggcacacaccaccacacctagctaatttttgtatttttttgtgtgtggagacaaggctttgccatgttgcccaggctggtcttgaactcctggactctagtgatctgcccacctcaacctcccaaagtgctgggattacaggcatgagctaccacgcctatccaatttctggtttatttactttcgatggttaaatgcctccttattcaaatatcctgtatatatactggcgtttctgtcctgatgtcaagtctcgagagaagatgatcaaacaataataaaataattataataagaacaacaataataaa

SEQ ID NO: 160012 - DNA, 753 bp, Homo sapiens
  Payload ID: 11294
  Gene Symbol: NHEJ1
  Gene Name: nonhomologous end-joining factor 1
  ENST ID: ENST00000426304
  CDS Start-End: 1-675
cgcccattgttgaaggacgctgctcaccctagcgaagctaccttctcctgtgattgtgtggcagatgcactgattctacgggtgcgaagtgagctctctggcctccccttctattggaatttccactgcatgctagctagtccttccctggtctcccaacatttgattcgtcctctgatgggcatgagtctggcattacagtgccaagtgagggagctagcaacgttacttcatatgaaagacctagagatccaagactaccaggagagtggggctacgctgattcgagatcgattgaagacagaaccatttgaagaaaattccttcttggaacaatttatgatagagaaactgccagaggcatgcagcattggtgatggaaagccctttgtcatgaatctgcaggatctgtatatggcagtcaccacacaagaggtccaagtgggacagaagcatcaaggcgctggtgagccctccagaggagatcctcatacctcaaacagtgcttccctgcaaggaatcgatagccaatgtgtaaaccagccagaacaactggtctcctcagccccaaccctctcagcacctgagaaagagtccacgggtacttcaggccctctgcagagacctcagctgtcaaaggtcaagaggaagaagccaaggggtctcttcagttaatctgttgtggcctcagctgctgaggatggacttggagaacagcttccaagcttcaccttgaaagaagcttacatggca

SEQ ID NO: 160013 - DNA, 734 bp, Homo sapiens
  Payload ID: 11294
  Gene Symbol: NHEJ1
  Gene Name: nonhomologous end-joining factor 1
  ENST ID: ENST00000457600
  CDS Start-End: 47-734
agtccgctggctgctgcccggcgtggatggtagggctcgagtgaagatggaagaactggagcaaggcctgttgatgcagccatgggcgtggctacagcttgcagagaactccctcttggccaaggtttttatcaccaagcagggctatgccttgttggtttcagatcttcaacaggtgtggcatgaacaggtggacactagtgtggtcagccagcgagccaaggagctgaacaagcggctcactgctcctcctgcagctttcctctgtcatttggataatctccttcgcccattgttgaaggacgctgctcaccctagcgaagctaccttctcctgtgattgtgtggcagatgcactgattctacgggtgcgaagtgagctctctggcctccccttctattggaatttccactgcatgctagctagtccttccctggtctcccaacatttgattcgtcctctgatgggcatgagtctggcattacagtgccaagtgagggagctagcaacgttacttcatatgaaagacctagagatccaagactaccaggagagtggggctacgctgattcgagatcgattgaagacagaaccatttgaagaaaattccttcttggaacaatttatgatagagaaactgccagaggcatgcagcattggtgatggaaagccctttgtcatgaatctgcaggatctgtatatggcagtcaccacacaagaggtccaagtgggac

SEQ ID NO: 160014 - DNA, 547 bp, Homo sapiens
  Payload ID: 11294
  Gene Symbol: NHEJ1
  Gene Name: nonhomologous end-joining factor 1
  ENST ID: ENST00000450447
  CDS Start-End: 147-299
ataggccccgcccctgtatcccaagaccctgcctcctcttgcggtggggggaaagcggcctcttactctaggcctttcggtttgcgcgagcgggcaggaaagcgtgcgtgcggctaagagagtgggcgctctcgcggccgctgacgatggaagaactggagcaaggcctgttgatgcagccatgggcgtggctacagcttgcagagaactccctcttggccaaggtttttatcaccaagcagggctatgccttgttggtttcagatcttcaacaggtgtggcatgaacagatgcactgattctacgggtgcgaagtgagctctctggcctccccttctattggaatttccactgcatgctagctagtccttccctggtctcccaacatttgattcgtcctctgatgggcatgagtctggcattacagtgccaagtgagggagctagcaacgttacttcatatgaaagacctagagatccaagactaccaggagagtggggctacgctgattcgagatcgattgaagacagaaccatttgaagaaaat

SEQ ID NO: 160015 - DNA, 2113 bp, Homo sapiens
  Payload ID: 11294
  Gene Symbol: NHEJ1
  Gene Name: nonhomologous end-joining factor 1
  ENST ID: ENST00000418099
  CDS Start-End: 80-778
ctaggcctttcggtttgcgcgagcgggcaggaaagcgtgcgtgcggctaagagagtgggcgctctcgcggccgctgacgatggaagaactggagcaaggcctgttgatgcagccatgggcgtggctacagcttgcagagaactccctcttggccaaggtttttatcaccaagcagggctatgccttgttggtttcagatcttcaacaggtgtggcatgaacaggtggacactagtgtggtcagccagcgagccaaggagctgaacaagcggctcactgctcctcctgcagctttcctctgtcatttggataatctccttcgcccattgttgaaggacgctgctcaccctagcgaagctaccttctcctgtgattgtgtggcagatgcactgattctacgggtgcgaagtgagctctctggcctccccttctattggaatttccactgcatgctagctagtccttccctggtctcccaacatttgattcgtcctctgatgggcatgagtctggcattacagtgccaagtgagggagctagcaacgttacttcatatgaaagacctagagatccaagactaccaggagagtggggctacgctgattcgagatcgattgaagacagaaccatttgaagaaaattccttcttggaacaatttatgatagagttaaaagatatacccatcaaaactggagacccggcatattggcctagaactctacatgctgcatcggtctctttttatcatgaaactgccagaggcatgcagcattggtgatggaaagccctttgtcatgaatctgcaggatctgtatatggcagtcaccacacaagaggtccaagtgggacagaagcatcaaggcgctggagatcctcatacctcaaacagtgcttccctgcaaggaatcgatagccaatgtgtaaaccagccagaacaactggtctcctcagccccaaccctctcagcacctgagaaagagtccacgggtacttcaggccctctgcagagacctcagctgtcaaaggtcaagaggaagaagccaaggggtctcttcagttaatctgttgtggcctcagctgctgaggatggacttggagaacagcttccaagcttcaccttgaaagaagcttacatggcagcaatatttctaaaatagtgatacagtcagaggcctcctgtaagggcgagagaactgaagttgatgttgacaggcccacagggaattggccttccctgttcaagtggaagccagtctctgagaatcccgtgctctcctctcttttggtggaggttctgtaggttcaggtttctaccatggactttaggtatatagggcaagtcagcaagaaagcaccacacactcaggaagccttgtctacctttccctagcgtctctagccagccagccccagatactcctcagagacccacttctctcttttgcatggaataaaaagcactcacagtccctgcttttgggattacttatgctgtggaactcataacccaattcacttccttcactgggtcccaccccattgttgtctctggatgaagtctagccatcagtctggtccttcagattcttcgtaaacttttctgcagttgccagagctaagtctccatttggaaactttgatctcaagaactctcttgatggtgggcacaagacagataggtgattgctgctttcctttgccaaacttggatgcatttttctctttgtttccaaagtataggcaacaggttaaactaccacgtggggtagtttatcaatcctcccgcctcatccttctgcataactgggactaaaggcacacaccaccacacctagctaatttttgtatttttttgtgtgtggagacaaggctttgccatgttgcccaggctggtcttgaactcctggactctagtgatctgcccacctcaacctcccaaagtgctgggattacaggcatgagctaccacgcctatccaatttctggtttatttactttcgatggttaaatgcctccttattcaaatatcctgtatatatactggcgtttctgtcctgatgtcaagtctcgagagaagatgatcaaacaataataaaataattataataagaac

SEQ ID NO: 160016 - DNA, 2713 bp, Homo sapiens
  Payload ID: 11295
  Gene Symbol: NONO
  Gene Name: non-POU domain containing, octamer-binding
  Uniprot ID: Q15233
  ENST ID: ENST00000276079
  CDS Start-End: 206-1621
aatcgagaacgccattttgtaccccttggcaggcaccgagctccgtcgtctcgtttccggcggtcgcgcgctcttttctcgggacgggagaggccgtgtagcgtcgccgttactccgaggagataccagtcggtagaggagaagtcgaggttagagggaactgggaggcactttgctgtctgcaatcgaagttgagggtgcaaaaatgcagagtaataaaacttttaacttggagaagcaaaaccatactccaagaaagcatcatcaacatcaccaccagcagcagcaccaccagcagcaacagcagcagccgccaccaccgccaatacctgcaaatgggcaacaggccagcagccaaaatgaaggcttgactattgacctgaagaattttagaaaaccaggagagaagaccttcacccaacgaagccgtctttttgtgggaaatcttcctcccgacatcactgaggaagaaatgaggaaactatttgagaaatatggaaaggcaggcgaagtcttcattcataaggataaaggatttggctttatccgcttggaaacccgaaccctagcggagattgccaaagtggagctggacaatatgccactccgtggaaagcagctgcgtgtgcgctttgcctgccatagtgcatcccttacagttcgaaaccttcctcagtatgtgtccaacgaactgctggaagaagccttttctgtgtttggccaggtagagagggctgtagtcattgtggatgatcgaggaaggccctcaggaaaaggcattgttgagttctcagggaagccagctgctcggaaagctctggacagatgcagtgaaggctccttcctgctaaccacatttcctcgtcctgtgactgtggagcccatggaccagttagatgatgaagagggacttccagagaagctggttataaaaaaccagcaatttcacaaggaacgagagcagccacccagatttgcacagcctggctcctttgagtatgaatatgccatgcgctggaaggcactcattgagatggagaagcagcagcaggaccaagtggaccgcaacatcaaggaggctcgtgagaagctggagatggagatggaagctgcacgccatgagcaccaggtcatgctaatgagacaggatttgatgaggcgccaagaagaacttcggaggatggaagagctgcacaaccaagaggtgcaaaaacgaaagcaactggagctcaggcaggaggaagagcgcaggcgccgtgaagaagagatgcggcggcagcaagaagaaatgatgcggcgacagcaggaaggattcaagggaaccttccctgatgcgagagagcaggagattcggatgggtcagatggctatgggaggtgctatgggcataaacaacagaggtgccatgccccctgctcctgtgccagctggtaccccagctcctccaggacctgccactatgatgccggatggaactttgggattgaccccaccaacaactgaacgctttggtcaggctgctacaatggaaggaattggggcaattggtggaactcctcctgcattcaaccgtgcagctcctggagctgaatttgccccaaacaaacgtcgccgatactaataagttgcagtgtctagtttctcaaaacccttaaaagaaggaccctttttggactagccagaattctaccctggaaaagtgttagggattccttccaatagttagatctaccctgcctgtactactctagggagtatgctggaggcagagggcaagggaggggtggtattaaacaagtcaattctgtgtggtatattgtttaatcagttctgtgtggtgcattcctgaagtctctaatgtgactgttgagggcctggggaaaccatggcaaagtggatccagttagagcccattaatcttgatcattccggttttttttttttttgtccatcttgtttcatttgcttgccccgcccccgagacggagtcttactctgtcgcccaggctggagtgtagtggcatgatctcggctcactgcaatctctgcctcccgggttcaagcttgtccaggttgatcttgaactcctgacctcgtgatctacccacctcggcctcccaaaatgctgggattacaggggtgagccaccgtgcccaacctcacttgcttcttatccttacactcccccagccccagagaaactgccacatacaccacaaaaaccaaacatcccccaatgaccttagccccattgctccattcactcccaggtgagaattcaggcaaacgtccacaaaggtcacaggcagcgtacatacggttctgttataccccatatattaccccttcatgtcctaaagaagacattttctcttagagattttcattttagtgtatctttaaaaaaaaatcttgtgttaacttgcctccatctttttcttgggtgaggacacccaggaatgacccttttgtgtctatgatgttgctgttcacagcttttcttgataggcctagtacaatcttgggaacagggttactgtatactgaaggtctgacagtagctcttagactcgcctatcttaggtagtcatgctgtgcattttttttttcattggtgtactgtgtttgatttgtctcatatatttggagtttttctgaaaaatggagcagtaatgcagcatcaacctattaaaatacattttaagccttttaa

SEQ ID NO: 160017 - DNA, 2606 bp, Homo sapiens
  Payload ID: 11295
  Gene Symbol: NONO
  Gene Name: non-POU domain containing, octamer-binding
  Uniprot ID: Q15233
  ENST ID: ENST00000373841
  CDS Start-End: 99-1514
tcgtttccggcggtcgcgcgctcttttctcgggacgggagaggccgtgtagcgtcgccgttactccgaggagataccagtcggtagaggggtgcaaaaatgcagagtaataaaacttttaacttggagaagcaaaaccatactccaagaaagcatcatcaacatcaccaccagcagcagcaccaccagcagcaacagcagcagccgccaccaccgccaatacctgcaaatgggcaacaggccagcagccaaaatgaaggcttgactattgacctgaagaattttagaaaaccaggagagaagaccttcacccaacgaagccgtctttttgtgggaaatcttcctcccgacatcactgaggaagaaatgaggaaactatttgagaaatatggaaaggcaggcgaagtcttcattcataaggataaaggatttggctttatccgcttggaaacccgaaccctagcggagattgccaaagtggagctggacaatatgccactccgtggaaagcagctgcgtgtgcgctttgcctgccatagtgcatcccttacagttcgaaaccttcctcagtatgtgtccaacgaactgctggaagaagccttttctgtgtttggccaggtagagagggctgtagtcattgtggatgatcgaggaaggccctcaggaaaaggcattgttgagttctcagggaagccagctgctcggaaagctctggacagatgcagtgaaggctccttcctgctaaccacatttcctcgtcctgtgactgtggagcccatggaccagttagatgatgaagagggacttccagagaagctggttataaaaaaccagcaatttcacaaggaacgagagcagccacccagatttgcacagcctggctcctttgagtatgaatatgccatgcgctggaaggcactcattgagatggagaagcagcagcaggaccaagtggaccgcaacatcaaggaggctcgtgagaagctggagatggagatggaagctgcacgccatgagcaccaggtcatgctaatgagacaggatttgatgaggcgccaagaagaacttcggaggatggaagagctgcacaaccaagaggtgcaaaaacgaaagcaactggagctcaggcaggaggaagagcgcaggcgccgtgaagaagagatgcggcggcagcaagaagaaatgatgcggcgacagcaggaaggattcaagggaaccttccctgatgcgagagagcaggagattcggatgggtcagatggctatgggaggtgctatgggcataaacaacagaggtgccatgccccctgctcctgtgccagctggtaccccagctcctccaggacctgccactatgatgccggatggaactttgggattgaccccaccaacaactgaacgctttggtcaggctgctacaatggaaggaattggggcaattggtggaactcctcctgcattcaaccgtgcagctcctggagctgaatttgccccaaacaaacgtcgccgatactaataagttgcagtgtctagtttctcaaaacccttaaaagaaggaccctttttggactagccagaattctaccctggaaaagtgttagggattccttccaatagttagatctaccctgcctgtactactctagggagtatgctggaggcagagggcaagggaggggtggtattaaacaagtcaattctgtgtggtatattgtttaatcagttctgtgtggtgcattcctgaagtctctaatgtgactgttgagggcctggggaaaccatggcaaagtggatccagttagagcccattaatcttgatcattccggttttttttttttttgtccatcttgtttcatttgcttgccccgcccccgagacggagtcttactctgtcgcccaggctggagtgtagtggcatgatctcggctcactgcaatctctgcctcccgggttcaagcttgtccaggttgatcttgaactcctgacctcgtgatctacccacctcggcctcccaaaatgctgggattacaggggtgagccaccgtgcccaacctcacttgcttcttatccttacactcccccagccccagagaaactgccacatacaccacaaaaaccaaacatcccccaatgaccttagccccattgctccattcactcccaggtgagaattcaggcaaacgtccacaaaggtcacaggcagcgtacatacggttctgttataccccatatattaccccttcatgtcctaaagaagacattttctcttagagattttcattttagtgtatctttaaaaaaaaatcttgtgttaacttgcctccatctttttcttgggtgaggacacccaggaatgacccttttgtgtctatgatgttgctgttcacagcttttcttgataggcctagtacaatcttgggaacagggttactgtatactgaaggtctgacagtagctcttagactcgcctatcttaggtagtcatgctgtgcattttttttttcattggtgtactgtgtttgatttgtctcatatatttggagtttttctgaaaaatggagcagtaatgcagcatcaacctattaaaatacattttaagccttttaa

SEQ ID NO: 160018 - DNA, 1921 bp, Homo sapiens
  Payload ID: 11295
  Gene Symbol: NONO
  Gene Name: non-POU domain containing, octamer-binding
  Uniprot ID: Q15233
  ENST ID: ENST00000373856
  CDS Start-End: 313-1728
aacgccattttgtaccccttggcaggcaccgagctccgtcgtctcgtttccggcggtcgcgcgctcttttctcgggacgggagaggccgtgtagcgtcgccgttactccgaggagataccagtcggtagaggagaagtcgaggttagagggaactgggaggcactttgctgtctgcaatcgaagttgagaggcccagtatttaggcgacagtgaatttattactctgaagagggttctgcacatatttccaaattatattggtggtcatcagaagtaggtgataggaagaaatacttctcaagggtgcaaaaatgcagagtaataaaacttttaacttggagaagcaaaaccatactccaagaaagcatcatcaacatcaccaccagcagcagcaccaccagcagcaacagcagcagccgccaccaccgccaatacctgcaaatgggcaacaggccagcagccaaaatgaaggcttgactattgacctgaagaattttagaaaaccaggagagaagaccttcacccaacgaagccgtctttttgtgggaaatcttcctcccgacatcactgaggaagaaatgaggaaactatttgagaaatatggaaaggcaggcgaagtcttcattcataaggataaaggatttggctttatccgcttggaaacccgaaccctagcggagattgccaaagtggagctggacaatatgccactccgtggaaagcagctgcgtgtgcgctttgcctgccatagtgcatcccttacagttcgaaaccttcctcagtatgtgtccaacgaactgctggaagaagccttttctgtgtttggccaggtagagagggctgtagtcattgtggatgatcgaggaaggccctcaggaaaaggcattgttgagttctcagggaagccagctgctcggaaagctctggacagatgcagtgaaggctccttcctgctaaccacatttcctcgtcctgtgactgtggagcccatggaccagttagatgatgaagagggacttccagagaagctggttataaaaaaccagcaatttcacaaggaacgagagcagccacccagatttgcacagcctggctcctttgagtatgaatatgccatgcgctggaaggcactcattgagatggagaagcagcagcaggaccaagtggaccgcaacatcaaggaggctcgtgagaagctggagatggagatggaagctgcacgccatgagcaccaggtcatgctaatgagacaggatttgatgaggcgccaagaagaacttcggaggatggaagagctgcacaaccaagaggtgcaaaaacgaaagcaactggagctcaggcaggaggaagagcgcaggcgccgtgaagaagagatgcggcggcagcaagaagaaatgatgcggcgacagcaggaaggattcaagggaaccttccctgatgcgagagagcaggagattcggatgggtcagatggctatgggaggtgctatgggcataaacaacagaggtgccatgccccctgctcctgtgccagctggtaccccagctcctccaggacctgccactatgatgccggatggaactttgggattgaccccaccaacaactgaacgctttggtcaggctgctacaatggaaggaattggggcaattggtggaactcctcctgcattcaaccgtgcagctcctggagctgaatttgccccaaacaaacgtcgccgatactaataagttgcagtgtctagtttctcaaaacccttaaaagaaggaccctttttggactagccagaattctaccctggaaaagtgttagggattccttccaatagttagatctaccctgcctgtactactctagggagtatgctggaggcagagggcaagggaggggtggtattaaacaagtcaattctgtgtggta

SEQ ID NO: 160019 - DNA, 726 bp, Homo sapiens
  Payload ID: 11295
  Gene Symbol: NONO
  Gene Name: non-POU domain containing, octamer-binding
  ENST ID: ENST00000454976
  CDS Start-End: 105-726
gcatatccagagcccgccgctttcgtagtcagatttctagaagtcgaggttagagggaactgggaggcactttgctgtctgcaatcgaagttgagggtgcaaaaatgcagagtaataaaacttttaacttggagaagcaaaaccatactccaagaaagcatcatcaacatcaccaccagcagcagcaccaccagcagcaacagcagcagccgccaccaccgccaatacctgcaaatgggcaacaggccagcagccaaaatgaaggcttgactattgacctgaagaattttagaaaaccaggagagaagaccttcacccaacgaagccgtctttttgtgggaaatcttcctcccgacatcactgaggaagaaatgaggaaactatttgagaaatatggaaaggcaggcgaagtcttcattcataaggataaaggatttggctttatccgcttggaaacccgaaccctagcggagattgccaaagtggagctggacaatatgccactccgtggaaagcagctgcgtgtgcgctttgcctgccatagtgcatcccttacagttcgaaaccttcctcagtatgtgtccaacgaactgctggaagaagccttttctgtgtttggccaggtagagagggctgtagtcattgtggatgatcgaggaaggccctcaggaaaaggcattgttgagttctcagggaagccagctgctcggaaagctctggacagat

SEQ ID NO: 160020 - DNA, 703 bp, Homo sapiens
  Payload ID: 11295
  Gene Symbol: NONO
  Gene Name: non-POU domain containing, octamer-binding
  ENST ID: ENST00000418921
  CDS Start-End: 1-703
ctcccgacatcactgaggaagaaatgaggaaactatttgagaaatatggaaaggcaggcgaagtcttcattcataaggataaaggatttggctttatccgcttggtagagagggctgtagtcattgtggatgatcgaggaaggccctcaggaaaaggcattgttgagttctcagggaagccagctgctcggaaagctctggacagatgcagtgaaggctccttcctgctaaccacatttcctcgtcctgtgactgtggagcccatggaccagttagatgatgaagagggacttccagagaagctggttataaaaaaccagcaatttcacaaggaacgagagcagccacccagatttgcacagcctggctcctttgagtatgaatatgccatgcgctggaaggcactcattgagatggagaagcagcagcaggaccaagtggaccgcaacatcaaggaggctcgtgagaagctggagatggagatggaagctgcacgccatgagcaccaggtcatgctaatgagacaggatttgatgaggcgccaagaagaacttcggaggatggaagagctgcacaaccaagaggtgcaaaaacgaaagcaactggagctcaggcaggaggaagagcgcaggcgccgtgaagaagagatgcggcggcagcaagaagaaatgatgcggcgacagcaggaaggattcaagggaac

SEQ ID NO: 160021 - DNA, 622 bp, Homo sapiens
  Payload ID: 11295
  Gene Symbol: NONO
  Gene Name: non-POU domain containing, octamer-binding
  ENST ID: ENST00000420903
  CDS Start-End: 250-622
ctcttttctcgggacgggagaggccgtgtagcgtcgccgttactccgaggagataccagtcggtagaggagaagtcgaggttagagggaactgggaggcactttgctgtctgcaatcgaagttgagaggcccagtatttaggcgacagtgaatttattactctgaagagggttctgcacatatttccaaattatattggtggtcatcagaagtaggtgataggaagaaatacttctcaagggtgcaaaaatgcagagtaataaaacttttaacttggagaagcaaaaccatactccaagaaagcatcatcaacatcaccaccagcagcagcaccaccagcagcaacagcagcagccgccaccaccgccaatacctgcaaatgggcaacaggccagcagccaaaatgaaggcttgactattgacctgaagaattttagaaaaccaggagagaagaccttcacccaacgaagccgtctttttgtgggaaatcttcctcccgacatcactgaggaagaaatgaggaaactatttgagaaatatggaaaggaaacccgaaccctagcggagattgccaaagtggagctggacaatatgccactccgtggaaagcagctgcgtgtgc

SEQ ID NO: 160022 - DNA, 855 bp, Homo sapiens
  Payload ID: 11295
  Gene Symbol: NONO
  Gene Name: non-POU domain containing, octamer-binding
  ENST ID: ENST00000413858
  CDS Start-End: 113-855
ccgtgtagcgtcgccgttactccgaggagataccagtcggtagaggagaagtcgaggttagagggaactgggaggcactttgctgtctgcaatcgaagttgagggtgcaaaaatgcagagtaataaaacttttaacttggagaagcaaaaccatactccaagaaagcatcatcaacatcaccaccagcagcagcaccaccagcagcaacagcagcagccgccaccaccgccaatacctgcaaatgggcaacaggccagcagccaaaatgaaggcttgactattgacctgaagaattttagaaaaccaggagagaagaccttcacccaacgaagccgtctttttgtgggaaatcttcctcccgacatcactgaggaagaaatgaggaaactatttgagaaatatggaaaggcaggcgaagtcttcattcataaggataaaggatttggctttatccgcttggaaacccgaaccctagcggagattgccaaagtggagctggacaatatgccactccgtggaaagcagctgcgtgtgcgctttgcctgccatagtgcatcccttacagttcgaaaccttcctcaggaacgagagcagccacccagatttgcacagcctggctcctttgagtatgaatatgccatgcgctggaaggcactcattgagatggagaagcagcagcaggaccaagtggaccgcaacatcaaggaggctcgtgagaagctggagatggagatggaagctgcacgccatgagcaccaggtcatgctaatgagacaggatttgatgaggcgccaagaagaacttcggaggatggaagagctgcacaaccaagaggtgcaaaaacgaaagcaact

SEQ ID NO: 160023 - DNA, 491 bp, Homo sapiens
  Payload ID: 11295
  Gene Symbol: NONO
  Gene Name: non-POU domain containing, octamer-binding
  ENST ID: ENST00000450092
  CDS Start-End: 295-491
gtgggatttcttggaacaatcagcgaaggaagaggctagggcgaagctaggtttggagggtggatggcgcttccgaggccccttgaggccttgtctctgccgccacactgccttctcagcccacccgcggggggccacctttctcaactcgcttcgcttcgggctttccccattttcgttcctgccctgtttctttgtgcaactcatctccgaatcttacccgtgtcaagaagtcgaggttagagggaactgggaggcactttgctgtctgcaatcgaagttgagggtgcaaaaatgcagagtaataaaacttttaacttggagaagcaaaaccatactccaagaaagcatcatcaacatcaccaccagcagcagcaccaccagcagcaacagcagcagccgccaccaccgccaatacctgcaaatgggcaacaggccagcagccaaaatgaaggcttgactattgacctgaagaattttagaaaaccagg

SEQ ID NO: 160024 - DNA, 2882 bp, Homo sapiens
  Payload ID: 11295
  Gene Symbol: NONO
  Gene Name: non-POU domain containing, octamer-binding
  Uniprot ID: Q15233
  ENST ID: ENST00000535149
  CDS Start-End: 644-1792
caggcgcagtgcaggactgctccgagcacgcctacgcgcgcattttctccccttcctctccctctttccactttcctctccctttttctcctctcctttccccctcccaccacttggtctttcagtctttcagtcagttcgtttaggtctctccttccgacccccacccccagctcctctccctttccttttccccctccccctttcctttcccgtctcacgcgccaggccgcttgcacatgcgcattaggtacaaagcctcgctctttgtccccatctgtcgttcacacgaactcaagcctttggcattcggcagccaatagaatctaagaaatggcggaaaaatgattccgcctcgggagctaaaccttgattggcagtttagctaaccaatcgagaacgccattttgtaccccttggcaggcaccgagctccgtcgtctcgtttccggcggtcgcgcgctcttttctcgggacgggagaggccgtgtagcgtcgccgttactccgaggagataccagtcggtagaggatgaaggcttgactattgacctgaagaattttagaaaaccaggagagaagaccttcacccaacgaagccgtctttttgtgggaaatcttcctcccgacatcactgaggaagaaatgaggaaactatttgagaaatatggaaaggcaggcgaagtcttcattcataaggataaaggatttggctttatccgcttggaaacccgaaccctagcggagattgccaaagtggagctggacaatatgccactccgtggaaagcagctgcgtgtgcgctttgcctgccatagtgcatcccttacagttcgaaaccttcctcagtatgtgtccaacgaactgctggaagaagccttttctgtgtttggccaggtagagagggctgtagtcattgtggatgatcgaggaaggccctcaggaaaaggcattgttgagttctcagggaagccagctgctcggaaagctctggacagatgcagtgaaggctccttcctgctaaccacatttcctcgtcctgtgactgtggagcccatggaccagttagatgatgaagagggacttccagagaagctggttataaaaaaccagcaatttcacaaggaacgagagcagccacccagatttgcacagcctggctcctttgagtatgaatatgccatgcgctggaaggcactcattgagatggagaagcagcagcaggaccaagtggaccgcaacatcaaggaggctcgtgagaagctggagatggagatggaagctgcacgccatgagcaccaggtcatgctaatgagacaggatttgatgaggcgccaagaagaacttcggaggatggaagagctgcacaaccaagaggtgcaaaaacgaaagcaactggagctcaggcaggaggaagagcgcaggcgccgtgaagaagagatgcggcggcagcaagaagaaatgatgcggcgacagcaggaaggattcaagggaaccttccctgatgcgagagagcaggagattcggatgggtcagatggctatgggaggtgctatgggcataaacaacagaggtgccatgccccctgctcctgtgccagctggtaccccagctcctccaggacctgccactatgatgccggatggaactttgggattgaccccaccaacaactgaacgctttggtcaggctgctacaatggaaggaattggggcaattggtggaactcctcctgcattcaaccgtgcagctcctggagctgaatttgccccaaacaaacgtcgccgatactaataagttgcagtgtctagtttctcaaaacccttaaaagaaggaccctttttggactagccagaattctaccctggaaaagtgttagggattccttccaatagttagatctaccctgcctgtactactctagggagtatgctggaggcagagggcaagggaggggtggtattaaacaagtcaattctgtgtggtatattgtttaatcagttctgtgtggtgcattcctgaagtctctaatgtgactgttgagggcctggggaaaccatggcaaagtggatccagttagagcccattaatcttgatcattccggttttttttttttttgtccatcttgtttcatttgcttgccccgcccccgagacggagtcttactctgtcgcccaggctggagtgtagtggcatgatctcggctcactgcaatctctgcctcccgggttcaagcttgtccaggttgatcttgaactcctgacctcgtgatctacccacctcggcctcccaaaatgctgggattacaggggtgagccaccgtgcccaacctcacttgcttcttatccttacactcccccagccccagagaaactgccacatacaccacaaaaaccaaacatcccccaatgaccttagccccattgctccattcactcccaggtgagaattcaggcaaacgtccacaaaggtcacaggcagcgtacatacggttctgttataccccatatattaccccttcatgtcctaaagaagacattttctcttagagattttcattttagtgtatctttaaaaaaaaatcttgtgttaacttgcctccatctttttcttgggtgaggacacccaggaatgacccttttgtgtctatgatgttgctgttcacagcttttcttgataggcctagtacaatcttgggaacagggttactgtatactgaaggtctgacagtagctcttagactcgcctatcttaggtagtcatgctgtgcattttttttttcattggtgtactgtgtttgatttgtctcatatatttggagtttttctgaaaaatggagcagtaatgcagcatcaacctattaaaatacattttaagcctttt

SEQ ID NO: 160025 - DNA, 5548 bp, Homo sapiens
  Payload ID: 11296
  Gene Symbol: NCAPD2
  Gene Name: non-SMC condensin I complex, subunit D2
  Uniprot ID: Q15021
  ENST ID: ENST00000315579
  CDS Start-End: 800-5005
aagttttggagcgccggacaagctgaggtccgcgactcgtcgctaagattccccaaaactgagatttcaagaaaattcaccctttccgctttctttggcgtccttcaaccgtgaaggaaatgaaggttgagaacctggaacccgcttccaatgaccaagccctttctctgtgcctcacaacagtcttccgctgtagctgtttttattacccctattttactactggggaggagatttgaggtcctgaaagtgaagtgacttgctggacgtcacttagcagaggagatggcgaaacctggattagaggcgatgccttctaactcccagcgtggacttgcctcctttcctgggggtgactgaatgcccagccagggacgcgacgtctctggccagcagaaatacggcctcctccccgccgactgggcaaagggggaccttgcggccaaggagggattcgcaggcgggccgggggtgggagcgggggccggagccggagccttggcccgcccccgggcggcgctgtgattggccggccgctccggcgggcgtcgcgattggccgtcctgcagccgttgagatttgaactcggtatttgtggctttgcccgcgcgttgccagactcagaggcggccctttgcctctgcctgccggggattggccggattctccgccgacttgaaaactgccttgctaattggtgcgtgttgtgcacgcgtgttttttccttttcatttcagcctgactgccggaatcagagccgcgggtgagatccccagccctgtgagcctgtaggagtagaatggctccccaaatgtatgagttccatctgccattatccccagaggagttgttgaaaagtggaggggtgaatcagtatgttgtgcaagaggtactgtccatcaaacatcttccaccacagcttagagcttttcaggctgcctttcgagctcaggggcccctggctatgctgcagcactttgatactatctacagcattttgcatcactttcgaagtatagatcctggcctcaaagaagatactctgcaattcctgataaaagtggtatcccgccactcccaggagcttccagctatcctggatgatacaactttgagtggatcagatagaaacgcccatctaaatgccctcaaaatgaactgttatgctctgatacgtctcctggaatcctttgagaccatggccagccagacaaaccttgtggacctggaccttggtgggaagggtaagaaagctcggaccaaggcagcccatggctttgactgggaagaagagaggcaaccaattcttcagcttttaacacagctacttcagttggacatccgtcacctgtggaaccactcaataattgaagaagaatttgtcagtttggttactggctgttgctaccgccttctggagaatcccaccattaatcaccagaagaaccgccccactcgggaagccataacacacctgcttggtgtagccttgacccgttataaccatatgctcagtgctacagtgaagatcatccagatgctgcagcactttgaacacctggcacctgtactggttgcagccgtgagtctatgggcaactgactatggaatgaagagcatagtgggagagattgtaagagagattggacaaaagtgtccccaagagctgagtcgagacccttcagggacaaagggctttgcagcattcctgacagaactagcagaacgtgtcccagctatcctgatgtccagcatgtgcattttgctagatcacctggatggagaaaattacatgatgcgtaatgctgtgctggcagccatggcggagatggtgctgcaggttctcagtggcgatcaactggaagcagcagcccgagacaccagagaccagttcttggatactttacaagcccatggccatgatgtcaactcctttgtgcggagccgtgttttgcagctcttcacccgaattgtccagcagaaggctctccccctgacacgtttccaggcagtggtggctttagctgtgggacgtctggcagacaagtcagtgctagtatgtaaaaatgccatccagctgctggccagttttctagccaataatcctttctcctgcaagcttagtgatgctgaccttgccggaccactgcagaaggagacccagaaattacaagagatgagggcccagaggcgaactgcagcagcttctgcagtgctggacccagaggaggagtgggaagccatgctgccagagttgaagtctaccctgcagcagcttctacagcttccccagggagaggaggagattcctgagcaaattgccaatacagagacaactgaagatgtgaaaggacgcatctatcaactgcttgccaaagctagttacaaaaaggccatcattctcactcgagaagccacaggccacttccaggagtccgaacccttcagtcatatagacccagaggagtcagaggagaccaggctcttgaatatcttaggacttatcttcaaaggcccagcagcttccacacaagaaaagaatccccgggagtctacaggaaacatggtcacaggacagactgtctgtaaaaataaacccaatatgtcggatcctgaggaatccaggggaaatgatgaactagtgaagcaggagatgctggtacagtatctgcaggatgcctacagcttctcccggaagattacagaggccattggcatcatcagcaagatgatgtatgaaaacacaactacagtggtgcaggaggtgattgaattctttgtgatggtcttccaatttggggtaccccaggccctgtttggggtgcgccgtatgctgcctctcatctggtctaaggagcctggtgtccgggaagccgtgcttaatgcctaccgccaactctacctcaaccccaaaggggactctgccagagccaaggcccaggctttgattcagaatctctctctgctgctagtggatgcctcggttgggaccattcagtgtcttgaggaaattctctgtgagtttgtgcagaaggatgagttgaaaccagcagtgacccagctgctgtgggagcgggccaccgagaaggtcgcctgctgtcctctggagcgctgttcctctgtcatgcttcttggcatgatggcacgaggaaagccagaaattgtgggaagcaatttagacacactggtgagcatagggctggatgagaagtttccacaggactacaggctggcccagcaggtgtgccatgccattgccaacatctcggacaggagaaagccttctctgggcaaacgtcacccccccttccggctgcctcaggaacacaggttgtttgagcgactgcgggagacagtcacaaaaggctttgtccacccagacccactctggatcccattcaaagaggtggcagtgaccctcatttaccaactggcagagggccccgaagtgatctgtgcccagatattgcagggctgtgcaaaacaggccctggagaagctagaagagaagagaaccagtcaggaggacccgaaggagtcccccgcaatgctccccactttcctgttgatgaacctgctgtccctggctggggatgtggctctgcagcagctggtccacttggagcaggcagtgagtggagagctctgccggcgccgagttctccgggaagaacaggagcacaagaccaaagatcccaaggagaagaatacgagctctgagaccaccatggaggaggagctggggctggttggggcaacagcagatgacacagaggcagaactaatccgtggcatctgcgagatggaactgttggatggcaaacagacactggctgcctttgttccactcttgcttaaagtctgtaacaacccaggcctctatagcaacccagacctctctgcagctgcttcacttgcccttggcaagttctgcatgatcagtgccactttctgcgactcccagcttcgtcttctgttcaccatgctggaaaagtctccacttcccattgtccggtctaacctcatggttgccactggggatctggccatccgctttcccaatctggtggacccctggactcctcatctgtatgctcgtctccgggaccctgctcagcaagtgcggaaaacagcggggctggtgatgacccacctgatcctcaaggacatggtgaaggtgaaggggcaggtcagcgagatggcggtgctgctcatcgaccccgagcctcagattgctgccctggccaagaacttcttcaatgagctctcccacaagggcaacgcaatctataatctccttccagatatcatcagccgcctgtcagaccccgagctgggggtggaggaagagcctttccacaccatcatgaaacagctcctctcctacatcaccaaggacaagcagacagagagcctggtggaaaagctgtgtcagcggttccgcacatcccgaactgagcggcagcagcgagacctggcctactgtgtgtcacagctgcccctcacagagcgaggcctccgtaagatgcttgacaattttgactgttttggagacaaactgtcagatgagtccatcttcagtgcttttttgtcagttgtaggcaagctgcgacgtggggccaagcctgagggcaaggctataatagatgaatttgagcagaagcttcgggcctgtcataccagaggtttggatggaatcaaggagcttgagattggccaagcaggtagccagagagcgccatcagccaagaaaccatccactggttctaggtaccagcctctggcttctacagcctcagacaatgactttgtcacaccagagccccgccgtactacccgtcggcatccaaacacccagcagcgagcttccaaaaagaaacccaaagttgtcttctcaagtgatgagtccagtgaggaagatctttcagcagagatgacagaagacgagacacccaagaaaacaactcccattctcagagcatcggctcgcaggcacagatcctaggaagtctgttcctgtcctccctgtgcagggtatcctgtagggtgacctggaattcgaattctgtttcccttgtaaaatatttgtctgtctcttttttttaaaaaaaaaaaaggccgggcactgtggctcacgcctgtaatcccagcactttgcgataccaaggcgggtggataacctgaggtagggagttcgagaccagcctgaccaacatggagaaaccccatctctactaaaaataaaaaattagccgggcgtattggcgtgcgcctgtaatcccagctactcaagaggctgaggcaggagaatcgcctgaacccagaggcggaggttgtagtgagccgaaatcacaccattgcactccagcttgggcaacaatagcgaacctccatctcaaattaaaaaaaaaatgcctacacgctctttaaaatgcaaggctttctcttaaattagcctaactgaactgcgttgagctgcttcaactttggaatatatgtttgccaatctccttgttttctaatgaataaatgtttttatatactttta

SEQ ID NO: 160026 - DNA, 2844 bp, Homo sapiens
  Payload ID: 11296
  Gene Symbol: NCAPD2
  Gene Name: non-SMC condensin I complex, subunit D2
  ENST ID: ENST00000382457
  CDS Start-End: 86-2844
gtgttttttccttttcatttcagcctgactgccggaatcagagccgcgggtgagatccccagccctgtgagcctgtaggagtagaatggctccccaaatgtatgagttccatctgccattatccccagaggagttgttgaaaagtggaggggtgaatcagtatgttgtgcaagaggtactgtccatcaaacatcttccaccacagcttagagcttttcaggctgcctttcgagctcaggggcccctggctatgctgcagcactttgatactatctacagcattttgcatttggttactggctgttgctaccgccttctggagaatcccaccattaatcaccagaagaaccgccccactcgggaagccataacacacctgcttggtgtagccttgacccgttataaccatatgctcagtgctacagtgaagatcatccagatgctgcagcactttgaacacctggcacctgtactggttgcagccgtgagtctatgggcaactgactatggaatgaagagcatagtgggagagattgtaagagagattggacaaaagtgtccccaagagctgagtcgagacccttcagggacaaagggctttgcagcattcctgacagaactagcagaacgtgtcccagctatcctgatgtccagcatgtgcattttgctagatcacctggatggagaaaattacatgatgcgtaatgctgtgctggcagccatggcggagatggtgctgcaggttctcagtggcgatcaactggaagcagcagcccgagacaccagagaccagttcttggatactttacaagcccatggccatgatgtcaactcctttgtgcggagccgtgttttgcagctcttcacccgaattgtccagcagaaggctctccccctgacacgtttccaggcagtggtggctttagctgtgggacgtctggcagacaagtcagtgctagtatgtaaaaatgccatccagctgctggccagttttctagccaataatcctttctcctgcaagcttagtgatgctgaccttgccggaccactgcagaaggagacccagaaattacaagagatgagggcccagaggcgaactgcagcagcttctgcagtgctggacccagaggaggagtgggaagccatgctgccagagttgaagtctaccctgcagcagcttctacagcttccccagggagaggaggagattcctgagcaaattgccaatacagagacaactgaagatgtgaaaggacgcatctatcaactgcttgccaaagctagttacaaaaaggccatcattctcactcgagaagccacaggccacttccaggagtccgaacccttcagtcatatagacccagaggagtcagaggagaccaggctcttgaatatcttaggacttatcttcaaaggcccagcagcttccacacaagaaaagaatccccgggagtctacaggaaacatggtcacaggacagactgtctgtaaaaataaacccaatatgtcggatcctgaggaatccaggggaaatgatgaactagtgaagcaggagatgctggtacagtatctgcaggatgcctacagcttctcccggaagattacagaggccattggcatcatcagcaagatgatgtatgaaaacacaactacagtggtgcaggaggtgattgaattctttgtgatggtcttccaatttggggtaccccaggccctgtttggggtgcgccgtatgctgcctctcatctggtctaaggagcctggtgtccgggaagccgtgcttaatgcctaccgccaactctacctcaaccccaaaggggactctgccagagccaaggcccaggctttgattcagaatctctctctgctgctagtggatgcctcggttgggaccattcagtgtcttgaggaaattctctgtgagtttgtgcagaaggatgagttgaaaccagcagtgacccagctgctgtgggagcgggccaccgagaaggtcgcctgctgtcctctggagcgctgttcctctgtcatgcttcttggcatgatggcacgaggaaagccagaaattgtgggaagcaatttagacacactggtgagcatagggctggatgagaagtttccacaggactacaggctggcccagcaggtgtgccatgccattgccaacatctcggacaggagaaagccttctctgggcaaacgtcacccccccttccggctgcctcaggaacacaggttgtttgagcgactgcgggagacagtcacaaaaggctttgtccacccagacccactctggatcccattcaaagaggtggcagtgaccctcatttaccaactggcagagggccccgaagtgatctgtgcccagatattgcagggctgtgcaaaacaggccctggagaagctagaagagaagagaaccagtcaggaggacccgaaggagtcccccgcaatgctccccactttcctgttgatgaacctgctgtccctggctggggatgtggctctgcagcagctggtccacttggagcaggcagtgagtggagagctctgccggcgccgagttctccgggaagaacaggagcacaagaccaaagatcccaaggagaagaatacgagctctgagaccaccatggaggaggagctggggctggttggggcaacagcagatgacacagaggcagaactaatccgtggcatctgcgagatggaactgttggatggcaaacagacactggctgcctttgttccactcttgcttaaagtctgtaacaacccaggcctctatagcaacccagacctctctgcagctgcttcacttgcccttggcaagttctgcatgatcag

SEQ ID NO: 160027 - DNA, 4290 bp, Homo sapiens
  Payload ID: 11296
  Gene Symbol: NCAPD2
  Gene Name: non-SMC condensin I complex, subunit D2
  ENST ID: ENST00000539084
  CDS Start-End: 80-325
tttccttttcatttcagcctgactgccggaatcagagccgcgggtgagatccccagccctgtgagcctgtaggagtagaatggctccccaaatgtatgagttccatctgccattatccccagaggagttgttgaaaagtggaggggtgaatcagtatgttgtgcaagaggtactgtccatcaaacatcttccaccacagcttagagcttttcaggctgcctttcgagctcaggggcccctggctatgctgcagcactttgatactatctacagcattttgcatggtatcccgccactcccaggagcttccagctatcctggatgatacaactttgagtggatcagatagaaacgcccatctaaatgccctcaaaatgaactgttatgctctgatacgtctcctggaatcctttgagaccatggccagccagacaaaccttgtggacctggaccttggtgggaagggtaagaaagctcggaccaaggcagcccatggctttgactgggaagaagagaggcaaccaattcttcagcttttaacacagctacttcagttggacatccgtcacctgtggaaccactcaataattgaagaagaatttgtcagtttggttactggctgttgctaccgccttctggagaatcccaccattaatcaccagaagaaccgccccactcgggaagccataacacacctgcttggtgtagccttgacccgttataaccatatgctcagtgctacagtgaagatcatccagatgctgcagcactttgaacacctggcacctgtactggttgcagccgtgagtctatgggcaactgactatggaatgaagagcatagtgggagagattgtaagagagattggacaaaagtgtccccaagagctgagtcgagacccttcagggacaaagggctttgcagcattcctgacagaactagcagaacgtgtcccagctatcctgatgtccagcatgtgcattttgctagatcacctggatggagaaaattacatgatgcgtaatgctgtgctggcagccatggcggagatggtgctgcaggttctcagtggcgatcaactggaagcagcagcccgagacaccagagaccagttcttggatactttacaagcccatggccatgatgtcaactcctttgtgcggagccgtgttttgcagctcttcacccgaattgtccagcagaaggctctccccctgacacgtttccaggcagtggtggctttagctgtgggacgtctggcagacaagtcagtgctagtatgtaaaaatgccatccagctgctggccagttttctagccaataatcctttctcctgcaagcttagtgatgctgaccttgccggaccactgcagaaggagacccagaaattacaagagatgagggcccagaggcgaactgcagcagcttctgcagtgctggacccagaggaggagtgggaagccatgctgccagagttgaagtctaccctgcagcagcttctacagcttccccagggagaggaggagattcctgagcaaattgccaatacagagacaactgaagatgtgaaaggacgcatctatcaactgcttgccaaagctagttacaaaaaggccatcattctcactcgagaagccacaggccacttccaggagtccgaacccttcagtcatatagacccagaggagtcagaggagaccaggctcttgaatatcttaggacttatcttcaaaggcccagcagcttccacacaagaaaagaatccccgggagtctacaggaaacatggtcacaggacagactgtctgtaaaaataaacccaatatgtcggatcctgaggaatccaggggaaatgatgaactagtgaagcaggagatgctggtacagtatctgcaggatgcctacagcttctcccggaagattacagaggccattggcatcatcagcaagatgatgtatgaaaacacaactacagtggtgcaggaggtgattgaattctttgtgatggtcttccaatttggggtaccccaggccctgtttggggtgcgccgtatgctgcctctcatctggtctaaggagcctggtgtccgggaagccgtgcttaatgcctaccgccaactctacctcaaccccaaaggggactctgccagagccaaggcccaggctttgattcagaatctctctctgctgctagtggatgcctcggttgggaccattcagtgtcttgaggaaattctctgtgagtttgtgcagaaggatgagttgaaaccagcagtgacccagctgctgtgggagcgggccaccgagaaggtcgcctgctgtcctctggagcgctgttcctctgtcatgcttcttggcatgatggcacgaggaaagccagaaattgtgggaagcaatttagacacactggtgagcatagggctggatgagaagtttccacaggactacaggctggcccagcaggtgtgccatgccattgccaacatctcggacaggagaaagccttctctgggcaaacgtcacccccccttccggctgcctcaggaacacaggttgtttgagcgactgcgggagacagtcacaaaaggctttgtccacccagacccactctggatcccattcaaagaggtggcagtgaccctcatttaccaactggcagagggccccgaagtgatctgtgcccagatattgcagggctgtgcaaaacaggccctggagaagctagaagagaagagaaccagtcaggaggacccgaaggagtcccccgcaatgctccccactttcctgttgatgaacctgctgtccctggctggggatgtggctctgcagcagctggtccacttggagcaggcagtgagtggagagctctgccggcgccgagttctccgggaagaacaggagcacaagaccaaagatcccaaggagaagaatacgagctctgagaccaccatggaggaggagctggggctggttggggcaacagcagatgacacagaggcagaactaatccgtggcatctgcgagatggaactgttggatggcaaacagacactggctgcctttgttccactcttgcttaaagtctgtaacaacccaggcctctatagcaacccagacctctctgcagctgcttcacttgcccttggcaagttctgcatgatcagtgccactttctgcgactcccagcttcgtcttctgttcaccatgctggaaaagtctccacttcccattgtccggtctaacctcatggttgccactggggatctggccatccgctttcccaatctggtggacccctggactcctcatctgtatgctcgtctccgggaccctgctcagcaagtgcggaaaacagcggggctggtgatgacccacctgatcctcaaggacatggtgaaggtgaaggggcaggtcagcgagatggcggtgctgctcatcgaccccgagcctcagattgctgccctggccaagaacttcttcaatgagctctcccacaagggcaacgcaatctataatctccttccagatatcatcagccgcctgtcagaccccgagctgggggtggaggaagagcctttccacaccatcatgaaacagctcctctcctacatcaccaaggacaagcagacagagagcctggtggaaaagctgtgtcagcggttccgcacatcccgaactgagcggcagcagcgagacctggcctactgtgtgtcacagctgcccctcacagagcgaggcctccgtaagatgcttgacaattttgactgttttggagacaaactgtcagatgagtccatcttcagtgcttttttgtcagttgtaggcaagctgcgacgtggggccaagcctgagggcaaggctataatagatgaatttgagcagaagcttcgggcctgtcataccagaggtttggatggaatcaaggagcttgagattggccaagcaggtagccagagagcgccatcagccaagaaaccatccactggttctaggtaccagcctctggcttctacagcctcagacaatgactttgtcacaccagagccccgccgtactacccgtcggcatccaaacacccagcagcgagcttccaaaaagaaacccaaagttgtcttctcaagtgatgagtccagtgaggaagatctttcagcagagatgacagaagacgagacacccaagaaaacaactcccattctcagagcatcggctcgcaggcacagatcctaggaagtctgttcctgtcctccctgtgcagggtatcctgtagggtgacctggaattcgaattctgt

SEQ ID NO: 160028 - DNA, 533 bp, Homo sapiens
  Payload ID: 11296
  Gene Symbol: NCAPD2
  Gene Name: non-SMC condensin I complex, subunit D2
  ENST ID: ENST00000539714
  CDS Start-End: 180-533
gagcgccggacaagctgaggtccgcgactcgtcgctaagattccccaaaactgagatttcaagaaaattcaccctttccgctttctttggcgtccttcaaccgtgaaggaaatgaagcctgactgccggaatcagagccgcgggtgagatccccagccctgtgagcctgtaggagtagaatggctccccaaatgtatgagttccatctgccattatccccagaggagttgttgaaaagtggaggggtgaatcagtatgttgtgcaagaggtactgtccatcaaacatcttccaccacagcttagagcttttcaggctgcctttcgagctcaggggcccctggctatgctgcagcactttgatactatctacagcattttgcatcactttcgaagtatagatcctggcctcaaagaagatactctgcaattcctgataaaagtggtatcccgccactcccaggagcttccagctatcctggatgatacaactttgagtggatcagatagaaacgcccatctaaatgccctcaaa

SEQ ID NO: 160029 - DNA, 4661 bp, Homo sapiens
  Payload ID: 11297
  Gene Symbol: NCAPG
  Gene Name: non-SMC condensin I complex, subunit G
  Uniprot ID: Q9BPX3
  ENST ID: ENST00000251496
  CDS Start-End: 177-3224
cttacggcagtctcgcgggatttccccctctcgcgggaattatttgaacgttcgagcggtaaatactccctggggctgtcatagaagactactcggagagcgctgcctctgggttggcgggctggcaggctgtagccgagcgcgggcaggactcgtcccggcagggttccagagccatgggagcggaaaggaggctgctgtcgattaaggaggcctttcggctggcgcagcagccgcaccagaaccaggcgaagctggtggtggcgctgagccgcacctaccgcacgatggatgataagacagtttttcatgaggagttcattcattaccttaaatatgttatggtggtctataaacgtgaaccagctgtggagagggtaatagaatttgcagcaaagtttgttacctcatttcaccaatcagatatggaagatgatgaggaagaggaagatggtggccttttaaattatttgtttacttttctcttaaagtctcatgaagcaaacagcaatgcagtgagatttagagtgtgcctgctcataaacaagcttttgggaagtatgccagaaaatgctcagattgatgatgatgtgtttgataaaattaataaagccatgcttattagattgaaagataagattccaaatgtgagaatacaggcagttctggcgctttcacgacttcaggatcccaaggatgatgaatgcccagtggttaatgcatatgctactttgattgaaaatgattcaaatccagaagttagacgggcagtgttatcatgtattgcaccatcagcaaagactttgccaaaaattgtagggcgcaccaaggatgtgaaagaggctgtcagaaagctggcttatcaggttttagctgaaaaggttcatatgagagctatgtccattgctcagagagtaatgctccttcaacaaggtcttaatgacagatcagatgctgtgaaacaagctatgcagaagcatcttcttcaaggctggttacggttctctgaaggaaatatcttagagttgctccatcggttggatgtagaaaattcttctgaagtggcagtctctgttctcaatgccttgttttcaataactcctctcagtgaactggtgggactctgtaaaaacaatgatggcaggaaattgattccagtggaaacattaactcctgaaattgctttgtattggtgtgccctttgtgaatatttgaaatcaaaaggagatgaaggtgaagaatttttagagcagattttgccagagcctgtagtatatgcagactatttattgagttacatccagagcattccagttgttaatgaagaacacagaggtgatttttcctatattggaaatttgatgacaaaagaattcataggtcaacaattgattctaattattaagtctttggataccagtgaagaaggaggaagaaaaaaactgctggctgttttacaggagattcttattttacccacaatcccaatatccctggtttcttttcttgttgaaagactactccacatcattatagatgataataagagaacacaaattgttacagaaattatctcagagattcgggcgcccattgttactgttggtgttaataacgatccagctgatgtaagaaagaaagaactcaagatggctgaaataaaagttaagcttatcgaagccaaagaagctttggaaaattgcattaccttacaggattttaatcgggcatcagaattaaaagaagaaataaaagcattagaagatgccagaataaaccttttgaaagagacagagcaacttgaaattaaagaagtccacatagagaagaatgatgctgaaacattgcagaaatgtcttattttatgctatgaactgttgaagcagatgtccatttcaacaggcttaagtgcaaccatgaatggaatcatcgaatctttgattcttcctggaataataagtattcatcctgttgtaagaaacctggctgttttatgcttgggatgctgtggactacagaatcaggattttgcaaggaaacacttcgtattactattgcaggttttgcaaattgatgatgtcacaataaaaataagtgctttaaaggcaatctttgaccaactgatgacgttcgggattgaaccatttaaaactaaaaaaatcaaaacacttcattgtgaaggtacagaaataaacagtgatgatgagcaagaatcaaaagaagttgaagagactgctacagctaagaatgttctgaaactcctttctgatttcttagatagtgaggtatctgaacttaggactggagctgcagaaggactagccaagctgatgttctctgggcttttggtcagcagcaggattctttctcgtcttattttgttatggtacaatcctgtgactgaagaggatgttcaacttcgacattgcctaggcgtgttcttccccgtgtttgcttatgcaagcaggactaatcaggaatgctttgaagaagcttttcttccaaccctgcaaacactggccaatgcccctgcatcttctcctttagctgaaattgatatcacaaatgttgctgagttacttgtagatttgacaagaccaagtggattaaatcctcaggccaagacttcccaagattatcaggccttaacagtacatgacaatttggctatgaaaatttgcaatgagatcttaacaagtccgtgctcgccagaaattcgagtctatacaaaagccttgagttctttagaactcagtagccatcttgcaaaagatcttctggttctattgaatgagattctggagcaagtaaaagataggacatgtctgagagctttggagaaaatcaagattcagttagaaaaaggaaataaagaatttggtgaccaagctgaagcagcacaggatgccaccttgactacaactactttccaaaatgaagatgaaaagaataaagaagtatatatgactccactcaggggtgtaaaagcaacccaagcatcaaagtctactcagctaaagactaacagaggacagagaaaagtgacagtttcagctaggacgaacaggaggtgtcagactgctgaagccgactctgaaagtgatcatgaagttccagaaccagaatcagaaatgaagatgagactaccaagacgagccaaaaccgcagcactagaaaaaagtaaacttaaccttgcccaatttctcaatgaagatctaagttaggaaagacgatggaggtggaatcctttaagattatgtccagttatttgctttaataaagaagaagttacccttgtcaaaatcagaacaaacctgatgtctttctgaagattttctgctgtgcgcttccacgttactttggcctgtattaaagcagtagagcagcatcagttattatagtccagaaaaagtgtgcatcagtcagtcacacagatttatcacaatctgaggtgggcctaggaatctcatttttaaatagtctctccaagtgattcttatgaactctttatgtttaaaatcatgtcattatggaaaacttacaagtgtaactagctagtagcttgcatttgagaagcttatgacttagatgggcagaatcaacaaagatgaaaccgcctgaggacacatttaacaagtaacatttctagggaaaatgaaggaagtaccacaaactggctagaaaggagcttatcaatcaccagtgaggaagaccagtataacgttcaacaacagttattttgacaaaaacttattttgtgattcctacagtgaaaacatttttggtgatatctgcctgggaaatctctcttcctaaagtatttgtatatgggagtccttgtttgtgaatgtttcctggattagggaggtgtcaacataaatgtattattaaccatgaagctgctcgctatatttttggcataacaaaataatatttatttactgtggataataattctagtgggaatataatgtgacaggaacttctctttatatacgctaccaatttatgagcactattcactgtcaatttcatttcttgtcttttgaaattgacacttggcctgacttacgaaacttgtactatatgaaattggtcctcttttctgcaatacccaacgaaacaccttttctctttattattcagaaatgtcctaacatggatctgtttgttttaataattgtgctttttttaggcttatcatctactagaggccatttacttaaggtgaaattttaagatggagctaaagtaagatcactggtttttagaaccaaattgctatacatatgtgcctcatagaacttataaaaggagtcaaagtttcaaagcaagatagttattaagcaaaaggaaaaatggtaatgatagaaagtcagttaaaaatagatgattgttcttcattctgtttgttggctctgtgttctcctgtgcttcagattccttatgtgttgttgttttaaagacaatttgcagggggttgggagaaggactgaaaaggtacattaagtgtgctgtaaggaaaagtcttagaaacataataagctaaaatcccattcacacatggccaggctatccaaaaagaaaggagccatgttctcatgtggtttaccataccaaagcttgctttctctggcatgggaaaaataaatttaagcacc

SEQ ID NO: 160030 - DNA, 3017 bp, Homo sapiens
  Payload ID: 11297
  Gene Symbol: NCAPG
  Gene Name: non-SMC condensin I complex, subunit G
  ENST ID: ENST00000514176
  CDS Start-End: 57-755
gctggcaggctgtagccgagcgcgggcaggactcgtcccggcagggttccagagccatgggagcggaaaggaggctgctgtcgattaaggaggcctttcggctggcgcagcagccgcaccagaaccaggcgaagctggtggtggcgctgagccgcacctaccgcacgatggatgataagacagtttttcatgaggagttcattcattaccttaaatatgttatggtggtctataaacgtgaaccagctgtggagagggtaatagaatttgcagcaaagtttgttacctcatttcaccaatcagatatggaagatgatgaggaagaggaagatggtggccttttaaattatttgtttacttttctcttaaagtctcatgaagcaaacagcaatgcagtgagatttagagtgtgcctgctcataaacaagcttttgggaagtatgccagaaaatgctcagattgatgatgatgtgtttgataaaattaataaagccatgcttattagattgaaagataagattccaaatgtgagaatacaggcagttctggcgctttcacgacttcaggatcccaaggatgatgaatgcccagtggttaatgcatatgctactttgattgaaaatgattcaaatccagaagttagacgggcagtgttatcatgtattgcaccatcagcaaagactttgccaaaaattgtagggcgcaccaaggatgtgaaagaggctgtcagaaagctggcttatcagatgctgtgaaacaagctatgcagaagcatcttcttcaaggctggttacggttctctgaaggaaatatcttagagttgctccatcggttggatgtagaaaattcttctgaagtggcagtctctgttctcaatgccttgttttcaataactcctctcagtgaactggtgggactctgtaaaaacaatgatggcaggaaattgattccagtggaaacattaactcctgaaattgctttgtattggtgtgccctttgtgaatatttgaaatcaaaaggagatgaaggtgaagaatttttagagcagattttgccagagcctgtagtatatgcagactatttattgagttacatccagagcattccagttgttaatgaagaacacagaggtgatttttcctatattggaaatttgatgacaaaagaattcataggtcaacaattgattctaattattaagtctttggataccagtgaagaaggaggaaggagattcttattttacccacaatcccaatatccctggtttcttttcttgttgaaagactactccacatcattatagatgataataagagaacacaaattgttacagaaattatctcagagattcgggcgcccattgttactgttggtgttaataacgatccagctgatgtaagaaagaaagaactcaagatggctgaaataaaagttaagcttatcgaagccaaagaagctttggaaaattgcattaccttacaggattttaatcgggcatcagaattaaaagaagaaataaaagcattagaagatgccagaataaaccttttgaaagagacagagcaacttgaaattaaagaagtccacatagagaagaatgatgctgaaacattgcagaaatgtcttattttatgctatgaactgttgaagcagatgtccatttcaacaggcttaagtgcaaccatgaatggaatcatcgaatctttgattcttcctggaataataagtattcatcctgttgtaagaaacctggctgttttatgcttgggatgctgtggactacagaatcaggattttgcaaggaaacacttcgtattactattgcaggttttgcaaattgatgatgtcacaataaaaataagtgctttaaaggcaatctttgaccaactgatgacgttcgggattgaaccatttaaaactaaaaaaatcaaaacacttcattgtgaaggtacagaaataaacagtgatgatgagcaagaatcaaaagaagttgaagagactgctacagctaagaatgttctgaaactcctttctgatttcttagatagtgaggtatctgaacttaggactggagctgcagaaggactagccaagctgatgttctctgggcttttggtcagcagcaggattctttctcgtcttattttgttatggtacaatcctgtgactgaagaggatgttcaacttcgacattgcctaggcgtgttcttccccgtgtttgcttatgcaagcaggactaatcaggaatgctttgaagaagcttttcttccaaccctgcaaacactggccaatgcccctgcatcttctcctttagctgaaattgatatcacaaatgttgctgagttacttgtagatttgacaagaccaagtggattaaatcctcaggccaagacttcccaagattatcaggccttaacagtacatgacaatttggctatgaaaatttgcaatgagatcttaacaagtccgtgctcgccagaaattcgagtctatacaaaagccttgagttctttagaactcagtagccatcttgcaaaagatcttctggttctattgaatgagattctggagcaagtaaaagataggacatgtctgagagctttggagaaaatcaagattcagttagaaaaaggaaataaagaatttggtgaccaagctgaagcagcacaggatgccaccttgactacaactactttccaaaatgaagatgaaaagaataaagaagtatatatgactccactcaggggtgtaaaagcaacccaagcatcaaagtctactcagctaaagactaacagaggacagagaaaagtgacagtttcagctaggacgaacaggaggtgtcagactgctgaagccgactctgaaagtgatcatgaagttccagaaccagaatcagaaatgaagatgagactaccaagacgagccaaaaccgcagcactagaaaaaagtaaacttaaccttgcccaatttctcaatgaagatctaagttaggaaagacgatggaggtggaatcc

SEQ ID NO: 160031 - DNA, 807 bp, Homo sapiens
  Payload ID: 11297
  Gene Symbol: NCAPG
  Gene Name: non-SMC condensin I complex, subunit G
  ENST ID: ENST00000510063
  CDS Start-End: 1-807
atatccctggtttcttttcttgttgaaagactactccacatcattatagatgataataagagaacacaaattgttacagaaattatctcagagattcgggcgcccattgttactgttggtgttaataacgatccagctgatgtaagaaagaaagaactcaagatggctgaaataaaagttaagcttatcgaagccaaagaagctttggaaaattgcattaccttacaggattttaatcgggcatcagaattaaaagaagaaataaaagcattagaagatgccagaataaaccttttgaaagagacagagcaacttgaaattaaagaagtccacatagagaaggtacagaatgatgctgaaacattgcagaaatgtcttattttatgctatgaactgttgaagcagatgtccatttcaacaggcttaagtgcaaccatgaatggaatcatcgaatctttgattcttcctggaataataagtattcatcctgttgtaagaaacctggctgttttatgcttgggatgctgtggactacagaatcaggattttgcaaggaaacacttcgtattactattgcaggttttgcaaattgatgatgtcacaataaaaataagtgctttaaaggcaatctttgaccaactgatgacgttcgggattgaaccatttaaaactaaaaaaatcaaaacacttcattgtgaaggtacagaaataaacagtgatgatgagcaagaatcaaaagaagttgaagagactgctacagctaagaatgttctgaaactcctttctgatttcttagatagtgaggta

SEQ ID NO: 160032 - DNA, 2763 bp, Homo sapiens
  Payload ID: 11298
  Gene Symbol: NCAPH
  Gene Name: non-SMC condensin I complex, subunit H
  Uniprot ID: Q15003
  ENST ID: ENST00000240423
  CDS Start-End: 44-2269
gacgcgcgcgatttaaaaccagctcaggagacgccaaggaaagatgggacctcccggcccagcactgccagccacaatgaataactcttcttcagagacgcgaggacacccccacagtgcctcctctccttcagagcgtgtgttcccgatgcccctgcccaggaaggcgcctctcaatattcctggcaccccagtcctcgaagactttcctcagaatgacgatgagaaggagcggctgcagcggaggcgctcgagggtctttgatctgcagttcagcactgactcacctcgcttattggcctccccctccagcaggagtattgacatttcagctactatccccaagtttacaaacacgcagattacggaacattactccacctgtatcaaactgtccactgaaaataaaatcactaccaagaatgcttttggtttgcacttgattgattttatgtcagagattcttaaacagaaagacaccgaaccaaccaactttaaagtggctgcgggtactctggatgccagcaccaagatctatgctgtgcgcgtggatgccgtccatgccgatgtatacagagtccttggggggctgggcaaagatgcaccgtctttggaagaagtagaaggccatgttgctgatggaagtgctactgaaatgggaacaaccaaaaaggctgtaaagccaaagaagaagcacttacacagaactattgagcagaacataaacaacctcaatgtctccgaagcagatcggaagtgtgagattgatcccatgtttcagaagacagcagcctcatttgatgagtgcagcacagcaggggtgtttctgtccactctccactgccaggactacagaagtgaactgctgtttccctctgatgtccagactctctccacgggagaacctctcgagttgccagagttaggttgtgtagaaatgacagatttaaaagcgcccttgcagcagtgtgcagaagatcgccagatctgcccttccctggccgggttccagtttacacagtgggacagtgaaacacataatgagtctgtgtcggccctggtagacaagtttaagaagaatgaccaggtatttgacatcaatgctgaagttgacgagagtgactgtggagacttccccgatgggtccctgggggatgactttgatgccaacgatgaacctgaccacaccgcagttggggatcatgaagagttcaggagctggaaggagccctgccaggttcagagctgccaggaagaaatgatttcccttggggatggagacatcaggaccatgtgcccccttctgtctatgaaacctggagaatattcttatttcagtcctcggaccatgtcgatgtgggctggcccggatcactggcgctttaggcctcgacgcaaacaagatgctccttcccaatcagaaaacaaaaagaagagtacaaaaaaagattttgaaattgactttgaagatgatattgactttgatgtatattttagaaaaacaaaggctgctactattctgaccaagtccactttggagaaccagaattggagagctaccacccttcctacagatttcaactacaatgttgacactctggtccagcttcacctcaaaccaggcaccaggttacttaagatggcccagggccatagggtagagactgagcattatgaagaaattgaagactatgattacaacaaccctaacgacacctccaacttttgccctggattacaggctgctgacagtgatgatgaagatttggatgacttatttgtgggacctgttgggaactctgacctctcaccttatccttgccatccacctaagacagcacaacagaatggtgacactccagaagcccaaggattagacatcacaacatatggggagtcaaacttggtagctgagcctcagaaggtaaataaaattgaaattcactatgccaagactgccaaaaagatggacatgaagaaactgaagcagagcatgtggagtctgctgacagcgctctccggaaaggaggcagatgcagaggcaaaccacagggaagctggaaaagaagcggccctggcagaagtggctgacgagaagatgcttagcgggctcacgaaggacctgcagaggagcctgccccctgtcatggctcagaacctctccatacctctggcttttgcctgtctcctacatttagccaatgaaaagaatctaaaactggaaggaacagaggacctctctgatgttcttgtgaggcaaggagattgagttcactatggagaagtcagcagcaggaggcccatcccttactcagttgccgggacatccccagtctcgggggaagaagatgccatgggcttatacccaggctgtagccaactaccaacgtgcctgtttgtttgttgctctttccttctctccatcatagtctgggtgccagcgccctgaagctccgtgctcaactgattaaactttactgccctatggtgaccatctaggagaggggagggcagagggggtgagggtactattctggattgagaaaacctatatccattctttatatcaatgtatagttttagtctcctaaattgatctgttattttccaaactattctcttgtagaaaattttccagtgggcacttaatggtgcccttgaagaacttcctaatccatgtacataaaatacatcatatgtacacttataaatgtatatagaatgctcaaaaataaaattcttaataatagaactggcaaaata

SEQ ID NO: 160033 - DNA, 2363 bp, Homo sapiens
  Payload ID: 11298
  Gene Symbol: NCAPH
  Gene Name: non-SMC condensin I complex, subunit H
  Uniprot ID: Q15003
  ENST ID: ENST00000427946
  CDS Start-End: 190-2007
gatttaaaaccagctcaggagacgccaaggaaagatgggacctcccggcccaggagtattgacatttcagctactatccccaagtttacaaacacgcagattacggaacattactccacctgtatcaaactgtccactgaaaataaaatcactaccaagaatgcttttggtttgcacttgattgattttatgtcagagattcttaaacagaaagacaccgaaccaaccaactttaaagtggctgcgggtactctggatgccagcaccaagatctatgctgtgcgcgtggatgccgtccatgccgatgtatacagagtccttggggggctgggcaaagatgcaccgtctttggaagaagtagaaggccatgttgctgatggaagtgctactgaaatgggaacaaccaaaaaggctgtaaagccaaagaagaagcacttacacagaactattgagcagaacataaacaacctcaatgtctccgaagcagatcggaagtgtgagattgatcccatgtttcagaagacagcagcctcatttgatgagtgcagcacagcaggggtgtttctgtccactctccactgccaggactacagaagtgaactgctgtttccctctgatgtccagactctctccacgggagaacctctcgagttgccagagttaggttgtgtagaaatgacagatttaaaagcgcccttgcagcagtgtgcagaagatcgccagatctgcccttccctggccgggttccagtttacacagtgggacagtgaaacacataatgagtctgtgtcggccctggtagacaagtttaagaagaatgaccaggtatttgacatcaatgctgaagttgacgagagtgactgtggagacttccccgatgggtccctgggggatgactttgatgccaacgatgaacctgaccacaccgcagttggggatcatgaagagttcaggagctggaaggagccctgccaggttcagagctgccaggaagaaatgatttcccttggggatggagacatcaggaccatgtgcccccttctgtctatgaaacctggagaatattcttatttcagtcctcggaccatgtcgatgtgggctggcccggatcactggcgctttaggcctcgacgcaaacaagatgctccttcccaatcagaaaacaaaaagaagagtacaaaaaaagattttgaaattgactttgaagatgatattgactttgatgtatattttagaaaaacaaaggctgctactattctgaccaagtccactttggagaaccagaattggagagctaccacccttcctacagatttcaactacaatgttgacactctggtccagcttcacctcaaaccaggcaccaggttacttaagatggcccagggccatagggtagagactgagcattatgaagaaattgaagactatgattacaacaaccctaacgacacctccaacttttgccctggattacaggctgctgacagtgatgatgaagatttggatgacttatttgtgggacctgttgggaactctgacctctcaccttatccttgccatccacctaagacagcacaacagaatggtgacactccagaagcccaaggattagacatcacaacatatggggagtcaaacttggtagctgagcctcagaaggtaaataaaattgaaattcactatgccaagactgccaaaaagatggacatgaagaaactgaagcagagcatgtggagtctgctgacagcgctctccggaaaggaggcagatgcagaggcaaaccacagggaagctggaaaagaagcggccctggcagaagtggctgacgagaagatgcttagcgggctcacgaaggacctgcagaggagcctgccccctgtcatggctcagaacctctccatacctctggcttttgcctgtctcctacatttagccaatgaaaagaatctaaaactggaaggaacagaggacctctctgatgttcttgtgaggcaaggagattgagttcactatggagaagtcagcagcaggaggcccatcccttactcagttgccgggacatccccagtctcgggggaagaagatgccatgggcttatacccaggctgtagccaactaccaacgtgcctgtttgtttgttgctctttccttctctccatcatagtctgggtgccagcgccctgaagctccgtgctcaactgattaaactttactgccctatggtgaccatctaggagaggggagggcagagggggtgagggtactattctggattgagaaaacctatatccattctttatatcaatgtatagttttagtctcctaaattgatctgttattttccaaactattctcttgta

SEQ ID NO: 160034 - DNA, 673 bp, Homo sapiens
  Payload ID: 11298
  Gene Symbol: NCAPH
  Gene Name: non-SMC condensin I complex, subunit H
  ENST ID: ENST00000456906
  CDS Start-End: 24-673
agctcaggagacgccaaggaaagatgggacctcccggcccagcactgccagccacaatgaataactcttcttcagagacgcgaggacacccccacagtgcctcctctccttcagagcgtgtgttcccgatgcccctgcccaggaaggcgcctctcaatattcctggcaccccagtcctcgaagactttcctcagaatgacgatgagaaggagcggctgcagcggaggcgctcgagggtctttgatctgcagttcagcactgactcacctcgcttattggcctccccctccagcaggagtattgacatttcagctactatccccaagtttacaaacacgcagattacggaacattactccacctgtatcaaactgtccactgaaaatattgatcccatgtttcagaagacagcagcctcatttgatgagtgcagcacagcaggggtgtttctgtccactctccactgccaggactacagaagtgaactgctgtttccctctgatgtccagactctctccacgggagaacctctcgagttgccagagttaggttgtgtagaaatgacagatttaaaagcgcccttgcagcagtgtgcagaagatcgccagatctgcccttccctggccgggttccagtttacacagtgggacagtgaaacacataatgaggtgtg

SEQ ID NO: 160035 - DNA, 1852 bp, Homo sapiens
  Payload ID: 11298
  Gene Symbol: NCAPH
  Gene Name: non-SMC condensin I complex, subunit H
  ENST ID: ENST00000435975
  CDS Start-End: 30-1852
aaaaccagctcaggagacgccaaggaaagatgggacctcccggcccagagacgcgaggacacccccacagtgcctcctctccttcagagcgtgtgttcccgatgcccctgcccaggaaggcgcctctcaatattcctggcaccccagtcctcgaagactttcctcagaatgacgatgagaaggagcggctgcagcggaggcgctcgagggtctttgatctgcagttcagcactgactcacctcgcttattggcctccccctccagcaggagtattgacatttcagctactatccccaagtttacaaacacgcagattacggaacattactccacctgtatcaaactgtccactgaaaataaaatcactaccaagaatgcttttggtttgcacttgattgattttatgtcagagattcttaaacagaaagacaccgaaccaaccaactttaaagtggctgcgggtactctggatgccagcaccaagatctatgctgtgcgcgtggatgccgtccatgccgatgtatacagagtccttggggggctgggcaaagatgcaccgtctttggaagaagtagaaggccatgttgctgatggaagtgctactgaaatgggaacaaccaaaaaggctgtaaagccaaagaagaagcacttacacagaactattgagcagaacataaacaacctcaatgtctccgaagcagatcggaagtgtgagattgatcccatgtttcagaagacagcagcctcatttgatgagtgcagcacagcaggggtgtttctgtccactctccactgccaggactacagaagtgaactgctgtttccctctgatgtccagactctctccacgggagaacctctcgagttgccagagttaggttgtgtagaaatgacagatttaaaagcgcccttgcagcagtgtgcagaagatcgccagatctgcccttccctggccgggttccagtttacacagtgggacagtgaaacacataatgagtctgtgtcggccctggtagacaagtttaagaagaatgaccaggtatttgacatcaatgctgaagttgacgagagtgactgtggagacttccccgatgggtccctgggggatgactttgatgccaacgatgaacctgaccacaccgcagttggggatcatgaagagttcaggagctggaaggagccctgccaggttcagagctgccaggaagaaatgatttcccttggggatggagacatcaggaccatgtgcccccttctgtctatgaaacctggagaatattcttatttcagtcctcggaccatgtcgatgtgggctggcccggatcactggcgctttaggcctcgacgcaaacaagatgctccttcccaatcagaaaacaaaaagaagagtacaaaaaaagattttgaaattgactttgaagatgatattgactttgatgtatattttagaaaaacaaaggctgctactattctgaccaagtccactttggagaaccagaattggagagctaccacccttcctacagatttcaactacaatgttgacactctggtccagcttcacctcaaaccaggcaccaggttacttaagatggcccagggccatagggtagagactgagcattatgaagaaattgaagactatgattacaacaaccctaacgacacctccaacttttgccctggattacaggctgctgacagtgatgatgaagatttggatgacttatttgtgggacctgttgggaactctgacctctcaccttatccttgccatccacctaagacagcacaacagaatggtgacactccagaagcccaaggattagacatcacaacatatggggagtc

SEQ ID NO: 160036 - DNA, 2952 bp, Homo sapiens
  Payload ID: 11298
  Gene Symbol: NCAPH
  Gene Name: non-SMC condensin I complex, subunit H
  ENST ID: ENST00000455200
  CDS Start-End: 296-2488
cgccaaggaaagatgggacctcccggcccagtacttaaattcacatagctgcagagtggatatttgtcccagattaacaaagaagcatcagaaacctatggcctcccccctgcacctccaagaaacccaaactctagaggttctagccattaagtattagagttggagaagatctcagtggacagtgtgtggtgaacctccacccctgtgacaggctcaagacttctttggatataggaaatgttctcttgaaggtttcttgagcaagaattttgttccagcactgccagccacaatgaataactcttcttcagagacgcgaggacacccccacagtgcctcctctccttcagagcgtgtgttcccgatgcccctgcccaggaaggcgcctctcaatattcctggcaccccagtcctcgaagactttcctcagaatgacgatgagaaggagcggctgcagcggaggcgctcgagggtctttgatctgcagttcagcactgactcacctcgcttattggcctccccctccagcaggagtattgacatttcagctactatccccaagtttacaaacacgcagattacggaacattactccacctgtatcaaactgtccactgaaaataaaatcactaccaagaatgcttttggtttgcacttgattgattttatgtcagagattcttaaacagaaagacaccgaaccaaccaactttaaagtggctgcgggtactctggatgccagcaccaagatctatgctgtgcgcgtggatgccgtccatgccgatgtatacagagtccttggggggctgggcaaagatgcaccgtctttggaagaagtagaaggccatgttgctgatggaagtgctactgaaatgggaacaaccaaaaaggctgtaaagccaaagaagaagcacttacacagaactattgagcagaacataaacaacctcaatgtctccgaagcagatcggaagtgtgagattgatcccatgtttcagaagacagcagcctcatttgatgagtgcagcacagcaggggtgtttctgtccactctccactgccaggactacagaagtgaactgctgtttccctctgatgtccagactctctccacgggagaacctctcgagttgccagagttaggttgtgtagaaatgacagatttaaaagcgcccttgcagcagtgtgcagaagatcgccagatctgcccttccctggccgggttccagtttacacagtgggacagtgaaacacataatgagtctgtgtcggccctggtagacaagtttaagaagaatgaccaggtatttgacatcaatgctgaagttgacgagagtgactgtggagacttccccgatgggtccctgggggatgactttgatgccaacgatgaacctgaccacaccgcagttggggatcatgaagagttcaggagctggaaggagccctgccaggttcagagctgccaggaagaaatgatttcccttggggatggagacatcaggaccatgtgcccccttctgtctatgaaacctggagaatattcttatttcagtcctcggaccatgtcgatgtgggctggcccggatcactggcgctttaggcctcgacgcaaacaagatgctccttcccaatcagaaaacaaaaagaagagtacaaaaaaagattttgaaattgactttgaagatgatattgactttgatgtatattttagaaaaacaaaggctgctactattctgaccaagtccactttggagaaccagaattggagagctaccacccttcctacagatttcaactacaatgttgacactctggtccagcttcacctcaaaccaggcaccaggttacttaagatggcccagggccatagggtagagactgagcattatgaagaaattgaagactatgattacaacaaccctaacgacacctccaacttttgccctggattacaggctgctgacagtgatgatgaagatttggatgacttatttgtgggacctgttgggaactctgacctctcaccttatccttgccatccacctaagacagcacaacagaatggtgacactccagaagcccaaggattagacatcacaacatatggggagtcaaacttggtagctgagcctcagaaggtaaataaaattgaaattcactatgccaagactgccaaaaagatggacatgaagaaactgaagcagagcatgtggagtctgctgacagcgctctccggaaaggaggcagatgcagaggcaaaccacagggaagctggaaaagaagcggccctggcagaagtggctgacgagaagatgcttagcgggctcacgaaggacctgcagaggagcctgccccctgtcatggctcagaacctctccatacctctggcttttgcctgtctcctacatttagccaatgaaaagaatctaaaactggaaggaacagaggacctctctgatgttcttgtgaggcaaggagattgagttcactatggagaagtcagcagcaggaggcccatcccttactcagttgccgggacatccccagtctcgggggaagaagatgccatgggcttatacccaggctgtagccaactaccaacgtgcctgtttgtttgttgctctttccttctctccatcatagtctgggtgccagcgccctgaagctccgtgctcaactgattaaactttactgccctatggtgaccatctaggagaggggagggcagagggggtgagggtactattctggattgagaaaacctatatccattctttatatcaatgtatagttttagtctcctaaattgatctgttattttccaaactattctcttgtagaaaattttccagtgggcacttaatggtgcccttgaagaacttcctaatccatgtacataaaatacatcatatgtacacttataaatgtatatagaatgctcaaaaat

SEQ ID NO: 160037 - DNA, 779 bp, Homo sapiens
  Payload ID: 11298
  Gene Symbol: NCAPH
  Gene Name: non-SMC condensin I complex, subunit H
  ENST ID: ENST00000435349
  CDS Start-End: 1-547
gttacttaagatggcccagggccatagggtagagactgagcattatgaagaaattgaagactatgattacaacaaccctaacgacacctccaacttttgccctggattacagacagcacaacagaatggtgacactccagaagcccaaggattagacatcacaacatatggggagtcaaacttggtagctgagcctcagaaggtaaataaaattgaaattcactatgccaagactgccaaaaagatggacatgaagaaactgaagcagagcatgtggagtctgctgacagcgctctccggaaaggaggcagatgcagaggcaaaccacagggaagctggaaaagaagcggccctggcagaagtggctgacgagaagatgcttagcgggctcacgaaggacctgcagaggagcctgccccctgtcatggctcagaacctctccatacctctggcttttgcctgtctcctacatttagccaatgaaaagaatctaaaactggaaggaacagaggacctctctgatgttcttgtgaggcaaggagattgagttcactatggagaagtcagcagcaggaggcccatcccttactcagttgccgggacatccccagtctcgggggaagaagatgccatgggcttatacccaggctgtagccaactaccaacgtgcctgtttgtttgttgctctttccttctctccatcatagtctgggtgccagcgccctgaagctccgtgctcaactgattaaactttactgccctatggtgaccatctagga

SEQ ID NO: 160038 - DNA, 727 bp, Homo sapiens
  Payload ID: 11299
  Gene Symbol: NCAPD3
  Gene Name: non-SMC condensin II complex, subunit D3
  ENST ID: ENST00000533155
  CDS Start-End: 16-243
cggtgccctgggatcatggtggcgttgcggggccttggtagcggcctgcagccctggtgtccgctggatcttagactcgaatgggttgacacagtgtgggaactggatttcacagagactgagcctttggatcccagcatagaagcagagatcatagagactggattggctgcattcacaaaactctatgaaagccttttaccctttgctactggagaacatggatctatggaggcagtgtagccaatcaagtattccacccagtgatgtttgacaaatgcattcagactctaaagaagagctggccccaggaatctaacttgaatcggaaaagaaagaaagaacagcctaagagctctcaggctaaccccgggaggcatagaaaaaggggaaagccacccaggagagaagatattgagatggatgaaattatagaagaacaagaagatgagaatatttgtttttctgcccgggacctttctcaaattcgaaatgccatctttcaccttttaaagaattttttaaggcttctgccaaagttttccttgaaagaaaagccacaatgtgtacagaattgtatagaggtctttgtttcattaactaattttgagccagttcttcatgaatgtcatgttacacaagccagagctcttaaccaagcaaaatacataccagaactggcttattatggattgtatttgctgtgctctcccattcatggagaagg

SEQ ID NO: 160039 - DNA, 537 bp, Homo sapiens
  Payload ID: 11299
  Gene Symbol: NCAPD3
  Gene Name: non-SMC condensin II complex, subunit D3
  ENST ID: ENST00000534227
  CDS Start-End: 433-537
agttgacaagcgactgtgacaggcctcgccggaggagctgggccctgaatcaccctgctccccggccggctgtcggcgctgggggagggggtcccgggggtcgactcaccgatctgcccgatgaactcgatcttgatgccctggtgctccagccgcttgttggggttcttgagggcaaggctcaccttcccggagaccgtctccccgtcgtagaagaggaaatatttctccttcttcccgtcctccgtcttgtgctcggcccgcttcctactctctgcatcgttcagaaggatttccacctccacgctctgcccgaagccgaagaagctcatcgcaccgccgggccgggcgggtctcggaacgactcggcgcgcgcgcgggagcgagctttgaaagttgagcacggcggcggcgagccggtgccctgggatcatggtggcgttgcggggccttggtagcggcctgcagccctggtgtccgctggatcttagactcgaatgggttgacacagtgtgggaactggatttcacagagact

SEQ ID NO: 160040 - DNA, 5025 bp, Homo sapiens
  Payload ID: 11299
  Gene Symbol: NCAPD3
  Gene Name: non-SMC condensin II complex, subunit D3
  ENST ID: ENST00000525964
  CDS Start-End: 291-2789
gcgggaaaaacgctgttagggtttaactcaggccctggctccttctcgaacgaattagcggaacacccgcaggagccttgtttggcttccacttttcggcccgcccagttctctgagcgtgcggcggacgacgccggtgattggttgagcgaatggaaacggctcggcgcggtggttggccagtgggaaattctgtacgttgtgattggtccacaggaacgactcggcgcgcgcgcgggagcgagctttgaaagttgagcacggcggcggcgagccggtgccctgggatcatggtggcgttgcggggccttggtagcggcctgcagccctggtgtccgctggatcttagactcgaatgggttgacacagtgtgggaactggatttcacagagactgagcctttggatcccagcatagaagcagagatcatagagactggattggctgcattcacaaaactctatgaaagccttttaccctttgctactggagaacatggatctatggagagtatctggaccttcttcattgagaacaatgtttcccatagtacactggtggcattgttctatcattttgttcaaatagttcataagaagaatgtcagtgtacagtatcgagaatatggccttcatgccgctgggctttactttttgctactagaagtaccaggcagtgtagccaatcaagtattccacccagtgatgtttgacaaatgcattcagactctaaagaagagctggccccaggaatctaacttgaatcggaaaagaaagaaagaacagcctaagagctctcaggctaaccccgggaggcatagaaaaaggggaaagccacccaggagagaagatattgagatggatgaaattatagaagaacaagaagatgagaatatttgtttttctgcccgggacctttctcaaattcgaaatgccatctttcaccttttaaagaattttttaaggcttctgccaaagttttccttgaaagaaaagccacaatgtgtacagaattgtatagaggtctttgtttcattaactaattttgagccagttcttcatgaatgtcatgttacacaagccagagctcttaaccaagcaaaatacataccagaactggcttattatggattgtatttgctgtgctctcccattcatggagaaggagataaggtcatcagttgtgttttccatcaaatgctcagtgtaatattaatgttagaagttggtgaaggatcccatcgtgccccccttgctgttacctcccaagtcatcaactgtagaaaccaggcggtccagtttatcagcgcccttgtggatgaattaaaggagagtatattcccagtcgtccgtatcttactgcagcacatctgtgccaaggtggtagataaatcagagtatcgtacttttgcagcccagtccctagtccagctgctcagtaaacttccttgtggggaatacgctatgttcattgcctggctttacaaatactcccgaagttccaagatcccacaccgggtttttactcttgatgttgtcttagctctgttagaactgcctgaaagagaggtggataacaccctctccttggagcatcagaagttcttaaagcataagttcctggtgcaggaaattatgtttgatcgttgcttagacaaggcgcctactgtccgcagcaaggcactgtccagctttgcacactgtctggagttgactgttaccagtgcgtcggagagtatcctggagctcctgattaacagtcctacgttttctgtaatagagagtcaccctggtaccttactgagaaattcatcagctttttcctaccaaaggcagacatctaaccgttccgaaccctcaggggagatcaacatagacagcagtggtgaaacagttggatctggagaaagatgtgtcatggcaatgctgagaaggaggatcagggatgagaagaccaacgttaggaagtctgcactgcaggtattagtgagtattttgaaacactgtgatgtctcaggcatgaaggaagacctgtggattctgcaggaccagtgtcgggaccctgcagtgtctgtccggaagcaggccctccagtctcttactgaactccttatggctcagcctagatgcgtgcagatccagaaagcctggttgcggggggtggtcccggtggtgatggactgcgagagcactgtgcaggagaaggccctggagttcctggaccagctgctgctgcagaacatccggcatcacagtcattttcactctggggacgacagccaggtcctcgcctgggcgcttcttactctcctcaccaccgaaagccaggaactgagccgatatttaaataaggcttttcatatctggtccaagaaagaaaaattctcacccacttttataaacaatgtaatatctcacactggcacggaacattcggcacctgcctggatgctgctctccaagattgctggctcctcacccaggctggactacagcagaataatacaatcttgggagaaaatcagcagtcagcagaatcccaattcaaacaccttaggacatattctctgtgtgattgggcatattgcaaagcatcttcctaagagcacccgggacaaagtgactgatgctgtcaagtgtaagctgaatggatttcagtggtctctagaggtgatcagttcagctgttgacgccttgcagaggctttgtagagcatctgcagagacaccagcagaggagcagcactggttggaaaaagaatcatgtgtacagcgcgcagtcagggcctaggaagtcatctgccgcttgctgctggcccagggccattaggacggtggttacattgtcatgagagcctatgaggaaggcaagaactgtcttcaggaattgctgacgcaggtgtgtggggatgtactctccacctgcgagcaccgcctctccaacatcgttctcaaggagaatggaacagggaatatggacgaagacctgttggtgaagtacatttttaccttaggggatatagcccagctgtgtccagccagggtggagaagcgcatcttccttctgattcagtccgtcctggcttcgtctgctgatgctgaccactcaccatcatctcaaggcagcagtgaggccccagcgtctcagccacccccccaggtcagaggttctgtcatgccctctgtgattagagcacatgccatcattaccttaggtaagctgtgcttacagcacgaggatctggcaaagaagagcatcccagccctggtgcgagagctcgaggtgtgtgaggacgtggctgtccgcaacaacgtcatcattgtaatgtgcgatctctgcattcgctacaccatcatggtggacaagtatattcccaacatctccatgtgtctgaaggattccgacccattcatccggaagcagacactcatcttgcttaccaatctcttgcaggaggaatttgtgaaatggaagggctccctgttcttccgatttgtcagcactctgatcgattcacacccagacattgccagcttcggggagttttgcctggctcacctgttactgaagaggaaccctgtcatgttcttccaacacttcattgaatgtatttttcactttaataactatgagaagcatgagaagtacaacaagttcccccagtcagagagagagaagcggctgttttcattgaagggaaagtcaaacaaagagagacgaatgaaaatctacaaatttcttctagagcacttcacagatgaacagcgattcaacatcacttccaaaatctgccttagtattttggcgtgctttgctgatggcatcctacccctggacctggacgccagtgagttactctcagacacgtttgaggtcctcagctcaaaggagatcaagcttttggcaatgagatctaaaccagacaaagacctccttatggaagaagatgacatggccttggcaaatgtagtcatgcaggaagctcagaagaagctcatctcacaagttcagaagaggaatttcatagaaaatattattccaattatcatctccctgaagactgtgctggagaaaaataagatcccagctttgcgggaactcatgcactatctcagggaggtgatgcaggattaccgagatgagctcaaggacttctttgcagttgacaaacagctggcatcagagcttgagtatgacatgaagaagtaccaggaacagctggtccaggagcaggagctagcaaaacatgcagatgtggccgggacggctggaggtgctgaggtggcacctgtggcacaggttgccctgtgtttagaaacagtgccagttcctgctggccaagaaaaccctgccatgtcacctgccgtgagccagccctgcacacccagggcaagtgctggccatgtagcagtatcatctcctacacctgaaacagggccattgcagaggttgctgcccaaagccaggcccatgtccctgagcaccattgcaatcctgaattctgtcaagaaagccgtggagtcaaagagcaggcatcggagtcggagcttaggagtgctgcctttcactttaaattctggaagcccagaaaaaacgtgcagtcaggtgtcttcatacagtttggagcaagagtcgaatggcgagattgagcacgtgaccaagcgggccatcagcacccccgagaagagcatcagtgatgtcacgtttggagcaggggtcagttacatcgggacaccacggactccgtcgtcagccaaagagaaaattgaaggccggagtcaaggaaatgacatcttatgtttatcactgcctgataaaccgcccccacagcctcagcagtggaatgtgcggtctcccgccaggaataaagacactccagcctgcagcaggaggtccctccgaaagacccctctgaaaacagccaactaaacagcgcctcccaccagtgtccaggcaggcaggagcccttgaggaagcagtctcgtgtcctccgtgtgaaggcagctggatcacttcccgcagtcct

SEQ ID NO: 160041 - DNA, 773 bp, Homo sapiens
  Payload ID: 11299
  Gene Symbol: NCAPD3
  Gene Name: non-SMC condensin II complex, subunit D3
  ENST ID: ENST00000527944
  CDS Start-End: 190-773
ttgggtaagcccagtgtgtgtgggagaaaatgtgtgtgtttgcaaatgaaatgctgtgttgataatggcccagcaggcctctagtaagggagaccctggcactgcaggaagacccctgtcatcttgtccttctctggcatcagctgtgccccagacaaaacacccttgcagaccccctgacagcctcagatggccccccagttgtgggaattacacctcctctctgggccagagcatttctcagaagctcacgtttttctctctctctgtctctcagcgtgctttgctgatggcatcctacccctggacctggacgccagtgagttactctcagacacgtttgaggtcctcagctcaaaggagatcaagcttttggcaatgagatctaaaccagacaaagacctccttatggaagaagatgacatggccttggcaaatgtagtcatgcaggaagctcagaagaagctcatctcacaagttcagaagaggaatttcatagaaaatattattccaattatcatctccctgaagactgtgctggagaaaaataagatcccagctttgcgggaactcatgcactatctcagggaggtgatgcaggattaccgagatgagctcaaggacttctttgcagttgacaaacagctggcatcagagcttgagtatgacatgaagaagtaccaggaacagctggtccaggagcaggagctagcaaaacatgcagatgtggccgggacggctggaggtgctgaggtggcacctgtggcacaggt

SEQ ID NO: 160042 - DNA, 5061 bp, Homo sapiens
  Payload ID: 11299
  Gene Symbol: NCAPD3
  Gene Name: non-SMC condensin II complex, subunit D3
  Uniprot ID: P42695
  ENST ID: ENST00000534548
  CDS Start-End: 66-4562
ggcgcgcgcgcgggagcgagctttgaaagttgagcacggcggcggcgagccggtgccctgggatcatggtggcgttgcggggccttggtagcggcctgcagccctggtgtccgctggatcttagactcgaatgggttgacacagtgtgggaactggatttcacagagactgagcctttggatcccagcatagaagcagagatcatagagactggattggctgcattcacaaaactctatgaaagccttttaccctttgctactggagaacatggatctatggagagtatctggaccttcttcattgagaacaatgtttcccatagtacactggtggcattgttctatcattttgttcaaatagttcataagaagaatgtcagtgtacagtatcgagaatatggccttcatgccgctgggctttactttttgctactagaagtaccaggcagtgtagccaatcaagtattccacccagtgatgtttgacaaatgcattcagactctaaagaagagctggccccaggaatctaacttgaatcggaaaagaaagaaagaacagcctaagagctctcaggctaaccccgggaggcatagaaaaaggggaaagccacccaggagagaagatattgagatggatgaaattatagaagaacaagaagatgagaatatttgtttttctgcccgggacctttctcaaattcgaaatgccatctttcaccttttaaagaattttttaaggcttctgccaaagttttccttgaaagaaaagccacaatgtgtacagaattgtatagaggtctttgtttcattaactaattttgagccagttcttcatgaatgtcatgttacacaagccagagctcttaaccaagcaaaatacataccagaactggcttattatggattgtatttgctgtgctctcccattcatggagaaggagataaggtcatcagttgtgttttccatcaaatgctcagtgtaatattaatgttagaagttggtgaaggatcccatcgtgccccccttgctgttacctcccaagtcatcaactgtagaaaccaggcggtccagtttatcagcgcccttgtggatgaattaaaggagagtatattcccagtcgtccgtatcttactgcagcacatctgtgccaaggtggtagataaatcagagtatcgtacttttgcagcccagtccctagtccagctgctcagtaaacttccttgtggggaatacgctatgttcattgcctggctttacaaatactcccgaagttccaagatcccacaccgggtttttactcttgatgttgtcttagctctgttagaactgcctgaaagagaggtggataacaccctctccttggagcatcagaagttcttaaagcataagttcctggtgcaggaaattatgtttgatcgttgcttagacaaggcgcctactgtccgcagcaaggcactgtccagctttgcacactgtctggagttgactgttaccagtgcgtcggagagtatcctggagctcctgattaacagtcctacgttttctgtaatagagagtcaccctggtaccttactgagaaattcatcagctttttcctaccaaaggcagacatctaaccgttccgaaccctcaggggagatcaacatagacagcagtggtgaaacagttggatctggagaaagatgtgtcatggcaatgctgagaaggaggatcagggatgagaagaccaacgttaggaagtctgcactgcaggtattagtgagtattttgaaacactgtgatgtctcaggcatgaaggaagacctgtggattctgcaggaccagtgtcgggaccctgcagtgtctgtccggaagcaggccctccagtctcttactgaactccttatggctcagcctagatgcgtgcagatccagaaagcctggttgcggggggtggtcccggtggtgatggactgcgagagcactgtgcaggagaaggccctggagttcctggaccagctgctgctgcagaacatccggcatcacagtcattttcactctggggacgacagccaggtcctcgcctgggcgcttcttactctcctcaccaccgaaagccaggaactgagccgatatttaaataaggcttttcatatctggtccaagaaagaaaaattctcacccacttttataaacaatgtaatatctcacactggcacggaacattcggcacctgcctggatgctgctctccaagattgctggctcctcacccaggctggactacagcagaataatacaatcttgggagaaaatcagcagtcagcagaatcccaattcaaacaccttaggacatattctctgtgtgattgggcatattgcaaagcatcttcctaagagcacccgggacaaagtgactgatgctgtcaagtgtaagctgaatggatttcagtggtctctagaggtgatcagttcagctgttgacgccttgcagaggctttgtagagcatctgcagagacaccagcagaggagcaggaattgctgacgcaggtgtgtggggatgtactctccacctgcgagcaccgcctctccaacatcgttctcaaggagaatggaacagggaatatggacgaagacctgttggtgaagtacatttttaccttaggggatatagcccagctgtgtccagccagggtggagaagcgcatcttccttctgattcagtccgtcctggcttcgtctgctgatgctgaccactcaccatcatctcaaggcagcagtgaggccccagcgtctcagccacccccccaggtcagaggttctgtcatgccctctgtgattagagcacatgccatcattaccttaggtaagctgtgcttacagcacgaggatctggcaaagaagagcatcccagccctggtgcgagagctcgaggtgtgtgaggacgtggctgtccgcaacaacgtcatcattgtaatgtgcgatctctgcattcgctacaccatcatggtggacaagtatattcccaacatctccatgtgtctgaaggattccgacccattcatccggaagcagacactcatcttgcttaccaatctcttgcaggaggaatttgtgaaatggaagggctccctgttcttccgatttgtcagcactctgatcgattcacacccagacattgccagcttcggggagttttgcctggctcacctgttactgaagaggaaccctgtcatgttcttccaacacttcattgaatgtatttttcactttaataactatgagaagcatgagaagtacaacaagttcccccagtcagagagagagaagcggctgttttcattgaagggaaagtcaaacaaagagagacgaatgaaaatctacaaatttcttctagagcacttcacagatgaacagcgattcaacatcacttccaaaatctgccttagtattttggcgtgctttgctgatggcatcctacccctggacctggacgccagtgagttactctcagacacgtttgaggtcctcagctcaaaggagatcaagcttttggcaatgagatctaaaccagacaaagacctccttatggaagaagatgacatggccttggcaaatgtagtcatgcaggaagctcagaagaagctcatctcacaagttcagaagaggaatttcatagaaaatattattccaattatcatctccctgaagactgtgctggagaaaaataagatcccagctttgcgggaactcatgcactatctcagggaggtgatgcaggattaccgagatgagctcaaggacttctttgcagttgacaaacagctggcatcagagcttgagtatgacatgaagaagtaccaggaacagctggtccaggagcaggagctagcaaaacatgcagatgtggccgggacggctggaggtgctgaggtggcacctgtggcacaggttgccctgtgtttagaaacagtgccagttcctgctggccaagaaaaccctgccatgtcacctgccgtgagccagccctgcacacccagggcaagtgctggccatgtagcagtatcatctcctacacctgaaacagggccattgcagaggttgctgcccaaagccaggcccatgtccctgagcaccattgcaatcctgaattctgtcaagaaagccgtggagtcaaagagcaggcatcggagtcggagcttaggagtgctgcctttcactttaaattctggaagcccagaaaaaacgtgcagtcaggtgtcttcatacagtttggagcaagagtcgaatggcgagattgagcacgtgaccaagcgggccatcagcacccccgagaagagcatcagtgatgtcacgtttggagcaggggtcagttacatcgggacaccacggactccgtcgtcagccaaagagaaaattgaaggccggagtcaaggaaatgacatcttatgtttatcactgcctgataaaccgcccccacagcctcagcagtggaatgtgcggtctcccgccaggaataaagacactccagcctgcagcaggaggtccctccgaaagacccctctgaaaacagccaactaaacagcgcctcccaccagtgtccaggcaggcaggagcccttgaggaagcagtctcgtgtcctccgtgtgaaggcagctggatcacttcccgcagtccttgggcagcgctttgctgtggaacacgagagctcctcctcaggggcctggcactcaccttctattctgtatgatgtatttggttaaacactgtcaaataatagagatgtgccagatttagattttcttaccctaatctgtttaatattgtaactttattccatttgaaagtgtcaagcccattcagataagctataatctggtctttaaggaacacaactttaaaactgcagctttcttttatataaatcaagcctctgttaacttgaattccttatagtacatattttcccatctgtaatgacgaaattttgattctaatattttttctattatttataagtgcaaattttttaaaaaagtgtacagctttctaaaagtaataaaggtttagcataaataca

SEQ ID NO: 160043 - DNA, 5539 bp, Homo sapiens
  Payload ID: 11299
  Gene Symbol: NCAPD3
  Gene Name: non-SMC condensin II complex, subunit D3
  ENST ID: ENST00000534532
  CDS Start-End: 607-3861
gctccagcggtcggcatggcagctgctacctcgctgggacaggctctgggcccacgcgtgccgcgcagtccctacagaactgcagttgtcttgtcttctcggagtgctttcggctacttttcccttattactttagctcgatacacgttgggctgcctttcacattcggatattacgctgttcgagtgctgacgggaaaggcagccctttgacacgcacgcgaaatgtcgcctgacgagggcaaaggtgacagttactaccggaagtaccctatctcagataccctttagattttcccccattgaagaaaaacgaggcgggaaaaacgctgttagggtttaactcaggccctggctccttctcgaacgaattagcggaacacccgcaggagccttgtttggcttccacttttcggcccgcccagttctctgagcgtgcggcggacgacgccggtgattggttgagcgaatggaaacggctcggcgcggtggttggccagtgggaaattctgtacgttgtgattggtccacaggaacgactcggcgcgcgcgcgggagcgagctttgaaagttgagcacggcggcggcgagccggtgccctgggatcatggtggcgttgcggggccttggtagcggcctgcagccctggtgtccgctggatcttagactcgaatgggttgacacagtgtgggaactggatttcacagagactgagcctttggatcccagcatagaagcagagatcatagagactggattggctgcattcacaaaactctatgaaagccttttaccctttgctactggagaacatggatctatggagagtatctggaccttcttcattgagaacaatgtttcccatagtacactggtggcattgttctatcattttgttcaaatagttcataagaagaatgtcagtgtacagtatcgagaatatggccttcatgccgctgggctttactttttgctactagaagtaccaggcagtgtagccaatcaagtattccacccagtgatgtttgacaaatgcattcagactctaaagaagagctggccccaggaatctaacttgaatcggaaaagaaagaaagaacagcctaagagctctcaggctaaccccgggaggcatagaaaaaggggaaagccacccaggagagaagatattgagatggatgaaattatagaagaacaagaagatgagaatatttgtttttctgcccgggacctttctcaaattcgaaatgccatctttcaccttttaaagaattttttaaggcttctgccaaagttttccttgaaagaaaagccacaatgtgtacagaattgtatagaggtctttgtttcattaactaattttgagccagttcttcatgaatgtcatgttacacaagccagagctcttaaccaagcaaaatacataccagaactggcttattatggattgtatttgctgtgctctcccattcatggagaaggagataaggtcatcagttgtgttttccatcaaatgctcagtgtaatattaatgttagaagttggtgaaggatcccatcgtgccccccttgctgttacctcccaagtcatcaactgtagaaaccaggcggtccagtttatcagcgcccttgtggatgaattaaaggagagtatattcccagtcgtccgtatcttactgcagcacatctgtgccaaggtggtagataaatcagagtatcgtacttttgcagcccagtccctagtccagctgctcagtaaacttccttgtggggaatacgctatgttcattgcctggctttacaaatactcccgaagttccaagatcccacaccgggtttttactcttgatgttgtcttagctctgttagaactgcctgaaagagaggtggataacaccctctccttggagcatcagaagttcttaaagcataagttcctggtgcaggaaattatgtttgatcgttgcttagacaaggcgcctactgtccgcagcaaggcactgtccagctttgcacactgtctggagttgactgttaccagtgcgtcggagagtatcctggagctcctgattaacagtcctacgttttctgtaatagagagtcaccctggtaccttactgagaaattcatcagctttttcctaccaaaggcagacatctaaccgttccgaaccctcaggggagatcaacatagacagcagtggtgaaacagttggatctggagaaagatgtgtcatggcaatgctgagaaggaggatcagggatgagaagaccaacgttaggaagtctgcactgcaggtattagtgagtattttgaaacactgtgatgtctcaggcatgaaggaagacctgtggattctgcaggaccagtgtcgggaccctgcagtgtctgtccggaagcaggccctccagtctcttactgaactccttatggctcagcctagatgcgtgcagatccagaaagcctggttgcggggggtggtcccggtggtgatggactgcgagagcactgtgcaggagaaggccctggagttcctggaccagctgctgctgcagaacatccggcatcacagtcattttcactctggggacgacagccaggtcctcgcctgggcgcttcttactctcctcaccaccgaaagccaggaactgagccgatatttaaataaggcttttcatatctggtccaagaaagaaaaattctcacccacttttataaacaatgtaatatctcacactggcacggaacattcggcacctgcctggatgctgctctccaagattgctggctcctcacccaggctggactacagcagaataatacaatcttgggagaaaatcagcagtcagcagaatcccaattcaaacaccttaggacatattctctgtgtgattgggcatattgcaaagcatcttcctaagagcacccgggacaaagtgactgatgctgtcaagtgtaagctgaatggatttcagtggtctctagaggtgatcagttcagctgttgacgccttgcagaggctttgtagagcatctgcagagacaccagcagaggagcaggaattgctgacgcaggtgtgtggggatgtactctccacctgcgagcaccgcctctccaacatcgttctcaaggagaatggaacagggaatatggacgaagacctgttggtgaagtacatttttaccttaggggatatagcccagctgtgtccagccagggtggagaagcgcatcttccttctgattcagtccgtcctggcttcgtctgctgatgctgaccactcaccatcatctcaaggcagcagtgaggccccagcgtctcagccacccccccaggtcagaggttctgtcatgccctctgtgattagagcacatgccatcattaccttaggtaagctgtgcttacagcacgaggatctggcaaagaagagcatcccagccctggtgcgagagctcgaggtgtgtgaggacgtggctgtccgcaacaacgtcatcattgtaatgtgcgatctctgcattcgctacaccatcatggtggacaagtatattcccaacatctccatgtgtctgaaggattccgacccattcatccggaagcagacactcatcttgcttaccaatctcttgcaggaggaatttgtgaaatggaagggctccctgttcttccgatttgtcagcactctgatcgattcacacccagacattgccagcttcggggagttttgcctggctcacctgttactgaagaggaaccctgtcatgttcttccaacacttcattgaatgtatttttcactttaataactatgagaagcatgagaagtacaacaagttcccccagtcagagagagcacttcacagatgaacagcgattcaacatcacttccaaaatctgccttagtattttggcgtgctttgctgatggcatcctacccctggacctggacgccagtgagttactctcagacacgtttgaggtcctcagctcaaaggagatcaagcttttggcaatgagatctaaaccagacaaagacctccttatggaagaagatgacatggccttggcaaatgtagtcatgcaggaagctcagaagaagctcatctcacaagttcagaagaggaatttcatagaaaatattattccaattatcatctccctgaagactgtgctggagaaaaataagatcccagctttgcgggaactcatgcactatctcagggaggtgatgcaggattaccgagatgagctcaaggacttctttgcagttgacaaacagctggcatcagagcttgagtatgacatgaagaagtaccaggaacagctggtccaggagcaggagctagcaaaacatgcagatgtggccgggacggctggaggtgctgaggtggcacctgtggcacaggttgccctgtgtttagaaacagtgccagttcctgctggccaagaaaaccctgccatgtcacctgccgtgagccagccctgcacacccagggcaagtgctggccatgtagcagtatcatctcctacacctgaaacagggccattgcagaggttgctgcccaaagccaggcccatgtccctgagcaccattgcaatcctgaattctgtcaagaaagccgtggagtcaaagagcaggcatcggagtcggagcttaggagtgctgcctttcactttaaattctggaagcccagaaaaaacgtgcagtcaggtgtcttcatacagtttggagcaagagtcgaatggcgagattgagcacgtgaccaagcgggccatcagcacccccgagaagagcatcagtgatgtcacgtttggagcaggggtcagttacatcgggacaccacggactccgtcgtcagccaaagagaaaattgaaggccggagtcaaggaaatgacatcttatgtttatcactgcctgataaaccgcccccacagcctcagcagtggaatgtgcggtctcccgccaggaataaagacactccagcctgcagcaggaggtccctccgaaagacccctctgaaaacagccaactaaacagcgcctcccaccagtgtccaggcaggcaggagcccttgaggaagcagtctcgtgtcctccgtgtgaaggcagctggatcacttcccgcagtccttgggcagcgctttgctgtggaacacgagagctcctcctcaggggcctggcactcaccttctattctgtatgatgtatttggttaaacactgtcaaataatagagatgtgccagatttagattttcttaccctaatctgtttaatattgtaactttattccatttgaaagtgtcaagcccattcagataagctataatctggtctttaaggaacacaactttaaaactgcagctttcttttatataaatcaagcctctgttaacttgaattccttatagtacatattttcccatctgtaatgacgaaattttgattctaatattttttctattatttataagtgcaaattttttaaaaaagtgtacagctttctaaaagtaataaaggtttagcataaatacagccttccagta

SEQ ID NO: 160044 - DNA, 1521 bp, Homo sapiens
  Payload ID: 11299
  Gene Symbol: NCAPD3
  Gene Name: non-SMC condensin II complex, subunit D3
  ENST ID: ENST00000530396
  CDS Start-End: 729-1521
tttgtttttttatttttcctttagtgtgagtgtatatttcatgctacctaagttattaatttttttgtaatattagttatttttcaaatacctaagaattgcaaaacatttcccaggcacaaaagaaacatacaaacaaaactcagcagccttttcaactatgaacaagaaagaaagaaagaaagaaagaaaggggacatgcattctttcctatttacccagctcagatttcaaattcagcatgggtatttagcatctgtagaggatatgtataatcaggagtaaaatgtttcacctctcaggctttgctgatcattttccaggtaaggggataactgcgaaattcaaatgttgactttaaaaggaagatgattttattagtgtaaaggaacatcccatagtatataactcctggggagtttatttctccttaggtatttttattcgactattcaagatgggtctgtctgcctttagttttttgttgtttgtgattgtgggcatgatgttttaactttgatgaaatagaagccattagcaagatgtatctggagaaaatttaggaatggaattaggatttagaatacagttgagacatcttcctgtcttctgtgccaggtaagctgtgcttacagcacgaggatctggcaaagaagagcatcccagccctggtgcgagagctcgaggtgtgtgaggacgtggctgtccgcaacaacgtcatcattgtaatgtgcgatctctgcattcgctacaccatcatggtggacaagtatattcccaacatctccatgtgtctgaaggattccgacccattcatccggaagcagacactcatcttgcttaccaatctcttgcaggaggaatttgtgaaatggaagggctccctgttcttccgatttgtcagcactctgatcgattcacacccagacattgccagcttcggggagttttgcctggctcacctgttactgaagaggaaccctgtcatgttcttccaacacttcattgaatgtatttttcactttaataactatgagaagcatgagaagtacaacaagttcccccagtcagagagagagaagcggctgttttcattgaagggaaagtcaaacaaagagagacgaatgaaaatctacaaatttcttctagagcacttcacagatgaacagcgattcaacatcacttccaaaatctgccttagtattttggcgtgctttgctgatggcatcctacccctggacctggacgccagtgagttactctcagacacgtttgaggtcctcagctcaaaggagatcaagcttttggcaatgagatctaaaccagacaaagacctccttatggaagaagatgacatggccttggcaaatgtagtcatgcaggaagctcagaagaagctcatctcacaagttcagaagaggaatttcatagaaaatattattccaattatcatctccctgaagactgtgctggagaaaaataagatcccagctttgcgggaactcatgcactatctcaggg

SEQ ID NO: 160045 - DNA, 1060 bp, Homo sapiens
  Payload ID: 11299
  Gene Symbol: NCAPD3
  Gene Name: non-SMC condensin II complex, subunit D3
  ENST ID: ENST00000526422
  CDS Start-End: 607-720
gctccagcggtcggcatggcagctgctacctcgctgggacaggctctgggcccacgcgtgccgcgcagtccctacagaactgcagttgtcttgtcttctcggagtgctttcggctacttttcccttattactttagctcgatacacgttgggctgcctttcacattcggatattacgctgttcgagtgctgacgggaaaggcagccctttgacacgcacgcgaaatgtcgcctgacgagggcaaaggtgacagttactaccggaagtaccctatctcagataccctttagattttcccccattgaagaaaaacgaggcgggaaaaacgctgttagggtttaactcaggccctggctccttctcgaacgaattagcggaacacccgcaggagccttgtttggcttccacttttcggcccgcccagttctctgagcgtgcggcggacgacgccggtgattggttgagcgaatggaaacggctcggcgcggtggttggccagtgggaaattctgtacgttgtgattggtccacaggaacgactcggcgcgcgcgcgggagcgagctttgaaagttgagcacggcggcggcgagccggtgccctgggatcatggtggcgttgcggggccttggtagcggcctgcagccctggtgtccgctggatcttagactcggttccactggatgtctcacatgcagacatcatcaaacgtcacatgagtgaaaatgggattcccaaagcctgctaatggcaccatccaagccaccaacccaggagtcatggcatttctgcttcccctttcatgcccactaccactgtcctgcctctgaggtgtctcagggcagccccgctccattcctgatgctgctgccttcatcatagcctcgagcaattgcaggagtattttagctgctttctgatgttaactgtgccagcccatcccccacacttttgcagaacgacttttgaaaacacagctttgaatgtgtcaagcctgtacacctttaatgtttcccctttgtttcctaaataaatgaccacatccttggcatgctttataaga

SEQ ID NO: 160046 - DNA, 532 bp, Homo sapiens
  Payload ID: 11299
  Gene Symbol: NCAPD3
  Gene Name: non-SMC condensin II complex, subunit D3
  ENST ID: ENST00000532445
  CDS Start-End: 433-532
agttgacaagcgactgtgacaggcctcgccggaggagctgggccctgaatcaccctgctccccggccggctgtcggcgctgggggagggggtcccgggggtcgactcaccgatctgcccgatgaactcgatcttgatgccctggtgctccagccgcttgttggggttcttgagggcaaggctcaccttcccggagaccgtctccccgtcgtagaagaggaaatatttctccttcttcccgtcctccgtcttgtgctcggcccgcttcctactctctgcatcgttcagaaggatttccacctccacgctctgcccgaagccgaagaagctcatcgcaccgccgggccgggcgggtctcggaacgactcggcgcgcgcgcgggagcgagctttgaaagttgagcacggcggcggcgagccggtgccctgggatcatggtggcgttgcggggccttggtagcggcctgcagccctggtgtccgctggatcttagactcggttccactggatgtctcacatgcagacatcatcaaa

SEQ ID NO: 160047 - DNA, 555 bp, Homo sapiens
  Payload ID: 11299
  Gene Symbol: NCAPD3
  Gene Name: non-SMC condensin II complex, subunit D3
  ENST ID: ENST00000525485
  CDS Start-End: 334-555
gagcgcggccggcgctccagcggtcggcatggcagctgctacctcgctgggacaggctctgggcccacgcgtgccgcgcagtccctacagaactgcagttgtcttgtcttctcggagtgctttcggctacttttcccttattactttagctcgatacacgttgggctgcctttcacattcggatattacgctgttcgagtgctgacgggaaaggcagccctttgacacgcacgcgaaatgtcgcctgacgagggcaaaggaacgactcggcgcgcgcgcgggagcgagctttgaaagttgagcacggcggcggcgagccggtgccctgggatcatggtggcgttgcggggccttggtagcggcctgcagccctggtgtccgctggatcttagactcgaatgggttgacacagtgtgggaactggatttcacagagactgagcctttggatcccagcatagaagcagagatcatagagactggattggctgcattcacaaaactctatgaaagccttttaccctttgctactggagaacatggatctatggaggta

SEQ ID NO: 160048 - DNA, 3930 bp, Homo sapiens
  Payload ID: 11300
  Gene Symbol: NCAPG2
  Gene Name: non-SMC condensin II complex, subunit G2
  Uniprot ID: Q86XI2
  ENST ID: ENST00000356309
  CDS Start-End: 146-3577
gagagcggcgcctgatgacgaccgggagggcggggcccgtctggggcgccggcgggtgcgtttgaatctggtccgagcgcgggaaacggcgggtccccgagcccagggttacaaaataaatgccatttgaacagtgccatctgtcatggaaaaacgtgagacgtttgtacaagccgtgtctaaggagctggttggagagtttttgcaatttgttcaacttgataaagaggcctctgatcctttcagcctaaatgaattactagatgaattatcaaggaaacagaaagaagaattatggcaaaggctgaagaatttattgacagatgtgttgttagaaagcccagtggatgggtggcaggtagtggaagcccagggtgaagacaatatggaaaccgaacatggctcaaaaatgagaaaaagcatagaaataatttatgcaattacatctgtgattcttgcttctgtgtctgtaataaatgaaagtgagaactacgaagccctactggaatgtgttattatattaaatggtattttatatgcattacctgagtctgaacgaaaactacagagttctattcaggatttgtgtgttacctggtgggagaaaggcctgcctgccaaggaagacacaggaaagacagcctttgtcatgttactaaggaggagtctggagactaagacaggtgcagacgtatgtcggctttggcgtatccatcaagctttatattgctttgattatgatttggaggaaagtggagaaattaaagatatgttacttgagtgcttcataaatattaattatatcaagaaagaagagggaagaagatttcttagttgtctcttcaactggaatatcaacttcatcaaaatgatccacgggaccattaaaaaccagttacagggattacaaaagtctttgatggtatacattgcagaaatttatttcagagcttggaaaaaggcttcagggaaaatactggaggcgattgaaaatgattgcatccaggacttcatgttccacgggatacaccttccgaggaggtctccagtgcattccaaagtgcgggaggttctgagttactttcaccatcaaaagaaagttcggcagggagtggaagagatgctttatagattatataagcccatcctttggagaggattaaaggccagaaactctgaagttcgatcaaatgctgcattgttgtttgttgaagcatttcctattagggatccaaaccttcatgctattgaaatggatagtgaaatccagaaacagtttgaagagctctatagccttttagaagatccttacccgatggtccgttccacagggatccttggtgtttgtaaaataacttctaagtactgggaaatgatgcccccgaccattcttattgacctcctgaagaaggtgactggggaactggcatttgacacgagctcagctgatgttcgttgttctgtctttaagtgtctgccaatgattttggacaacaaactgagccacccattgttagagcagctccttccagctctcagatacagtctccacgacaattcggagaaagtgagggtagcttttgtggacatgctgttgaagatcaaagctgtgagggctgctaagttttggaaaatatgtcccatggagcacattctggttcgtctggaaactgattctcgacctgtgtctcggcgcctggtgagcctcatctttaattctttcctgcctgtgaatcagccggaggaggtctggtgcgagcgctgtgtcaccctggtgcagatgaaccacgccgctgccaggaggttctatcagtacgcccacgaacacaccgcctgcaccaacatagcaaagctgattcacgttattcgtcattgcttaaatgcctgtatccagagggcagtgagagagcctccagaggacgaggaggaagaggacggaagggagaaggagaatgtgactgttctggacaaaacactgtcagtaaacgatgttgcatgcatggcaggtttactagaaatcattgtgattctctggaaaagtattgacagaagtatggaaaataataaagaggccaaactttacacgattaacaagtttgcctctgtgcttccagagtatctgaaagtatttaaggatgatcgctgcaagatccctttattcatgctaatgtcctttatgccggcctctgctgtccccccattcagctgtggtgtgatttccacgctgagaagccgggaggagggcgctgtggacaagagctactgcactttgttggattgcctctgctcctgggggcaggtggggcacattctggagcttgttgacaactggctgcccacagagcatgcccaggccaagagcaacacagcttctaaaggtagggtgcagatccatgacacacgcccagtcaaacctgaattggcattggtctacattgagtatctgctgactcatccaaagaaccgcgagtgcttgctctctgctcctcggaagaaacttaaccatcttttgaaagcccttgaaacgtcaaaggcagatctggagtcacttctgcagacaccgggtgggaagcctcgtggcttcagtgaagcagctgccccgcgagcctttggtctccactgtcgcctgagcatccatcttcagcacaagttctgctcagaaggaaaggtgtatttgtccatgttggaagacactggcttttggttagaaagcaaaattttatcttttattcaagatcaagaagaagactacctgaagcttcatagggtcatttatcagcaaattatccagacctacctgactgtgtgtaaagatgttgttatggtaggccttggtgaccatcagtttcagatgcaactcttacagcggagtcttggaatcatgcaaacagtgaagggatttttttatgtttcattacttcttgacattctgaaagagataactggaagttccttgattcagaaaacagattcagatgaagaagttgcaatgctgttggacacagtccagaaagtatttcagaaaatgttggaatgtattgcacggagcttcaggaagcagccggaagaaggcctgcggctgctttattctgttcagaggcctcttcatgagttcattactgctgttcagtctcggcacacagacacccctgtgcaccggggtgtactttctactctgatcgctgggcctgtggttgagataagtcaccagctacggaaggtttctgacgtagaagagcttacccctccagagcatctttctgatcttccaccattttcaaggtgtttaataggaataataataaagtcttcgaatgtggtcaggtcatttttggatgaattaaaggcatgtgtggcttctaatgatattgaaggcattgtgtgcctcacggctgctgtgcatattatcctggttattaatgcaggtaaacataaaagctcaaaagtgagggaggttgcagccactgttcacagaaaactaaagacattcatggaaattactttggaagaggatagcattgaaagatttctctatgaatcatcatcaagaactctgggagaacttttgaattcataaccaagccaacatctccagacatgtaaaaatagggaaaagtgattcaaattgaaatgcctgtgtattttcctattgtttttaatgttaataacccatataatagggaaagggtgggatttttttgtgggaatgtgggaaggtgggggttatggaggagataactcaaaacttcttcaattttgcctagtgcctgcgtaaataatatatttaatataaaggactccaggtatgaatggtgtagaaatccatgattccaagaaaaaacacttttctagcaaacctggttgtttttaaaatgacttttatatatgtaatattgcttggaaactatgagtaataaagcaatgacaaca

SEQ ID NO: 160049 - DNA, 3957 bp, Homo sapiens
  Payload ID: 11300
  Gene Symbol: NCAPG2
  Gene Name: non-SMC condensin II complex, subunit G2
  Uniprot ID: Q86XI2
  ENST ID: ENST00000409423
  CDS Start-End: 174-3605
gagggcggggcccgtctggggcgccggcgggtgcgtttgaatctggtccgagcgcgggaaacggcgggtccccgagcccagtaccagacctcctgtgcgaagagtaacctgctcttcggactgataactggatgggttacaaaataaatgccatttgaacagtgccatctgtcatggaaaaacgtgagacgtttgtacaagccgtgtctaaggagctggttggagagtttttgcaatttgttcaacttgataaagaggcctctgatcctttcagcctaaatgaattactagatgaattatcaaggaaacagaaagaagaattatggcaaaggctgaagaatttattgacagatgtgttgttagaaagcccagtggatgggtggcaggtagtggaagcccagggtgaagacaatatggaaaccgaacatggctcaaaaatgagaaaaagcatagaaataatttatgcaattacatctgtgattcttgcttctgtgtctgtaataaatgaaagtgagaactacgaagccctactggaatgtgttattatattaaatggtattttatatgcattacctgagtctgaacgaaaactacagagttctattcaggatttgtgtgttacctggtgggagaaaggcctgcctgccaaggaagacacaggaaagacagcctttgtcatgttactaaggaggagtctggagactaagacaggtgcagacgtatgtcggctttggcgtatccatcaagctttatattgctttgattatgatttggaggaaagtggagaaattaaagatatgttacttgagtgcttcataaatattaattatatcaagaaagaagagggaagaagatttcttagttgtctcttcaactggaatatcaacttcatcaaaatgatccacgggaccattaaaaaccagttacagggattacaaaagtctttgatggtatacattgcagaaatttatttcagagcttggaaaaaggcttcagggaaaatactggaggcgattgaaaatgattgcatccaggacttcatgttccacgggatacaccttccgaggaggtctccagtgcattccaaagtgcgggaggttctgagttactttcaccatcaaaagaaagttcggcagggagtggaagagatgctttatagattatataagcccatcctttggagaggattaaaggccagaaactctgaagttcgatcaaatgctgcattgttgtttgttgaagcatttcctattagggatccaaaccttcatgctattgaaatggatagtgaaatccagaaacagtttgaagagctctatagccttttagaagatccttacccgatggtccgttccacagggatccttggtgtttgtaaaataacttctaagtactgggaaatgatgcccccgaccattcttattgacctcctgaagaaggtgactggggaactggcatttgacacgagctcagctgatgttcgttgttctgtctttaagtgtctgccaatgattttggacaacaaactgagccacccattgttagagcagctccttccagctctcagatacagtctccacgacaattcggagaaagtgagggtagcttttgtggacatgctgttgaagatcaaagctgtgagggctgctaagttttggaaaatatgtcccatggagcacattctggttcgtctggaaactgattctcgacctgtgtctcggcgcctggtgagcctcatctttaattctttcctgcctgtgaatcagccggaggaggtctggtgcgagcgctgtgtcaccctggtgcagatgaaccacgccgctgccaggaggttctatcagtacgcccacgaacacaccgcctgcaccaacatagcaaagctgattcacgttattcgtcattgcttaaatgcctgtatccagagggcagtgagagagcctccagaggacgaggaggaagaggacggaagggagaaggagaatgtgactgttctggacaaaacactgtcagtaaacgatgttgcatgcatggcaggtttactagaaatcattgtgattctctggaaaagtattgacagaagtatggaaaataataaagaggccaaactttacacgattaacaagtttgcctctgtgcttccagagtatctgaaagtatttaaggatgatcgctgcaagatccctttattcatgctaatgtcctttatgccggcctctgctgtccccccattcagctgtggtgtgatttccacgctgagaagccgggaggagggcgctgtggacaagagctactgcactttgttggattgcctctgctcctgggggcaggtggggcacattctggagcttgttgacaactggctgcccacagagcatgcccaggccaagagcaacacagcttctaaaggtagggtgcagatccatgacacacgcccagtcaaacctgaattggcattggtctacattgagtatctgctgactcatccaaagaaccgcgagtgcttgctctctgctcctcggaagaaacttaaccatcttttgaaagcccttgaaacgtcaaaggcagatctggagtcacttctgcagacaccgggtgggaagcctcgtggcttcagtgaagcagctgccccgcgagcctttggtctccactgtcgcctgagcatccatcttcagcacaagttctgctcagaaggaaaggtgtatttgtccatgttggaagacactggcttttggttagaaagcaaaattttatcttttattcaagatcaagaagaagactacctgaagcttcatagggtcatttatcagcaaattatccagacctacctgactgtgtgtaaagatgttgttatggtaggccttggtgaccatcagtttcagatgcaactcttacagcggagtcttggaatcatgcaaacagtgaagggatttttttatgtttcattacttcttgacattctgaaagagataactggaagttccttgattcagaaaacagattcagatgaagaagttgcaatgctgttggacacagtccagaaagtatttcagaaaatgttggaatgtattgcacggagcttcaggaagcagccggaagaaggcctgcggctgctttattctgttcagaggcctcttcatgagttcattactgctgttcagtctcggcacacagacacccctgtgcaccggggtgtactttctactctgatcgctgggcctgtggttgagataagtcaccagctacggaaggtttctgacgtagaagagcttacccctccagagcatctttctgatcttccaccattttcaaggtgtttaataggaataataataaagtcttcgaatgtggtcaggtcatttttggatgaattaaaggcatgtgtggcttctaatgatattgaaggcattgtgtgcctcacggctgctgtgcatattatcctggttattaatgcaggtaaacataaaagctcaaaagtgagggaggttgcagccactgttcacagaaaactaaagacattcatggaaattactttggaagaggatagcattgaaagatttctctatgaatcatcatcaagaactctgggagaacttttgaattcataaccaagccaacatctccagacatgtaaaaatagggaaaagtgattcaaattgaaatgcctgtgtattttcctattgtttttaatgttaataacccatataatagggaaagggtgggatttttttgtgggaatgtgggaaggtgggggttatggaggagataactcaaaacttcttcaattttgcctagtgcctgcgtaaataatatatttaatataaaggactccaggtatgaatggtgtagaaatccatgattccaagaaaaaacacttttctagcaaacctggttgtttttaaaatgacttttatatatgtaatattgcttggaaactatgagtaataaagcaatgacaac

SEQ ID NO: 160050 - DNA, 5253 bp, Homo sapiens
  Payload ID: 11300
  Gene Symbol: NCAPG2
  Gene Name: non-SMC condensin II complex, subunit G2
  Uniprot ID: Q86XI2
  ENST ID: ENST00000409339
  CDS Start-End: 115-3585
ggggcccgtctggggcgccggcgggtgcgtttgaatctggtccgagcgcgggaaacggcgggtccccgagcccagggttacaaaataaatgccatttgaacagtgccatctgtcatggaaaaacgtgagacgtttgtacaagccgtgtctaaggagctggttggagagtttttgcaatttgttcaacttgataaagaggcctctgatcctttcagcctaaatgaattactagatgaattatcaaggaaacagaaagaagaattatggcaaaggctgaagaatttattgacagatgtgttgttagaaagcccagtggatgggtggcaggtagtggaagcccagggtgaagacaatatggaaaccgaacatggctcaaaaatgagaaaaagcatagaaataatttatgcaattacatctgtgattcttgcttctgtgtctgtaataaatgaaagtgagaactacgaagccctactggaatgtgttattatattaaatggtattttatatgcattacctgagtctgaacgaaaactacagagttctattcaggatttgtgtgttacctggtgggagaaaggcctgcctgccaaggaagacacaggaaagacagcctttgtcatgttactaaggaggagtctggagactaagacaggtgcagacgtatgtcggctttggcgtatccatcaagctttatattgctttgattatgatttggaggaaagtggagaaattaaagatatgttacttgagtgcttcataaatattaattatatcaagaaagaagagggaagaagatttcttagttgtctcttcaactggaatatcaacttcatcaaaatgatccacgggaccattaaaaaccagttacagggattacaaaagtctttgatggtatacattgcagaaatttatttcagagcttggaaaaaggcttcagggaaaatactggaggcgattgaaaatgattgcatccaggacttcatgttccacgggatacaccttccgaggaggtctccagtgcattccaaagtgcgggaggttctgagttactttcaccatcaaaagaaagttcggcagggagtggaagagatgctttatagattatataagcccatcctttggagaggattaaaggccagaaactctgaagttcgatcaaatgctgcattgttgtttgttgaagcatttcctattagggatccaaaccttcatgctattgaaatggatagtgaaatccagaaacagtttgaagagctctatagccttttagaagatccttacccgatggtccgttccacagggatccttggtgtttgtaaaataacttctaagtactgggaaatgatgcccccgaccattcttattgacctcctgaagaaggtgactggggaactggcatttgacacgagctcagctgatgttcgttgttctgtctttaagtgtctgccaatgattttggacaacaaactgagccacccattgttagagcagctccttccagctctcagatacagtctccacgacaattcggagaaagtgagggtagcttttgtggacatgctgttgaagatcaaagctgtgagggctgctaagttttggaaaatatgtcccatggagcacattctggttcgtctggaaactgattctcgacctgtgtctcggcgcctggtgagcctcatctttaattctttcctgcctgtgaatcagccggaggaggtctggtgcgagcgctgtgtcaccctggtgcagatgaaccacgccgctgccaggaggttctatcagtacgcccacgaacacaccgcctgcaccaacatagcaaagctgattcacgttattcgtcattgcttaaatgcctgtatccagagggcagtgagagagcctccagaggacgaggaggaagaggacggaagggagaaggagaatgtgactgttctggacaaaacactgtcagtaaacgatgttgcatgcatggcaggtttactagaaatcattgtgattctctggaaaagtattgacagaagtatggaaaataataaagaggccaaactttacacgattaacaagtttgcctctgtgcttccagagtatctgaaagtatttaaggatgatcgctgcaagatccctttattcatgctaatgtcctttatgccggcctctgctgtccccccattcagctgtggtgtgatttccacgctgagaagccgggaggagggcgctgtggacaagagctactgcactttgttggattgcctctgctcctgggggcaggtggggcacattctggagcttgttgacaactggctgcccacagagcatgcccaggccaagagcaacacagcttctaaaggtagggtgcagatccatgacacacgcccagtcaaacctgaattggcattggtctacattgagtatctgctgactcatccaaagaaccgcgagtgcttgctctctgctcctcggaagaaacttaaccatcttttgaaagcccttgaaacgtcaaaggcagatctggagtcacttctgcagacaccgggtgggaagcctcgtggcttcagtgaagcagctgccccgcgagcctttggtctccactgtcgcctgagcatccatcttcagcacaagttctgctcagaaggaaaggtgtatttgtccatgttggaagacactggcttttggttagaaagcaaaattttatcttttattcaagatcaagaagaagactacctgaagcttcatagggtcatttatcagcaaattatccagacctacctgactgtgtgtaaagatgttgttatggtaggccttggtgaccatcagtttcagatgcaactcttacagcggagtcttggaatcatgcaaacagtgaagggatttttttatgtttcattacttcttgacattctgaaagagataactggaagttccttgattcagaaaacagattcagatgaagaagttgcaatgctgttggacacagtccagaaagtatttcagaaaatgttggaatgtattgcacggagcttcaggaagcagccggaagaaggcctgcggctgctttattctgttcagaggcctcttcatgagttcattactgctgttcagtctcggcacacagacacccctgtgcaccggggtgtactttctactctgatcgctgggcctgtggttgagataagtcaccagctacggaaggtttctgacgtagaagagcttacccctccagagcatctttctgatcttccaccattttcaaggtgtttaataggaataataataaagtcttcgaatgtggtcaggtcatttttggatgaattaaaggcatgtgtggcttctaatgatattgaaggcattgtgtgcctcacggctgctgtgcatattatcctggttattaatgcaggtaaacataaaagctcaaaagtgagggaggttgcagccactgttcacagaaaactaaagacattcatggaaattactttggaagaggatagcattgaaagatatgaggacttgctgtgttgcccaggctgggctctaactcctggactcctggactcaatctatccttctgcctcagtcccaattggctaggactgcaggcacacaccaccagacccagctaatgtaatttctatctatatgtgtctttatatttaaagtggtttttttatagacagtatataaatgggtcatgttttttgatcttctctgacaatctgtcttaaaattggtgcatatgtaccatattcaaagtgattattgatatagttggattaatatccaccatatttgttattgtcttctatttgttccccttgttatttgttcctatttctgtcttccactccttttctgtcttttgtggttttaactgaacattttatgatgccgttttctttcctagcatatcagttatacttttttttttttaaacctttcttagtggtttctttagagttggaatttttatttgtttttatctttcttagtggttgctttagagttggagttttcatttataactaatccacgtttgctttcagatgacactataccactttgcaggtagggtggtatataataacaaaataatcctaatccttgcctctcgttccttgtatcattgctgtcattcattttgctaaggtataagcagacataagcatacataattgaatatattgttgctattattattttgaacaaactacatcttaggtcatttaagaataagaaaaataaaagtttttatttaccttcacttactccttctttgatgcttctcctttgtttgtgttgatccaaattctgacctatattcttttccttccctccagagaacttcttttaatgcttctttcaaggcatgtctactggcaactaattctcttaattttggtttgtcagagagtcttttacttctactttatttctttgcagggataatgttatgtagtttataattctagttgatgaatttttttctctctgtactttatttaatttattattattattttttgagacagagtcttgctctgttgcctagggtggaacgcagtggtgtgatctcagttcactgcaacctctgcctcctaagttcaaacgattcttgtacctcagcctgctgagtagctggtatacaggcacatcgccgccacacccagctcatttttgtattagtggagacagggcttcaccatgttgcccaggctggtctcgaattcttgatctcaagtgatctactcgcctcagcttctcaaattgctgggattactccccgtgcccggccactctctgtactttaaacatttcgctatactctcttcttggctcgtgtagtatctgagaaataggatataattcttttttgctcctcagtagataaggtgtatttttccctatctggtttctttcaatactttttctttgtttgatttttctgtaggttgaatatgatatgcctaggtgtagttttcttttcttttttttttttttttttggcatttattctattcagtattctatgagcttcctggataaattctcagttattattgtctgaatatttcttctgttcctttctctcttctgaaattcttattatacatgttaacaccttttacagttgtctcacaggtcttggatatttcattctatcaaaacagctgcatttttgaattctgtttgctaatattttatttgagaatgtttgcattaggtttgaaataagattaaatggttgttggttgttttgtt

SEQ ID NO: 160051 - DNA, 2926 bp, Homo sapiens
  Payload ID: 11300
  Gene Symbol: NCAPG2
  Gene Name: non-SMC condensin II complex, subunit G2
  ENST ID: ENST00000441982
  CDS Start-End: 1-2696
atttggaggaaagtggagaaattaaagatatgttacttgagtgcttcataaatattaattatatcaagaaagaagagggaagaagatttcttagttgtctcttcaactggaatatcaacttcatcaaaatgatccacgggaccattaaaaaccagttacagggattacaaaagtctttgatggtatacattgcagaaatttatttcagagcttggaaaaaggcttcagggaaaatactggaggcgattgaaaatgattgcatccaggacttcatgttccacgggatacaccttccgaggaggtctccagtgcattccaaagtgcgggaggttctgagttactttcaccatcaaaagaaagttcggcagggagtggaagagatgctttatagattatataagcccatcctttggagaggattaaaggccagaaactctgaagttcgatcaaatgctgcattgttgtttgttgaagcatttcctattagggatccaaaccttcatgctattgaaatggatagtgaaatccagaaacagtttgaagagctctatagccttttagaagatccttacccgatggtccgttccacagggatccttggtgtttgtaaaataacttctaagtactgggaaatgatgcccccgaccattcttattgacctcctgaagaaggtgactggggaactggcatttgacacgagctcagctgatgttcgttgttctgtctttaagtgtctgccaatgattttggacaacaaactgagccacccattgttagagcagctccttccagctctcagatacagtctccacgacaattcggagaaagtgagggtagcttttgtggacatgctgttgaagatcaaagctgtgagggctgctaagttttggaaaatatgtcccatggagcacattctggttcgtctggaaactgattctcgacctgtgtctcggcgcctggtgagcctcatctttaattctttcctgcctgtgaatcagccggaggaggtctggtgcgagcgctgtgtcaccctggtgcagatgaaccacgccgctgccaggaggttctatcagtacgcccacgaacacaccgcctgcaccaacatagcaaagctgattcacgttattcgtcattgcttaaatgcctgtatccagagggcagtgagagagcctccagaggacgaggaggaagaggacggaagggagaaggagaatgtgactgttctggacaaaacactgtcagtaaacgatgttgcatgcatggcaggtttactagaaatcattgtgattctctggaaaagtattgacagaagtatggaaaataataaagaggccaaactttacacgattaacaagtttgcctctgtgcttccagagtatctgaaagtatttaaggatgatcgctgcaagatccctttattcatgctaatgtcctttatgccggcctctgctgtccccccattcagctgtggtgtgatttccacgctgagaagccgggaggagggcgctgtggacaagagctactgcactttgttggattgcctctgctcctgggggcaggtggggcacattctggagcttgttgacaactggctgcccacagagcatgcccaggccaagagcaacacagcttctaaaggtagggtgcagatccatgacacacgcccagtcaaacctgaattggcattggtctacattgagtatctgctgactcatccaaagaaccgcgagtgcttgctctctgctcctcggaagaaacttaaccatcttttgaaagcccttgaaacgtcaaaggcagatctggagtcacttctgcagacaccgggtgggaagcctcgtggcttcagtgaagcagctgccccgcgagcctttggtctccactgtcgcctgagcatccatcttcagcacaagttctgctcagaaggaaaggtgtatttgtccatgttggaagacactggcttttggttagaaagcaaaattttatcttttattcaagatcaagaagaagactacctgaagcttcatagggtcatttatcagcaaattatccagacctacctgactgtgtgtaaagatgttgttatggtaggccttggtgaccatcagtttcagatgcaactcttacagcggagtcttggaatcatgcaaacagtgaagggatttttttatgtttcattacttcttgacattctgaaagagataactggaagttccttgattcagaaaacagattcagatgaagaagttgcaatgctgttggacacagtccagaaagtatttcagaaaatgttggaatgtattgcacggagcttcaggaagcagccggaagaaggcctgcgggtttctgacgtagaagagcttacccctccagagcatctttctgatcttccaccattttcaaggtgtttaataggaataataataaagtcttcgaatgtggtcaggtcatttttggatgaattaaaggcatgtgtggcttctaatgatattgaaggcattgtgtgcctcacggctgctgtgcatattatcctggttattaatgcaggtaaacataaaagctcaaaagtgagggaggttgcagccactgttcacagaaaactaaagacattcatggaaattactttggaagaggatagcattgaaagatttctctatgaatcatcatcaagaactctgggagaacttttgaattcataaccaagccaacatctccagacatgtaaaaatagggaaaagtgattcaaattgaaatgcctgtgtattttcctattgtttttaatgttaataacccatataatagggaaagggtgggatttttttgtgggaatgtgggaaggtgggggttatggaggagataactcaaaacttcttcaattttgcctagtgcctgcgtaaataatatatttaatataaaggactccaggtat

SEQ ID NO: 160052 - DNA, 4134 bp, Homo sapiens
  Payload ID: 11300
  Gene Symbol: NCAPG2
  Gene Name: non-SMC condensin II complex, subunit G2
  ENST ID: ENST00000432615
  CDS Start-End: 196-1365
agtaccagacctcctgtgcgaagagtaacctgctcttcggactgataactggatggaatggcctttagaaagggagcatcttcagaatctgcagctgggatcagattgttcttttgttgaatcaactcagctctgccgagccagcatcttgctaagggttacaaaataaatgccatttgaacagtgccatctgtcatggaaaaacgtgagacgtttgtacaagccgtgtctaaggagctggttggagagtttttgcaatttgttcaacttgataaagaggcctctgatcctttcagcctaaatgaattactagatgaattatcaaggaaacagaaagaagaattatggcaaaggctgaagaatttattgacagatgtgttgttagaaagcccagtggatgggtggcaggtagtggaagcccagggtgaagacaatatggaaaccgaacatggctcaaaaatgagaaaaagcatagaaataatttatgcaattacatctgtgattcttgcttctgtgtctgtaataaatgaaagtgagaactacgaagccctactggaatgtgttattatattaaatggtattttatatgcattacctgagtctgaacgaaaactacagagttctattcaggatttgtgtgttacctggtgggagaaaggcctgcctgccaaggaagacacaggaaagacagcctttgtcatgttactaaggaggagtctggagactaagacaggtgcagacgtatgtcggctttggcgtatccatcaagctttatattgctttgattatgatttggaggaaagtggagaaattaaagatatgttacttgagtgcttcataaatattaattatatcaagaaagaagagggaagaagatttcttagttgtctcttcaactggaatatcaacttcatcaaaatgatccacgggaccattaaaaaccagttacagggattacaaaagtctttgatggtatacattgcagaaatttatttcagagcttggaaaaaggcttcagggaaaatactggaggcgattgaaaatgattgcatccaggacttcatgttccacgggatacaccttccgaggaggtctccagtgcattccaaagtgcgggaggttctgagttactttcaccatcaaaagaaagttcggcagggagtggaagagatgctttatagattatataagcccatcctttggagaggattaaaggccagaaactctgaagttcgatcaaatgctgcattgttgtttgttgaagcatttcctattagggatccaaaccttcatgctattgaaatggatagtgaaatccagaaacagtttgaagagctctatggatccttggtgtttgtaaaataacttctaagtactgggaaatgatgcccccgaccattcttattgacctcctgaagaaggtgactggggaactggcatttgacacgagctcagctgatgttcgttgttctgtctttaagtgtctgccaatgattttggacaacaaactgagccacccattgttagagcagctccttccagctctcagatacagtctccacgacaattcggagaaagtgagggtagcttttgtggacatgctgttgaagatcaaagctgtgagggctgctaagaatgtatctctaaaagataagcacttaaaaccactctaccattattttataaaaaaagaataactcttcagtaaaacaaaacagaaaacagtaatagttttggaaaatatgtcccatggagcacattctggttcgtctggaaactgattctcgacctgtgtctcggcgcctggtgagcctcatctttaattctttcctgcctgtgaatcagccggaggaggtctggtgcgagcgctgtgtcaccctggtgcagatgaaccacgccgctgccaggaggttctatcagtacgcccacgaacacaccgcctgcaccaacatagcaaagctgattcacgttattcgtcattgcttaaatgcctgtatccagagggcagtgagagagcctccagaggacgaggaggaagaggacggaagggagaaggagaatgtgactgttctggacaaaacactgtcagtaaacgatgttgcatgcatggcaggtttactagaaatcattgtgattctctggaaaagtattgacagaagtatggaaaataataaagaggccaaactttacacgattaacaagtttgcctctgtgcttccagagtatctgaaagtatttaaggatgatcgctgcaagatccctttattcatgctaatgtcctttatgccggcctctgctgtccccccattcagctgtggtgtgatttccacgctgagaagccgggaggagggcgctgtggacaagagctactgcactttgttggattgcctctgctcctgggggcaggtggggcacattctggagcttgttgacaactggctgcccacagagcatgcccaggccaagagcaacacagcttctaaaggtagggtgcagatccatgacacacgcccagtcaaacctgaattggcattggtctacattgagtatctgctgactcatccaaagaaccgcgagtgcttgctctctgctcctcggaagaaacttaaccatcttttgaaagcccttgaaacgtcaaaggcagatctggagtcacttctgcagacaccgggtgggaagcctcgtggcttcagtgaagcagctgccccgcgagcctttggtctccactgtcgcctgagcatccatcttcagcacaagttctgctcagaaggaaaggtgtatttgtccatgttggaagacactggcttttggttagaaagcaaaattttatcttttattcaagatcaagaagaagactacctgaagcttcatagggtcatttatcagcaaattatccagataactagcacatggataggagaagctttgtgaggctggatttactccctttttaaaaatggcctttgttgctaagctgtgtctgtctcttacagacctacctgactgtgtgtaaagatgttgttatggtaggccttggtgaccatcagtttcagatgcaactcttacagcggagtcttggaatcatgcaaacagtgaagggatttttttatgtttcattacttcttgacattctgaaagagataactggaagttccttgattcagaaaacagattcagatgaagaagttgcaatgctgttggacacagtccagaaagtatttcagaaaatgttggaatgtattgcacggagcttcaggaagcagccggaagaaggcctgcggctgctttattctgttcagaggcctcttcatgagttcattactgctgttcagtctcggcacacagacacccctgtgcaccggggtgtactttctactctgatcgctgggcctgtggttgagataagtcaccagctacggaaggtttctgacgtagaagagcttacccctccagagcatctttctgatcttccaccattttcaaggtgtttaataggaataataataaagtcttcgaatgtggtcaggtcatttttggatgaattaaaggcatgtgtggcttctaatgatattgaaggcattgtgtgcctcacggctgctgtgcatattatcctggttattaatgcaggtaaacataaaagctcaaaagtgagggaggttgcagccactgttcacagaaaactaaagacattcatggaaattactttggaagaggatagcattgaaagatttctctatgaatcatcatcaagaactctgggagaacttttgaattcataaccaagccaacatctccagacatgtaaaaatagggaaaagtgattcaaattgaaatgcctgtgtattttcctattgtttttaatgttaataacccatataatagggaaagggtgggatttttttgtgggaatgtgggaaggtgggggttatggaggagataactcaaaacttcttcaattttgcctagtgcctgcgtaaataatatatttaatataaaggactccaggtatgaatggtgtagaaatccatgattccaagaaaaaacacttttctagcaaacctggttgtttttaaaatgacttttatatatgtaatattgcttggaaactatgagtaataaagcaatgacaacatc

SEQ ID NO: 160053 - DNA, 1996 bp, Homo sapiens
  Payload ID: 11301
  Gene Symbol: NCAPH2
  Gene Name: non-SMC condensin II complex, subunit H2
  Uniprot ID: Q6IBW4
  ENST ID: ENST00000299821
  CDS Start-End: 79-1899
aactagtggcgggctgaggacgccgtacccctcggaaggcagccctgcggtccctttgccgcccgttccctcccggacatggaggacgtggaggcgcgcttcgcccacctcttgcagcccatccgcgacctcaccaagaactgggaggtggacgtggcggcccagctgggcgagtatctggaggagctggatcagatctgcatttcttttgacgaaggcaagaccacaatgaacttcattgaggcagcgttgttgatccagggctctgcctgcgtctacagtaagaaggtggaatacctctactcactcgtctaccaggcccttgatttcatctctggaaagaggcgggccaagcagctctcttcggtgcaggaggacagggccaatggggttgccagctccggggtcccccaggaggcagagaatgagttcctgtcgctggatgacttccctgactcccggactaacgtggatctcaagaatgatcagacgcccagtgaggtcctcatcatccccctcctgcccatggccctggtggcccctgatgaaatggagaagaacaacaatcccctgtacagccgtcagggtgaggtcctggccagccggaaggatttcaggatgaacacgtgcgttccccaccccagaggggccttcatgttggagccagagggcatgtcccccatggaaccagcgggcgtttcccccatgccagggacccagaaggacaccgggaggactgaggagcagccaatggaagtttccgtgtgcaggagccctgtcccagcactcggcttctcccaggagccaggcccctctccagaaggcccgatgcccctgggtgggggcgaggacgaggatgcagaggaggcagtagagcttcctgaggcctcggcccccaaggccgctctggagcccaaggagtccaggagcccgcagcagagtgctgccctgcccaggaggtacatgctgcgggagcgggagggggccccagagcctgcatcctgcgtgaaggagactccagacccctggcagagcctggacccctttgactccttggagtctaagcccttcaagaaaggtaggccttactctgtgcccccctgtgtggaggaggctctgggacagaagcgcaagaggaagggcgctgccaagctgcaggacttccaccagtggtacctggctgcctatgcagaccatgccgacagcaggcggcttcggcgaaagggtccgtcctttgcagacatggaggtcctgtactggacacacgtgaaggagcagttggaaactctccggaagctgcagaggagggaggtggctgagcagtggctgcggcctgcagaggaggaccacctggaggattccctggaagacctgggggcagcagcagatgactttctagagcctgaggagtacatggagcccgagggagcagaccccagggaagccgctgaccttgacgcagtgccgatgtccctgagctacgaggagctggttcgaaggaatgtggagctcttcatcgccacctcccagaagtttgtccaggagacagagctgagccagcgcatcagggactgggaggacacagtgcagcctctgctccaggagcaggagcagcatgtgccctttgacatccacacctatggggaccagctggtctcacggttcccccagctcaatgagtggtgtccctttgcggagctggtggctggccagccggccttcgaggtgtgtcgttccatgctggcctccctgcagctggccaatgactacacagtggagataacccagcagcccgggctggagatggccgtggacaccatgtccctgagactgctcacgcaccagcgagcgcacaagcgcttccagacctacgctgccccctccatggcccagccctgagtggggagcaccgaggcaggggtgggggaatgtgtactgaggagccgtgtgtctgctcctggctggcccggcctaataaagcagtgttgccatctca

SEQ ID NO: 160054 - DNA, 1388 bp, Homo sapiens
  Payload ID: 11301
  Gene Symbol: NCAPH2
  Gene Name: non-SMC condensin II complex, subunit H2
  Uniprot ID: Q6IBW4
  ENST ID: ENST00000395698
  CDS Start-End: 96-995
cagcaaaatggcgccagaactagtggcgggctgaggacgccgtacccctcggaaggcagccctgcggtccctttgccgcccgttccctcccggacatggaggacgtggaggcgcgcttcgcccacctcttgcagcccatccgcgacctcaccaagaactgggaggtggacgtggcggcccagctgggcgagtatctggaggagctggatcagatctgcatttcttttgacgaaggcaagaccacaatgaacttcattgaggcagcgttgttgatccagggctctgcctgcgtctacagtaagaaggtggaatacctctactcactcgtctaccaggcccttgatttcatctctggaaagaggcgggccaagcagctctcttcggtgcaggaggacagggccaatggggttgccagctccggggtcccccaggaggcagagaatgagttcctgtcgctggatgacttccctgactcccggactaacgtggatctcaagaatgatcagacgcccagtgaggtcctcatcatccccctcctgcccatggccctggtggcccctgatgaaatggagaagaacaacaatcccctgtacagccgtcagggtgaggtcctggccagccggaaggatttcaggatgaacacgtgcgttccccaccccagaggggccttcatgttggagccagagggcatgtcccccatggaaccagcgggcgtttcccccatgccagggacccagaaggacaccgggaggactgaggagcagccaatggaagtttccgtgtgcaggagccctgtcccagcactcggcttctcccaggagccaggcccctctccagaaggcccgatgcccctgggtgggggcgaggacgaggatgcagaggaggcagtagagcttcctgaggcctcggcccccaaggccgctctggagcccaaggagtccaggagcccgcagcaggtgggacccacatggaggcctgcagaacctgagctgtgaactggcaaccctggctctggggccgagtcaccttgcacaaggaggacagtggtatggccttggccccagaccactggtctggggcagaagcccacctgtcttgcagcccgtcctgcaaccagcccttttgaagagcagcttctgtgttcctcccctctctgagcagaactgatgctcctcagagtagtgggctggcgtccaaggatttgagccctgtcgagctcacggcaacctgggatggccgccggttgccaaggcgcctctctgcagtcgggctggtaggagggagtgtctggaggccattgctgcctccctcaacccccggggtcaactgtacccagcctagagccaagaaatccttcctttttattcattaaaacaaaatcaacctga

SEQ ID NO: 160055 - DNA, 2077 bp, Homo sapiens
  Payload ID: 11301
  Gene Symbol: NCAPH2
  Gene Name: non-SMC condensin II complex, subunit H2
  ENST ID: ENST00000395701
  CDS Start-End: 95-1864
agcaaaatggcgccagaactagtggcgggctgaggacgccgtacccctcggaaggcagccctgcggtccctttgccgcccgttccctcccggacatggaggacgtggaggcgcgcttcgcccacctcttgcagcccatccgcgacctcaccaagaactgggaggtggacgtggcggcccagctgggcgagtatctggaggagctggatcagatctgcatttcttttgacgaaggcaagaccacaatgaacttcattgaggcagcgttgttgatccagggctctgcctgcgtctacagtaagaaggtggaatacctctactcactcgtctaccaggcccttgatttcatctctggaaagaggcgggccaagcagctctcttcggtgcaggaggacagggccaatggggttgccagctccggggtcccccaggaggcagagaatgagttcctgtcgctggatgacttccctgactcccggactaacgtggatctcaagaatgatcagacgcccagtgaggtcctcatcatccccctcctgcccatggccctggtggcccctgatgaaatggagaagaacaacaatcccctgtacagccgtcagggtgaggtcctggccagccggaaggatttcaggatgaacacgtgcgttccccaccccagaggggccttcatgttggagccagagggcatgtcccccatggaaccagcgggcgtttcccccatgccagggacccagaaggacaccgggaggactgaggagcagccaatggaagtttccgtgtgcaggagccctgtcccagcactcggcttctcccaggagccaggcccctctccagaaggcccgatgcccctgggtgggggcgaggacgaggatgcagaggaggcagtagagcttcctgaggcctcggcccccaaggccgctctggagcccaaggagtccaggagcccgcagcagagtgctgccctgcccaggaggtacatgctgcgggagcgggagggggccccagagcctgcatcctgcgtgaaggagactccagacccctggcagagcctggacccctttgactccttggagtctaagcccttcaagaaaggtaggccttactctgtgcccccctgtgtggaggaggctctgggacagaagcgcaagaggaagggcgctgccaagctgcaggacttccaccagtggtacctggctgcctatgcagaccatgccgacagcaggcggcttcggcgaaagggtccgtcctttgcagacatggaggtcctgtactggacacacgtgaaggagcagttggaaactctccggaagctgcagaggagggaggtggctgagcagtggctgcggcctgcagaggaggaccacctggaggattccctggaagacctgggggcagcagatgactttctagagcctgaggagtacatggagcccgagggagcagaccccagggaagccgctgaccttgacgcagtgccgatgtccctgagctacgaggagctggttcgaaggaatgtggagctcttcatcgccacctcccagaagtttgtccaggagacagagctgagccagcgcatcagggactgggaggacacagtgcagcctctgctccaggagcaggagcagcatgtgccctttgacatccacacctatggggaccagctggtctcacggttcccccagctcaatgagtggtgtccctttgcggagctggtggctggccagccggccttcgaggtgtgtcgttccatgctggcctccctgcagctggtgagtagcctgggatacgtgggagggggagacggtccccagaccctgctgatgtgccacccctgcaggccaatgactacacagtggagataacccagcagcccgggctggagatggccgtggacaccatgtccctgagactgctcacgcaccagcgagcgcacaagcgcttccagacctacgctgccccctccatggcccagccctgagtggggagcaccgaggcaggggtgggggaatgtgtactgaggagccgtgtgtctgctcctggctggcccggcctaataaagcagtgttgccatctca

SEQ ID NO: 160056 - DNA, 2037 bp, Homo sapiens
  Payload ID: 11301
  Gene Symbol: NCAPH2
  Gene Name: non-SMC condensin II complex, subunit H2
  Uniprot ID: Q6IBW4
  ENST ID: ENST00000420993
  CDS Start-End: 123-1940
gcgcctacgcattttcctgggcgggaacagcaaaatggcgccagaactagtggcgggctgaggacgccgtacccctcggaaggcagccctgcggtccctttgccgcccgttccctcccggacatggaggacgtggaggcgcgcttcgcccacctcttgcagcccatccgcgacctcaccaagaactgggaggtggacgtggcggcccagctgggcgagtatctggaggagctggatcagatctgcatttcttttgacgaaggcaagaccacaatgaacttcattgaggcagcgttgttgatccagggctctgcctgcgtctacagtaagaaggtggaatacctctactcactcgtctaccaggcccttgatttcatctctggaaagaggcgggccaagcagctctcttcggtgcaggaggacagggccaatggggttgccagctccggggtcccccaggaggcagagaatgagttcctgtcgctggatgacttccctgactcccggactaacgtggatctcaagaatgatcagacgcccagtgaggtcctcatcatccccctcctgcccatggccctggtggcccctgatgaaatggagaagaacaacaatcccctgtacagccgtcagggtgaggtcctggccagccggaaggatttcaggatgaacacgtgcgttccccaccccagaggggccttcatgttggagccagagggcatgtcccccatggaaccagcgggcgtttcccccatgccagggacccagaaggacaccgggaggactgaggagcagccaatggaagtttccgtgtgcaggagccctgtcccagcactcggcttctcccaggagccaggcccctctccagaaggcccgatgcccctgggtgggggcgaggacgaggatgcagaggaggcagtagagcttcctgaggcctcggcccccaaggccgctctggagcccaaggagtccaggagcccgcagcagagtgctgccctgcccaggaggtacatgctgcgggagcgggagggggccccagagcctgcatcctgcgtgaaggagactccagacccctggcagagcctggacccctttgactccttggagtctaagcccttcaagaaaggtaggccttactctgtgcccccctgtgtggaggaggctctgggacagaagcgcaagaggaagggcgctgccaagctgcaggacttccaccagtggtacctggctgcctatgcagaccatgccgacagcaggcggcttcggcgaaagggtccgtcctttgcagacatggaggtcctgtactggacacacgtgaaggagcagttggaaactctccggaagctgcagaggagggaggtggctgagcagtggctgcggcctgcagaggaggaccacctggaggattccctggaagacctgggggcagcagatgactttctagagcctgaggagtacatggagcccgagggagcagaccccagggaagccgctgaccttgacgcagtgccgatgtccctgagctacgaggagctggttcgaaggaatgtggagctcttcatcgccacctcccagaagtttgtccaggagacagagctgagccagcgcatcagggactgggaggacacagtgcagcctctgctccaggagcaggagcagcatgtgccctttgacatccacacctatggggaccagctggtctcacggttcccccagctcaatgagtggtgtccctttgcggagctggtggctggccagccggccttcgaggtgtgtcgttccatgctggcctccctgcagctggccaatgactacacagtggagataacccagcagcccgggctggagatggccgtggacaccatgtccctgagactgctcacgcaccagcgagcgcacaagcgcttccagacctacgctgccccctccatggcccagccctgagtggggagcaccgaggcaggggtgggggaatgtgtactgaggagccgtgtgtctgctcctggctggcccggcctaataaagcagtgttgccatctca

SEQ ID NO: 160057 - DNA, 640 bp, Homo sapiens
  Payload ID: 11301
  Gene Symbol: NCAPH2
  Gene Name: non-SMC condensin II complex, subunit H2
  ENST ID: ENST00000418794
  CDS Start-End: 80-268
gaactagtggcgggctgaggacgccgtacccctcggaaggcagccctgcggtccctttgccgcccgttccctcccggacatggaggacgtggaggcgcgcttcgcccacctcttgcagcccatccgcgacctcaccaagaactgggaggtggacgtggcggcccagctgggcgagtatctggaggagtgtcatttgctgagaaggaatacaggagatgagccagcgttggggaagatgttggctggatcagatctgcatttcttttgacgaaggcaagaccacaatgaacttcattgaggcagcgttgttgatccagggctctgcctgcgtctacagtaagaaggtggaatacctctactcactcgtctaccaggcccttgatttcatctctggaaagaggcgggccaagcagctctcttcggtgcaggaggacagggccaatggggttgccagctccggggtcccccaggaggcagagaatgagttcctgtcgctggatgacttccctgactcccggactaacgtggatctcaagaatgatcagacgcccagtgaggtcctcatcatccccctcctgcccatggccctggtggcccctgatgaaatggagaagaacaacaatcccctgtacaggtaggg

SEQ ID NO: 160058 - DNA, 970 bp, Homo sapiens
  Payload ID: 11301
  Gene Symbol: NCAPH2
  Gene Name: non-SMC condensin II complex, subunit H2
  ENST ID: ENST00000523045
  CDS Start-End: 93-970
caaaatggcgccagaactagtggcgggctgaggacgccgtacccctcggaaggcagccctgcggtccctttgccgcccgttccctcccggacatggaggacgtggaggcgcgcttcgcccacctcttgcagcccatccgcgacctcaccaagaactgggaggtggacgtggcggcccagctgggcgagtatctggaggaggtggaatacctctactcactcgtctaccaggcccttgatttcatctctggaaagaggcgggccaagcagctctcttcggtgcaggaggacagggccaatggggttgccagctccggggtcccccaggaggcagagaatgagttcctgtcgctggatgacttccctgactcccggactaacgtggatctcaagaatgatcagacgcccagtgaggtcctcatcatccccctcctgcccatggccctggtggcccctgatgaaatggagaagaacaacaatcccctgtacagccgtcagggtgaggtcctggccagccggaaggatttcaggatgaacacgtgcgttccccaccccagaggggccttcatgttggagccagagggcatgtcccccatggaaccagcgggcgtttcccccatgccagggacccagaaggacaccgggaggactgaggagcagccaatggaagtttccgtgtgcaggagccctgtcccagcactcggcttctcccaggagccaggcccctctccagaaggcccgatgcccctgggtgggggcgaggacgaggatgcagaggaggcagtagagcttcctgaggcctcggcccccaaggccgctctggagcccaaggagtccaggagcccgcagcagagtgctgccctgcccaggaggtacatgctgcgggagcgggagggggccccagagcctgcatcctgcgtgaaggagactccagacccctggcagagcctggacccctttgactccttgga

SEQ ID NO: 160059 - DNA, 720 bp, Homo sapiens
  Payload ID: 11301
  Gene Symbol: NCAPH2
  Gene Name: non-SMC condensin II complex, subunit H2
  ENST ID: ENST00000518394
  CDS Start-End: 94-210
gcaaaatggcgccagaactagtggcgggctgaggacgccgtacccctcggaaggcagccctgcggtccctttgccgcccgttccctcccggacatggaggacgtggaggcgcgcttcgcccacctcttgcagcccatccgcgacctcaccaagaactgggaggtggacgtggcggcccagctggctggatcagatctgcatttcttttgacgaaggcaagaccacaatgaacttcattgaggcagcgttgttgatccagggctctgcctgcgtctacagtaagaaggtggaatacctctactcactcgtctaccaggcccttgatttcatctctggaaagaggcgggccaagcagctctcttcggtgcaggaggacagggccaatggggttgccagctccggggtcccccaggaggcagagaatgagttcctgtcgctggatgacttccctgactcccggactaacgtggatctcaagaatgatcagacgcccagtgaggtcctcatcatccccctcctgcccatggccctggtggcccctgatgaaatggagaagaacaacaatcccctgtacagccgtcagggtgaggtcctggccagccggaaggatttcaggatgaacacgtgcgttccccaccccagaggggccttcatgttggagccagagggcatgtcccccatggaaccagcgggcgtttcccccatgccagggacccagaa

SEQ ID NO: 160060 - DNA, 521 bp, Homo sapiens
  Payload ID: 11301
  Gene Symbol: NCAPH2
  Gene Name: non-SMC condensin II complex, subunit H2
  ENST ID: ENST00000522304
  CDS Start-End: 1-425
acatggagcccgagggagcagaccccagggaagccgctgaccttgacgcagtgccgatgtccctgagctacgaggagctggttcgaaggaatgtggagctcttcatcgccacctcccagaagtttgtccaggagacagagctgagccagcgcatcagggactgggaggacacagtgcagcctctgctccaggagcagctcaatgagtggtgtccctttgcggagctggtggctggccagccggccttcgaggtgtgtcgttccatgctggcctccctgcagctggccaatgactacacagtggagataacccagcagcccgggctggagatggccgtggacaccatgtccctgagactgctcacgcaccagcgagcgcacaagcgcttccagacctacgctgccccctccatggcccagccctgagtggggagcaccgaggcaggggtgggggaatgtgtactgaggagccgtgtgtctgctcctggctggcccggcctaataaagcagtgttgccatctc

SEQ ID NO: 160061 - DNA, 1978 bp, Homo sapiens
  Payload ID: 11302
  Gene Symbol: NCCRP1
  Gene Name: non-specific cytotoxic cell receptor protein 1 homolog (zebrafish)
  Uniprot ID: Q6ZVX7
  ENST ID: ENST00000339852
  CDS Start-End: 23-850
gacagtcgcgcagcctcgagggatggaggaggtgcgtgagggacacgcgctcggtggcgggatggaagccgatgggcccgcgagcctccaggagctgcctccctcgccacggtcgccttcaccgccgccgtcgccgccaccactgccctcgccgccgtcgctgccatcgcccgcagccccggaggcccccgagctccccgagccggcgcagccgtccgaggctcacgcccggcagctgctgctggaggagtgggggccgctgagcgggggcctggagctgccccagcgcctcacctggaagctgctcctgttgcggcggccgctctaccgcaacctgctgcgctcgcccaaccccgaaggcatcaacatttatgagccagcaccccctactggtcccacccagcgacccctggaaactctgggcaatttccgtggctggtacattagaactgaaaagctccagcagaaccaaagctggacagtgaagcagcagtgtgtggaccttctggccgagggcctgtgggaggagctgctggatgacgaacaaccagccattacggtcatggactggttcgaggacagccggctggatgcgtgcgtctatgagctgcatgtctggctgctggcggccgaccgccgcacggtcattgctcagcaccacgtggccccccgaacttctgggagaggaccccctggccgctgggtccaggtgtcccacgtattccgccattatggtcccggtgtgcgctttatccacttcctgcacaaggccaagaaccgcatggagcctggtgggctgcggcggacacgggtgaccgactcctccgtgtctgtgcagctccgggagtgactggctggctcctctgtcctgaccccacagcacctccctgacctttaggagccccaactcttagtcacctcctaggcctcttatttctccctggcccttggcttctcacttgatggacagcttcacacacccttaagcggtggactccagcattttcccagcactgtctgagccccatgagggcggagccactccttgtaaattcagtgcccgacagatgctctggcacagatgctttgtagatctctgttgagagaatgcatagacacctgtgcccaaggatgctgagggctggtctctgcttctttgaacttcactgaaactgaatgctcactgctgtgttgccagcaccacccagcccagggctgtgaacggagtgggtggcagcaaatgtgtgttgaaaggggaatgaagccattcacttcactcagttcctgtcccatttaaccgccccgatccttgatcttccattaccttcacatcccggggtccttctgaactgaccttgacctctgatctcttcacacatctccccttagcatctccacttacctacttttttttttttttttgagatggcatctcactctgtcacccaggctggagtgtagtgacacgatctcgactcactgcaatttccacctctcaggttcaagtggttctcctgcctcagcctctcaagtagctgggattacaggtgcacagcacctcccccgactaatttttatatttttagtagagacgggatttcgccatgttggccaggctggtctcaaactcctgacctcaagtgatctgcccaccttggcttcccaaagtgctgggattgcagacgtgagtcactgcgcccagccattccatgtctcttaagtctcagaatctcccctagctccctccaggtgtctgcagtggttgtcccctcaaagctgtcccacaccctcctccgaggaccctttgtgtatctcctccagctaccgcagagcccacaaacccaggcatctatcaaagtccctcattcatgagggtggtgaggacacagactgcgaccagaacagaaatatgaaaatgtgaatgacagcgtcccccgtgtgtggaatgtggggattaaaagcatttatcaacctctaa

SEQ ID NO: 160062 - DNA, 554 bp, Homo sapiens
  Payload ID: 11303
  Gene Symbol: NOP10
  Gene Name: NOP10 ribonucleoprotein
  Uniprot ID: Q9NPE3
  ENST ID: ENST00000328848
  CDS Start-End: 105-299
ttccggttatgcaggaaggaaattgacgaacacgtgacgcggtcgggcggaccactgcagactgagcggtggaccgaattgggaccgctggcttataagcgatcatgtttctccagtattacctcaacgagcagggagatcgagtctatacgctgaagaaatttgacccgatgggacaacagacctgctcagcccatcctgctcggttctccccagatgacaaatactctcgacaccgaatcaccatcaagaaacgcttcaaggtgctcatgacccagcaaccgcgccctgtcctctgagggtcccttaaactgatgtcttttctgccacctgttacccctcggagactccgtaaccaaactcttcggactgtgagccctgatgcctttttgccagccatactctttggcatccagtctctcgtggcgattgattatgcttgtgtgaggcaatcatggtggcatcacccataaagggaacacatttgacttttttttctcatattttaaattactacaagattattaaagataaaatgatttgaaaaactctta

SEQ ID NO: 160063 - DNA, 436 bp, Homo sapiens
  Payload ID: 11303
  Gene Symbol: NOP10
  Gene Name: NOP10 ribonucleoprotein
  ENST ID: ENST00000557912
  CDS Start-End: 51-161
ctgcagactgagcggtggaccgaattgggaccgctggcttataagcgatcatgtttctccagtattacctcaacgagcagggagatcgagtctatacgctgaagatgacaaatactctcgacaccgaatcaccatcaagaaacgcttcaaggtgctcatgacccagcaaccgcgccctgtcctctgagggtcccttaaactgatgtcttttctgccacctgttacccctcggagactccgtaaccaaactcttcggactgtgagccctgatgcctttttgccagccatactctttggcatccagtctctcgtggcgattgattatgcttgtgtgaggcaatcatggtggcatcacccataaagggaacacatttgacttttttttctcatattttaaattactacaagattattaaagataaaatgatttgaaaaa

SEQ ID NO: 160064 - DNA, 2889 bp, Homo sapiens
  Payload ID: 11304
  Gene Symbol: NOP14
  Gene Name: NOP14 nucleolar protein
  Uniprot ID: P78316
  ENST ID: ENST00000314262
  CDS Start-End: 50-2623
cctgtctctcttcgggtctcgggcccttgggcgcagcggggcgcgcgccatggcgaaggcgaagaaggtcggggcgcgaaggaaggcctccggggcgccggcgggagcgcgagggggcccggcgaaggccaactccaatccgttcgaggtgaaagttaacaggcagaagttccagatcctgggccggaagacgcgccacgacgtgggactgcccggggtgtctcgcgcacgggccctcaggaagcgtacacagactttactaaaagagtacaaagaaagggataaatccaatgtattcagagataaacgcttcggagaatacaacagcaacatgagccccgaggagaagatgatgaagaggtttgctctggaacagcagcgacatcatgagaaaaaaagcatctacaatctaaatgaagatgaagaattgactcattatggccagtctttggcagacatcgagaagcataatgacattgtggacagtgacagcgatgctgaggatcgaggaacgttgtctgctgagctgactgctgcccactttggaggaggcggtgggctccttcacaagaagactcaacaggaaggcgaggagcgggagaaaccgaagtcccggaaagagctgattgaagagctcattgccaagtcaaaacaagagaagagggagagacaagctcaacgagaagatgccctcgagctcacggagaagctagaccaagactggaaagaaattcagactctcctgtcccacaaaactcccaagtcagagaacagagacaaaaaggaaaaacccaagcccgatgcatatgacatgatggttcgcgagcttggctttgaaatgaaggcgcagccctctaacaggatgaagacggaggcagaattggcaaaggaagagcaggagcacctcaggaagctggaggctgagagacttcgaagaatgcttggaaaggatgaggatgaaaatgttaagaaaccaaaacatatgtcagcagatgatctgaatgatggcttcgtgctagataaagatgacaggcgtttgctttcctacaaagatggaaagatgaatgtcgaggaagatgtccaggaagagcaaagcaaggaagccagtgaccctgagagcaacgaggaagaaggtgacagttcaggcggggaggacacagaggagagcgacagcccagatagccacttggacctggaatccaacgtggagagtgaggaagaaaacgagaagccagcaaaagagcagaggcagactcctgggaaagggttgataagcggcaaggaaagagctggaaaagctaccagagacgagctgccctacacgttcgcagcccctgaatcctatgaggaactgagatctctgttgttaggaagatcgatggaagagcagcttttggtggtggagagaattcagaagtgcaaccacccgagtctcgcagaaggaaacaaagcaaaattagaaaaactgtttggctttcttttggaatacgttggcgatttggctacagatgacccaccagacctcacagtcattgataagttggttgtgcacttatatcatctttgccagatgtttcctgaatctgcaagtgacgctatcaaatttgttctccgagatgcgatgcatgagatggaagaaatgattgagaccaaaggccgggcggcattgccagggttggatgtgctcatttatttgaaaatcactgggctgctatttccaacttccgacttctggcacccagtggtgacccctgccctcgtgtgcctcagtcagctgctcaccaagtgccccatcctgtccctccaggacgtggtgaagggcctgttcgtgtgctgcctgttcctggagtatgtggctttgtcccagaggtttatacctgagcttattaattttcttcttgggattctttacatagcaactccaaacaaagcaagccaaggttccactctggtgcaccctttcagagcgcttgggaagaactcggaactgctcgtggtgtctgctagagaggatgtggccacgtggcagcagagcagcctctccctccgctgggcgagtagactgagggccccaacttcgacagaggccaatcacatccgactgtcctgcctggctgtgggcctggccctgctgaagcgctgcgtgctcatgtacgggtccctgccatccttccacgccatcatggggcctctccaagccctcctcacggatcacctggcggactgcagccacccgcaggagctccaggagctgtgtcagagcacactgaccgaaatggaaagccagaagcagctctgccggccgctgacctgtgagaagagcaagcctgtcccactgaagcttttcacaccccggctggtcaaagtcctcgagtttggaagaaaacaaggcagtagtaaggaggaacaggaaaggaagaggctgatccacaaacacaagcgtgaatttaaaggggccgttcgagaaatccgcaaggacaatcagttcctggcgaggatgcaactctcagaaatcatggaacgggatgcggaaagaaagcggaaagtaaagcagctttttaacagcctggctacacaggaaggcgaatggaaggctctgaagaggaaaaagttcaaaaaataaattacattttataaataagctccccccacccgctgcctgcggttttgtttctgttaaaacgtcacctgatgaaatagaatgaatcctgaaatgcacctctgggatcgggaatggtctgtgtgttatcagctgcgactggttcactgcgtctggacaagcctcatggggactggggattctggccagtgtaatttctgtcaaccacggacgtttgccttcatgtgtagaatttactgttgttatgcaaattatattttcaattataa

SEQ ID NO: 160065 - DNA, 2535 bp, Homo sapiens
  Payload ID: 11304
  Gene Symbol: NOP14
  Gene Name: NOP14 nucleolar protein
  Uniprot ID: P78316
  ENST ID: ENST00000398071
  CDS Start-End: 15-2435
gcggggcgcgcgccatggcgaaggcgaagaaggtcggggcgcgaaggaaggcctccggggcgccggcgggagcgcgagggggcccggcgaaggccaactccaatccgttcgaggtgaaagttaacaggcagaagttccagatcctgggccggaagacgcgccacgacgtgggactgcccggggtgtctcgcgcacgggccctcaggaagcgtacacagactttactaaaagagtacaaagaaagggataaatccaatgtattcagagataaacgcttcggagaatacaacagcaacatgagccccgaggagaagatgatgaagaggtttgctctggaacagcagcgacatcatgagaaaaaaagcatctacaatctaaatgaagatgaagaattgactcattatggccagtctttggcagacatcgagaagcataatgacattgtggacagtgacagcgatgctgaggatcgaggaacgttgtctgctgagctgactgctgcccactttggaggaggcggtgggctccttcacaagaagactcaacaggaaggcgaggagcgggagaaaccgaagtcccggaaagagctgattgaagagctcattgccaagtcaaaacaagagaagagggagagacaagctcaacgagaagatgccctcgagctcacggagaagctagaccaagactggaaagaaattcagactctcctgtcccacaaaactcccaagtcagagaacagagacaaaaaggaaaaacccaagcccgatgcatatgacatgatggttcgcgagcttggctttgaaatgaaggcgcagccctctaacaggatgaagacggaggcagaattggcaaaggaagagcaggagcacctcaggaagctggaggctgagagacttcgaagaatgcttggaaaggatgaggatgaaaatgttaagaaaccaaaacatatgtcagcagatgatctgaatgatggcttcgtgctagataaagatgacaggcgtttgctttcctacaaagatggaaagatgaatgtcgaggaagatgtccaggaagagcaaagcaaggaagccagtgaccctgagagcaacgaggaagaaggtgacagttcaggcggggaggacacagaggagagcgacagcccagatagccacttggacctggaatccaacgtggagagtgaggaagaaaacgagaagccagcaaaagagcagaggcagactcctgggaaagggttgataagcggcaaggaaagagctggaaaagctaccagagacgagctgccctacacgttcgcagcccctgaatcctatgaggaactgagatctctgttgttaggaagatcgatggaagagcagcttttggtggtggagagaattcagaagtgcaaccacccgagtctcgcagaaggaaacaaagcaaaattagaaaaactgtttggctttcttttggaatacgttggcgatttggctacagatgacccaccagacctcacagtcattgataagttggttgtgcacttatatcatctttgccagatgtttcctgaatctgcaagtgacgctatcaaatttgttctccgagatgcgatgcatgagatggaagaaatgattgagaccaaaggccgggcggcattgccagggttggatgtgctcatttatttgaaaatcactgggctgctatttccaacttccgacttctggcacccagtggtgacccctgccctcgtgtgcctcagtcagctgctcaccaagtgccccatcctgtccctccaggacgtggtgaagggcctgttcgtgtgctgcctgttcctggagtatgtggctttgtcccagaggtttatacctgagcttattaattttcttcttgggattctttacatagcaactccaaacaaagcaagccaaggttccactctggtgcaccctttcagagcgcttgggaagaactcggaactgctcgtggtgtctgctagagaggatgtggccacgtggcagcagagcagcctctccctccgctgggcgagtagactgagggccccaacttcgacagaggccaatcacatccgactgtcctgcctggctgtgggcctggccctgctgaagcgctgcgtgctcatgtacgggtccctgccatccttccacgccatcatggggcctctccaagccctcctcacggatcacctggcggactgcagccacccgcaggagctccaggagctgtgtcagagcacactgaccgaaatggaaagccagaagcagctctgccggccgctgacctgtgagaagagcaagcctgtcccactgaagcttttcacaccccggctggtctcgaattcccgacctcaggtaatccacctgccttggccccccaattataggtgtgagccacagcacccagccaaaaaagtaattttttttagagtaataatgctataatgttggtgtgattccaacctccagctccccccacccgctgcctgcggttttgtttctgttaaaacgtcacctgatgaaatagaatgaatcctgaaatgca

SEQ ID NO: 160066 - DNA, 3538 bp, Homo sapiens
  Payload ID: 11304
  Gene Symbol: NOP14
  Gene Name: NOP14 nucleolar protein
  Uniprot ID: P78316
  ENST ID: ENST00000416614
  CDS Start-End: 67-2640
tcttagggtagcgcgcgcctgtctctcttcgggtctcgggcccttgggcgcagcggggcgcgcgccatggcgaaggcgaagaaggtcggggcgcgaaggaaggcctccggggcgccggcgggagcgcgagggggcccggcgaaggccaactccaatccgttcgaggtgaaagttaacaggcagaagttccagatcctgggccggaagacgcgccacgacgtgggactgcccggggtgtctcgcgcacgggccctcaggaagcgtacacagactttactaaaagagtacaaagaaagggataaatccaatgtattcagagataaacgcttcggagaatacaacagcaacatgagccccgaggagaagatgatgaagaggtttgctctggaacagcagcgacatcatgagaaaaaaagcatctacaatctaaatgaagatgaagaattgactcattatggccagtctttggcagacatcgagaagcataatgacattgtggacagtgacagcgatgctgaggatcgaggaacgttgtctgctgagctgactgctgcccactttggaggaggcggtgggctccttcacaagaagactcaacaggaaggcgaggagcgggagaaaccgaagtcccggaaagagctgattgaagagctcattgccaagtcaaaacaagagaagagggagagacaagctcaacgagaagatgccctcgagctcacggagaagctagaccaagactggaaagaaattcagactctcctgtcccacaaaactcccaagtcagagaacagagacaaaaaggaaaaacccaagcccgatgcatatgacatgatggttcgcgagcttggctttgaaatgaaggcgcagccctctaacaggatgaagacggaggcagaattggcaaaggaagagcaggagcacctcaggaagctggaggctgagagacttcgaagaatgcttggaaaggatgaggatgaaaatgttaagaaaccaaaacatatgtcagcagatgatctgaatgatggcttcgtgctagataaagatgacaggcgtttgctttcctacaaagatggaaagatgaatgtcgaggaagatgtccaggaagagcaaagcaaggaagccagtgaccctgagagcaacgaggaagaaggtgacagttcaggcggggaggacacagaggagagcgacagcccagatagccacttggacctggaatccaacgtggagagtgaggaagaaaacgagaagccagcaaaagagcagaggcagactcctgggaaagggttgataagcggcaaggaaagagctggaaaagctaccagagacgagctgccctacacgttcgcagcccctgaatcctatgaggaactgagatctctgttgttaggaagatcgatggaagagcagcttttggtggtggagagaattcagaagtgcaaccacccgagtctcgcagaaggaaacaaagcaaaattagaaaaactgtttggctttcttttggaatacgttggcgatttggctacagatgacccaccagacctcacagtcattgataagttggttgtgcacttatatcatctttgccagatgtttcctgaatctgcaagtgacgctatcaaatttgttctccgagatgcgatgcatgagatggaagaaatgattgagaccaaaggccgggcggcattgccagggttggatgtgctcatttatttgaaaatcactgggctgctatttccaacttccgacttctggcacccagtggtgacccctgccctcgtgtgcctcagtcagctgctcaccaagtgccccatcctgtccctccaggacgtggtgaagggcctgttcgtgtgctgcctgttcctggagtatgtggctttgtcccagaggtttatacctgagcttattaattttcttcttgggattctttacatagcaactccaaacaaagcaagccaaggttccactctggtgcaccctttcagagcgcttgggaagaactcggaactgctcgtggtgtctgctagagaggatgtggccacgtggcagcagagcagcctctccctccgctgggcgagtagactgagggccccaacttcgacagaggccaatcacatccgactgtcctgcctggctgtgggcctggccctgctgaagcgctgcgtgctcatgtacgggtccctgccatccttccacgccatcatggggcctctccaagccctcctcacggatcacctggcggactgcagccacccgcaggagctccaggagctgtgtcagagcacactgaccgaaatggaaagccagaagcagctctgccggccgctgacctgtgagaagagcaagcctgtcccactgaagcttttcacaccccggctggtcaaagtcctcgagtttggaagaaaacaaggcagtagtaaggaggaacaggaaaggaagaggctgatccacaaacacaagcgtgaatttaaaggggccgttcgagaaatccgcaaggacaatcagttcctggcgaggatgcaactctcagaaatcatggaacgggatgcggaaagaaagcggaaagtaaagcagctttttaacagcctggctacacaggaaggcgaatggaaggctctgaagaggaaaaagttcaaaaaataaattacattttataaataaggcaaggaactggacattacctcacatctgcaattccaaccctctgggaggccaaggcaggaagattgcttcagcccaggagttcgagaccagcctgggcaacacaggaagaccccgtctctaccaaaaaaacataaaaattagccaagtgtggtggcacgcacctgtagtcccaactactcgggaggctgaagcaggaggactgcttgagctgagtccaaggttacagtgagccgtgattgagccactgcactccagcctcggccacagtgcaagactgtgtcgcttaaaaaaaaatttttttttttgagacggagttttgctcttgttgcccaggctggagtgcaatggcacaacctccacctcctgggttcaagcgattctcctgcctcagcctcccgagtagctgggattacagacatgtgccaccacgcccagctaattttgtatttttagtagagacggggtttctccatgttggtcaggctggtctcgaattcccgacctcaggtaatccacctgccttggccccccaattataggtgtgagccacagcacccagccaaaaaagtaattttttttagagtaataatgctataatgttggtgtgattccaacctccagctccccccacccgctgcctgcggttttgtttctgttaaaacgtcacctgatgaaatagaatgaatcctgaaatgcacctctgggatcgggaatggtctgtgtgttatcagctgcgactggttcactgcgtctggacaagcctcatggggactggggattctggccagtgtaatttctgtcaaccacggacgtttgccttcatgtgtagaatttactgttgttatgcaaattatattttcaattataaatgaaacaa

SEQ ID NO: 160067 - DNA, 2723 bp, Homo sapiens
  Payload ID: 11304
  Gene Symbol: NOP14
  Gene Name: NOP14 nucleolar protein
  ENST ID: ENST00000502735
  CDS Start-End: 38-2404
cgggtctcgggcccttgggcgcagcggggcgcgcgccatggcgaaggcgaagaaggtcggggcgcgaaggaaggcctccggggcgccggcgggagcgcgagggggcccggcgaaggccaactccaatccgttcgaggtgaaagttaacaggcagaagttccagatcctgggccggaagacgcgccacgacgtgggactgcccggggtgtctcgcgcacgggccctcaggaagcgtacacagactttactaaaagagtacaaagaaagggataaatccaatgtattcagagataaacgcttcggagaatacaacagcaacatgagccccgaggagaagatgatgaagaggtttgctctggaacagcagcgacatcatgagaaaaaaagcatctacaatctaaatgaagatgaagaattgactcattatggccagtctttggcagacatcgagaagcataatgacattgtggacagtgacagcgatgctgaggatcgaggaacgttgtctgctgagctgactgctgcccactttggaggaggcggtgggctccttcacaagaagactcaacaggaaggcgaggagcgggagaaaccgaagtcccggaaagagctgattgaagagctcattgccaagtcaaaacaagagaagagggagagacaagctcaacgagaagatgccctcgagctcacggagaagctagaccaagactggaaagaaattcagactctcctgtcccacaaaactcccaagtcagagaacagagacaaaaaggaaaaacccaagcccgatgcatatgacatgatggttcgcgagcttggctttgaaatgaaggcgcagccctctaacaggatgaagacggaggcagaattggcaaaggaagagcaggagcacctcaggaagctggaggctgagagacttcgaagaatgcttggaaaggatgaggatgaaaatgttaagaaaccaaaacatatgtcagcagatgatctgaatgatggcttcgtgctagataaagatgacaggcgtttgctttcctacaaagatggaaagatgaatgtcgaggaagatgtccaggaagagcaaagcaaggaagccagtgaccctgagagcaacgaggaagaaggtgacagttcaggcggggaggacacagaggagagcgacagcccagatagccacttggacctggaatccaacgtggagagtgaggaagaaaacgagaagccagcaaaagagcagaggcagactcctgggaaagggttgataagcggcaaggaaagagctggaaaagctaccagagacgagctgccctacacgttcgcagcccctgaatcctatgaggaactgagatctctgttgttaggaagatcgatggaagagcagcttttggtggtggagagaattcagaagtgcaaccacccgagtctcgcagaaggaaacaaagcaaaattagaaaaactgtttggctttcttttggaatacgttggcgatttggctacagatgacccaccagacctcacagtcattgataagttggttgtgcacttatatcatctttgccagatgtttcctgaatctgcaagtgacgctatcaaatttgttctccgagatgcgatgcatgagatggaagaaatgattgagaccaaaggccgggcggcattgccagggttggatgtgctcatttatttgaaaatcactgggctgctatttccaacttccgacttctggcacccagtggtgacccctgccctcgtgtgcctcagtcagctgctcaccaagtgccccatcctgtccctccaggacgtggtgaagggcctgttcgtgtgctgcctgttcctggagtatgtggctttgtcccagaggtttatacctgagcttattaattttcttcttgggattctttacatagcaactccaaacaaagcaagccaaggttccactctggtgcaccctttcagagcgcttgggaagaactcggaactgctcgtggtgtctgctagagaggatgtggccacgtggcagcagagcagcctctccctccgctgggcgagtagactgagggccccaacttcgacagaggccaatcacatccgactgtcctgcctggctgtgggcctggccctgctgaagcgctgcgtgctcatgtacgggtccctgccatccttccacgccatcatggggcctctccaagccctcctcacggatcacctggcggactgcagccacccgcaggagctccaggagctgtgtcagagcacactgaccgaaatggaaagccagaagcagctctgccggccgctgacctgtgagaagagcaagcctgtcccactgaagcttttcacaccccggctggctggtctcgaattcccgacctcaggtaatccacctgccttggccccccaattataggtgtgagccacagcacccagccaaaaaagtaattttttttagagtaataatgctataatgttggtgtgattccaacctccagctccccccacccgctgcctgcggttttgtttctgttaaaacgtcacctgatgaaatagaatgaatcctgaaatgcacctctgggatcgggaatggtctgtgtgttatcagctgcgactggttcactgcgtctggacaagcctcatggggactggggattctggccagtgtaatttctgtcaaccacggacgtttgccttcatgtgtagaatttactgttgttatgcaaattatattt

SEQ ID NO: 160068 - DNA, 551 bp, Homo sapiens
  Payload ID: 11305
  Gene Symbol: NOP16
  Gene Name: NOP16 nucleolar protein
  ENST ID: ENST00000502663
  CDS Start-End: 49-336
gagagacagaggcagcgtgtttgagctgctggtgcggtggtcagcgcgatgcccaaggccaagggcaaaacccggaggcagaagtttggttacagtgtcaaccgaaagcgtctgaaccggaatgctcgacggaaggcagcgccgcggatcgaatgctcccacatccgacatgcctgggaccacgctaaatcggtacggcagaacctggccgagatggggttggctgtggaccccaacagggcggtgcccctccgtaagagaaagatccttctggtctcaagggctctgttctctgcaggtgaaggccatggaggtggacatagaggagaggcctaaagagcttgtacggaagccctatgtgctgaatgacctggaggcagaagccagccttccagaaaagaaaggaaatactctgtctcgggacctcattgactatgtacgctacatggtagagaaccacggggaggactataagagtggcaagacttcctcgattctttgcagaagaggaagatggaggtggagtgactggtttacatcacagctgcccc

SEQ ID NO: 160069 - DNA, 1000 bp, Homo sapiens
  Payload ID: 11305
  Gene Symbol: NOP16
  Gene Name: NOP16 nucleolar protein
  ENST ID: ENST00000509257
  CDS Start-End: 30-482
tttgagctgctggtgcggtggtcagcgcgatgcccaaggccaagggcaaaacccggaggcagaagtttggttacagtgtcaaccgaaagcgtctgaaccggaatgctcgacggaaggcagcgccgcggatcgaatgctcccacatccgacatgcctgggaccacgctaaatcggtacggcagaacctggccgagatggggttggctgtggaccccaacagggcggtgcccctccgtaagagaaaggtgaaggccatggaggtggacatagaggagaggcctaaagagcttgtacggaagccctatgtgctgaatgacctggaggcagaagccagccttccagaaaagaaaggaaatactctgtctcgggacctcattgactatgtacgctacatggtagagaaccacggggaggactataaggtgagcggctcaggccccgtgggctggctgggaaggcgccctggaccattcgcggcttgatctgcttgcgcagcacctgtttcctgaaaccgagtgcaaagaaagggaggcaaaagagactctaggaaatggatcccattgacagggatctaacttgaatgaatgcttatggcaaggatagactgagtgaccttggttccagtctcactcacagataaatgttttgctcgcatggtgttttttggtttgtttttgttttcaagacagagtcttgctcagtcacccaggatggaagtctatttttggcttcctttaacagttgaaagatccggctacactggacccctgggcccaagtaggattagctggctatgatgggtcatgagctcctcagctggccccagctcctccctggcccgctggactctcaggccttcctggtcttttttttgagacagaatctcgctctgtcacccagggtggagttcagtggtgtgatcatggctcaccgcagcctcatcctcccgggctgaaacagtcctcctgcctcggcctcccaagtagctgggaccacagga

SEQ ID NO: 160070 - DNA, 472 bp, Homo sapiens
  Payload ID: 11305
  Gene Symbol: NOP16
  Gene Name: NOP16 nucleolar protein
  ENST ID: ENST00000616685
  CDS Start-End: 37-249
cagcgtgtttgagctgctggtgcggtggtcagcgcgatgcccaaggccaagggcaaaacccggaggcagaagtttggttacagtgtcaaccgaaagcgtctgaaccggaatgctcgacggaaggcagcgccgcggatcgaatgcagagtggcaagacttcctcgattctttgcagaagaggaagatggaggtggagtgactggtttacatcacagctgccccaggctgaggcgtcccccggaccagtgaagctggagccagggtgtaaggcaaggaggtgctgtgtggctccagaggagctggccaggtcccatggaatcagaaggttacacacacacgtgcacactccccgctctggggaaggaactgttctcagaggctccaatttatattcatctgggggttcacggaaaagccagaacctgctgttttcagggtgggtgatgtaaatatagtgtgtacataataaagc

SEQ ID NO: 160071 - DNA, 954 bp, Homo sapiens
  Payload ID: 11305
  Gene Symbol: NOP16
  Gene Name: NOP16 nucleolar protein
  ENST ID: ENST00000621444
  CDS Start-End: 224-919
gtcatgaaaggggcggggaaacgaataaattgagccttgtacgcaggcgcaaatgctcgttgcatcctgggagtcgtagtgctcagcacggtagtgctacaaaaggactacatttccccaaatgcccgcaaagccttgtgcacgccttccggaaggagtttgttacacgaggtctgagagacagaggcagcgtgtttgagctgctggtgcggtggtcagcgcgatgcccaaggccaagggcaaaacccggaggcagaagtttggttacagtgtcaaccgaaagcgtctgaaccggaatgctcgacggaaggcagcgccgcggatcgaatgctcccacatccgacatgcctgggaccacgctaaatcggtacggcagaacctggccgagatggggttggctgtggaccccaacagggcggtgcccctccgtaagagaaaggtgaaggccatggaggtggacatagaggagaggcctaaagagcttgtacggaagccctatgtgctgaatgacctggaggcagaagccagccttccagaaaagaaaggaaatactctgtctcgggacctcattgactatgtacgctacatggtagagaaccacggggaggactataagagtggcaagacttcctcgattctttgcagaagaggaagatggaggtggagtgactggtttacatcacagctgccccaggctgaggcgtcccccggaccagtgaagctggagccagggtgtaaggcaaggaggtgctgtgtggctccagaggagctggccaggtcccatggaatcagaaggttacacacacacgtgcacactccccgctctggggaaggaactgttctcagaggctccaatttatattcatctgggggttcacggaaaagccagaacctgctgttttcagggtgggtgatgtaaatatagtgtgtacataataaagcaaatatatttta

SEQ ID NO: 160072 - DNA, 1258 bp, Homo sapiens
  Payload ID: 11305
  Gene Symbol: NOP16
  Gene Name: NOP16 nucleolar protein
  Uniprot ID: Q9Y3C1
  ENST ID: ENST00000614830
  CDS Start-End: 437-973
acctatgggtaccaccgggttctcgcgggtcttgcgaacgaacttttccttgaaactctctggattcctgtaaacagtggggctcagcccctcaatgactggaggcttcgatggttcaaaggggacctccggaatcacagggccgggagtcgccatgtccgggccacagcagcaggagaaaatcgggactccgacctcagcctcccggtgaaggtcatgaaaggggcggggaaacgaataaattgagccttgtacgcaggcgcaaatgctcgttgcatcctgggagtcgtagtgctcagcacggtagtgctacaaaaggactacatttccccaaatgcccgcaaagccttgtgcacgccttccggaaggagtttgttacacgaggtctgagagacagaggcagcgtgtttgagctgctggtgcggtggtcagcgcgatgcccaaggccaagggcaaaacccggaggcagaagtttggttacagtgtcaaccgaaagcgtctgaaccggaatgctcgacggaaggcagcgccgcggatcgaatgctcccacatccgacatgcctgggaccacgctaaatcggtacggcagaacctggccgagatggggttggctgtggaccccaacagggcggtgcccctccgtaagagaaaggtgaaggccatggaggtggacatagaggagaggcctaaagagcttgtacggaagccctatgtgctgaatgacctggaggcagaagccagccttccagaaaagaaaggaaatactctgtctcgggacctcattgactatgtacgctacatggtagagaaccacggggaggactataaggccatggcccgtgatgagaagaattactatcaagataccccaaaacagattcggagtaagatcaacgtctataaacgcttttacccagcagagtggcaagacttcctcgattctttgcagaagaggaagatggaggtggagtgactggtttacatcacagctgccccaggctgaggcgtcccccggaccagtgaagctggagccagggtgtaaggcaaggaggtgctgtgtggctccagaggagctggccaggtcccatggaatcagaaggttacacacacacgtgcacactccccgctctggggaaggaactgttctcagaggctccaatttatattcatctgggggttcacggaaaagccagaacctgctgttttcagggtgggtgatgtaaatatagtgtgtacataataaagcaaatatatttta

SEQ ID NO: 160073 - DNA, 1087 bp, Homo sapiens
  Payload ID: 11305
  Gene Symbol: NOP16
  Gene Name: NOP16 nucleolar protein
  Uniprot ID: Q9Y3C1
  ENST ID: ENST00000618911
  CDS Start-End: 389-1087
cttgaaactctctggattcctgtaaacagtggggctcagcccctcaatgactggaggcttcgatggttcaaaggggacctccggaatcacagggccgggagtcgccatgtccgggccacagcagcaggagaaaatcgggactccgacctcagcctcccggtgaaggtcatgaaaggggcggggaaacgaataaattgagccttgtacgcaggcgcaaatgctcgttgcatcctgggagtcgtagtgctcagcacggtagtgctacaaaaggactacatttccccaaatgcccgcaaagccttgtgcacgccttccggaaggagtttgttacacgaggtctgagagacagaggcagcgtgtttgagctgctggtgcggtggtcagcgcgatgcccaaggccaagggcaaaacccggaggcagaagtttggttacagtgtcaaccgaaagcgtctgaaccggaatgctcgacggaaggcagcgccgcggatcgaatgctcccacatccgacatgcctgggaccacgctaaatcggtacggcagaacctggccgagatggggttggctgtggaccccaacagggcggtgcccctccgtaagagaaaggtgaaggccatggaggtggacatagaggagaggcctaaagagcttgtacggaagccctatgtgctgaatgacctggaggcagaagccagccttccagaaaagaaaggaaatactctgtctcgggacctcattgactatgtacgctacatggtagagaaccacggggaggactataagcagagtggcaagacttcctcgattctttgcagaagaggaagatggaggtggagtgactggtttacatcacagctgccccaggctgaggcgtcccccggaccagtgaagctggagccagggtgtaaggcaaggaggtgctgtgtggctccagaggagctggccaggtcccatggaatcagaaggttacacacacacgtgcacactccccgctctggggaaggaactgttctcagaggctccaatttatattcatctgggggttcacggaaaagccagaacctgctgttttcagggtgggtgatgtaa

SEQ ID NO: 160074 - DNA, 1206 bp, Homo sapiens
  Payload ID: 11305
  Gene Symbol: NOP16
  Gene Name: NOP16 nucleolar protein
  ENST ID: ENST00000613081
  CDS Start-End: 462-1172
cttgaaactctctggattcctgtaaacagtggggctcagcccctcaatgactggaggcttcgatggttcaaaggggacctccggaatcacagggccgggagtcgccatgtccgggccacagcagcaggagaaaatcgggactccgacctcagcctcccggtgaaggtcatgaaaggggcggggaaacgaataaattgagccttgtacgcaggcgcaaatgctcgttgcatcctgggagtcgtagtgctcagcacggtagtgctacaaaaggactacatttccccaaatgcccgcaaagccttgtgcacgccttccggaaggagtttgttacacgaggtctgagagacagaggcagcgtgtttgagctgctggtgcggtggtcagcgcgatgcccaaggccaagggcaaaacccggaggcagaagtttggttacagtgtcaaccgaaagcgtctgaaccggaatgctcgacggaaggcagcgccgcggatcgaatgctcccacatccgacatgcctgggaccacgctaaatcggtacggcagaacctggccgagatggggttggctgtggaccccaacaggcggtgccctccgtaagagaaaggtgaaggccatggaggtggacatagaggagaggcctaaagagcttgtacggaagccctatgtgctgaatgacctggaggcagaagccagccttccagaaaagaaaggaaatactctgtctcgggacctcattgactatgtacgctacatggtagagaaccacggggaggactataaggccatggccgtgatgagaagaattactatcaagataccccaaaacagattcggagtaagatcaacgtctataaacgcttttacccagcagagtggcaagacttcctcgattctttgcagaagaggaagatggaggtggagtgactggtttacatcacagctgccccaggctgaggcgtcccccggaccagtgaagctggagccagggtgtaaggcaaggaggtgctgtgtggctccagaggagctggccaggtcccatggaatcagaaggttacacacacacgtgcacactccccgctctggggaaggaactgttctcagaggctccaatttatattcatctgggggttcacggaaaagccagaacctgctgttttcagggtgggtgatgtaaatatagtgtgtacataataaagcaaatatatttt

SEQ ID NO: 160075 - DNA, 963 bp, Homo sapiens
  Payload ID: 11305
  Gene Symbol: NOP16
  Gene Name: NOP16 nucleolar protein
  ENST ID: ENST00000619979
  CDS Start-End: 224-937
gtcatgaaaggggcggggaaacgaataaattgagccttgtacgcaggcgcaaatgctcgttgcatcctgggagtcgtagtgctcagcacggtagtgctacaaaaggactacatttccccaaatgcccgcaaagccttgtgcacgccttccggaaggagtttgttacacgaggtctgagagacagaggcagcgtgtttgagctgctggtgcggtggtcagcgcgatgcccaaggccaagggcaaaacccggaggcagaagtttggttacagtgtcaaccgaaagcgtctgaaccggaatgctcgacggaaggcagcgccgcggatcgaatgctcccacatccgacatgcctgggaccacgctaaatcggtacggcagaacctggccgagatggggttggctgtggaccccaacagggcggtgcccctccgtaagagaaaggtgaaggccatggaggtggacatagaggagaggcctaaagagcttgtacggaagccctatgtgctgaatgacctggaggcagaagccagccttccagaaaagaaaggaaatactctgtctcgggacctcattgactatgtacgctacatggtagagaaccacggggaggactataagcagagtggcaagacttcctcgattctttgcagaagaggaagatggaggtggagtgactggtttacatcacagctgccccaggctgaggcgtcccccggaccagtgaagctggagccagggtgtaaggcaaggaggtgctgtgtggctccagaggagctggccaggtcccatggaatcagaaggttacacacacgtgcacactccccgctctggggaaggaactgttctcagaggctccaatttatattcatctgggggttcacggaaaagccagaacctgctgttttcagggtgggtgatgtaaatatagtgtgtacataataaagcaaatatattttacttctctg

SEQ ID NO: 160076 - DNA, 2683 bp, Homo sapiens
  Payload ID: 11306
  Gene Symbol: NOP2
  Gene Name: NOP2 nucleolar protein
  Uniprot ID: P46087
  ENST ID: ENST00000322166
  CDS Start-End: 123-2561
agcgctacccgtgcgcctgcgtggaacgattctgtggcgagtgccggccgaaagctaggtccggattgcacgtggagggccgcccgaagggcactctcggacattaacccgcattctgtaccatggggcgcaagttggaccctacgaaggagaagcgggggccaggccgaaaggcccggaagcagaagggtgccgagacagaactcgtcagattcttgcctgcagtaagtgacgaaaattccaagaggctgtctagtcgtgctcgaaagagggcagccaagaggagattgggctctgttgaagcccctaagacaaataagtctcctgaggccaaaccattgcctggaaagctaccaaaagggatctctgcaggagctgtccagacagctggtaagaagggaccccagtccctatttaatgctcctcgaggcaagaagcgcccagcacctggcagtgatgaggaagaggaggaggaagactctgaagaagatggtatggtgaaccacggggacctctggggctccgaggacgatgctgatacggtagatgactatggagctgactccaactctgaggatgaggaggaaggtgaagcgttgctgcccattgaaagagctgctcggaagcagaaggcccgggaagctgctgctgggatccagtggagtgaagaggagaccgaggacgaggaggaagagaaagaagtgacccctgagtcaggccccccaaaggtggaagaggcagatgggggcctgcagatcaatgtggatgaggaaccatttgtgctgccccctgctggggagatggagcaggatgcccaggctccagacctgcaacgagttcacaagcggatccaggatattgtgggaattctgcgtgattttggggctcagcgggaggaagggcggtctcgttctgaatacctgaaccggctcaagaaggatctggccatttactactcctatggagacttcctgcttggcaagctcatggacctcttccctctgtctgagctggtggagttcttagaagctaatgaggtgcctcggcccgtcaccctccggaccaataccttgaaaacccgacgccgagaccttgcacaggctctaatcaatcgtggggttaacctggatcccctgggcaagtggtcaaagactggactagtggtgtatgattcttctgtgcccattggtgctacccccgagtacctggctgggcactacatgctgcagggagcctccagcatgttgcccgtcatggccttggcaccccaggaacatgagcggatcctggacatgtgttgtgcccctggaggaaagaccagctacatggcccagctgatgaagaacacgggtgtgatccttgccaatgacgccaatgctgagcggctcaagagtgttgtgggcaacttgcatcggctgggagtcaccaacaccattatcagccactatgatgggcgccagttccccaaggtggtggggggctttgaccgagtactgctggatgctccctgcagtggcactggggtcatctccaaggatccagccgtgaagactaacaaggatgagaaggacatcctgcgctgtgctcacctccagaaggagttgctcctgagtgctattgactctgtcaatgcgacctccaagacaggaggctacctggtttactgcacctgttctatcacagtagaagagaatgagtgggtggtagactatgctctgaaaaagaggaatgtgcgactggtgcccacgggcctagactttggccaggaaggttttacccgctttcgagaaaggcgcttccaccccagtctgcgttctacccgacgcttctaccctcatacccacaatatggatgggttcttcattgccaagttcaagaaattttccaattctatccctcagtcccagacaggaaattctgaaacagccacacctacaaatgtagacttgcctcaggtcatccccaagtctgagaacagcagccagccagccaagaaagccaagggggctgcaaagacaaagcagcagctgcagaaacagcaacatcccaagaaggcctccttccagaagctgaatggcatctccaaaggggcagactcagaattgtccactgtaccttctgtcacaaagacccaagcttcctccagcttccaggatagcagtcagccagctggaaaagccgaagggatcagggagccaaaggtgactgggaagctaaagcaacgatcacctaaattacagtcctccaagaaagttgctttcctcaggcagaatgcccctcccaagggcacagacacacaaacaccggctgtgttatccccatccaagactcaggccaccctgaaacctaaggaccatcatcagccccttggaagggccaagggggttgagaagcagcagttgccagagcagccttttgagaaagctgccttccagaaacagaatgatacccccaaggggcctcagcctcccactgtgtctcccatccgttccagccgccccccaccagcaaagaggaagaaatctcagtccaggggcaacagccagctgctgctatcttagatggttgaaaactagacgggtggctcactgccattgtcaccaggttggaactcttgcctctgtgaggatgccttctctactgtgcatacccatgaaatttaatacacattttaaaacctctg

SEQ ID NO: 160077 - DNA, 2736 bp, Homo sapiens
  Payload ID: 11306
  Gene Symbol: NOP2
  Gene Name: NOP2 nucleolar protein
  Uniprot ID: P46087
  ENST ID: ENST00000382421
  CDS Start-End: 77-2614
gccgaaagctaggtccggattgcacgtggagggccgcccgaagggcactctcggacattaacccgcattctgtaccatggggcgcaagttggaccctacgaaggagaagcgggggccaggccgaaaggcccggaagcagaagggtgccgagacagaactcgtcagattcttgcctgcagtaagtgacgaaaattccaagaggctgtctagtcgtgctcgaaagagggcagccaagaggagattgggctctgttgaagcccctaagacaaataagtctcctgaggccaaaccattgcctggaaagctaccaaaagggatctctgcaggagctgtccagacagctggtaagaagggaccccagtccctatttaatgctcctcgaggcaagaagcgcccagcacctggcagtgatgaggaagaggaggaggaagactctgaagaagatggtatggtgaaccacggggacctctggggctccgaggacgatgctgatacggtagatgactatggagctgactccaactctgaggatgaggaggaaggtgaagcggctggagtgcagtggctcggtcttggctcactgcaacctccacctcccgggttcaagcaattctcctgcctcagcttcccaagtagctgggatttacagttgctgcccattgaaagagctgctcggaagcagaaggcccgggaagctgctgctgggatccagtggagtgaagaggagaccgaggacgaggaggaagagaaagaagtgacccctgagtcaggccccccaaaggtggaagaggcagatgggggcctgcagatcaatgtggatgaggaaccatttgtgctgccccctgctggggagatggagcaggatgcccaggctccagacctgcaacgagttcacaagcggatccaggatattgtgggaattctgcgtgattttggggctcagcgggaggaagggcggtctcgttctgaatacctgaaccggctcaagaaggatctggccatttactactcctatggagacttcctgcttggcaagctcatggacctcttccctctgtctgagctggtggagttcttagaagctaatgaggtgcctcggcccgtcaccctccggaccaataccttgaaaacccgacgccgagaccttgcacaggctctaatcaatcgtggggttaacctggatcccctgggcaagtggtcaaagactggactagtggtgtatgattcttctgtgcccattggtgctacccccgagtacctggctgggcactacatgctgcagggagcctccagcatgttgcccgtcatggccttggcaccccaggaacatgagcggatcctggacatgtgttgtgcccctggaggaaagaccagctacatggcccagctgatgaagaacacgggtgtgatccttgccaatgacgccaatgctgagcggctcaagagtgttgtgggcaacttgcatcggctgggagtcaccaacaccattatcagccactatgatgggcgccagttccccaaggtggtggggggctttgaccgagtactgctggatgctccctgcagtggcactggggtcatctccaaggatccagccgtgaagactaacaaggatgagaaggacatcctgcgctgtgctcacctccagaaggagttgctcctgagtgctattgactctgtcaatgcgacctccaagacaggaggctacctggtttactgcacctgttctatcacagtagaagagaatgagtgggtggtagactatgctctgaaaaagaggaatgtgcgactggtgcccacgggcctagactttggccaggaaggttttacccgctttcgagaaaggcgcttccaccccagtctgcgttctacccgacgcttctaccctcatacccacaatatggatgggttcttcattgccaagttcaagaaattttccaattctatccctcagtcccagacaggaaattctgaaacagccacacctacaaatgtagacttgcctcaggtcatccccaagtctgagaacagcagccagccagccaagaaagccaagggggctgcaaagacaaagcagcagctgcagaaacagcaacatcccaagaaggcctccttccagaagctgaatggcatctccaaaggggcagactcagaattgtccactgtaccttctgtcacaaagacccaagcttcctccagcttccaggatagcagtcagccagctggaaaagccgaagggatcagggagccaaaggtgactgggaagctaaagcaacgatcacctaaattacagtcctccaagaaagttgctttcctcaggcagaatgcccctcccaagggcacagacacacaaacaccggctgtgttatccccatccaagactcaggccaccctgaaacctaaggaccatcatcagccccttggaagggccaagggggttgagaagcagcagttgccagagcagccttttgagaaagctgccttccagaaacagaatgatacccccaaggggcctcagcctcccactgtgtctcccatccgttccagccgccccccaccagcaaagaggaagaaatctcagtccaggggcaacagccagctgctgctatcttagatggttgaaaactagacgggtggctcactgccattgtcaccaggttggaactcttgcctctgtgaggatgccttctctactgtgcatacccatgaaatttaatacacattttaaaacctctg

SEQ ID NO: 160078 - DNA, 2701 bp, Homo sapiens
  Payload ID: 11306
  Gene Symbol: NOP2
  Gene Name: NOP2 nucleolar protein
  Uniprot ID: P46087
  ENST ID: ENST00000399466
  CDS Start-End: 153-2579
gagtgccggccgaaagctaggtccggattgcacgtggagggccgcccgaagggcactctcggacattaacccgcattctggtgggtctagaggaaattgggggacgaagagtggcagcactgacctggtctgggacgtggggagaaggtaccatggggcgcaagttggaccctacgaaggagaagcgggggccaggccgaaaggcccggaagcagaagggtgccgagacagaactcgtcagattcttgcctgcagtaagtgacgaaaattccaagaggctgtctagtcgtgctcgaaagagggcagccaagaggagattgggctctgttgaagcccctaagacaaataagtctcctgaggccaaaccattgcctggaaagctaccaaaaggagctgtccagacagctggtaagaagggaccccagtccctatttaatgctcctcgaggcaagaagcgcccagcacctggcagtgatgaggaagaggaggaggaagactctgaagaagatggtatggtgaaccacggggacctctggggctccgaggacgatgctgatacggtagatgactatggagctgactccaactctgaggatgaggaggaaggtgaagcgttgctgcccattgaaagagctgctcggaagcagaaggcccgggaagctgctgctgggatccagtggagtgaagaggagaccgaggacgaggaggaagagaaagaagtgacccctgagtcaggccccccaaaggtggaagaggcagatgggggcctgcagatcaatgtggatgaggaaccatttgtgctgccccctgctggggagatggagcaggatgcccaggctccagacctgcaacgagttcacaagcggatccaggatattgtgggaattctgcgtgattttggggctcagcgggaggaagggcggtctcgttctgaatacctgaaccggctcaagaaggatctggccatttactactcctatggagacttcctgcttggcaagctcatggacctcttccctctgtctgagctggtggagttcttagaagctaatgaggtgcctcggcccgtcaccctccggaccaataccttgaaaacccgacgccgagaccttgcacaggctctaatcaatcgtggggttaacctggatcccctgggcaagtggtcaaagactggactagtggtgtatgattcttctgtgcccattggtgctacccccgagtacctggctgggcactacatgctgcagggagcctccagcatgttgcccgtcatggccttggcaccccaggaacatgagcggatcctggacatgtgttgtgcccctggaggaaagaccagctacatggcccagctgatgaagaacacgggtgtgatccttgccaatgacgccaatgctgagcggctcaagagtgttgtgggcaacttgcatcggctgggagtcaccaacaccattatcagccactatgatgggcgccagttccccaaggtggtggggggctttgaccgagtactgctggatgctccctgcagtggcactggggtcatctccaaggatccagccgtgaagactaacaaggatgagaaggacatcctgcgctgtgctcacctccagaaggagttgctcctgagtgctattgactctgtcaatgcgacctccaagacaggaggctacctggtttactgcacctgttctatcacagtagaagagaatgagtgggtggtagactatgctctgaaaaagaggaatgtgcgactggtgcccacgggcctagactttggccaggaaggttttacccgctttcgagaaaggcgcttccaccccagtctgcgttctacccgacgcttctaccctcatacccacaatatggatgggttcttcattgccaagttcaagaaattttccaattctatccctcagtcccagacaggaaattctgaaacagccacacctacaaatgtagacttgcctcaggtcatccccaagtctgagaacagcagccagccagccaagaaagccaagggggctgcaaagacaaagcagcagctgcagaaacagcaacatcccaagaaggcctccttccagaagctgaatggcatctccaaaggggcagactcagaattgtccactgtaccttctgtcacaaagacccaagcttcctccagcttccaggatagcagtcagccagctggaaaagccgaagggatcagggagccaaaggtgactgggaagctaaagcaacgatcacctaaattacagtcctccaagaaagttgctttcctcaggcagaatgcccctcccaagggcacagacacacaaacaccggctgtgttatccccatccaagactcaggccaccctgaaacctaaggaccatcatcagccccttggaagggccaagggggttgagaagcagcagttgccagagcagccttttgagaaagctgccttccagaaacagaatgatacccccaaggggcctcagcctcccactgtgtctcccatccgttccagccgccccccaccagcaaagaggaagaaatctcagtccaggggcaacagccagctgctgctatcttagatggttgaaaactagacgggtggctcactgccattgtcaccaggttggaactcttgcctctgtgaggatgccttctctactgtgcatacccatgaaatttaatacacattttaaaacctctg

SEQ ID NO: 160079 - DNA, 2751 bp, Homo sapiens
  Payload ID: 11306
  Gene Symbol: NOP2
  Gene Name: NOP2 nucleolar protein
  Uniprot ID: P46087
  ENST ID: ENST00000545200
  CDS Start-End: 81-1967
gccggccgaaagctaggtccggattgcacgtggagggccgcccgaagggcactctcggacattaacccgcattctgtaccatggggcgcaagttggaccctacgaaggagaagcgggggccaggccgaaaggcccggaagcagaagggtgccgagacagaactcgtcagattcttgcctgcagtaagtgacgaaaattccaagaggctgtctagtcgtgctcgaaagagggcagccaagaggagattgggctctgttgaagcccctaagacaaataagtctcctgaggccaaaccattgcctggaaagctaccaaaaggagctgtccagacagctggtaagaagggaccccagtccctatttaatgctcctcgaggcaagaagcgcccagcacctggcagtgatgaggaagaggaggaggaagactctgaagaagatggtatggtgaaccacggggacctctggggctccgaggacgatgctgatacggtagatgactatggagctgactccaactctgaggatgaggaggaaggtgaagcgttgctgcccattgaaagagctgctcggaagcagaaggcccgggaagctgctgctgggatccagtggagtgaagaggagaccgaggacgaggaggaagagaaagaagtgacccctgagtcaggccccccaaaggtggaagaggcagatgggggcctgcagatcaatgtggatgaggaaccatttgtgctgccccctgctggggagatggagcaggatgcccaggctccagacctgcaacgagttcacaagcggatccaggatattgtgggaattctgcgtgattttggggctcagcgggaggaagggcggtctcgttctgaatacctgaaccggctcaagaaggatctggccatttactactcctatggagacttcctgcttggcaagctcatggacctcttccctctgtctgagctggtggagttcttagaagctaatgaggtgcctcggcccgtcaccctccggaccaataccttgaaaacccgacgccgagaccttgcacaggctctaatcaatcgtggggttaacctggatcccctgggcaagtggtcaaagactggactagtggtgtatgattcttctgtgcccattggtgctacccccgagtacctggctgggcactacatgctgcagggagcctccagcatgttgcccgtcatggccttggcaccccaggaacatgagcggatcctggacatgtgttgtgcccctggaggaaagaccagctacatggcccagctgatgaagaacacgggtgtgatccttgccaatgacgccaatgctgagcggctcaagagtgttgtgggcaacttgcatcggctgggagtcaccaacaccattatcagccactatgatgggcgccagttccccaaggtggtggggggctttgaccgagtactgctggatgctccctgcagtggcactggggtcatctccaaggatccagccgtgaagactaacaaggatgagaaggacatcctgcgctgtgctcacctccagaaggagttgctcctgagtgctattgactctgtcaatgcgacctccaagacaggaggctacctggtttactgcacctgttctatcacagtagaagagaatgagtgggtggtagactatgctctgaaaaagaggaatgtgcgactggtgcccacgggcctagactttggccaggaaggttttacccgctttcgagaaaggcgcttccaccccagtctgcgttctacccgacgcttctaccctcatacccacaatatggatgggttcttcattgccaagttcaagaaattttccaattctatccctcagtcccagacagacggtgtcttgctttgtcgctcaggctggactgcagtggtgcaatctcagctcattgcaacctccaccttccaggttcaagcgattcttgtgcctcagactcccaagtagctaggattacaggaaattctgaaacagccacacctacaaatgtagacttgcctcaggtcatccccaagtctgagaacagcagccagccagccaagaaagccaagggggctgcaaagacaaagcagcagctgcagaaacagcaacatcccaagaaggcctccttccagaagctgaatggcatctccaaaggggcagactcagaattgtccactgtaccttctgtcacaaagacccaagcttcctccagcttccaggatagcagtcagccagctggaaaagccgaagggatcagggagccaaaggtgactgggaagctaaagcaacgatcacctaaattacagtcctccaagaaagttgctttcctcaggcagaatgcccctcccaagggcacagacacacaaacaccggctgtgttatccccatccaagactcaggccaccctgaaacctaaggaccatcatcagccccttggaagggccaagggggttgagaagcagcagttgccagagcagccttttgagaaagctgccttccagaaacagaatgatacccccaaggggcctcagcctcccactgtgtctcccatccgttccagccgccccccaccagcaaagaggaagaaatctcagtccaggggcaacagccagctgctgctatcttagatggttgaaaactagacgggtggctcactgccattgtcaccaggttggaactcttgcctctgtgaggatgccttctctactgtgcatacccatgaaatttaatacacattttaaaacctctg

SEQ ID NO: 160080 - DNA, 1080 bp, Homo sapiens
  Payload ID: 11306
  Gene Symbol: NOP2
  Gene Name: NOP2 nucleolar protein
  ENST ID: ENST00000542944
  CDS Start-End: 256-1080
acatttccggagtgaaaggaacagccaaaggacattctgaggggtagaaagtacaggctcccagggtgtggggccagggaatgtgtggctgccattagtccaggactcttcaaacccttagggatctctgcaggagctgtccagacagctggtaagaagggaccccagtccctatttaatgctcctcgaggcaagaagcgcccagcacctggcagtgatgaggaagaggaggaggaagactctgaagaagatggtatggtgaaccacggggacctctggggctccgaggacgatgctgatacggtagatgactatggagctgactccaactctgaggatgaggaggaaggtgaagcgttgctgcccattgaaagagctgctcggaagcagaaggcccgggaagctgctgctgggatccagtggagtgaagaggagaccgaggacgaggaggaagagaaagaagtgacccctgagtcaggccccccaaaggtggaagaggcagatgggggcctgcagatcaatgtggatgaggaaccatttgtgctgccccctgctggggagatggagcaggatgcccaggctccagacctgcaacgagttcacaagcggatccaggatattgtgggaattctgcgtgattttggggctcagcgggaggaagggcggtctcgttctgaatacctgaaccggctcaagaaggatctggccatttactactcctatggagacttcctgcttggcaagctcatggacctcttccctctgtctgagctggtggagttcttagaagctaatgaggtgcctcggcccgtcaccctccggaccaataccttgaaaacccgacgccgagaccttgcacaggctctaatcaatcgtggggttaacctggatcccctgggcaagtggtcaaagactggactagtggtgtatgattcttctgtgcccattggtgctacccccgagtacctggctgggcactacatgctgcagggagcctccagcatgttgcccgtcatggccttggcaccccaggaacatgagcggatcctggacatgtgttgtgcccctggaggaaagacc

SEQ ID NO: 160081 - DNA, 657 bp, Homo sapiens
  Payload ID: 11306
  Gene Symbol: NOP2
  Gene Name: NOP2 nucleolar protein
  ENST ID: ENST00000545492
  CDS Start-End: 181-657
gtgcgcctgcgtggaacgattctgtggcgagtgccggccgaaagctaggtccggattgcacgtggagggccgcccgaagggcactctcggacattaacccgcattctggtgggtctagaggaaattgggggacgaagagtggcagcactgacctggtctgggacgtggggagaaggtaccatggggcgcaagttggaccctacgaaggagaagcgggggccaggccgaaaggcccggaagcagaagggtgccgagacagaactcgtcagattcttgcctgcagtaagtgacgaaaattccaagaggctgtctagtcgtgctcgaaagagggcagccaagaggagattgggctctgttgaagcccctaagacaaataagtctcctgaggccaaaccattgcctggaaagctaccaaaagggatctctgcaggagctgtccagacagctggtaagaagggaccccagtccctatttaatgctcctcgaggcaagaagcgcccagcacctggcagtgatgaggaagaggaggaggaagactctgaagaagatggtatggtgaaccacggggacctctggggctccgaggacgatgctgatacggtagatgactatggagctgactccaactctgaggatgaggaggaaggtgaagcggtg

SEQ ID NO: 160082 - DNA, 630 bp, Homo sapiens
  Payload ID: 11306
  Gene Symbol: NOP2
  Gene Name: NOP2 nucleolar protein
  ENST ID: ENST00000545915
  CDS Start-End: 124-369
tagcgctacccgtgcgcctgcgtggaacgattctgtggcgagtgccggccgaaagctaggtccggattgcacgtggagggccgcccgaagggcactctcggacattaacccgcattctgtaccatggggcgcaagttggaccctacgaaggagaagcgggggccaggccgaaaggcccggaagcagaagggtgccgagacagaactcgtcagattcttgcctgcagtaagtgacgaaaattccaagaggctgtctagtcgtgctcgaaagagggcagccaagaggagattgggctctgttgaagcccctaagacaaataagtctcctgaggccaaaccattgcctggaaagctaccaaaaggtccgtgaaactaagagctggatgctacatgaggagtccctttgggtcctgggtagggaagaactcgctaaacatttccggagtgaaaggaacagccaaaggacattctgaggggtagaaagtacaggctcccagggtgtggggccagggaatgtgtggctgccattagtccaggactcttcaaacccttagggatctctgcaggagctgtccagacagctggtaagaagggaccccagtccctatttaatgctcctcgaggcaagaag

SEQ ID NO: 160083 - DNA, 689 bp, Homo sapiens
  Payload ID: 11306
  Gene Symbol: NOP2
  Gene Name: NOP2 nucleolar protein
  ENST ID: ENST00000536124
  CDS Start-End: 160-689
ctgtggcgagtgccggccgaaagctaggtccggattgcacgtggagggccgcccgaagggcactctcggacattaacccgcattctggtgggtctagaggaaattgggggacgaagagtggcagcactgacctggtctgggacgtggggagaaggtaccatggggcgcaagttggaccctacgaaggagaagcgggggccaggccgaaaggcccggaagcagaagggtgccgagacagaactcgtcagattcttgcctgcagtaagtgacgaaaattccaagaggctgtctagtcgtgctcgaaagagggcagccaagaggagattgggctctgttgaagcccctaagacaaataagtctcctgaggccaaaccattgcctggaaagctaccaaaagggatctctgcaggagctgtccagacagctggtaagaagggaccccagtccctatttaatgctcctcgaggcaagaagcgcccagcacctggcagtgatgaggaagaggaggaggaagactctgaagaagatggtatggtgaaccacggggacctctggggctccgaggacgatgctgatacggtagatgactatggagctgactccaactctgaggatgaggaggaaggtgaagcgttgctgcccattgaaagagctgctcggaagcagaaggcccgggaagctgctgctgg

SEQ ID NO: 160084 - DNA, 848 bp, Homo sapiens
  Payload ID: 11306
  Gene Symbol: NOP2
  Gene Name: NOP2 nucleolar protein
  ENST ID: ENST00000542867
  CDS Start-End: 98-848
acgattctgtggcgagtgccggccgaaagctaggtccggattgcacgtggagggccgcccgaagggcactctcggacattaacccgcattctgtaccatggggcgcaagttggaccctacgaaggagaagcgggggccaggccgaaaggcccggaagcagaagggtgccgagacagaactcgtcagattcttgcctgcagtaagtgacgaaaattccaagaggctgtctagtcgtgctcgaaagagggcagccaagaggagattgggctctgttgaagcccctaagacaaataagtctcctgaggccaaaccattgcctggaaagctaccaaaaggagctgtccagacagctggtaagaagggaccccagtccctatttaatgctcctcgaggcaagaagcgcccagcacctggcagtgatgaggaagaggaggaggaagactctgaagaagatggtatggtgaaccacggggacctctggggctccgaggacgatgctgatacggtagatgactatggagctgactccaactctgaggatgaggaggaaggtgaagcgttgctgcccattgaaagagctgctcggaagcagaaggcccgggaagctgctgctgggatccagtggagtgaagaggagaccgaggacgaggaggaagagaaagaagtgacccctgagtcaggccccccaaaggtggaagaggcagatgggggcctgcagatcaatgtggatgaggaaccatttgtgctgccccctgctggggagatggagcaggatgcccaggctccagacctgcaacgagttcacaagcggatccaggatattgtgggaattctgcgtgattttgggg

SEQ ID NO: 160085 - DNA, 3038 bp, Homo sapiens
  Payload ID: 11306
  Gene Symbol: NOP2
  Gene Name: NOP2 nucleolar protein
  Uniprot ID: P46087
  ENST ID: ENST00000541778
  CDS Start-End: 490-2916
aaagtgctgggattacaggcgtgagccactgcgcccagcctggaattccgtgatcttgacgctggactagggcagtggatgcgagggagagggctccaatgtcgggccctggttcgaggagaaggtgcggctttcacccaacagaaaccggccgtgaggctaaaagccaactccatgagggaaggtcggtcaagctcaatggtttcgtcacattgctccctccacccgccgcgggtgtaagctgcgcgtctccttcgaattgccccctactcgccgccgccggctccgctggcgttcccagggcgagcgtaagttccgggtgcggcggccgactaggcgcaacaggaagaggcggggccgcgaggctagcgctacccgtgcgcctgcgtggaacgattctgtggcgagtgccggccgaaagctaggtccggattgcacgtggagggccgcccgaagggcactctcggacattaacccgcattctgtaccatggggcgcaagttggaccctacgaaggagaagcgggggccaggccgaaaggcccggaagcagaagggtgccgagacagaactcgtcagattcttgcctgcagtaagtgacgaaaattccaagaggctgtctagtcgtgctcgaaagagggcagccaagaggagattgggctctgttgaagcccctaagacaaataagtctcctgaggccaaaccattgcctggaaagctaccaaaaggagctgtccagacagctggtaagaagggaccccagtccctatttaatgctcctcgaggcaagaagcgcccagcacctggcagtgatgaggaagaggaggaggaagactctgaagaagatggtatggtgaaccacggggacctctggggctccgaggacgatgctgatacggtagatgactatggagctgactccaactctgaggatgaggaggaaggtgaagcgttgctgcccattgaaagagctgctcggaagcagaaggcccgggaagctgctgctgggatccagtggagtgaagaggagaccgaggacgaggaggaagagaaagaagtgacccctgagtcaggccccccaaaggtggaagaggcagatgggggcctgcagatcaatgtggatgaggaaccatttgtgctgccccctgctggggagatggagcaggatgcccaggctccagacctgcaacgagttcacaagcggatccaggatattgtgggaattctgcgtgattttggggctcagcgggaggaagggcggtctcgttctgaatacctgaaccggctcaagaaggatctggccatttactactcctatggagacttcctgcttggcaagctcatggacctcttccctctgtctgagctggtggagttcttagaagctaatgaggtgcctcggcccgtcaccctccggaccaataccttgaaaacccgacgccgagaccttgcacaggctctaatcaatcgtggggttaacctggatcccctgggcaagtggtcaaagactggactagtggtgtatgattcttctgtgcccattggtgctacccccgagtacctggctgggcactacatgctgcagggagcctccagcatgttgcccgtcatggccttggcaccccaggaacatgagcggatcctggacatgtgttgtgcccctggaggaaagaccagctacatggcccagctgatgaagaacacgggtgtgatccttgccaatgacgccaatgctgagcggctcaagagtgttgtgggcaacttgcatcggctgggagtcaccaacaccattatcagccactatgatgggcgccagttccccaaggtggtggggggctttgaccgagtactgctggatgctccctgcagtggcactggggtcatctccaaggatccagccgtgaagactaacaaggatgagaaggacatcctgcgctgtgctcacctccagaaggagttgctcctgagtgctattgactctgtcaatgcgacctccaagacaggaggctacctggtttactgcacctgttctatcacagtagaagagaatgagtgggtggtagactatgctctgaaaaagaggaatgtgcgactggtgcccacgggcctagactttggccaggaaggttttacccgctttcgagaaaggcgcttccaccccagtctgcgttctacccgacgcttctaccctcatacccacaatatggatgggttcttcattgccaagttcaagaaattttccaattctatccctcagtcccagacaggaaattctgaaacagccacacctacaaatgtagacttgcctcaggtcatccccaagtctgagaacagcagccagccagccaagaaagccaagggggctgcaaagacaaagcagcagctgcagaaacagcaacatcccaagaaggcctccttccagaagctgaatggcatctccaaaggggcagactcagaattgtccactgtaccttctgtcacaaagacccaagcttcctccagcttccaggatagcagtcagccagctggaaaagccgaagggatcagggagccaaaggtgactgggaagctaaagcaacgatcacctaaattacagtcctccaagaaagttgctttcctcaggcagaatgcccctcccaagggcacagacacacaaacaccggctgtgttatccccatccaagactcaggccaccctgaaacctaaggaccatcatcagccccttggaagggccaagggggttgagaagcagcagttgccagagcagccttttgagaaagctgccttccagaaacagaatgatacccccaaggggcctcagcctcccactgtgtctcccatccgttccagccgccccccaccagcaaagaggaagaaatctcagtccaggggcaacagccagctgctgctatcttagatggttgaaaactagacgggtggctcactgccattgtcaccaggttggaactcttgcctctgtgaggatgccttctctactgtgcatacccatgaaatttaatacacattttaaaacctctg

SEQ ID NO: 160086 - DNA, 572 bp, Homo sapiens
  Payload ID: 11306
  Gene Symbol: NOP2
  Gene Name: NOP2 nucleolar protein
  ENST ID: ENST00000538420
  CDS Start-End: 142-438
gaaagctaggtccggattgcacgtggagggccgcccgaagggcactctcggacattaacccgcattctggtgggtctagaggaaattgggggacgaagagtggcagcactgacctggtctgggacgtggggagaaggtaccatggggcgcaagttggaccctacgaaggagaagcgggggccaggccgaaaggcccggaagcagaagggtgccgagacagaactcgtcagattcttgcctgcagtaagtgacgaaaattccaagaggccaaaccattgcctggaaagctaccaaaagggatctctgcaggagctgtccagacagctggtaagaagggaccccagtccctatttaatgctcctcgaggcaagaagcgcccagcacctggcagtgatgaggaagaggaggaggaagactctgaagaagatggtatggtgaaccacggggacctctggggctccgaggacgatgctgatacggtagatgactatggagctgactccaactctgaggatgaggaggaaggtgaagcgttgctgcccattgaaagagctgctcggaagcagaaggcc

SEQ ID NO: 160087 - DNA, 2613 bp, Homo sapiens
  Payload ID: 11306
  Gene Symbol: NOP2
  Gene Name: NOP2 nucleolar protein
  Uniprot ID: P46087
  ENST ID: ENST00000537442
  CDS Start-End: 45-2483
cacgcgcgacgccaccttctcccatttctgcctgccacagtaccatggggcgcaagttggaccctacgaaggagaagcgggggccaggccgaaaggcccggaagcagaagggtgccgagacagaactcgtcagattcttgcctgcagtaagtgacgaaaattccaagaggctgtctagtcgtgctcgaaagagggcagccaagaggagattgggctctgttgaagcccctaagacaaataagtctcctgaggccaaaccattgcctggaaagctaccaaaagggatctctgcaggagctgtccagacagctggtaagaagggaccccagtccctatttaatgctcctcgaggcaagaagcgcccagcacctggcagtgatgaggaagaggaggaggaagactctgaagaagatggtatggtgaaccacggggacctctggggctccgaggacgatgctgatacggtagatgactatggagctgactccaactctgaggatgaggaggaaggtgaagcgttgctgcccattgaaagagctgctcggaagcagaaggcccgggaagctgctgctgggatccagtggagtgaagaggagaccgaggacgaggaggaagagaaagaagtgacccctgagtcaggccccccaaaggtggaagaggcagatgggggcctgcagatcaatgtggatgaggaaccatttgtgctgccccctgctggggagatggagcaggatgcccaggctccagacctgcaacgagttcacaagcggatccaggatattgtgggaattctgcgtgattttggggctcagcgggaggaagggcggtctcgttctgaatacctgaaccggctcaagaaggatctggccatttactactcctatggagacttcctgcttggcaagctcatggacctcttccctctgtctgagctggtggagttcttagaagctaatgaggtgcctcggcccgtcaccctccggaccaataccttgaaaacccgacgccgagaccttgcacaggctctaatcaatcgtggggttaacctggatcccctgggcaagtggtcaaagactggactagtggtgtatgattcttctgtgcccattggtgctacccccgagtacctggctgggcactacatgctgcagggagcctccagcatgttgcccgtcatggccttggcaccccaggaacatgagcggatcctggacatgtgttgtgcccctggaggaaagaccagctacatggcccagctgatgaagaacacgggtgtgatccttgccaatgacgccaatgctgagcggctcaagagtgttgtgggcaacttgcatcggctgggagtcaccaacaccattatcagccactatgatgggcgccagttccccaaggtggtggggggctttgaccgagtactgctggatgctccctgcagtggcactggggtcatctccaaggatccagccgtgaagactaacaaggatgagaaggacatcctgcgctgtgctcacctccagaaggagttgctcctgagtgctattgactctgtcaatgcgacctccaagacaggaggctacctggtttactgcacctgttctatcacagtagaagagaatgagtgggtggtagactatgctctgaaaaagaggaatgtgcgactggtgcccacgggcctagactttggccaggaaggttttacccgctttcgagaaaggcgcttccaccccagtctgcgttctacccgacgcttctaccctcatacccacaatatggatgggttcttcattgccaagttcaagaaattttccaattctatccctcagtcccagacaggaaattctgaaacagccacacctacaaatgtagacttgcctcaggtcatccccaagtctgagaacagcagccagccagccaagaaagccaagggggctgcaaagacaaagcagcagctgcagaaacagcaacatcccaagaaggcctccttccagaagctgaatggcatctccaaaggggcagactcagaattgtccactgtaccttctgtcacaaagacccaagcttcctccagcttccaggatagcagtcagccagctggaaaagccgaagggatcagggagccaaaggtgactgggaagctaaagcaacgatcacctaaattacagtcctccaagaaagttgctttcctcaggcagaatgcccctcccaagggcacagacacacaaacaccggctgtgttatccccatccaagactcaggccaccctgaaacctaaggaccatcatcagccccttggaagggccaagggggttgagaagcagcagttgccagagcagccttttgagaaagctgccttccagaaacagaatgatacccccaaggggcctcagcctcccactgtgtctcccatccgttccagccgccccccaccagcaaagaggaagaaatctcagtccaggggcaacagccagctgctgctatcttagatggttgaaaactagacgggtggctcactgccattgtcaccaggttggaactcttgcctctgtgaggatgccttctctactgtgcatacccatgaaatttaatacacattttaaaacctctggccactga

SEQ ID NO: 160088 - DNA, 668 bp, Homo sapiens
  Payload ID: 11306
  Gene Symbol: NOP2
  Gene Name: NOP2 nucleolar protein
  ENST ID: ENST00000540228
  CDS Start-End: 164-409
gattctgtggcgagtgccggccgaaagctaggtccggattgcacgtggagggccgcccgaagggcactctcggacattaacccgcattctggtgggtctagaggaaattgggggacgaagagtggcagcactgacctggtctgggacgtggggagaaggtaccatggggcgcaagttggaccctacgaaggagaagcgggggccaggccgaaaggcccggaagcagaagggtgccgagacagaactcgtcagattcttgcctgcagtaagtgacgaaaattccaagaggctgtctagtcgtgctcgaaagagggcagccaagaggagattgggctctgttgaagcccctaagacaaataagtctcctgaggccaaaccattgcctggaaagctaccaaaaggtccgtgaaactaagagctggatgctacatgaggagtccctttgggtcctgggtagggaagaactcgctaaacatttccggagtgaaaggaacagccaaaggacattctgaggggtagaaagtacaggctcccagggtgtggggccagggaatgtgtggctgccattagtccaggactcttcaaacccttagggatctctgcaggagctgtccagacagctggtaagaagggaccccagtccctatttaatgctcctcgaggcaaga

SEQ ID NO: 160089 - DNA, 2568 bp, Homo sapiens
  Payload ID: 11306
  Gene Symbol: NOP2
  Gene Name: NOP2 nucleolar protein
  ENST ID: ENST00000616948
  CDS Start-End: 1-2568
atggggcgcaagttggaccctacgaaggagaagcgggggccaggccgaaaggcccggaagcagaagggtgccgagacagaactcgtcagattcttgcctgcagtaagtgacgaaaattccaagaggctgtctagtcgtgctcgaaagagggcagccaagaggagattgggctctgttgaagcccctaagacaaataagtctcctgaggccaaaccattgcctggaaagctaccaaaagggatctctgcaggagctgtccagacagctggtaagaagggaccccagtccctatttaatgctcctcgaggcaagaagcgcccagcacctggcagtgatgaggaagaggaggaggaagactctgaagaagatggtatggtgaaccacggggacctctggggctccgaggacgatgctgatacggtagatgactatggagctgactccaactctgaggatgaggaggaaggtgaagcgttgctgcccattgaaagagctgctcggaagcagaaggcccgggaagctgctgctgggatccagtggagtgaagaggagaccgaggacgaggaggaagagaaagaagtgacccctgagtcaggccccccaaaggtggaagaggcagatgggggcctgcagatcaatgtggatgaggaaccatttgtgctgccccctgctggggagatggagcaggatgcccaggctccagacctgcaacgagttcacaagcggatccaggatattgtgggaattctgcgtgattttggggctcagcgggaggaagggcggtctcgttctgaatacctgaaccggctcaagaaggatctggccatttactactcctatggagacttcctgcttggcaagctcatggacctcttccctctgtctgagctggtggagttcttagaagctaatgaggtgcctcggcccgtcaccctccggaccaataccttgaaaacccgacgccgagaccttgcacaggctctaatcaatcgtggggttaacctggatcccctgggcaagtggtcaaagactggactagtggtgtatgattcttctgtgcccattggtgctacccccgagtacctggctgggcactacatgctgcagggagcctccagcatgttgcccgtcatggccttggcaccccaggaacatgagcggatcctggacatgtgttgtgcccctggaggaaagaccagctacatggcccagctgatgaagaacacgggtgtgatccttgccaatgacgccaatgctgagcggctcaagagtgttgtgggcaacttgcatcggctgggagtcaccaacaccattatcagccactatgatgggcgccagttccccaaggtggtggggggctttgaccgagtactgctggatgctccctgcagtggcactggggtcatctccaaggatccagccgtgaagactaacaaggatgagaaggacatcctgcgctgtgctcacctccagaaggagttgctcctgagtgctattgactctgtcaatgcgacctccaagacaggaggctacctggtttactgcacctgttctatcacagtagaagagaatgagtgggtggtagactatgctctgaaaaagaggaatgtgcgactggtgcccacgggcctagactttggccaggaaggttttacccgctttcgagaaaggcgcttccaccccagtctgcgttctacccgacgcttctaccctcatacccacaatatggatgggttcttcattgccaagttcaagaaattttccaattctatccctcagtcccagacaggaaattctgaaacagccacacctacaaatgtagacttgcctcaggtcatccccaagtctgagaacagcagccagccagccaagaaagccaagggggctgcaaagacaaagcagcagctgcagaaacagcaacatcccaagaaggcctccttccagaagctgaatggcatctccaaaggggcagactcagaattgtccactgtaccttctgtcacaaagacccaagcttcctccagcttccaggatagcagtcagccagctggaaaagccgaagggatcagggagccaaaggtgactgggaagctaaagcaacgatcacctaaattacagtcctccaagaaagttgctttcctcaggcagaatgcccctcccaagggcacagacacacaaacaccggctgtgttatccccatccaagactcaggccaccctgaaacctaaggaccatcatcagccccttggaagggccaagggggttgagaagcagcagttgccagagcagccttttgagaaagctgccttccagaaacagaatgatacccccaagggcctcagcctcccactgtgtctcccatccgttccagccgccccccaccagcaaagaggaagaaatctcagtccaggggcaacagccagctgctgctatcttagatggttgaaaactagacgggtggctcactgccattgtcaccaggttggaactcttgcctctgtgaggatgccttctctactgtgcatacccatgaaatttaatacacattttaaaacctctggccactga

SEQ ID NO: 160090 - DNA, 2791 bp, Homo sapiens
  Payload ID: 11306
  Gene Symbol: NOP2
  Gene Name: NOP2 nucleolar protein
  Uniprot ID: P46087
  ENST ID: ENST00000620535
  CDS Start-End: 131-2668
gcgaggctagcgctacccgtgcgcctgcgtggaacgattctgtggcgagtgccggccgaaagctaggtccggattgcacgtggagggccgcccgaagggcactctcggacattaacccgcattctgtaccatggggcgcaagttggaccctacgaaggagaagcgggggccaggccgaaaggcccggaagcagaagggtgccgagacagaactcgtcagattcttgcctgcagtaagtgacgaaaattccaagaggctgtctagtcgtgctcgaaagagggcagccaagaggagattgggctctgttgaagcccctaagacaaataagtctcctgaggccaaaccattgcctggaaagctaccaaaagggatctctgcaggagctgtccagacagctggtaagaagggaccccagtccctatttaatgctcctcgaggcaagaagcgcccagcacctggcagtgatgaggaagaggaggaggaagactctgaagaagatggtatggtgaaccacggggacctctggggctccgaggacgatgctgatacggtagatgactatggagctgactccaactctgaggatgaggaggaaggtgaagcggctggagtgcagtggctcggtcttggctcactgcaacctccacctcccgggttcaagcaattctcctgcctcagcttcccaagtagctgggatttacagttgctgcccattgaaagagctgctcggaagcagaaggcccgggaagctgctgctgggatccagtggagtgaagaggagaccgaggacgaggaggaagagaaagaagtgacccctgagtcaggccccccaaaggtggaagaggcagatgggggcctgcagatcaatgtggatgaggaaccatttgtgctgccccctgctggggagatggagcaggatgcccaggctccagacctgcaacgagttcacaagcggatccaggatattgtgggaattctgcgtgattttggggctcagcgggaggaagggcggtctcgttctgaatacctgaaccggctcaagaaggatctggccatttactactcctatggagacttcctgcttggcaagctcatggacctcttccctctgtctgagctggtggagttcttagaagctaatgaggtgcctcggcccgtcaccctccggaccaataccttgaaaacccgacgccgagaccttgcacaggctctaatcaatcgtggggttaacctggatcccctgggcaagtggtcaaagactggactagtggtgtatgattcttctgtgcccattggtgctacccccgagtacctggctgggcactacatgctgcagggagcctccagcatgttgcccgtcatggccttggcaccccaggaacatgagcggatcctggacatgtgttgtgcccctggaggaaagaccagctacatggcccagctgatgaagaacacgggtgtgatccttgccaatgacgccaatgctgagcggctcaagagtgttgtgggcaacttgcatcggctgggagtcaccaacaccattatcagccactatgatgggcgccagttccccaaggtggtggggggctttgaccgagtactgctggatgctccctgcagtggcactggggtcatctccaaggatccagccgtgaagactaacaaggatgagaaggacatcctgcgctgtgctcacctccagaaggagttgctcctgagtgctattgactctgtcaatgcgacctccaagacaggaggctacctggtttactgcacctgttctatcacagtagaagagaatgagtgggtggtagactatgctctgaaaaagaggaatgtgcgactggtgcccacgggcctagactttggccaggaaggttttacccgctttcgagaaaggcgcttccaccccagtctgcgttctacccgacgcttctaccctcatacccacaatatggatgggttcttcattgccaagttcaagaaattttccaattctatccctcagtcccagacaggaaattctgaaacagccacacctacaaatgtagacttgcctcaggtcatccccaagtctgagaacagcagccagccagccaagaaagccaagggggctgcaaagacaaagcagcagctgcagaaacagcaacatcccaagaaggcctccttccagaagctgaatggcatctccaaaggggcagactcagaattgtccactgtaccttctgtcacaaagacccaagcttcctccagcttccaggatagcagtcagccagctggaaaagccgaagggatcagggagccaaaggtgactgggaagctaaagcaacgatcacctaaattacagtcctccaagaaagttgctttcctcaggcagaatgcccctcccaagggcacagacacacaaacaccggctgtgttatccccatccaagactcaggccaccctgaaacctaaggaccatcatcagccccttggaagggccaagggggttgagaagcagcagttgccagagcagccttttgagaaagctgccttccagaaacagaatgatacccccaaggggcctcagcctcccactgtgtctcccatccgttccagccgccccccaccagcaaagaggaagaaatctcagtccaggggcaacagccagctgctgctatcttagatggttgaaaactagacgggtggctcactgccattgtcaccaggttggaactcttgcctctgtgaggatgccttctctactgtgcatacccatgaaatttaatacacattttaaaacctctgg

SEQ ID NO: 160091 - DNA, 2017 bp, Homo sapiens
  Payload ID: 11306
  Gene Symbol: NOP2
  Gene Name: NOP2 nucleolar protein
  Uniprot ID: P46087
  ENST ID: ENST00000617555
  CDS Start-End: 131-2017
gcgaggctagcgctacccgtgcgcctgcgtggaacgattctgtggcgagtgccggccgaaagctaggtccggattgcacgtggagggccgcccgaagggcactctcggacattaacccgcattctgtaccatggggcgcaagttggaccctacgaaggagaagcgggggccaggccgaaaggcccggaagcagaagggtgccgagacagaactcgtcagattcttgcctgcagtaagtgacgaaaattccaagaggctgtctagtcgtgctcgaaagagggcagccaagaggagattgggctctgttgaagcccctaagacaaataagtctcctgaggccaaaccattgcctggaaagctaccaaaaggagctgtccagacagctggtaagaagggaccccagtccctatttaatgctcctcgaggcaagaagcgcccagcacctggcagtgatgaggaagaggaggaggaagactctgaagaagatggtatggtgaaccacggggacctctggggctccgaggacgatgctgatacggtagatgactatggagctgactccaactctgaggatgaggaggaaggtgaagcgttgctgcccattgaaagagctgctcggaagcagaaggcccgggaagctgctgctgggatccagtggagtgaagaggagaccgaggacgaggaggaagagaaagaagtgacccctgagtcaggccccccaaaggtggaagaggcagatgggggcctgcagatcaatgtggatgaggaaccatttgtgctgccccctgctggggagatggagcaggatgcccaggctccagacctgcaacgagttcacaagcggatccaggatattgtgggaattctgcgtgattttggggctcagcgggaggaagggcggtctcgttctgaatacctgaaccggctcaagaaggatctggccatttactactcctatggagacttcctgcttggcaagctcatggacctcttccctctgtctgagctggtggagttcttagaagctaatgaggtgcctcggcccgtcaccctccggaccaataccttgaaaacccgacgccgagaccttgcacaggctctaatcaatcgtggggttaacctggatcccctgggcaagtggtcaaagactggactagtggtgtatgattcttctgtgcccattggtgctacccccgagtacctggctgggcactacatgctgcagggagcctccagcatgttgcccgtcatggccttggcaccccaggaacatgagcggatcctggacatgtgttgtgcccctggaggaaagaccagctacatggcccagctgatgaagaacacgggtgtgatccttgccaatgacgccaatgctgagcggctcaagagtgttgtgggcaacttgcatcggctgggagtcaccaacaccattatcagccactatgatgggcgccagttccccaaggtggtggggggctttgaccgagtactgctggatgctccctgcagtggcactggggtcatctccaaggatccagccgtgaagactaacaaggatgagaaggacatcctgcgctgtgctcacctccagaaggagttgctcctgagtgctattgactctgtcaatgcgacctccaagacaggaggctacctggtttactgcacctgttctatcacagtagaagagaatgagtgggtggtagactatgctctgaaaaagaggaatgtgcgactggtgcccacgggcctagactttggccaggaaggttttacccgctttcgagaaaggcgcttccaccccagtctgcgttctacccgacgcttctaccctcatacccacaatatggatgggttcttcattgccaagttcaagaaattttccaattctatccctcagtcccagacagacggtgtcttgctttgtcgctcaggctggactgcagtggtgcaatctcagctcattgcaacctccaccttccaggttcaagcgattcttgtgcctcagactcccaagtag

SEQ ID NO: 160092 - DNA, 3289 bp, Homo sapiens
  Payload ID: 11307
  Gene Symbol: NSUN3
  Gene Name: NOP2/Sun domain family, member 3
  Uniprot ID: Q9H649
  ENST ID: ENST00000314622
  CDS Start-End: 212-1234
tgcgcacgaaatctcccgcgggagctaagcctcttcgacaagaattctatagcgcgagcaaatcagtatctcgcgagaaattgaagaggaaacgtgagaatgaaagtggatgcccgcgaatcccggaagtcagactgtttttttcagttccctggaggctttttgatactgattcgcgtacacctgttgtttgaaagctctcagcgggacaatgctgacccagctgaaagcaaaatcagaggggaagcttgcaaaacagatttgcaaagttgtgttggatcattttgaaaaacagtattccaaagaactcggagatgcctggaatacagtaagggagatactaacatctccatcatgctggcaatatgctgtcctgcttaaccgattcaattatccttttgaactggaaaaggatttacatttgaagggctatcacacactctctcagggatctttacccaactatcctaaatcagtgaagtgttaccttagcagaactccgggccgaatcccttcagaaagacaccaaattggaaacctgaaaaaatattatctcctaaatgctgcttctcttctcccagtgttggctctggaattaagggatggggagaaggttctggatctctgtgctgctcctggagggaaatcaatagctctgctgcagtgtgcttgtccaggttatcttcattgtaatgaatatgatagtctgagattgaggtggctaaggcagacgttggaatctttcatcccacagcctttgataaatgtaattaaagtgtctgaattggatggcagaaaaatgggagatgcccagcctgaaatgtttgacaaggtgttagtggatgctccgtgttcaaatgatcgaagctggttgttttcttctgactctcagaaggcatcctgtaggataagtcaaaggaggaatttgcctcttctacagatagagctgttaaggtctgcaattaaggccttacgtcctggagggatacttgtatactctacatgcacgctttccaaggcagaaaatcaagatgtgatcagtgaaattttaaactcccacggtaacatcatgcctatggacattaaaggaatagcaaggacttgctcccacgacttcacatttgctcccactggccaggaatgtgggctcttagtgattccagataagggcaaagcctggggcccaatgtatgtagccaaattgaagaaatcatggagcacaggaaaatggtgacatgaatttgtaaactgtgtttatgtgttattatatttatatttctgaactcagtacatgttaatatttaaataattatgcagtaactttctctgggtctgtttggaatcctatttagttaatactttagcatcttagaatctaggcttgagaattgttcaggtgtatttttttcctagaaatatatctgtaacaatgatttaaggtggtgcagatggtgtttgttctatattataaatctgctgtctttgcttggcattttatagttaaattaattagaatatgtggttttatgcataacgtgtttagttctgtattctttctatgatagtgctttgaaccttcaaaaattcacattttccagcgctccgaccattttcccgcttatcaaatgtacaaatttgttcaaggtttttttttccccccaacttttgtaactgattgtctcagaactgattggtattctgagactaactttttaagcagcactatttctagttctggcaaaatagtttttttatttgcaatgttgttttctgttaaagactatattatgtttactgcaaaggtcagtgactctactgacaccagctttatttcccccactttttttgcattcacaaatacaaattgaaagggtaaattatattgaaaggcctttagaacagcagattcacatgcacatgtttgactttcgacattcagcttatagaattatggagtctatccagcaggctataaagcaagtacttgagacaaaaccggaatgattaataactgcaatcactgaactatatttggagagttttgttacataattgcagtcataatgagcactacagaatctgattatcttacattcacaatctggaggggctttttatttcactttgttataaaatgttctctgagaatatgatgccacatattaatgcacaagagggagatgcctaatgagagtggactgtgtgattaccagaacccagtgccatttactaagtggctctccatgtttacataaatcctgggaatactgtatacatttcttcttatgtacttagggttttagcttcagtcagcatcacactttttctccagaaattacttcacttagagtacaaacatatttttccaactattaagaaaaattatgcagcacatctcaaaaaatagcatctctttggaaaatagcctttaaaaaaaaacaactttatctgattatagaaatacaaaattctgctaaagctgaatacttttgaattgttcattatgttctgtgcctttaaactagagactatttgcttattaatattttttgttttgcaagcatatgtaacccggtttatatcatcaggaagtcttaggaagaatttttttttctgtaccttcagtctgttaatcatttgttttcctttatgtccaattgatatgtttaaagtaaagctaaagtccaggcacggtggcttatgcctgtaatcccagcactttgtcaggccgaggcagggggcatctcctgaggtcagaagttcgagactagcctgcccaacatggtaaaaccccgactctactaaaaatgcaaaaaaattagacaggcatggtggctggcaccagcaatcccagctacttaggaggctgaggcaggagaatcacttgaacccaggaggcagaggttgcagttagccaagatctcgccattgcactccagcctgggcgacaagagtgaaaccccgtagcaaaaaaataataataatagtaattaaataaaaataaagtaacgctagaactgttggaccaaatcaagtatatgggtaaatacagaagaataatgatggtggaaaagatgttttcttttttaagttatcattattagtttgttttttttatcttcagacactataggttttaaaaataggtttcttttatgtaggttaatcacagagtaaatctgcacactgtactttgttaaatgtcggtattttcccagtataatgcgatgaagcttaatctgaatacttggtatgctattgaatttactttcctatgattactgaaaaa

SEQ ID NO: 160093 - DNA, 582 bp, Homo sapiens
  Payload ID: 11307
  Gene Symbol: NSUN3
  Gene Name: NOP2/Sun domain family, member 3
  ENST ID: ENST00000483378
  CDS Start-End: 148-381
agtatctcgcgagaaattgaagaggaaacgtgagaatgaaagtggatgcccgcgaatcccggaagtcagactgtttttttcagttccctggaggctttttgatactgattcgcgtacacctgttgtttgaaagctctcagcgggacaatgctgacccagctgaaagcaaaatcagaggggaagcttgcaaaacagatttgcaaagttgtgttggatcattttgaaaaacagtattccaaagaactcggagatgcctggaatacagtaagtgttggctctggaattaagggatggggagaaggttctggatctctgtgctgctcctggagggaaatcaatagctctgctgcagtgtgcttgtccaggttatcttcattgtaatgaatatgatagtctgagattgaggtggctaaggcagacgttggaatctttcatcccacagcctttgataaatgtaattaaagtgtctgaattggatggcagaaaaatgggagatgcccagcctgaaatgtttgacaaggtgttagtggatgctccgtgttcaaatgatcgaagctggttgttttcttctgactctcagaa

SEQ ID NO: 160094 - DNA, 2150 bp, Homo sapiens
  Payload ID: 11308
  Gene Symbol: NSUN4
  Gene Name: NOP2/Sun domain family, member 4
  Uniprot ID: Q96CB9
  ENST ID: ENST00000474844
  CDS Start-End: 651-1805
ctcagcttcccgagtagctgggactgcaggcgccagcaacctcgcccggctaattttttgtatttttggtagagacggggtttcaccgtgttagccaggagggtctcgatctcctgacctcgtgatctgctcgcctcggcctcccaaagtgctgggattacaggcgtgagccaccacgcccggccaggtcccgaaacttaagcttcatttgtttcactgcaaatctgcttctgcctacaagcctggtctcattttcctctacctaaggatcttcctccatgcaatttcggcctaggaggcccttcccgccccttttcgcctagctaactctttcggtactcaaccaccaactcctaatcctccctggtcccccaagtgggctaggggcttcttgggagtccctcgcactgctctaagcatccaggcagagtcattattccgggtgccaggttgctctttttccagcagccttcaggggactcctggctgggcggagtctgtagaggcgcgcggagtcctgggagagcgtcagatgtatttcctttcccttttttcgctcgtgtcccgccgggtggcgctcaccacctccccggaacacgcgagtctcctgtcgcggttccggtcggaattaccccgtggagcacgccgatatggctgcgctgacactgaggggtgtccgggagctgctgaagcgtgtggacctcgcgacggtcccgcggagacatcgatataagaagaaatgggctgccacagagcccaaattccctgctgttcgactggctttgcagaattttgacatgacttacagtgtgcagtttggagatctttggccatcaatccgtgtcagtctcctctcagagcagaagtatggtgcactggtcaataactttgctgcctgggatcatgtaagtgctaagctggagcagctgagtgccaaggattttgtgaatgaagccatctcccactgggaactgcagtctgagggtggccaatctgcagccccatcccctgcctcctgggcctgcagtccgaaccttcgatgcttcacttttgacagaggggatatcagtcgcttccctcctgccagacctggcagcctgggtgtcatggagtactacctgatggatgctgcctccttgctgcctgttctggccctcggcctgcagcctggggacatcgtgcttgacctatgtgcagctcctgggggaaagacactagcgttgcttcagactggctgttgccgcaatcttgctgccaatgatctctccccgtcccgaatagccagactacagaagatccttcacagctatgtgcctgaagagatcagggatggaaatcaagttcgagttacctcatgggatggcaggaaatggggagaactggagggggacacctatgaccgggtgctggtggatgtgccctgtaccacagaccgccactcccttcatgaggaggagaacaacatctttaagcggtcaaggaagaaggagcgacagatattgcctgtgctgcaagtgcagcttcttgcggctggactccttgccaccaaaccaggaggccatgttgtctattctacctgctcactctcacacttacagaacgagtatgtggtgcaaggtgccattgagctcctggccaatcaatacagcatccaggtacaggtggaagatctgactcacttccgaagggttttcatggacacattttgtttcttctcatcctgtcaggttggggagctggtaataccaaacctcatggccaattttggccccatgtacttctgcaaaatgcgtaggctgacatagtatcacccaatccctgaagcaagaatacaaagggtatactctgttggatgcaccagaaactggaaactgggaccagtggcagagatgcactctcggtcctgtctccatcctgttcgtgtctttctgcagttttcggcaataagaagtagaagatttgctgtcctgctgtccaattgtggagcatcagcaggtttccaactcactcattaacccctaccccatctccaggcctgtactaaagtttgctgcccgcttaggggcttagaaggagaagccagtgagcaggctcacactaagttgtaaacataggagaagcatttggccaataaagttgttgaaactcta

SEQ ID NO: 160095 - DNA, 2087 bp, Homo sapiens
  Payload ID: 11308
  Gene Symbol: NSUN4
  Gene Name: NOP2/Sun domain family, member 4
  Uniprot ID: Q96CB9
  ENST ID: ENST00000537428
  CDS Start-End: 734-1741
actgtctcttgttccccagctgtgtccacctacctttctgtcccccactcccccttttacttccctccctcccctccccctttcccttgcccattcttcccccacatgacttctcctttcctcattgattttccagcccggtcgccctcacccctcggaaaataccatagcgaccttgcctgcactcctgggtctccgccgccttgcaggaaaggattcagccccttcctcaacctcgagctgcctctggcgaccgggcaaggttacagcgaccaccctgtccatactgccggcccaaaccctggcaaaaggtgcaacgaatcctctcatcctctggactctccttgcttctccagagaccctttttcttgcctcactggaagccctggaatttcttctatgaccggcacgcccccctgcccaccccagccgattccctcgccacctccaccatctcttccacccccacaaccttcctcgcactcagggagatggtcttttgagtcctcttccccactcctggaaaggacctactgccgctagccctgccactcgggttccccactctccagcccttattttgagcagttcagcattccggggtcaccccctctctgtcagcggacaccttattgcagctggatgagtccctccagaatgcggcgtccctgtcttcaaggctgccacagagcccaaattccctgctgttcgactggctttgcagaattttgacatgacttacagtgtgcagtttggagatctttggccatcaatccgtgtcagtctcctctcagagcagaagtatggtgcactggtcaataactttgctgcctgggatcatgtaagtgctaagctggagcagctgagtgccaaggattttgtgaatgaagccatctcccactgggaactgcagtctgagggtggccaatctgcagccccatcccctgcctcctgggcctgcagtccgaaccttcgatgcttcacttttgacagaggggatatcagtcgcttccctcctgccagacctggcagcctgggtgtcatggagtactacctgatggatgctgcctccttgctgcctgttctggccctcggcctgcagcctggggacatcgtgcttgacctatgtgcagctcctgggggaaagacactagcgttgcttcagactggctgttgccgcaatcttgctgccaatgatctctccccgtcccgaatagccagactacagaagatccttcacagctatgtgcctgaagagatcagggatggaaatcaagttcgagttacctcatgggatggcaggaaatggggagaactggagggggacacctatgaccgggtgctggtggatgtgccctgtaccacagaccgccactcccttcatgaggaggagaacaacatctttaagcggtcaaggaagaaggagcgacagatattgcctgtgctgcaagtgcagcttcttgcggctggactccttgccaccaaaccaggaggccatgttgtctattctacctgctcactctcacacttacagaacgagtatgtggtgcaaggtgccattgagctcctggccaatcaatacagcatccaggtacaggtggaagatctgactcacttccgaagggttttcatggacacattttgtttcttctcatcctgtcaggttggggagctggtaataccaaacctcatggccaattttggccccatgtacttctgcaaaatgcgtaggctgacatagtatcacccaatccctgaagcaagaatacaaagggtatactctgttggatgcaccagaaactggaaactgggaccagtggcagagatgcactctcggtcctgtctccatcctgttcgtgtctttctgcagttttcggcaataagaagtagaagatttgctgtcctgctgtccaattgtggagcatcagcaggtttccaactcactcattaacccctaccccatctccaggcctgtactaaagtttgctgcccgcttaggggcttagaaggagaagccagtgagcaggctcacactaagttgtaaacataggagaagcatttggccaataaagttgttgaaactctat

SEQ ID NO: 160096 - DNA, 4344 bp, Homo sapiens
  Payload ID: 11308
  Gene Symbol: NSUN4
  Gene Name: NOP2/Sun domain family, member 4
  ENST ID: ENST00000307089
  CDS Start-End: 39-494
gcggttccggtcggaattaccccgtggagcacgccgatatggctgcgctgacactgaggggtgtccgggagctgctgaagcgtgtggacctcgcgacggtcccgcggagacatcgatataagaagaaatgggctgccacagagcccaaattccctgctgttcgactggctttgcagaattttgacatgacttacagtgtgcagtttggagatctttggccatcaatccgtgtcagtctcctctcagagcagaagtatggtgcactggtcaataactttgctgcctgggatcatgtaagtgctaagctggagcagctgagtgccaaggattttgtgaatgaagccatctcccactgggaactgcagtctgagggtggccaatctgcagccccatcccctgcctcctgggcctgcagtccgaaccttcgatgcttcacttttgacagaggggatatcagtcgcttccctcctgccaggcaatcttgctgccaatgatctctccccgtcccgaatagccagactacagaagatccttcacagctatgtgcctgaagagatcagggatggaaatcaagttcgagttacctcatgggatggcaggaaatggggagaactggagggggacacctatgaccgggtgctggtggatgtgccctgtaccacagaccgccactcccttcatgaggaggagaacaacatctttaagcggtcaaggaagaaggagcgacagatattgcctgtgctgcaagtgcagcttcttgcggctggactccttgccaccaaaccaggaggccatgttgtctattctacctgctcactctcacacttacagaacgagtatgtggtgcaaggtgccattgagctcctggccaatcaatacagcatccaggtacaggtggaagatctgactcacttccgaagggttttcatggacacattttgtttcttctcatcctgtcaggttggggagctggtaataccaaacctcatggccaattttggccccatgtacttctgcaaaatgcgtaggctgacatagtatcacccaatccctgaagcaagaatacaaagggtatactctgttggatgcaccagaaactggaaactgggaccagtggcagagatgcactctcggtcctgtctccatcctgttcgtgtctttctgcagttttcggcaataagaagtagaagatttgctgtcctgctgtccaattgtggagcatcagcaggtttccaactcactcattaacccctaccccatctccaggcctgtactaaagtttgctgcccgcttaggggcttagaaggagaagccagtgagcaggctcacactaagttgtaaacataggagaagcatttggccaataaagttgttgaaactctatagacctggggctgcagttggggacttcatgtcagtgcaaatgccattagttccatttgtaccagccagttactgagcccctgtcacccttgaagtgagttccacctgaccagtcttgagcagccaacaggctcaattaagcccgcctggtttttccatatggctcatgatctaatttaaggaacaagtaactaaaaatgttaagccagtgcaaaataatctgcttacctactcacattggaaaaaccctctgagctgaataattctggccattcctgctgtcaacaatactgctgcccaaatgtggcttaggaggctgcttctgccacaaaaccgtcatactcttgtgcgtgccttgttctttgttcattcatctagcaggtattcccagacctcgtgtatgacaggtagctagggagctcttggagatgtagcagttgggattgtgggagattactgggcttcctcatcctttagaatggtaactctccttttgctttctgaacacctaggaatttcctgatgttttgttttgttggattccagactttttgttgtttctagtctgcagctgagctctggtgcctgttctttggcccaccccctaatccctaactcttccctcagcatcacagggcttcactgcacacactgtgttcagggcaagatttcatcatttactgactgcatactcgatatgttgtttttgtaactttagccaaaagaaagtaacctttagtggcagggatataaaaaattgctcagggtcacttgcagatattttatttttaaactttttttttttttcctggaaaacatcctgtgcagaaaagggtatataattttagaatacctgaaggcttcttggcttttccactttccttattcctcctcttcctgccactctttttgtcccttctgtctttcctgctcatccttatttgggtattagaggtgtcagttgaggagggactttagctgaggttaagccttcttttgggatttgcattgtaattgagggccctggaagatctctgagactcaaaatcaggtgaagctaggaagatggagctttaaggagcatggctagtgctctgagtaggaccgtaaccgcctccgtgcgtggcatatggtccctgcatgctgttcactctgtatagtacttagtattcgctgaggctaagaggcctcaggtgcctgggcttctgcccttggactcctggatatccagcctagtgctaattgaatgctaagcagtggtaattcaaaatgagagggtcccctgcctctagagtcatcatctaattggggacaggcagacctagataagaaaagcagagaactactttggaaaacagtttatctgctgtaattgaacattcagctaccctataacccagttaatccaatactggggataaatcctagagaaactcatacatgtacaccaggagatgtgtacaagaatattcatagcaaccctattcacaaaagcaaaagcctagaaataacccagatgcccatgagcaagagagtggacaagtaaactggaatattcacataatagaacattatacaattgtcaaatgaactataatgatacctaaccatatggatgaatctgagcaataaaataattaagtgaaaaaagtttaatcccagaagagtaaatgtagcatgatgccctttctaaatgaaaggttttttcttttctatggagttattctttacatacaatatagttcataaattttaaatatattgtttaataaattttgataattgtatataatagtatagtcaccatcaagatgtagaaaatagaaaataggctaggcacagtggctcacgcctgtaatctcaacactttgggaggccaaggtgggaagatcacttgatcccaggaattctagatcagcttggacaatgtagtgagacctggtctttaccaaaaaaaaaaaaaaaaaaattagctgggtgcgctggcatgtgcctgtggtcccagctactcaggaggctgaggcaggaggatcacttgagcacaggagtttgaggctgcagtgagcagcctgggcaagagagtgagactccgttttgtgccactgcactccagccagggtgacagagtgagactctgtctcaaaaaaaaaaaaaaaaaaaaaggcattgggatttataatgtgctgtttaaagtctgaagctcggccaggtgcggtggctcacgcctgtaatcccaaaactttggaaggctgaggcaggtggatcacctgaggtcaggaggagttcaagaccagcctggccaacgtggtgaaaccccatctctataaaagtacaaaagggcatgatggcaggtgcctgtaatctcagctactcagtaggctggagcgggagaactgcttgaacctgggaggtggaggtttcagtgagccaagatagcgccattgcactccagcgtgggcgacagcaagagacttcatttcgataaataagtaaataaataaataaagtctgaagctccactggtcactccttttattgattatttgcagctggtctaaccagttacgtatgtctggcttgattacatggccagagcaacataaaagccctgctgggaacttctgatttgagctcttccaaaaccaggatggatgcctcacatagatcatgatgattcaatccaaaggcactttgcagtgcagtccacatgtgcataaggaccatggggagcttgtatttgggaattctgagattcctgatgtttacctacctagtctttctcttgctgccctgtatcctttgcctttaaataaaaatcttaagtgattatgctctgtgaagcctggataatcctttcaaatatttggtcttggaaaatttttgcatatatacatggaatcatacaatatgtagtctttggtgtttgacttctttgacttagtgtaatgtttttgagattca

SEQ ID NO: 160097 - DNA, 2126 bp, Homo sapiens
  Payload ID: 11308
  Gene Symbol: NSUN4
  Gene Name: NOP2/Sun domain family, member 4
  ENST ID: ENST00000495427
  CDS Start-End: 1-410
ctgtggcctctcaaggcccttgcaaagagcctctgcagatcccctacagctgccctttgccttcatccaaggattccagctgtagcaccaatcccagctgtagttcgactattattagcaaatgccagagtagtgacagcgagagcaggagttcccaccaaagccaaagccggagccaaagcaagagtccccatgatggcagaagtcagagctggagcaagaggcatcatctgagcagaagtccaagtcagaaaagcagtccctatcctagcagaagctggggccggagcagtaatcctcaacaaaacacaagtcagggccagagtgagagtccccaacttagcataaatgagcaccagggtgagagtccccaaattagcagaggtcagggcaagagcaagagtctatgatggcaaaagtcggaaccggagcaagagtccccaacatggcaaaggtcaaggccagagcaagagtccccaacatagcaggagccagagcaagagtcccagcgaggcaaaagtcacagagcaagagtcctcaccataacaagaaatgagggccagagcaaaagttctgaccagaccaaaaatctaggccagagcaaggcatagatagtaacaagattgccagctatagcaagcatcccagctgcagcaaccaggaccgacttgtgcactcctcatctgaagtcttcatttctcttttactctgcctccttgttcttgtcctcttgtcccctgctacccccatagcagtcatcctagaagtccctgttttggttcacacctcaagattctgtgggccctccttatccaacctttctggggtctgggaactctcccagcatgaccctcaaacctctgattctaagcatggtggtgctagtcactgtgtgacgctaggctgccacagagcccaaattccctgctgttcgactggctttgcagaattttgacatgacttacagtgtgcagtttggagatctttggccatcaatccgtgtcagtctcctctcagagcagaagtatggtgcactggtcaataactttgctgcctgggatcatacctggcagcctgggtgtcatggagtactacctgatggatgctgcctccttgctgcctgttctggccctcggcctgcagcctggggacatcgtgcttgacctatgtgcagctcctgggggaaagacactagcgttgcttcagactggctgttgccgcaatcttgctgccaatgatctctccccgtcccgaatagccagactacagaagatccttcacagctatgtgcctgaagagatcagggatggaaatcaagttcgagttacctcatgggatggcaggaaatggggagaactggagggggacacctatgaccgggtgctggtggatgtgccctgtaccacagaccgccactcccttcatgaggaggagaacaacatctttaagcggtcaaggaagaaggagcgacagatattgcctgtgctgcaagtgcagcttcttgcggctggactccttgccaccaaaccaggaggccatgttgtctattctacctgctcactctcacacttacagaacgagtatgtggtgcaaggtgccattgagctcctggccaatcaatacagcatccaggtacaggtggaagatctgactcacttccgaagggttttcatggacacattttgtttcttctcatcctgtcaggttggggagctggtaataccaaacctcatggccaattttggccccatgtacttctgcaaaatgcgtaggctgacatagtatcacccaatccctgaagcaagaatacaaagggtatactctgttggatgcaccagaaactggaaactgggaccagtggcagagatgcactctcggtcctgtctccatcctgttcgtgtctttctgcagttttcggcaataagaagtagaagatttgctgtcctgctgtccaattgtggagcatcagcaggtttccaactcactcattaacccctaccccatctccaggcctgtactaaagtttgctgcccgcttaggggcttagaaggagaagccagtgagcaggctcacactaagttgtaaacataggagaagcatttggccaataaagttgttgaaactct

SEQ ID NO: 160098 - DNA, 3867 bp, Homo sapiens
  Payload ID: 11308
  Gene Symbol: NSUN4
  Gene Name: NOP2/Sun domain family, member 4
  ENST ID: ENST00000498008
  CDS Start-End: 9-1967
cctccagaatgcggcgtccctgtcttcaaggcacgtactgtgaccagcacactaatctctgttactctagcggatggccttcagcttttggaaccagcccggcaacctcctttccccttgctcatcagtccccgggaacgagcccagtgacctcccctcagctcactcatgtacccttggaaactggacccatgatttcgcctcctcctacacataggaccccgggaacttgcctcacgatttcacctcctcttgctcgccggccggtggaaactagtcctatggcctccccaaccctttctcacagagttttggaaactgggctgatgatctctctgccctctcactggttctcagggagaagttataatgacccccttctctccccagcatcttccccacctactggcagcttttaccatggcagccttaagcctctagactcttgtgaacccaaaccacagcttgacctgccccttgagaaaaattgttgtggcttcccactctcttctcaggcaggcatgcctggctctcccagctcacctcaggagggctcttatcattactcccatctttcctcagaggcctacatacctacccctgggagtccttgctatgccatctgcctgtgccccgggagtactgattctccttgctcaccccagtcccaggctcccaggaaggcttgcattgagtcccttctctcctgggaggcaactgggaactcttacctcatcctaaccccggacaccacaacttctggtcccccctgttcccaggaaccatctcgtccccatggtcctcattctgtcctttccttcccttcacccctgggcaaccagtttatatctccaccccagtcacttccccgcagaagctataatgaaccccctcttcccactccagtttccccccaaccgaagtcccctaagtccccagagttaagacagtcacatactccccacaaatgtctctccctagtcaacactccccagcacaccccttctggccagcccaagcccgctaaggcccacacctgtcccccacctccctcctgcctctctggtccttcttgtatgcagccatacatcacaactccttcaaattccagccccaaagaacttcccccagggactaccttactgactgtggtccctagagctctcaaaagtgttatccccacttcttttcccctctgccttccttgtgatcctgtctcggccaatagttatgctcagagcagccgccatggaccctccatagggcccccctgcaatacccatatatgctctgtggttccctccaccccccatccctgcccactgtctggctccctcaatcattcgacaggcccccctcccattgtgcccctgtgtgacacctatagcactcccaggggcccaccccaacctcgttgtcagcctgtgatgcctccttgttctacccacatctattcttttatccctttgagaacaccctttgatcctcaaagtttacccattgtcccccgagtccgggcctaccctgatactgtcccctgtggcctccatatctaccctgtggcctctcaaggcccttgcaaagagcctctgcagatcccctacagctgccctttgccttcatccaaggattccagctgtagcaccaatcccagctgtagttcgactattattagcaaatgccagagtagtgacagcgagagcaggagttcccaccaaagccaaagccggagccaaagcaagagtccccatgatggcagaagtcagagctggagcaagaggcatcatctgagcagaagtccaagtcagaaaagcagtccctatcctagcagaagctggggccggagcagtaatcctcaacaaaacacaagtcagggccagagtgagagtccccaacttagcataaatgagcaccagggtgagagtccccaaattagcagaggtcagggcaagagcaagagtctatgatggcaaaagtcggaaccggagcaagagtccccaacatggcaaaggtcaaggccagagcaagagtccccaacatagcaggagccagagcaagagtcccagcgaggcaaaagtcacagagcaagagtcctcaccataacaagaaatgagggccagagcaaaagttctgaccagaccaaaaatctaggccagagcaaggcatagatagtaacaagattgccagctatagcaagcatcccagctgcagcaaccaggaccgacttgtgcactcctcatctgaagtcttcatttctcttttactctgcctccttgttcttgtcctcttgtcccctgctacccccatagcagtcatcctagaagtccctgttttggttcacacctcaagattctgtgggccctccttatccaacctttctggggtctgggaactctcccagcatgaccctcaaacctctgattctaagcatggtggtgctagtcactgtgtgacgctaggctgccacagagcccaaattccctgctgttcgactggctttgcagaattttgacatgacttacagtgtgcagtttggagatctttggccatcaatccgtgtcagtctcctctcagagcagaagtatggtgcactggtcaataactttgctgcctgggatcatgtaagtgctaagctggagcagctgagtgccaaggattttgtgaatgaagccatctcccactgggaactgcagtctgagggtggccaatctgcagccccatcccctgcctcctgggcctgcagtccgaaccttcgatgcttcacttttgacagaggggatatcagtcgcttccctcctgccagacctggcagcctgggtgtcatggagtactacctgatggatgctgcctccttgctgcctgttctggccctcggcctgcagcctggggacatcgtgcttgacctatgtgcagctcctgggggaaagacactagcgttgcttcagactggctgttgccgcaatcttgctgccaatgatctctccccgtcccgaatagccagactacagaagatccttcacagctatgtgcctgaagagatcagggatggaaatcaagttcgagttacctcatgggatggcaggaaatggggagaactggagggggacacctatgaccgggtgctggtggatgtgccctgtaccacagaccgccactcccttcatgaggaggagaacaacatctttaagcggtcaaggaagaaggagcgacagatattgcctgtgctgcaagtgcagcttcttgcggctggactccttgccaccaaaccaggaggccatgttgtctattctacctgctcactctcacacttacagaacgagtatgtggtgcaaggtgccattgagctcctggccaatcaatacagcatccaggtacaggtggaagatctgactcacttccgaagggttttcatggacacattttgtttcttctcatcctgtcaggttggggagctggtaataccaaacctcatggccaattttggccccatgtacttctgcaaaatgcgtaggctgacatagtatcacccaatccctgaagcaagaatacaaagggtatactctgttggatgcaccagaaactggaaactgggaccagtggcagagatgcactctcggtcctgtctccatcctgttcgtgtctttctgcagttttcggcaataagaagtagaagatttgctgtcctgctgtccaattgtggagcatcagcaggtttccaactcactcattaacccctaccccatctccaggcctgtactaaagtttgctgcccgcttaggggcttagaaggagaagccagtgagcaggctcacactaagttgtaaacataggagaagcatttggccaataaagttgttgaaactctat

SEQ ID NO: 160099 - DNA, 865 bp, Homo sapiens
  Payload ID: 11308
  Gene Symbol: NSUN4
  Gene Name: NOP2/Sun domain family, member 4
  ENST ID: ENST00000469918
  CDS Start-End: 8-328
cgccgatatggctgcgctgacactgaggggtgtccgggagctgctgaagcgtgtggacctcgcgacggtcccgcggagacatcgatataagaagaaatggcccggtcgccctcacccctcggaaaataccatagcgaccttgcctgcactcctgggtctccgccgccttgcaggaaaggattcagccccttcctcaacctcgagctgcctctggcgaccgggcaaggttacagcgaccaccctgtccatactgccggcccaaaccctggcaaaaggctgccacagagcccaaattccctgctgttcgactggctttgcagaattttgacatgacttacagtgtgcagtttggagatctttggccatcaatccgtgtcagtctcctctcagagcagaagtatggtgcactggtcaataactttgctgcctgggatcatgtaagtgctaagctggagcagctgagtgccaaggattttgtgaatgaagccatctcccactgggaactgcagtctgagggtggccaatctgcagccccatcccctgcctcctgggcctgcagtccgaaccttcgatgcttcacttttgacagaggggatatcagtcgcttccctcctgccagacctggcagcctgggtgtcatggagtactacctgatggatgctgcctccttgctgcctgttctggccctcggcctgcagcctggggacatcgtgcttgacctatgtgcagctcctgggggaaagacactagcgttgcttcagactggctgttgccgcaatcttgctgccaatgatctctccccgtcccgaatagccagactacagaagatccttcacagctatgtgcctgaagagatcagggatgg

SEQ ID NO: 160100 - DNA, 922 bp, Homo sapiens
  Payload ID: 11308
  Gene Symbol: NSUN4
  Gene Name: NOP2/Sun domain family, member 4
  ENST ID: ENST00000486270
  CDS Start-End: 26-190
gaattaccccgtggagcacgccgatatggctgcgctgacactgaggggtgtccgggagctgctgaagcgtgtggacctcgcgacggtcccgcggagacatcgatataagaagaaatggcctgtcctctctcttttaggctgccacagagcccaaattccctgctgttcgactggctttgcagaattttgacatgacttacagtgtgcagtttggagatctttggccatcaatccgtgtcagtctcctctcagagcagaagtatggtgcactggtcaataactttgctgcctgggatcatgtaagtgctaagctggagcagctgagtgccaaggattttgtgaatgaagccatctcccactgggaactgcagtctgagggtggccaatctgcagccccatcccctgcctcctgggcctgcagtccgaaccttcgatgcttcacttttgacagaggggatatcagtcgcttccctcctgccagacctggcagcctgggtgtcatggagtactacctgatggatgctgcctccttgctgcctgttctggccctcggcctgcagcctggggacatcgtgcttgacctatgtgcagctcctgggggaaagacactagcgttgcttcagactggctgttgccgcaatcttgctgccaatgatctctccccgtcccgaatagccagactacagaagatccttcacagctatgtgcctgaagagatcagggatggaaatcaagttcgagttacctcatgggatggcaggaaatggggagaactggagggggacacctatgaccgggtgctggtggatgtgccctgtaccacagaccgccactcccttcatgaggaggagaacaacatctttaagcggtcaaggaagaaggagcgacagatattgcctgtgctgcaagtgcagcttcttgc

SEQ ID NO: 160101 - DNA, 1672 bp, Homo sapiens
  Payload ID: 11309
  Gene Symbol: NSUN5
  Gene Name: NOP2/Sun domain family, member 5
  Uniprot ID: Q96P11
  ENST ID: ENST00000252594
  CDS Start-End: 17-1306
aaaggcgcgcgggaacatggggctgtatgctgcagctgcaggcgtgttggccggcgtggagagccgccagggctctatcaaggggttggtgtactccagcaacttccagaacgtgaagcagctgtacgcgctggtgtgcgaaacgcagcgctactccgccgtgctggatgctgtgatcgccagcgccggcctcctccgtgcggagaagaagctgcggccgcacctggccaaggtgctagtgtatgagttgttgttgggaaagggctttcgagggggtgggggccgatggaaggctctgttgggccggcaccaggcgaggctcaaggctgagttggctcggctcaaggttcatcggggtgtgagccggaatgaggacctgttggaagtgggatccaggcctggtccagcctcccagctgcctcgatttgtgcgtgtgaacactctcaagacctgctccgatgatgtagttgattatttcaagagacaaggtttctcctatcagggtcgggcttccagcctcgatgacttacgagccctcaaggggaagcattttctcctggaccccttgatgccggagctgctggtgtttcccgcccagacagatctgcatgaacacccactgtaccgggccggacacctcattctgcaggacagggccagctgtctcccagccatgctgctggaccccccgccaggctcccatgtcatcgatgcctgtgccgccccaggcaataagaccagtcacttggctgctcttctgaagaaccaagggaagatctttgcctttgacctggatgccaagcggctggcatccatggccacgctgctggcccgggctggcgtctcttgctgtgaactggctgaggaggacttcctggcggtctccccctcggatccacgctaccatgaggtccactacatcctgctggatccttcctgcagtggctcgggtatgccgagcagacagctggaggagcccggggcaggcacacctagcccggtgcgtctgcatgccctggcagggttccagcagcgagccctgtgccacgcactcactttcccttccctgcagcggctcgtctactccacgtgctccctctgccaggaggagaatgaagacgtggtgcgagatgcgctgcagcagaacccgggcgccttcaggctagctcccgccctgcctgcctggccccaccgaggcctgagcacgttcccgggtgccgagcactgcctccgggcctcccctgagaccacactcagcagtggcttcttcgttgctgtaattgaacgggtcgaggtgccaaggtgagtgagtgggggcgtgcttgggaggcgcaggatggcaccggcacatctaacatctacacttctctagctcagcctcacaggccaaagcatcagcaccagaacgcacacccagcccagccccaaagagaaagaagagacagcaaagagccgcagccggtgcttgcacaccgccttgcacatagcagaggctccgggctgactccttcctggtgggaaaggaagatgcctgtcctctccgtggaggaccctgggccctcaccgcaggaagcagtttgggttttgaaaggttattgggtcccttccttgggctgtgttcttgctggtgagcaaagtgttgcctgcaaaaataaaatgcagaacgtactct

SEQ ID NO: 160102 - DNA, 1602 bp, Homo sapiens
  Payload ID: 11309
  Gene Symbol: NSUN5
  Gene Name: NOP2/Sun domain family, member 5
  Uniprot ID: Q96P11
  ENST ID: ENST00000310326
  CDS Start-End: 27-1439
acagagccgtaaaggcgcgcgggaacatggggctgtatgctgcagctgcaggcgtgttggccggcgtggagagccgccagggctctatcaaggggttggtgtactccagcaacttccagaacgtgaagcagctgtacgcgctggtgtgcgaaacgcagcgctactccgccgtgctggatgctgtgatcgccagcgccggcctcctccgtgcggagaagaagctgcggccgcacctggccaaggtgctagtgtatgagttgttgttgggaaagggctttcgagggggtgggggccgatggaaggctctgttgggccggcaccaggcgaggctcaaggctgagttggctcggctcaaggttcatcggggtgtgagccggaatgaggacctgttggaagtgggatccaggcctggtccagcctcccagctgcctcgatttgtgcgtgtgaacactctcaagacctgctccgatgatgtagttgattatttcaagagacaaggtttctcctatcagggtcgggcttccagcctcgatgacttacgagccctcaaggggaagcattttctcctggaccccttgatgccggagctgctggtgtttcccgcccagacagatctgcatgaacacccactgtaccgggccggacacctcattctgcaggacagggccagctgtctcccagccatgctgctggaccccccgccaggctcccatgtcatcgatgcctgtgccgccccaggcaataagaccagtcacttggctgctcttctgaagaaccaagggaagatctttgcctttgacctggatgccaagcggctggcatccatggccacgctgctggcccgggctggcgtctcttgctgtgaactggctgaggaggacttcctggcggtctccccctcggatccacgctaccatgaggtccactacatcctgctggatccttcctgcagtggctcgggtatgccgagcagacagctggaggagcccggggcaggcacacctagcccggtgcgtctgcatgccctggcagggttccagcagcgagccctgtgccacgcactcactttcccttccctgcagcggctcgtctactccacgtgctccctctgccaggaggagaatgaagacgtggtgcgagatgcgctgcagcagaacccgggcgccttcaggctagctcccgccctgcctgcctggccccaccgaggcctgagcacgttcccgggtgccgagcactgcctccgggcctcccctgagaccacactcagcagtggcttcttcgttgctgtaattgaacgggtcgaggtgccaagcctcacaggccaaagcatcagcaccagaacgcacacccagcccagccccaaagagaaagaagagacagcaaagagccgcagccggtgcttgcacaccgccttgcacatagcagaggctccgggctgactccttcctggtgggaaaggaagatgcctgtcctctccgtggaggaccctgggccctcaccgcaggaagcagtttgggttttgaaaggttattgggtcccttccttgggctgtgttcttgctggtgagcaaagtgttgcctgcaaaaataaaatgcagaacgt

SEQ ID NO: 160103 - DNA, 1663 bp, Homo sapiens
  Payload ID: 11309
  Gene Symbol: NSUN5
  Gene Name: NOP2/Sun domain family, member 5
  Uniprot ID: Q96P11
  ENST ID: ENST00000438747
  CDS Start-End: 78-1478
gctttttgaccccggaagtccgggcgggcgccgagccgggtgcgttttgccacagagccgtaaaggcgcgcgggaacatggggctgtatgctgcagctgcaggcgtgttggccggcgtggagagccgccagggctctatcaaggggttggtgtactccagcaacttccagaacgtgaagcagctgtacgcgctggtgtgcgaaacgcagcgctactccgccgtgctggatgctgtgatcgccagcgccggcctcctccgtgcggagaagaagctgcggccgcacctggccaaggtgctagtgtatgagttgttgttgggaaagggctttcgagggggtgggggccgatggaaggctctgttgggccggcaccaggcgaggctcaaggctgagttggctcggctcaaggttcatcggggtgtgagccggaatgaggacctgttggaagtgggatccaggcctggtccagcctcccagctgcctcgatttgtgcgtgtgaacactctcaagacctgctccgatgatgtagttgattatttcaagagacaaggtttctcctatcagggtcgggcttccagcctcgatgacttacgagccctcaaggggaagcattttctcctggaccccttgatgccggagctgctggtgtttcccgcccagacagatctgcatgaacacccactgtaccgggccggacacctcattctgcaggacagggccagctgtctcccagccatgctgctggaccccccgccaggctcccatgtcatcgatgcctgtgccgccccaggcaataagaccagtcacttggctgctcttctgaagaaccaagggaagatctttgcctttgacctggatgccaagcggctggcatccatggccacgctgctggcccgggctggcgtctcttgctgtgaactggctgaggaggacttcctggcggtctccccctcggatccacgctaccatgaggtccactacatcctgctggatccttcctgcagtggctcgggtatgccgagcagacagctggaggagcccggggcaggcacacctagcccggtgcgtctgcatgccctggcagggttccagcagcgagccctgtgccacgcactcactttcccttccctgcagcggctcgtctactccacgtgctccctctgccaggaggagaatgaagacgtggtgcgagatgcgctgcagcagaacccgggcgccttcaggctagctcccgccctgcctgcctggccccaccgaggcctgagcacgttcccgggtgccgagcactgcctccgggcctcccctgagaccacactcagcagtggcttcttcgttgctgtaattgaacgggtcgaggtgccaagctcagcctcacaggccaaagcatcagcaccagaacgcacacccagcccagccccaaagagaaagaagagacagcaaagagccgcagccggtgcttgcacaccgccttgcacatagcagaggctccgggctgactccttcctggtgggaaaggaagatgcctgtcctctccgtggaggaccctgggccctcaccgcaggaagcagtttgggttttgaaaggttattgggtcccttccttgggctgtgttcttgctggtgagcaaagtgttgcctgcaaaaataaaatgcagaacgtactct

SEQ ID NO: 160104 - DNA, 2269 bp, Homo sapiens
  Payload ID: 11309
  Gene Symbol: NSUN5
  Gene Name: NOP2/Sun domain family, member 5
  Uniprot ID: Q96P11
  ENST ID: ENST00000428206
  CDS Start-End: 15-1190
aggcgcgcgggaacatggggctgtatgctgcagctgcaggcgtgttggccggcgtggagagccgccagggctctatcaaggggttggtgtactccagcaacttccagaacgtgaagcagctgtacgcgctggtgtgcgaaacgcagcgctactccgccgtgctggatgctgtgatcgccagcgccggcctcctccgtgcggagaagaagctgcggccgcacctggccaaggttcatcggggtgtgagccggaatgaggacctgttggaagtgggatccaggcctggtccagcctcccagctgcctcgatttgtgcgtgtgaacactctcaagacctgctccgatgatgtagttgattatttcaagagacaaggtttctcctatcagggtcgggcttccagcctcgatgacttacgagccctcaaggggaagcattttctcctggaccccttgatgccggagctgctggtgtttcccgcccagacagatctgcatgaacacccactgtaccgggccggacacctcattctgcaggacagggccagctgtctcccagccatgctgctggaccccccgccaggctcccatgtcatcgatgcctgtgccgccccaggcaataagaccagtcacttggctgctcttctgaagaaccaagggaagatctttgcctttgacctggatgccaagcggctggcatccatggccacgctgctggcccgggctggcgtctcttgctgtgaactggctgaggaggacttcctggcggtctccccctcggatccacgctaccatgaggtccactacatcctgctggatccttcctgcagtggctcgggtatgccgagcagacagctggaggagcccggggcaggcacacctagcccggtgcgtctgcatgccctggcagggttccagcagcgagccctgtgccacgcactcactttcccttccctgcagcggctcgtctactccacgtgctccctctgccaggaggagaatgaagacgtggtgcgagatgcgctgcagcagaacccgggcgccttcaggctagctcccgccctgcctgcctggccccaccgaggcctgagcacgttcccgggtgccgagcactgcctccgggcctcccctgagaccacactcagcagtggcttcttcgttgctgtaattgaacgggtcgaggtgccaaggtgagtgagtgggggcgtgcttgggaggcgcaggatggcaccggcacatctaacatctacacttctctagctcagcctcacaggccaaagcatcagcaccagaacgcacacccagcccagccccaaagagaaagaagagacagcaaagagccgcagccggtgcttgcacaccgccttgcacatagcagaggctccgggctgactccttcctggtgggaaaggaagatgcctgtcctctccgtggaggaccctgggccctcaccgcaggaagcagtttgggttttgaaaggttattgggtcccttccttgggctgtgttcttgctggtgagcaaagtgttgcctgcaaaaataaaatgcagaacgtactctacgatagatcacagttttttattcttaatgtcacaagcaggagaaaaatctcacattcatactaaaagttccaactagactcaacaggaatgaagtctctatttgtaatggaaagtcccagcctcccgctgccgtccagtgcgtgtactgtacacatccacactcacactcactcagggttcccggaccggctgtcctgcctgcggaactgaggtaaactagctcaggtgctgacactaggagggtctaccttacataaggtacaggtagaagcttgattgctaggcccaggcccacccagaccctccaatcctaacaggtatttaggcttgaggttcactccctcctcagctgcacacgcagccaggtattaacgaggatcagagctgttctgaggggtgggaaggagcagccccaccaccactcactcaccctcagtcacatcggggagggggcaccagttacatttacatcacattatttataaaataagaattacatttcatataacatggccagaaggagctctagtcccccaggaaagctgccggggacagcatttgagcctcttctttgcacaggcataacttaactatacagctaattcctagttaatagcatttatacttaaccacctcaatgaaccaagcttgaaggaatttaaaaggcaatttagcttaaatacaaaaataaatttttgttaaaaaacgttt

SEQ ID NO: 160105 - DNA, 471 bp, Homo sapiens
  Payload ID: 11309
  Gene Symbol: NSUN5
  Gene Name: NOP2/Sun domain family, member 5
  ENST ID: ENST00000455763
  CDS Start-End: 1-176
aacgtgaagcagctgtacgcgctggtgtgcgaaacgcagcgctactccgccgtgctggatgctgtgatcgccagcgccggcctcctccgtgcggagaagaagctgcggccgcacctggccaagcctcgatgacttacgagccctcaaggggaagcattttctcctggaccccttgatgccggagctgctggtgtttcccgcccagacagatctgcatgaacacccactgtaccgggccggacacctcattctgcaggacagggccagctgtctcccagccatgctgctggaccccccgccaggctcccatgtcatcgatgcctgtgccgccccaggcaataagaccagtcacttggctgctcttctgaagaaccaagggaagatctttgcctttgacctggatgccaagcggctggcatccatggccacgctgctggcccgggctggcgtctcttgctgtgaactggctga

SEQ ID NO: 160106 - DNA, 2201 bp, Homo sapiens
  Payload ID: 11310
  Gene Symbol: NSUN6
  Gene Name: NOP2/Sun domain family, member 6
  Uniprot ID: Q8TEA1
  ENST ID: ENST00000377304
  CDS Start-End: 420-1829
tccgccgagaaatagggggcgcgtgtttggaaattgatagaaaagataaagggaccgagctgctgtcagcctggcttactgatctgcgtccgtttcaccacggattcagttactaagcatttttttctttttttggttctttgcaacgtgagtggcattggctcagtgatttccatgagcatctctaccagaaaacattgcctcgatgaggtgtggtggaagcccggcagccccttctaatcggctaggcttgagaaagcgtgtacctctgcatttccgaaattaactcagcgtgatcggcaagattttcctcagcatctggtgtcaagacactcgtcactattaattcggaaagaaaaaaaaaaacaaaacaccgttttccagcatttctcttggtggagaactaaacaacaggaaaaatgtctattttccctaagatatctttgagacctgaggttgaaaactatcttaaggaaggctttatgaataaggagattgtgactgctttaggtaaacaagaagcagaaaggaagtttgaaactttgttaaagcacctgtcacatcctccatcatttacaactgtcagagtgaatacacatttagcctcagtacaacatgtgaaaaatctgttacttgatgaacttcagaagcagtttaatggattaagtgttcctattcttcaacatccagaccttcaagatgtgttacttattcctgttattggacccagaaagaatattaaaaaacaacagtgtgaagccattgttggagcccagtgtggcaatgcagttttaagaggagcccatgtctatgccccaggaattgtgtcagcatcacaatttatgaaagctggagatgttatttctgtatactctgatattaaaggaaaatgtaagaaaggagccaaagaatttgatggaacaaaagtatttcttggaaatgggatttctgaactaagccgcaaagaaatcttcagtggattacctgaactgaaaggcatgggcataagaatgacagaaccagtatatctcagcccttcatttgacagtgtactgccccgttacttatttttacaaaatttgccatctgccttagtaagtcatgtactaaatcctcaacctggagagaagattctagacttgtgtgcagcacctggagggaaaacaacacacattgcagcactaatgcatgatcagggagaagttatagcactggataaaatcttcaacaaagtagaaaaaatcaaacagaatgccttattgttagggctgaattccatcagggcattttgttttgatggaacaaaggcggttaaacttgatatggtggaggacacagaaggagaacctccatttctaccagaatcctttgaccgaattcttctggatgcaccctgtagtggaatgggacagagaccaaacatggcctgtacttggtctgtgaaggaagtggcatcatatcagccattacagcgaaaactcttcactgcagcggttcagctgctgaagccagagggtgtgctggtttatagcacgtgcactataacactggccgaaaatgaagaacaggttgcctgggccctgacaaaatttccttgccttcagcttcagccccaggaaccgcagattggaggagaaggaatgaggggagctgggctctcatgtgaacagttgaaacagctgcagcgatttgatccatcggctgtgccattaccggacactgacatggactctcttagagaggccagaagagaagacatgttgcgtctggctaataaggactctataggtttttttattgcaaaatttgtaaaatgcaaaagcacataggagagggatggatgctcagaaatgaaaattccaaacatttgctgtctgtggtttttttttttttaaccaaagtgttgtcaggccaactgaatgatgatgtggttgctatggaaacagaaaaggctgccagctgttttaccagggatccagagacatagaggaagtagggggtggtatgagattatattttctgtttttaaaagattttttttttttatgtatttagtagagtataaagaaaagcagatgcctatagatgtctggagcatattttcatttgtgatctaatgttttaatttgtaaagtgtacaagtcatttttaatgttaaaaattagtgaatctaacaaaaggaataaattagcaatatttga

SEQ ID NO: 160107 - DNA, 578 bp, Homo sapiens
  Payload ID: 11310
  Gene Symbol: NSUN6
  Gene Name: NOP2/Sun domain family, member 6
  ENST ID: ENST00000606425
  CDS Start-End: 132-578
ttgtttgttcctttcttaggtgggaaggatacgagcaagataaagcagcgagggatttaagtctggcaacagttggactgctggattttcagagaagtgttccccaaagcaaattatagtgctaatttccaatgttccataagcgtggcaagaaaaatgggaagttctcgattgtgactgctttaggtaaacaagaagcagaaaggaagtttgaaactttgttaaagcacctgtcacatcctccatcatttacaactgtcagagtgaatacacatttagcctcagtacaacatgtgaaaaatctgttacttgatgaacttcagaagcagtttaatggattaagtgttcctattcttcaacatccagaccttcaagatgtgttacttattcctgttattggacccagaaagaatattaaaaaacaacagtgtgaagccattgttggagcccagtgtggcaatgcagttttaagaggagcccatgtctatgccccaggaattgtgtcagcatcacaatttatgaaagctggagatgttatttctgtatactctgatattaaaggaaaatgtaagaaagga

SEQ ID NO: 160108 - DNA, 553 bp, Homo sapiens
  Payload ID: 11310
  Gene Symbol: NSUN6
  Gene Name: NOP2/Sun domain family, member 6
  ENST ID: ENST00000607346
  CDS Start-End: 167-274
gcacttacggcaacccacgccttcgacgtggcgttttcttcggtttcacttccggtgggaaggatacgagcaagataaagcagcgagggatttaagtctggcaacagttggactgctggattttcagagaagtgttccccaaagcaaattatagtgctaatttccaatgttccataagcgtggcaagaaaaatgggaagttctcggtaaggtatatagtattatttctagaaataaagatgaaccaatccaagattgattttttgtttgtttaatcctggcagtattcttaactaaattgtattcattcttccctttactttccagactttttaattttatttatttttttattttttgagacagagtcttgcccaggcagaggttgcagtgagctgagatagcaccactgcactccagcctgagcgacagaatgagactccatctcaaacaaacaaaaaagtctaaatgtcctcaattctgtccgtgtgtggcactagtgaagtaatttctggcaaatgctttatcagcattttctttccatagtttataga

SEQ ID NO: 160109 - DNA, 3546 bp, Homo sapiens
  Payload ID: 11311
  Gene Symbol: NSUN7
  Gene Name: NOP2/Sun domain family, member 7
  Uniprot ID: Q8NE18
  ENST ID: ENST00000316607
  CDS Start-End: 468-1895
gcggttgccatgaagacccggtccgggagcagtcgactgccggagactcgggaggctgagctttcctcggcctgagccagccagaccccgggcaccgcgctcacccctcttcgccgccacgtccgcgaaggcctcacgcgcgaggccaggcgaggccccgaggcgcccaccacttcacgacaccggagcgaaccgggcgccagaggctgcgacccccctgccccgaatcctgccggtgggagtggctgcatttgaaccaaacggccttcgcgggcagcagccgtcgccccgcagtcccggggctcccaagggcctgtgaccgacgccgccctccgcgtcttcgtccccgaagccccgggaaccatccgccctcgggagaccatgctgcagatgcgaggaaagccgtttcctggaacatcggaattctaaccccagggtgaaggactcacgacaggcgaggggcagacatgctgaattccacgggcgaactggagttttcgaacgaagaagatcccgagatcatctcccaactcacttccctgcctctgtccggtgggaaaagctcagctggtgtgcccgaaaaaacgggctatccggactccgtttatgtcatggcagccaacatttttcagggtattcgaatcgaaaagtcggcacagaaagtcttaatcaagtatgggaatgaacccctgcggtccttgtccgagtctgaggatcagtcctttcagcgtttgtcttatgagctggctttcagtgccctgaaatatcaagatattttggaaactatattgatagacagctgtatcttcccaagtaccacaataccagatcatttgagcagtcttattattgtgatgctatatgatttccaagatagaaaatttcaaactcgtgtcctttctgataatgaagagcccatatcagaagttcaagaagtagagaaccttcttaacagttttaagataaaattggctgcagcattggcaagatgtcgaatcaagcatgatgccctttcaatttaccacatccttccagaaacagttaggaaacaggaactaagggcctccactttaccactttatgcttggataaatacttgtaaaatcagccctgaagaagtttataataatttgaagagaagaggctataataaagtcaaatctgtattgcatattgatgataaagtctttgctgtggatcaacattgctatgatgtcttaatttttccatctcatcttaaaaatgatcttataaatatagatcttttcaaagattacaaacttatatttcaggacaaatctcgaagtcttgctgtccattctgtaaaggctttattaaatatggatgatgatgtcttaatggtcaatacaggctcatggtacacagtttcccacatgtcaattttaacaaataataatacctcaaaagtatttgtgtgtggagtacaatcacaagctaaggatcctgacttgaagacccttttcacaaaaataggatgtaaaaatattgaaatacttcatgagaaatttattaacattgaatcaaaggatcacaggttacagaaagttaaagtgattttgctgctacctcgttgttcaggactgggtgttagtaatccagtagaatttattttaaatgaacatgaagatacagaattccttaaagatcactctcaaggaggcatctcagtggacaaacttcacgttcttgctcaacagcagtatgaacagctaacacatgcaatgaaatttactaaagctcaagcagttgtttactgcacatgttcagtttttccagaagaaaatgaagctgttgttaagaaagcactggaatttcaagaccttgggaataaaggacaaccttacagcgggacccttctgagacagtgtctgtgaatgatgttttggcccgagctgcagccaagggtctgctggatgggattgagttgggtaaatcatcaaaacgggagaagaagaagaaaaaatcaaaaacatcattgacaaaaggtgccactactgataatggcatccaaatgaaaattgctgagttcctgaatcgagaaactaaagccagtgctaatctatcagagactgtaacaaaaccacctcttccccagaaaaatactgctcaagtgggggcttcctcacagaccagaaaacccaacaagctggccccccatcctgcagtgcctgcatttgtgaagaacacttgtccctccagaccgcgtgaacggcagacacacttcttaagacctcggccagaagacagaatggttgctctgaaacccatcaagattgttctgcctccagtctttatgccattttcaagtccccaagggatcagatctcggatgccaactcaacatttgtactgtcgttgggttgcacccaaggcacttgtgcccacctgccttcccacacactcactatccagaaaagaggaaaagcctaaagatgacacaccttcctccctactcaggcctcctcggcgatggctttgattgtcttgtgttttttataggggccaaagagcagttgattttttttcaaagtctagtatttctctgaagattctacatctctacacaagatattcattcttttggtcacctagggatcttctaagtgtgatattactttcagagaattcagacaagtgagaaacaataatgtaggagtcagcaaagcagaattcagagacttcagccaatcactgctgctctgagaggatccagttagagactcagtatcagcggtcagaacttatctcactcctgtgaactttcaggctggacttaaagctgccaagtttcccctgcagggaaggaaacactgcctcccttcagcaggtagctcattagaaagccaaacaggcaaacgatcctggcctctcccgccagctgaccgctcttcagcatccatgcggttgtagtcgtgactttctcagtcacgatcaagggtgattttttcttaaatatcaagctgttctttgaacagggaatgaacatgagtttttgtaacgtgactgaagttgagtttaagtaggaagcgcaggaagttcccaagtgccaggtgtgtgtagctcagagttccttttacagtgaggtgtctctcactgggggagcttccaggatcctgagcagactggacacaatcatctctcccttcctctatgtcaagcactgttacaaaagactgtgagcaaatttccatctaaatattaataattctgaagaagaggcaaaactgttgaatgcaagcgatacctattgttgaagaaacccacaaatttctgattctaagatcaggggatacaacaaaatctacaagtcatttcaaatagcacacaggaatcaaactttggtaaatcatttctgaggcacaattaaatatattgtagcactatgttaattaattatattaaatgtcgattcatcttgaatgtattctcaattgcctaccaaaaattggtatgattatcatttctgggtctactgatttttcatcatggcaacagaaattgtcattaaatagaattaagatacaa

SEQ ID NO: 160110 - DNA, 3698 bp, Homo sapiens
  Payload ID: 11311
  Gene Symbol: NSUN7
  Gene Name: NOP2/Sun domain family, member 7
  Uniprot ID: Q8NE18
  ENST ID: ENST00000381782
  CDS Start-End: 496-2652
cgccgcgccccctgccccacctccgctcgcggttgccatgaagacccggtccgggagcagtcgactgccggagactcgggaggctgagctttcctcggcctgagccagccagaccccgggcaccgcgctcacccctcttcgccgccacgtccgcgaaggcctcacgcgcgaggccaggcgaggccccgaggcgcccaccacttcacgacaccggagcgaaccgggcgccagaggctgcgacccccctgccccgaatcctgccggtgggagtggctgcatttgaaccaaacggccttcgcgggcagcagccgtcgccccgcagtcccggggctcccaagggcctgtgaccgacgccgccctccgcgtcttcgtccccgaagccccgggaaccatccgccctcgggagaccatgctgcagatgcgaggaaagccgtttcctggaacatcggaattctaaccccagggtgaaggactcacgacaggcgaggggcagacatgctgaattccacgggcgaactggagttttcgaacgaagaagatcccgagatcatctcccaactcacttccctgcctctgtccggtgggaaaagctcagctggtgtgcccgaaaaaacgggctatccggactccgtttatgtcatggcagccaacatttttcagggtattcgaatcgaaaagtcggcacagaaagtcttaatcaagtatgggaatgaacccctgcggtccttgtccgagtctgaggatcagtcctttcagcgtttgtcttatgagctggctttcagtgccctgaaatatcaagatattttggaaactatattgatagacagctgtatcttcccaagtaccacaataccagatcatttgagcagtcttattattgtgatgctatatgatttccaagatagaaaatttcaaactcgtgtcctttctgataatgaagagcccatatcagaagttcaagaagtagagaaccttcttaacagttttaagataaaattggctgcagcattggcaagatgtcgaatcaagcatgatgccctttcaatttaccacatccttccagaaacagttaggaaacaggaactaagggcctccactttaccactttatgcttggataaatacttgtaaaatcagccctgaagaagtttataataatttgaagagaagaggctataataaagtcaaatctgtattgcatattgatgataaagtctttgctgtggatcaacattgctatgatgtcttaatttttccatctcatcttaaaaatgatcttataaatatagatcttttcaaagattacaaacttatatttcaggacaaatctcgaagtcttgctgtccattctgtaaaggctttattaaatatggatgatgatgtcttaatggtcaatacaggctcatggtacacagtttcccacatgtcaattttaacaaataataatacctcaaaagtatttgtgtgtggagtacaatcacaagctaaggatcctgacttgaagacccttttcacaaaaataggatgtaaaaatattgaaatacttcatgagaaatttattaacattgaatcaaaggatcacaggttacagaaagttaaagtgattttgctgctacctcgttgttcaggactgggtgttagtaatccagtagaatttattttaaatgaacatgaagatacagaattccttaaagatcactctcaaggaggcatctcagtggacaaacttcacgttcttgctcaacagcagtatgaacagctaacacatgcaatgaaatttactaaagctcaagcagttgtttactgcacatgttcagtttttccagaagaaaatgaagctgttgttaagaaagcactggaatttcaagaccttgggaataaaggacaaccttacaggcttagtcctcctgttcttccactgtgctccttaaaggaaattcaattgtctactgataaatttttcagaatggaaccatctgaaattaccaatggttgttttctttctattttaacaagggagcgggacccttctgagacagtgtctgtgaatgatgttttggcccgagctgcagccaagggtctgctggatgggattgagttgggtaaatcatcaaaacgggagaagaagaagaaaaaatcaaaaacatcattgacaaaaggtgccactactgataatggcatccaaatgaaaattgctgagttcctgaatcgagaaactaaagccagtgctaatctatcagagactgtaacaaaaccacctcttccccagaaaaatactgctcaagtgggggcttcctcacagaccagaaaacccaacaagctggccccccatcctgcagtgcctgcatttgtgaagaacacttgtccctccagaccgcgtgaacggcagacacacttcttaagacctcggccagaagacagaatggttgctctgaaacccatcaagattgttctgcctccagtctttatgccattttcaagtccccaagggatcagatctcggatgccaactcaacatttgtactgtcgttgggttgcacccaaggcacttgtgcccacctgccttcccacacactcactatccagaaaagaggaaaagcctaaagatgacacaccttcctccctactcaggcctcctcggcgatggctttgattgtcttgtgttttttataggggccaaagagcagttgattttttttcaaagtctagtatttctctgaagattctacatctctacacaagatattcattcttttggtcacctagggatcttctaagtgtgatattactttcagagaattcagacaagtgagaaacaataatgtaggagtcagcaaagcagaattcagagacttcagccaatcactgctgctctgagaggatccagttagagactcagtatcagcggtcagaacttatctcactcctgtgaactttcaggctggacttaaagctgccaagtttcccctgcagggaaggaaacactgcctcccttcagcaggtagctcattagaaagccaaacaggcaaacgatcctggcctctcccgccagctgaccgctcttcagcatccatgcggttgtagtcgtgactttctcagtcacgatcaagggtgattttttcttaaatatcaagctgttctttgaacagggaatgaacatgagtttttgtaacgtgactgaagttgagtttaagtaggaagcgcaggaagttcccaagtgccaggtgtgtgtagctcagagttccttttacagtgaggtgtctctcactgggggagcttccaggatcctgagcagactggacacaatcatctctcccttcctctatgtcaagcactgttacaaaagactgtgagcaaatttccatctaaatattaataattctgaagaagaggcaaaactgttgaatgcaagcgatacctattgttgaagaaacccacaaatttctgattctaagatcaggggatacaacaaaatctacaagtcatttcaaatagcacacaggaatcaaactttggtaaatcatttctgaggcacaattaaatatattgtagcactatgttaattaattatattaaatgtcgattcatcttgaatgtattctcaattgcctaccaaaaattggtatgattatcatttctgggtctactgatttttcatcatggcaacagaaattgtcattaaatagaattaagatacaa

SEQ ID NO: 160111 - DNA, 3303 bp, Homo sapiens
  Payload ID: 11312
  Gene Symbol: NSUN2
  Gene Name: NOP2/Sun RNA methyltransferase family, member 2
  Uniprot ID: Q08J23
  ENST ID: ENST00000264670
  CDS Start-End: 313-2616
aggctgtccgcggagctccttgagcccgcgtgggaaacctgggcgcttcgcgcggagacgcctttgtggctgcttcctggagcatttttttccccttagagctgttcgctgttttccctgtcacgccgcttttctgaaagacgggttgtgcgctttgggcttattcctggacggtccccaaaggtccccgaaaggaccaggcccggacacgtggggccttggtttccggccggaagtcccgggaggtgtagggctagagttctggccgtggcgggccggtttctgcgtgctgcgtgcgcggccgcgtgggctatggggcggcggtcgcggggtcggcggctccagcaacagcagcggccggaggacgcggaggatggcgccgagggtggtggaaagcgcggcgaggcgggctgggaaggaggctaccccgagatcgtcaaggagaacaagctgttcgagcactactaccaggagctcaagatcgtgcccgagggcgagtggggccagttcatggacgctctcagggagccgctcccggccactttaagaattactggttacaaaagccacgcaaaagagattctccattgcttaaagaacaaatattttaaggaattggaggacctggaggtggacggtcagaaagttgaagttccacagccactgagttggtatcctgaagaacttgcctggcacacaaatttaagtcgaaaaatcttgagaaaatcgccacacttggaaaagtttcatcagtttctagttagtgaaacagaatctggaaatattagtcgtcaagaagctgttagcatgatcccaccactgctcctcaacgtgcggcctcatcataagatcttagatatgtgtgcagcacctggctcaaagaccacacagttaattgaaatgctacatgccgacatgaatgtcccctttccagagggatttgttattgcgaatgatgtggacaacaagcgctgctacctgctcgtccatcaagccaagaggctgagcagcccctgcatcatggtggtcaaccatgatgcctccagcatacccaggctccagatagatgtggacggcaggaaagagatcctcttctatgatcgaattttatgtgatgtcccttgcagtggagacggcactatgagaaaaaacattgatgtttggaaaaagtggaccaccttaaatagcttgcagctacatggcttacagctgcggattgcaacacgcggggctgaacagctggctgaaggtggaaggatggtgtattccacgtgttcactaaaccctattgaggatgaagcagtcatagcatctttactggaaaaaagtgaaggtgctttggagcttgctgatgtgtctaatgaactgccagggctgaagtggatgcctggaatcacacagtggaaggtaatgacgaaagatgggcagtggtttacagactgggacgctgttcctcacagcagacacacccagatccgacctaccatgttccctccgaaggacccagaaaagctgcaggccatgcacctggagcgatgccttaggatattaccccatcatcagaatactggagggttttttgtggcagtattggtgaaaaaatcttcaatgccgtggaataaacgtcagccaaagcttcagggtaaatctgcagagaccagagaaagcacacagctgagccctgcagatctcacagaagggaaacccacagatccctctaagctggaaagtccgtcattcacaggaactggtgacacagaaatagctcatgcaactgaggatttagagaataatggcagtaagaaagatggcgtgtgtggtcctcctccatcaaagaaaatgaagttatttggatttaaagaagatccatttgtatttattcctgaagatgacccattatttccacctattgagaaattttatgctttggatccttcattcccaaggatgaatttgttaactcggactacagaagggaagaaaaggcagctctacatggtttctaaggagttgcggaatgtgctgctgaataacagtgagaagatgaaggttattaacacggggatcaaagtctggtgtagaaataacagcggtgaagagtttgactgtgctttccggctggcacaggagggaatatatacattgtatccatttattaactcaagaattattactgtatcaatggaagatgttaagatactgttgacccaggaaaatcccttttttagaaaactcagcagtgagacctacagtcaagcaaaggacctggcaaagggaagcatcgtgctgaagtatgaaccagattctgcgaatccagacgctctgcagtgtcccatcgtcttatgcggatggcggggaaaggcctccattcgaacttttgtgcccaagaatgaacggcttcattatctcaggatgatggggctggaggtattgggagaaaagaagaaggaaggggttatcctcacaaatgagagtgcagccagcaccggacagccagacaatgacgtgactgagggacagagagcaggagagcccaacagcccagatgcagaagaggccaacagtccagacgtgacagcaggctgtgacccggcgggggtccatccaccccggtgagcaggcccaaggcagcgggggcccacacccctcacacgcaaaactggcttcttctggtcactggtgtctgaaaccaaatccagagcagcctgtggcctgtaaagcatatatttctaatgactgcagactggtgggatcataggagccttctgaatgaccaggactgctttctttggagctgatgaaaatgtactcttttagcgtgttagaaatcacttgttttattttgtttctttggccaagctgggtctagtgtttcttttgctgggaatagactttcaaaagttgtacttctatcaagaaacaaaactgcccttgcagaaatttcaggtcttttgttaagcctgtattggtcttaaggtgcagtattttttaaattattatttatagaaagaatctataaattcttggggaagtgtgttataagctttaataattacattgagctgcacctcagtggtgtgtcattaacatgcagtggggttaatatctgaggcctcagatgactttgtgccttttggaataaagggtaaaataaactctcccagagtaagagctgtatcgtgaattgtcatactaattattgagggggacttatgtgcttttattgaatggagtgctttacaatttttatttttaaatggggttgggatccttggaatatttcaataaaattgataaaatata

SEQ ID NO: 160112 - DNA, 2619 bp, Homo sapiens
  Payload ID: 11312
  Gene Symbol: NSUN2
  Gene Name: NOP2/Sun RNA methyltransferase family, member 2
  Uniprot ID: Q08J23
  ENST ID: ENST00000506139
  CDS Start-End: 64-2262
agggctagagttctggccgtggcgggccggtttctgcgtgctgcgtgcgcggccgcgtgggctatggggcggcggtcgcggggtcggcggctccagcaacagcagcggccggaggacgcggaggatggcgccgagggtggtggaaagcgcggcgaggcgggctgggaaggaggctaccccgagatcgtcaaggagaacaagctgttcgagcactactaccaggagctcaagatcgtgcccgagggcgagtggggccagttcatggacgctctcagggagccgctcccggccactttaagaattactggttacaaaaggtatcctgaagaacttgcctggcacacaaatttaagtcgaaaaatcttgagaaaatcgccacacttggaaaagtttcatcagtttctagttagtgaaacagaatctggaaatattagtcgtcaagaagctgttagcatgatcccaccactgctcctcaacgtgcggcctcatcataagatcttagatatgtgtgcagcacctggctcaaagaccacacagttaattgaaatgctacatgccgacatgaatgtcccctttccagagggatttgttattgcgaatgatgtggacaacaagcgctgctacctgctcgtccatcaagccaagaggctgagcagcccctgcatcatggtggtcaaccatgatgcctccagcatacccaggctccagatagatgtggacggcaggaaagagatcctcttctatgatcgaattttatgtgatgtcccttgcagtggagacggcactatgagaaaaaacattgatgtttggaaaaagtggaccaccttaaatagcttgcagctacatggcttacagctgcggattgcaacacgcggggctgaacagctggctgaaggtggaaggatggtgtattccacgtgttcactaaaccctattgaggatgaagcagtcatagcatctttactggaaaaaagtgaaggtgctttggagcttgctgatgtgtctaatgaactgccagggctgaagtggatgcctggaatcacacagtggaaggtaatgacgaaagatgggcagtggtttacagactgggacgctgttcctcacagcagacacacccagatccgacctaccatgttccctccgaaggacccagaaaagctgcaggccatgcacctggagcgatgccttaggatattaccccatcatcagaatactggagggttttttgtggcagtattggtgaaaaaatcttcaatgccgtggaataaacgtcagccaaagcttcagggtaaatctgcagagaccagagaaagcacacagctgagccctgcagatctcacagaagggaaacccacagatccctctaagctggaaagtccgtcattcacaggaactggtgacacagaaatagctcatgcaactgaggatttagagaataatggcagtaagaaagatggcgtgtgtggtcctcctccatcaaagaaaatgaagttatttggatttaaagaagatccatttgtatttattcctgaagatgacccattatttccacctattgagaaattttatgctttggatccttcattcccaaggatgaatttgttaactcggactacagaagggaagaaaaggcagctctacatggtttctaaggagttgcggaatgtgctgctgaataacagtgagaagatgaaggttattaacacggggatcaaagtctggtgtagaaataacagcggtgaagagtttgactgtgctttccggctggcacaggagggaatatatacattgtatccatttattaactcaagaattattactgtatcaatggaagatgttaagatactgttgacccaggaaaatcccttttttagaaaactcagcagtgagacctacagtcaagcaaaggacctggcaaagggaagcatcgtgctgaagtatgaaccagattctgcgaatccagacgctctgcagtgtcccatcgtcttatgcggatggcggggaaaggcctccattcgaacttttgtgcccaagaatgaacggcttcattatctcaggatgatggggctggaggtattgggagaaaagaagaaggaaggggttatcctcacaaatgagagtgcagccagcaccggacagccagacaatgacgtgactgagggacagagagcaggagagcccaacagcccagatgcagaagaggccaacagtccagacgtgacagcaggctgtgacccggcgggggtccatccaccccggtgagcaggcccaaggcagcgggggcccacacccctcacacgcaaaactggcttcttctggtcactggtgtctgaaaccaaatccagagcagcctgtggcctgtaaagcatatatttctaatgactgcagactggtgggatcataggagccttctgaatgaccaggactgctttctttggagctgatgaaaatgtactcttttagcgtgttagaaatcacttgttttattttgtttctttggccaagctgggtctagtgtttcttttgctgggaatagactttcaaaagttgtacttctatcaagaaacaaaactgcccttgcagaaatttcaggtcttttgttaagcctgtattggtctt

SEQ ID NO: 160113 - DNA, 3217 bp, Homo sapiens
  Payload ID: 11312
  Gene Symbol: NSUN2
  Gene Name: NOP2/Sun RNA methyltransferase family, member 2
  ENST ID: ENST00000504374
  CDS Start-End: 313-921
aggctgtccgcggagctccttgagcccgcgtgggaaacctgggcgcttcgcgcggagacgcctttgtggctgcttcctggagcatttttttccccttagagctgttcgctgttttccctgtcacgccgcttttctgaaagacgggttgtgcgctttgggcttattcctggacggtccccaaaggtccccgaaaggaccaggcccggacacgtggggccttggtttccggccggaagtcccgggaggtgtagggctagagttctggccgtggcgggccggtttctgcgtgctgcgtgcgcggccgcgtgggctatggggcggcggtcgcggggtcggcggctccagcaacagcagcggccggaggacgcggaggatggcgccgagggtggtggaaagcgcggcgaggcgggctgggaaggaggctaccccgagatcgtcaaggagaacaagctgttcgagcactactaccaggagctcaagatcgtgcccgagggcgagtggggccagttcatggacgctctcagggagccgctcccggccactttaagaattactggttacaaaagccacgcaaaagagattctccattgcttaaagaacaaatattttaaggaattggaggacctggaggtggacggtcagaaagttgaagttccacagccactgagttggtatcctgaagaacttgcctggcacacaaatttaagtcgaaaaatcttgagaaaatcgccacacttggaaaagtttcatcagtttctagttagtgaaacagaatctggaaatattagtcgtcaagaagctgttagcatgatcccaccactgctcctcaacgtgcggcctcatcataagagggatttgttattgcgaatgatgtggacaacaagcgctgctacctgctcgtccatcaagccaagaggctgagcagcccctgcatcatggtggtcaaccatgatgcctccagcatacccaggctccagatagatgtggacggcaggaaagagatcctcttctatgatcgaattttatgtgatgtcccttgcagtggagacggcactatgagaaaaaacattgatgtttggaaaaagtggaccaccttaaatagcttgcagctacatggcttacagctgcggattgcaacacgcggggctgaacagctggctgaaggtggaaggatggtgtattccacgtgttcactaaaccctattgaggatgaagcagtcatagcatctttactggaaaaaagtgaaggtgctttggagcttgctgatgtgtctaatgaactgccagggctgaagtggatgcctggaatcacacagtggaaggtaatgacgaaagatgggcagtggtttacagactgggacgctgttcctcacagcagacacacccagatccgacctaccatgttccctccgaaggacccagaaaagctgcaggccatgcacctggagcgatgccttaggatattaccccatcatcagaatactggagggttttttgtggcagtattggtgaaaaaatcttcaatgccgtggaataaacgtcagccaaagcttcagggtaaatctgcagagaccagagaaagcacacagctgagccctgcagatctcacagaagggaaacccacagatccctctaagctggaaagtccgtcattcacaggaactggtgacacagaaatagctcatgcaactgaggatttagagaataatggcagtaagaaagatggcgtgtgtggtcctcctccatcaaagaaaatgaagttatttggatttaaagaagatccatttgtatttattcctgaagatgacccattatttccacctattgagaaattttatgctttggatccttcattcccaaggatgaatttgttaactcggactacagaagggaagaaaaggcagctctacatggtttctaaggagttgcggaatgtgctgctgaataacagtgagaagatgaaggttattaacacggggatcaaagtctggtgtagaaataacagcggtgaagagtttgactgtgctttccggctggcacaggagggaatatatacattgtatccatttattaactcaagaattattactgtatcaatggaagatgttaagatactgttgacccaggaaaatcccttttttagaaaactcagcagtgagacctacagtcaagcaaaggacctggcaaagggaagcatcgtgctgaagtatgaaccagattctgcgaatccagacgctctgcagtgtcccatcgtcttatgcggatggcggggaaaggcctccattcgaacttttgtgcccaagaatgaacggcttcattatctcaggatgatggggctggaggtattgggagaaaagaagaaggaaggggttatcctcacaaatgagagtgcagccagcaccggacagccagacaatgacgtgactgagggacagagagcaggagagcccaacagcccagatgcagaagaggccaacagtccagacgtgacagcaggctgtgacccggcgggggtccatccaccccggtgagcaggcccaaggcagcgggggcccacacccctcacacgcaaaactggcttcttctggtcactggtgtctgaaaccaaatccagagcagcctgtggcctgtaaagcatatatttctaatgactgcagactggtgggatcataggagccttctgaatgaccaggactgctttctttggagctgatgaaaatgtactcttttagcgtgttagaaatcacttgttttattttgtttctttggccaagctgggtctagtgtttcttttgctgggaatagactttcaaaagttgtacttctatcaagaaacaaaactgcccttgcagaaatttcaggtcttttgttaagcctgtattggtcttaaggtgcagtattttttaaattattatttatagaaagaatctataaattcttggggaagtgtgttataagctttaataattacattgagctgcacctcagtggtgtgtcattaacatgcagtggggttaatatctgaggcctcagatgactttgtgccttttggaataaagggtaaaataaactctcccagagtaagagctgtatcgtgaattgtcatactaattattgagggggacttatgtgcttttattgaatggagtgctttacaatttttatttttaaatggggttgggatccttggaatatttcaataaaattgataaaatat

SEQ ID NO: 160114 - DNA, 614 bp, Homo sapiens
  Payload ID: 11312
  Gene Symbol: NSUN2
  Gene Name: NOP2/Sun RNA methyltransferase family, member 2
  ENST ID: ENST00000514127
  CDS Start-End: 1-308
tagctcatgcaactgaggatttagagaataatggcagtaagaaagatggcgtgtgtggtcctcctccatcaaagaaaatgaagttatttggatttaaagaagatccatttgtatttattcctgaagatgacccattatttccacctattgagttattaacacggggatcaaagtctggtgtagaaataacagcggtgaagagtttgactgtgctttccggctggcacaggagggaatatatacattgtatccatttattaactcaagaattattactgtatcaatggaagatgttaagatactgttgacccaggaaaatcccttttttagaaaactcagcagtgagacctacagtcaagcaaaggacctggcaaagggaagcatcgtgctgaagtatgaaccagattctgcgaatccagacgctctgcagtgtcccatcgtcttatgcggatggcggggaaaggcctccattcgaacttttgtgcccaagaatgaacggcttcattatctcaggatgatggggctggaggtattgggagaaaagaagaaggaaggggttatcctcacaaatgagagtgcagccagcaccggacagccagacaatgacgtgactg

SEQ ID NO: 160115 - DNA, 2400 bp, Homo sapiens
  Payload ID: 11313
  Gene Symbol: NOP56
  Gene Name: NOP56 ribonucleoprotein
  Uniprot ID: O00567
  ENST ID: ENST00000329276
  CDS Start-End: 517-2301
ggctcgtccccgagtaggggacgggaacgcctgggtcccggggacgtggggcgcagggtctggggcccgaggccacggacgaagcgggaagccggctaggcagcggtctctgtctgggatggacgccgcgccccacgcggacctcccgccccgacttcacccagctctgctgcccgtaactcatatgacaagaacatcaggaaccggactattaccccgaaagggccttcccaagtcgtttcgccgcctgcagtgcccgaccgggggccgcgcgtccccggcaaccacgcccgcccgcgcagctgcagaggccggaaaaggcccgctcgcccgcgctcggcaccacccagcccgcgctccgggcgataccaccctgggcggcccctccaaaggccggagatggtgtcgtccccggcctccgattggtcgggggggcgggggcgtggcctctggagcctggttccgcgcgccggagcgcgctagccgcattgcgagccgaacccgggagctggcgccatggtgctgttgcacgtgctgtttgagcacgcggtcggctacgcgctgctggcgctgaaggaagtggaggagatcagtctgctgcagccgcaggtggaggagtctgtgctcaacctgggcaaattccacagcatcgttcgtctggtggccttttgtccctttgcctcatcccaggttgccttggaaaatgccaacgccgtgtctgaaggggttgttcatgaggacctccgcctgctcttggagacccacctgccgtccaaaaagaagaaagtactcttgggagttggggatcccaagattggtgccgcaatacaggaggagttagggtacaactgccagactggaggagtcatagctgagatcctgcgaggagttcgtctgcacttccacaatctggtgaagggtctgaccgatctgtcagcttgtaaagcacagctggggctgggacacagctattcccgtgccaaagttaagtttaatgtgaaccgggtggacaatatgatcatccagtccattagcctcctggaccagctggataaggacatcaataccttctctatgcgtgtcagggagtggtacgggtatcactttccggagctggtgaagatcatcaacgacaatgccacatactgccgtcttgcccagtttattggaaaccgaagggaactgaatgaggacaagctggagaagctggaggagctgacaatggatggggccaaggctaaggctattctggatgcctcacggtcctccatgggcatggacatatctgccattgacttgataaacatcgagagcttctccagtcgtgtggtgtctttatctgaataccgccagagcctacacacttacctgcgctccaagatgagccaagtagcccccagcctgtcagccctaattggggaagcggtaggtgcacgtctcatcgcacatgctggcagcctcaccaacctggccaagtatccagcatccacagtgcagatccttggggctgaaaaggccctgttcagagccctgaagacaaggggtaacactccaaaatatggactcattttccactccaccttcattggccgagcagctgccaagaacaaaggccgcatctcccgatacctggcaaacaaatgcagtattgcctcacgaatcgattgcttctctgaggtgcccacgagtgtattcggggagaagcttcgagaacaagttgaagagcgactgtccttctatgagactggagagataccacgaaagaatctggatgtcatgaaggaagcaatggttcaggcagaggaagcggctgctgagattactaggaagctggagaaacaggagaagaaacgcttaaagaaggaaaagaaacggctggctgcacttgccctcgcgtcttcagaaaacagcagtagtactccagaggagtgtgaggagatgagtgaaaaacccaaaaagaagaaaaagcaaaagccccaggaggttcctcaggagaatggaatggaagacccatctatctctttctccaaacccaagaaaaagaaatctttttccaaggaggagttgatgagtagcgatcttgaagagaccgctggcagcaccagtattcccaagaggaagaagtctacacccaaggaggaaacagttaatgaccctgaggaggcaggccacagaagtggctccaagaaaaagaggaaattctccaaagaggagccggtcagcagtgggcctgaagaggcggttggcaagagcagctccaagaagaagaaaaagttccataaagcatcccaggaagattagaatgcaaatggacattctctgggaggtggggcataccatagcccaaggtgacatttcccaccctgtgccgtgttccccaataaaaacaaattcacaaga

SEQ ID NO: 160116 - DNA, 856 bp, Homo sapiens
  Payload ID: 11313
  Gene Symbol: NOP56
  Gene Name: NOP56 ribonucleoprotein
  ENST ID: ENST00000445139
  CDS Start-End: 13-856
ggagctggcgccatggtgctgttgcacgtgctgtttgagcacgcggtcggctacgcgctgctggcgctgaaggaagtggaggagatcagtctgctgcagccgcaggtggaggagtctgtgctcaacctgggcaaattccacagcatcgttcgtctggtggccttttgtccctttgcctcatcccaggttgccttggaaaatgccaacgccgtgtctgaaggggttgttcatgaggacctccgcctgctcttggagacccacctgccgtccaaaaagaagaaagtactcttgggagttggggatcccaagattggtgccgcaatacaggaggagttagggtacaactgccagactggaggagtcatagctgagatcctgcgaggagttcgtctgcacttccacaatctggtgaagggtctgaccgatctgtcagcttgtaaagcacagctggggctgggacacagctattcccgtgccaaagttaagtttaatgtgaaccgggtggacaatatgatcatccagtccattagcctcctggaccagctggataaggacatcaataccttctctatgcgtgtcaggcagagtaggtgtggagaaggcaaggctgtagctctatggtttttgatgaagcagctgggccagggagtgactgtggctctttgcagggagtggtacgggtatcactttccggagctggtgaagatcatcaacgacaatgccacatactgccgtcttgcccagtttattggaaaccgaagggaactgaatgaggacaagctggagaagctggaggagctgacaatggatggggccaaggctaaggctattctggatgcctcacggtcctccatgg

SEQ ID NO: 160117 - DNA, 1628 bp, Homo sapiens
  Payload ID: 11313
  Gene Symbol: NOP56
  Gene Name: NOP56 ribonucleoprotein
  ENST ID: ENST00000415272
  CDS Start-End: 1-659
acttgataaacatcgagagcttctccagtcgtgtggtgtctttatctgaataccgccagagcctacacacttacctgcgctccaagatgagccaagtagcccccagcctgtcagccctaattggggaagcggtaggtgcacgtctcatcgcacatgctggcagcctcaccaacctggccaagtatccagcatccacagtgcagatccttggggctgaaaaggccctgttcagagccctgaagacaaggggtaacactccaaaatatggactcattttccactccaccttcattggccgagcagctgccaagaacaaaggccgcatctcccgatacctggcaaacaaatgcagtattgcctcacgaatcgattgcttctctgaggtgcccacgagtgtattcggggagaagcttcgagaacaagttgaagagcgactgtccttctatgagactggagagataccacgaaagaatctggatgtcatgaaggaagcaatggttcaggcagaggaagcggctgctgagattactaggaagctggagaaacaggagaagaaacgcttaaagaaggaaaagaaacggctggctgcacttgccctcgcgtcttcagaaaacagcagtagtactccagaggagtgtgaggaaggagataggtgctgaacttgctcaagagcccagagagctggttgtagctcacacccgttccctgggcatgtgtgttctgtcctcggctgcctcccaggagtcctcaacctggggtagtgtaaattcctgctctgcttattatcagacgtgtgtccggaggtggtcgtgtttcacagtggggatgggggcagggaggtccccaatgtgctaagctacaatcattctccctgagattttcatttagcacccagtttcttaaacagtgtttcagggccctgtctggaacttggcatgatggttctgttgcgaccagcatggtgggtgttttttaggtttttttttttaatgggctgaggtaatttctcatgacatgttttccttctaatttgggacagcctttggggtggatttctaaagttatacccacacaattaaactatcccagaaacactgggcaatgttaacgacacgcgttcccctgccttggctacttaattgctgaagatgtaatgagcactgttctcacagcctgttcccctgtccttccctttaggagatgagtgaaaaacccaaaaagaagaaaaagcaaaagccccaggaggttcctcaggagaatggaatggaagacccatctatctctttctccaaacccaagaaaaagaaatctttttccaaggaggagttgatgagtagcgatcttgaagagaccgctggcagcaccagtattcccaagaggaagaagtctacacccaaggaggaaacagttaatgaccctgaggaggcaggccacagaagtggctccaagaaaaagaggaaattctccaaagaggagccggtcagcagtgggcctgaagaggcggttggcaagagcagctccaagaagaagaaaaagttccataaagcatcccaggaagattagaatgcaaatggacattctctgggaggtggggcataccatagcccaaggtgacatttcccaccctg

SEQ ID NO: 160118 - DNA, 1320 bp, Homo sapiens
  Payload ID: 11313
  Gene Symbol: NOP56
  Gene Name: NOP56 ribonucleoprotein
  ENST ID: ENST00000467196
  CDS Start-End: 1-757
gctggagaagctggaggagctgacaatggatggggccaaggctaaggctattctggatgcctcacggtcctccatgggcatggacatatctgccattgacttgataaacatcgagagcttctccagtcgtgtggtgtctttatctgaataccgccagagcctacacacttacctgcgctccaagatgagccaagtagcccccagcctgtcagccctaattggggaagcggtaggtgcacgtctcatcgcacatgctggcagcctcaccaacctggccaagtatccagcatccacagtgcagatccttggggctgaaaaggccctgttcagagccctgaagacaaggggtaacactccaaaatatggactcattttccactccaccttcattggccgagcagctgccaagaacaaaggccgcatctcccgatacctggcaaacaaatgcagtattgcctcacgaatcgattgcttctctgaggtgcccacgagtgtattcggggagaagcttcgagaacaagttgaagagcgactgtccttctatgagactggagagataccacgaaagaatctggatgtcatgaaggaagcaatggttcaggcagaggaagcggctgctgagattactaggaagctggagaaacaggagaagaaacgcttaaagaaggaaaagaaacggctggctgcacttgccctcgcgtcttcagaaaacagcagtagtactccagaggagtgtgaggaaggagataggtgctgaacttgctcaagagcccagagagctggttgtagctcacacccgttccctgggcatgtgtgttctgtcctcggctgcctcccaggagtcctcaacctggggagatgagtgaaaaacccaaaaagaagaaaaagcaaaagccccaggaggttcctcaggagaatggaatggaagacccatctatctctttctccaaacccaagaaaaagaaatctttttccaaggaggagttgatgagtagcgatcttgaagagaccgctggcagcaccagtattcccaagaggaagaagtctacacccaaggaggaaacagttaatgaccctgaggaggcaggccacagaagtggctccaagaaaaagaggaaattctccaaagaggagccggtcagcagtgggcctgaagaggcggttggcaagagcagctccaagaagaagaaaaagttccataaagcatcccaggaagattagaatgcaaatggacattctctgggaggtggggcataccatagcccaaggtgacatttcccaccctgtgccgtgttccccaataaaaacaaattcacaaga

SEQ ID NO: 160119 - DNA, 2046 bp, Homo sapiens
  Payload ID: 11314
  Gene Symbol: NOP58
  Gene Name: NOP58 ribonucleoprotein
  Uniprot ID: Q9Y2X3
  ENST ID: ENST00000264279
  CDS Start-End: 227-1816
gttgctatcccagaatcctcagagaaggagtagcgcgttcgtgcgtcctagttccagtacagcgtggagggtttaggcagcgtgttctgattctttgcgggacggcgagcgcatttgtgctttgcccgccgcggcctaggaggccttttgaggccgcgtagtcggtgtttttgaactgactctacagcttctggcaggccgtgcggcgccctgacccggcctcaccatgttggtgctgtttgaaacgtctgtgggttacgccatctttaaggttctaaatgagaagaaacttcaagaggttgatagtttatggaaagaatttgaaactccagagaaagcaaacaaaatagtaaagctaaaacattttgagaaatttcaggatacagcagaagcattagcagcattcacagctctgatggagggcaaaatcaataagcagctgaaaaaagttctgaagaaaatagtaaaagaagcccatgaaccgctggcagtagctgatgctaaactaggaggggtcataaaggaaaagctgaatctcagttgtatccatagtcctgttgttaatgaacttatgagaggaattcgttcacaaatggatggattaatccctggggtagaaccacgtgaaatggcagctatgtgtcttggattggctcacagcctgtctcgatatagattgaagtttagcgctgataaagtagacacaatgattgttcaggcaatttccttgttagatgacttggataaagaactaaacaactacattatgcgatgtagagaatggtatggctggcatttccctgaattaggaaaaattatttcagataatttaacatactgcaagtgtttacagaaagttggcgataggaagaactatgcctctgccaagctttctgagttgctgccagaagaagttgaagcagaagtgaaagcagctgcagagatatcaatgggaacagaggtttcagaagaagatatttgcaatattctgcatctttgcacccaggtgattgaaatctctgaatatcgaacccagctctatgaatatctacaaaatcgaatgatggccattgcacccaatgttacagtcatggttggggaattagttggagcacggcttattgctcatgcaggttctcttttaaatttggccaagcatgcagcttctaccgttcagattcttggagctgaaaaggcacttttcagagccctcaaatctagacgggatacccctaagtatggtctcatttatcatgcttcactcgtgggccagacaagtcccaaacacaaaggaaagatttctcgaatgctggcagccaaaaccgttttggctatccgttatgatgcttttggtgaggattcaagttctgcaatgggagttgagaacagagccaaattagaggccaggttgagaactttggaagacagagggataagaaaaataagtggaacaggaaaagcattagcaaaaacagaaaaatatgaacacaaaagtgaagtgaagacttacgatccttctggtgactccacacttccaacctgttctaaaaaacgcaaaatagaacaggtagataaagaggatgaaattactgaaaagaaagccaaaaaagccaagattaaagttaaagttgaagaagaggaagaagaaaaagtggcagaagaagaagaaacatctgtgaagaagaagaagaaaaggggtaaaaagaaacacattaaggaagaaccactttctgaggaagaaccatgtaccagcacagcaattgctagtccagagaaaaagaagaaaaagaaaaaaaagagagagaacgaggattaacagaaaggaattacgattatatcacccggacacacatcatgcttaagattcaactgggagcataccagggatgctctctaacgtaatcaagggaaggttcagtaagacaaagtgatttatcatctataacttcaaacctatttgtcttgacatcaactctgttaaccttatgtcatcatttcttagagtctttgatatacaaataaaattttctttgtattttaagacaa

SEQ ID NO: 160120 - DNA, 714 bp, Homo sapiens
  Payload ID: 11314
  Gene Symbol: NOP58
  Gene Name: NOP58 ribonucleoprotein
  ENST ID: ENST00000433543
  CDS Start-End: 1-564
gaaccacgtgaaatggcagctatgtgtcttggattggctcacagcctgtctcgatatagattgaagtttagcgctgataaagtagacacaatgattgttcaggcaatttccttgttagatgacttggataaagaactaaacaactacattatgcgatgtagagaatggtatggctggcatttccctgaattaggaaaaattatttcagataatttaacatactgcaagtgtttacagaaagttggcgataggaagaactatgcctctgccaagctttctgagttgctgccagaagaagttgaagcagaagtgaaagcagctgcagagatatcaatgggaacagaggtttcagaagaagatatttgcaatattctgcatctttgcacccaggtgattgaaatctctgaatatcgaacccagctctatgaatatctacaaaatcgaatgatggccattgcacccaatgttacagtcatggttggggaattagttggagcacggcttattgctcatgcagatttctcgaatgctggcagccaaaaccgttttggctatccgttatgatgcttttggtgaggattcaagttctgcaatgggagttgagaacagagccaaattagaggccaggttgagaactttggaagacagagggataagaaaaataagtggaacaggaaaagcattagcaaaaacagaaaaatatgaacacaaaag

SEQ ID NO: 160121 - DNA, 655 bp, Homo sapiens
  Payload ID: 11314
  Gene Symbol: NOP58
  Gene Name: NOP58 ribonucleoprotein
  ENST ID: ENST00000426814
  CDS Start-End: 207-413
agagaaggagtagcgcgttcgtgcgtcctagttccagtacagcgtggagggtttaggcagcgtgttctgattctttgcgggacggcgagcgcatttgtgctttgcccgccgcggcctaggaggccttttgaggccgcgtagtcggtgtttttgaactgactctacagcttctggcaggccgtgcggcgccctgacccggcctcaccatgttggtgctgtttgaaacgtctgtgggttacgccatctttaaggttctaaatgagaagaaacttcaagaggttgatagtttatggaaagaatttgaaactccagagaaagcaaacaaaatagtaaagctaaaacattttgagaaatttcaggatacagcagaagcattagcagggctggttttccccatgtgtgaggagaggtgagaagtggttaagttgatctccctgtggaaaccagcaacataatgctgaagcacaattcagtaaaaggtgttctacaagggaccaagcattcacagctctgatggagggcaaaatcaataagcagctgaaaaaagttctgaagaaaatagtaaaagaagcccatgaaccgctggcagtagctgatgctaaactaggaggggtcataaaggaaaagctgaatctcagttgtatccatagtcctg

SEQ ID NO: 160122 - DNA, 6033 bp, Homo sapiens
  Payload ID: 11315
  Gene Symbol: NOP9
  Gene Name: NOP9 nucleolar protein
  Uniprot ID: Q86U38
  ENST ID: ENST00000267425
  CDS Start-End: 94-2004
aaactttgtctggataaggcgcacgcttggcgacgtcgaaggtccgtccgcagttaaggaagcttttgcagccggacaggtcgcgaagcacacatggggcagggtccgcgctctccacacaaggtggggcgccggttcccagctggtggcaaacgggggcgcggggccaaggggtcggggcgccccttaccaggccgtaagcggcaaccctggccgcctccggatgggcgctcggagccggctccagattcgcacccgcacctgagcccggaagctctgggatatttccgccgggcgctgtcagcattgaaagaggctcccgagactggggaagaacgagatctgatggtgcacaatataatgaaggaagtagagactcaggccctagctttgtccacgaacaggactggcagtgagatgctgcaggaactgttgggattcagtcccttgaaaccgctttgtcgcgtgtgggctgctctgcgctctaacttgcgcactgtggcctgtcaccgatgcggggtccatgtattacaaagtgctttgctacagctccctcgattgctggggagtgctgcagaggaggaggaggaggaggaggaggatggaaaggatggtcccacggagaccctggaggagctggtcctgggactagccgctgaggtgtgtgatgattttcttgtctactgtggagacacacatggcagcttcgtggtcagaactctgcttcaggtgttaggagggactattctggagtctgagagagccaggccccgtggttcccaatcatctgaagcacagaagaccccagctcaggaatgtaagccagctgattttgaagtccctgaaacctttttgaatcgccttcaggacctgagctcctcctttctgaaggacattgcagtgtttatcactgataagatctccagcttctgtcttcaagtggctttacaggttttacaccgcaaacttccccagttttgcgctcatctctgcaatgctgtgattggctacctgagtactcgcggttcctcagtagatggcagtcccctactgctatttctccgagatcagacgagttccagactcctggagcaggtcctgctggtgttggagcccccaagactccagagcctctttgaggagcacttgcaggggcagctgcagaccctggctgcacatcccattgccaacttccctttgcagcgcttactggatgcagtcactacccctgagctgctgtcccctgtgtttgaggagctgagccctgtcttggaagctgtattggcccagggccacccaggggtagtcattgccctggtgggggcctgtcgcagagttggggcctaccaagccaaggtcctacagctcttgttggaggcattccactgtgcagagccctcatcccggcaagtggcctgtgtgcctctctttgccactttgatggcttatgaggtgtactatggactgacggaggaggagggggcagtgcctgcagagcaccaggtggcaatggccgcagccagagccttgggggatgtgacagtccttgggtctctactgctccagcatctgctgcacttctccactcctggtcttgtacttcgaagtctgggtgccttgacgggaccacagcttctgtcccttgcccaaagtcccgctggctctcatgtgctcgatgccatcctgaccagcccctctgtgacgcgcaagctgcgccgccgtgtgctgcagaacctaaagggacaatatgtggctctggcctgtagtcgccatggcagccgtgtgctagatgccatctggagtggagcagccttgagggcccggaaggaaattgctgctgagcttggggagcagaaccaggagctgataagagaccctttcggccaccatgtggctcgaaatgtggccttgactaccttcctaaagcggcgagaggcttgggaacagcagcagggtgcggtggccaagcggaggcgggcattgaactccatacttgaagactgaggctttggatctgggactgggtgttgatgggggagggcaaaatggggtatccaccccatccctttcctggtttaaattggagtcagaagtcttagtggtaaatatttgatatttttattggaaatgtttttgttagtttgaggggaagggtatgaagacagatctcaaggtaaagtcagagagggctgtcatcagtatgctggggagtttagggacaggaggcattggtaggggattagatgtagcagcagtcaggctgggatcaagatgcctgggggacatcttgatcttggcctttcagggcaagtgggaggccagaaaggtggctaggaaagaacagcattcttcaggtaagggtatagacttgggatgtgaggcgttatgctgaaaggttctgtcacgaggggatcagaggacagtggggaaattgggtgggttatctagcctgtactgtctgcaggtcctgaaatttgatgctgtcatagtctttgcagtgggtcggttggaatgattctgggggcagaagctcagagccccttagtaggaatggaggcggcccttctgctgccactgctcagccccctccactgcatgacgaagggtggaggaaattcccagcaacatatggcccaggccttgcagcagtgtggaggtccaacgaaggagctccctgaatggcagagacaagaggaaatcagatgatttggaaaacttgggaggaagccatcaagctgggagatgaggactttccacaagcaagagctaactaggggtaggtgggtgcaagaggacgaattatggggactatccaactgtaggggatggggcagtatgacatgttgatttctgacctgagtactttctttgggccaagtccttgaaagtcacaactcatagagtagagcccgtagaatgtggctttgacattcaggctgccaaagaggtctcgagggttttgcttgtacacgtcaaaggtgaatcgggcgatgtccttgctgtgcttgggcctctcccgtcccaggccatatgacagcactccactctgtaggacacccttgtcagtgcagtagatcctcataccagacacccaccactaatctccatcagcactgggtcagaccctccctcgcttggactttctgtccactgtgtgacatccttgacaattccacaactcctcctgcacctggtccccaggatcagggttaagctagagaggaagcccgggaaagctctaaaggacaggcattggaagcagccccagtataggcctcttacccttgtagggctccagctctgaccagactgcaacaccatcaggcacgtgtcatcctccagcagctggaagaagtcctcactgtccactgcagttccatcctcctctagcaccagggttagcactccattcagcagtagggtctccaatgcctgcccaatggcaagaagcaagaagggcaggtcttatcccatgccccttccctctttagctgcccaacatccatcagttggctctagacattggtcgatgtcccactttgactttccggcactttgatacctcctaaaggttgcagctctccgtgttcttcagtttttgggggatcctagctagaggctgacctttttcctctttgctcctaccatgtcattggcatctccccttgctcccctccaagtcacttctggtttggaattggaaagcaagccaggttctcacgaagtccacccttctgtcttatctacaatgctgcacctcacttcccacaccctcaagagttctccagaagtgttttcagtaatagtgtttaacctttttgagtccttactctgtgccaggtatgaggactttacctacattatcctcttactcctttcaacaaccctaggaggtgatgtattattattgcctttttatagttgaagaaactgaggttttggtaggttgaacaacttcccaaggtttgacaggcaggaagtggcagaatcagaatttgaacttgatttgtcacacaaatcacctttccatactagcttctgaattctgtccctcgaactctccctatctcctgctaacccctgctcccatagaaaagctcactcggtggaaaatgaacaaattgaccagagctcattaggcccactccgctgcttttagccctcagagggaggggcagctgtgtgacttcagccctctgctccatcatcacaagttgccactgttgtggagccccttggctacccctgctataggaaccgaggaacttggcctacttactttggctagcagctcctggcgggtggcagctgtcaggcctttccggatggtccgcttgtgatcacagacacggaaaggtcgctggggtggtggagctgaggtccagaccctccgtccaaactccgagcttatattagatactgacctggtagttgagaagaaaagtcaagaaggggcgaggaggggcttggtgagtgtaaagggcatgatgagggtagagtggctagagggctagggagggagagatctaggtttatcgattagggatgagggagagaccatggagtgcaggtgggggcgggtggctcaggagcttgacaagcccactgtggagtggggagcaggagaggaaggggtactggttagtctcctaggggctgagtggagtattgttgccctgcctatatcccctaaaggtggagggtagagcggagggttagcagtcacctgagtaagtcactggggttcagagctgagaggtactccatggtggaccggagagttccttccctggaacttctgggctgggtggttctctcctgtgctggggctttagtggtgttttctgttacaaacctgggatctcagcccaggacaaggtgggaatgagtcaagcctggactctggcccccctgcctggccagtaagaagggcaaagtccaaggggagggatgagggaggggccagatggggtcctggaggaagaattgcctggcaaaagccattggagcttgtatgtgtgtctttggtgatgacatgtgttgtgagggtagatgggaaccatgtaaaaggatgaaatgtgacttctggtgtttttttatttctatggagggaatttctggggacggtttctggctctcaggctctgagaagctgcagtttatgagtggctctgtgtgtgctgccacctactggagaagccataagctgcagctttaggaaaagggaacccggggcagagtgtggggaagtgggatggcagcatggcagggctttggaaaatgagaggtgagactgtgtccaggaagggtgtaaggagaggatggatcctgatacatggattcaggatcattagggtcctgtctgggacactggccttcctgcttacctgctctttccttcctccttggtcggaggaggggctggctcactgctctggcttcattttccagagctgcctgctgcagtcacacttaggtcatcttctctcacttttctccttttgccgattagtggacgtgacagagatgtgaatggggcagggatgtcctttgatggcatcaagactttagcttctggtgcgctgtgtcccagctctgatttcagttgcagccgtgatggacagttgcatggaagctgagactctcactgacagtgaaaccctcaaatgaacacaatccctgctttcctgccaaggatccttgtagggtcccccagcttccccactttttttctgtgtcctgacaaagaaacacagagtaacttgattgccctgtgacctggccagttgcatttcccctgcaggcttgagcccaagccagagccttgaaaaggtattcaggttgttgcccaaaacactgaaaaaaactggccctggccctgaaccaaataccttgaaccctcgtaaactccataccctgacccccttgttttggatatacccaggtagaacaactctctctcactgtctgttgtgaggatacgctgtagcccactcattaagtacattctcctaataaatgctttggactgat

SEQ ID NO: 160123 - DNA, 1942 bp, Homo sapiens
  Payload ID: 11315
  Gene Symbol: NOP9
  Gene Name: NOP9 nucleolar protein
  Uniprot ID: Q86U38
  ENST ID: ENST00000396802
  CDS Start-End: 77-1684
ggcgcacgcttggcgacgtcgaaggtccgtccgcagttaaggaagcttttgcagccggacaggtcgcgaagcacacatggggcagggtccgcgctctccacacaaggtggggcgccggttcccagctggtggcaaacgggggcgcggggccaaggggtcggggcgccccttaccaggccgtaagcggcaaccctggccgcctccggatgggcgctcggagccggctccagattcgcacccgcacctgagcccggaagctctgggatatttccgccgggcgctgtcagcattgaaagaggctcccgagactggggaagaacgagatctgatggtgcacaatataatgaaggaagtagagactcaggccctagctttgtccacgaacaggactggcagtgagatgctgcaggaactgttgggattcagtcccttgaaaccgctttgtcgcgtgtgggctgctctgcgctctaacttgcgcactgtggcctgtcaccgatgcggggtccatgtattacaaagtgctttgctacagctccctcgattgctggggagtgctgcagaggaggaggaggaggaggaggaggatggaaaggatggtcccacggagaccctggaggagctggtcctgggactagccgctgaggtgtgtgatgattttcttgtctactgtggagacacacatggcagcttcgtggtcagaactctgcttcaggtgttaggagggactattctggagtctgagagagccaggccccgtggttcccaatcatctgaagcacagaagaccccagctcaggaatgtaagccagctgattttgaagtccctgaaacctttttgaatcgccttcaggacctgagctcctcctttctgaaggacattgcagtgtttatcactgataagatctccagcttctgtcttcaagtggctttacaggttttacaccgcaaacttccccagttttgcgctcatctctgcaatgctgtgattggctacctgagtactcgcggttcctcagtagatggcagtcccctactgctatttctccgagatcagacgagttccagactcctggagcaggtcctgctggtgttggagcccccaagactccagagcctctttgaggagcacttgcaggggcagctgcagaccctggctgcacatcccattgccaacttccctttgcagcgcttactggatgcagtcactacccctgagctgctgtcccctgtgtttgaggagctgagccctgtcttggaagctgtattggcccagggccacccaggggtagtcattgccctggtgggggcctgtcgcagagttggggcctaccaagccaaggtcctacagctcttgttggaggcattccactgtgcagagccctcatcccggcaagtggcctgtgtgcctctctttgccactttgatggcttatgaggtgtactatggactgacggaggaggagggggcagtgcctgcagagcaccaggtggcaatggccgcagccagagccttgggggatgtgacagtccttgggtctctactgctccagcatctgctgcacttctccactcctggtcttgtacttcgaagtctgggtgccttgacgggaccacagcttctgtcccttgcccaaaggcccggaaggaaattgctgctgagcttggggagcagaaccaggagctgataagagaccctttcggccaccatgtggctcgaaatgtggccttgactaccttcctaaagcggcgagaggcttgggaacagcagcagggtgcggtggccaagcggaggcgggcattgaactccatacttgaagactgaggctttggatctgggactgggtgttgatgggggagggcaaaatggggtatccaccccatccctttcctggtttaaattggagtcagaagtcttagtggtaaatatttgatatttttattgg

SEQ ID NO: 160124 - DNA, 455 bp, Homo sapiens
  Payload ID: 11315
  Gene Symbol: NOP9
  Gene Name: NOP9 nucleolar protein
  ENST ID: ENST00000557362
  CDS Start-End: 1-293
cagtcactacccctgagctgctgtcccctgtgtttgaggagctgagccctgtcttggaagctgtattggcccagggccacccaggggtagtcattgccctggtgggggcctgtcgcagagttggggcctaccaagccaaggtcctacagctcttgttggaggcattccactgtgcagagccctcatcccggcaagtggcctgtgtgcctctctttgccactttgatggcttatgaggtgtactatggactgacggaggaggagggggcagtgcctgcagagcaccagggttagcactccattcagcagtagggtctccaatgcctgcccaatggcaagaagcaagaagggcaggtcttatcccatgccccttccctctttagctgcccaacatccatcagttggctctagacattggtcgatgtcccactttgactttccggcactttgatacct

SEQ ID NO: 160125 - DNA, 1833 bp, Homo sapiens
  Payload ID: 11316
  Gene Symbol: NDP
  Gene Name: Norrie disease (pseudoglioma)
  Uniprot ID: Q00604
  ENST ID: ENST00000378062
  CDS Start-End: 409-810
cctctctctctctccctctctctctccctctctctctctccctgtgtcgcttaaacaacagtcctaacttttgtgtgttgcaaatataaaaggcaagccatgtgacagagggacagaagaacaaaagcatttggaagtaacaggacctctttctagctctcagaaaagtctgagaagaaaggagccctgcgttcccctaagctgtgcagcagatactgtgatgatggattgcaagtgcaaagagtaagacaaaactccagcacataaaggacaatgacaaccagaaagcttcagcccgatcctgccctttccttgaacgggactggatcctaggaggtgaagccatttccaattttttgtcctctgcctccctctgctgttcttctagagaagtttttccttacaacaatgagaaaacatgtactagctgcatccttttctatgctctccctgctggtgataatgggagatacagacagtaaaacggacagctcattcataatggactcggaccctcgacgctgcatgaggcaccactatgtggattctatcagtcacccattgtacaagtgtagctcaaagatggtgctcctggccaggtgcgaggggcactgcagccaggcgtcacgctccgagcctttggtgtcgttcagcactgtcctcaagcaacccttccgttcctcctgtcactgctgccggccccagacttccaagctgaaggcactgcggctgcgatgctcagggggcatgcgactcactgccacctaccggtacatcctctcctgtcactgcgaggaatgcaattcctgaggcccgctgctgtgtgtggcttctggatgggacaactgtagaggcagttcgaccagccagggaaagactggcaagaaaagagttaaggcaaaaaaggatgcaacaattctcccgggactctgcatattctagtaataaagactctacatgcttgttgacagagagagatactctgggaacttctttgcagttcccatctcctttctctggtacaatttcttttggttcattttcagattcaggcattttcccccttggctctcaatgctgtttgggtttccaacaattcagcattagtgggaaaaagtgggccctcatacacaagcgtgtcaggctgtcagtgtttggtgcacgctggggaagaatttactttggaaagtagaaaagcccagcttttcctgggacatcttctgttattgttgatgtttttttttaccttgtcattttggtctaaggttgccattgctgctaaaggttaccgatttcaaagtccagataccaagcatgtggatatgtttagctacgtttactcacagccagcgaactgacattaaaataactaacaaacagattcttttatgtgatgctggaactcttgacagctataattattattcagaaatgactttttgaaagtaaaagcagcataaagaatttgtcacaggaaggctgtctcagataaattatggtaaaattttgtaagggagcagacttttaaagacttgcacaaatacggatcctgcactgactctggaaaaggcatatatgtactagtggcatggagaatgcaccatactcatgcatgcaaattagacaaccaagtatgaatctatttgtgggtgtgctatagctttagccgtgtcacgggcatcattctctaatatccacttgtccatgtgaaacatgttgccaaaatggtggcctggcttgtcttctgaacgtttggttcaaatgtgttttggtcctggaggctcaaattttgagttattcccacgttttgaaataaaaagagtatattcaaaa

SEQ ID NO: 160126 - DNA, 9371 bp, Homo sapiens
  Payload ID: 11317
  Gene Symbol: NOTCH1
  Gene Name: notch 1
  Uniprot ID: P46531
  ENST ID: ENST00000277541
  CDS Start-End: 77-7744
gcgcgtgtgcgtcccagccccgccggccagcgcaggaggccgccgcccgggcgcagagggcagccggtggggaggcatgccgccgctcctggcgcccctgctctgcctggcgctgctgcccgcgctcgccgcacgaggcccgcgatgctcccagcccggtgagacctgcctgaatggcgggaagtgtgaagcggccaatggcacggaggcctgcgtctgtggcggggccttcgtgggcccgcgatgccaggaccccaacccgtgcctcagcaccccctgcaagaacgccgggacatgccacgtggtggaccgcagaggcgtggcagactatgcctgcagctgtgccctgggcttctctgggcccctctgcctgacacccctggacaatgcctgcctcaccaacccctgccgcaacgggggcacctgcgacctgctcacgctgacggagtacaagtgccgctgcccgcccggctggtcagggaaatcgtgccagcaggctgacccgtgcgcctccaacccctgcgccaacggtggccagtgcctgcccttcgaggcctcctacatctgccactgcccacccagcttccatggccccacctgccggcaggatgtcaacgagtgtggccagaagcccgggctttgccgccacggaggcacctgccacaacgaggtcggctcctaccgctgcgtctgccgcgccacccacactggccccaactgcgagcggccctacgtgccctgcagcccctcgccctgccagaacgggggcacctgccgccccacgggcgacgtcacccacgagtgtgcctgcctgccaggcttcaccggccagaactgtgaggaaaatatcgacgattgtccaggaaacaactgcaagaacgggggtgcctgtgtggacggcgtgaacacctacaactgccgctgcccgccagagtggacaggtcagtactgtaccgaggatgtggacgagtgccagctgatgccaaatgcctgccagaacggcgggacctgccacaacacccacggtggctacaactgcgtgtgtgtcaacggctggactggtgaggactgcagcgagaacattgatgactgtgccagcgccgcctgcttccacggcgccacctgccatgaccgtgtggcctccttctactgcgagtgtccccatggccgcacaggtctgctgtgccacctcaacgacgcatgcatcagcaacccctgtaacgagggctccaactgcgacaccaaccctgtcaatggcaaggccatctgcacctgcccctcggggtacacgggcccggcctgcagccaggacgtggatgagtgctcgctgggtgccaacccctgcgagcatgcgggcaagtgcatcaacacgctgggctccttcgagtgccagtgtctgcagggctacacgggcccccgatgcgagatcgacgtcaacgagtgcgtctcgaacccgtgccagaacgacgccacctgcctggaccagattggggagttccagtgcatctgcatgcccggctacgagggtgtgcactgcgaggtcaacacagacgagtgtgccagcagcccctgcctgcacaatggccgctgcctggacaagatcaatgagttccagtgcgagtgccccacgggcttcactgggcatctgtgccagtacgatgtggacgagtgtgccagcaccccctgcaagaatggtgccaagtgcctggacggacccaacacttacacctgtgtgtgcacggaagggtacacggggacgcactgcgaggtggacatcgatgagtgcgaccccgacccctgccactacggctcctgcaaggacggcgtcgccaccttcacctgcctctgccgcccaggctacacgggccaccactgcgagaccaacatcaacgagtgctccagccagccctgccgccacgggggcacctgccaggaccgcgacaacgcctacctctgcttctgcctgaaggggaccacaggacccaactgcgagatcaacctggatgactgtgccagcagcccctgcgactcgggcacctgtctggacaagatcgatggctacgagtgtgcctgtgagccgggctacacagggagcatgtgtaacatcaacatcgatgagtgtgcgggcaacccctgccacaacgggggcacctgcgaggacggcatcaatggcttcacctgccgctgccccgagggctaccacgaccccacctgcctgtctgaggtcaatgagtgcaacagcaacccctgcgtccacggggcctgccgggacagcctcaacgggtacaagtgcgactgtgaccctgggtggagtgggaccaactgtgacatcaacaacaatgagtgtgaatccaacccttgtgtcaacggcggcacctgcaaagacatgaccagtggctacgtgtgcacctgccgggagggcttcagcggtcccaactgccagaccaacatcaacgagtgtgcgtccaacccatgtctgaaccagggcacgtgtattgacgacgttgccgggtacaagtgcaactgcctgctgccctacacaggtgccacgtgtgaggtggtgctggccccgtgtgcccccagcccctgcagaaacggcggggagtgcaggcaatccgaggactatgagagcttctcctgtgtctgccccacgggctggcaagggcagacctgtgaggtcgacatcaacgagtgcgttctgagcccgtgccggcacggcgcatcctgccagaacacccacggcggctaccgctgccactgccaggccggctacagtgggcgcaactgcgagaccgacatcgacgactgccggcccaacccgtgtcacaacgggggctcctgcacagacggcatcaacacggccttctgcgactgcctgcccggcttccggggcactttctgtgaggaggacatcaacgagtgtgccagtgacccctgccgcaacggggccaactgcacggactgcgtggacagctacacgtgcacctgccccgcaggcttcagcgggatccactgtgagaacaacacgcctgactgcacagagagctcctgcttcaacggtggcacctgcgtggacggcatcaactcgttcacctgcctgtgtccacccggcttcacgggcagctactgccagcacgatgtcaatgagtgcgactcacagccctgcctgcatggcggcacctgtcaggacggctgcggctcctacaggtgcacctgcccccagggctacactggccccaactgccagaaccttgtgcactggtgtgactcctcgccctgcaagaacggcggcaaatgctggcagacccacacccagtaccgctgcgagtgccccagcggctggaccggcctttactgcgacgtgcccagcgtgtcctgtgaggtggctgcgcagcgacaaggtgttgacgttgcccgcctgtgccagcatggagggctctgtgtggacgcgggcaacacgcaccactgccgctgccaggcgggctacacaggcagctactgtgaggacctggtggacgagtgctcacccagcccctgccagaacggggccacctgcacggactacctgggcggctactcctgcaagtgcgtggccggctaccacggggtgaactgctctgaggagatcgacgagtgcctctcccacccctgccagaacgggggcacctgcctcgacctccccaacacctacaagtgctcctgcccacggggcactcagggtgtgcactgtgagatcaacgtggacgactgcaatccccccgttgaccccgtgtcccggagccccaagtgctttaacaacggcacctgcgtggaccaggtgggcggctacagctgcacctgcccgccgggcttcgtgggtgagcgctgtgagggggatgtcaacgagtgcctgtccaatccctgcgacgcccgtggcacccagaactgcgtgcagcgcgtcaatgacttccactgcgagtgccgtgctggtcacaccgggcgccgctgcgagtccgtcatcaatggctgcaaaggcaagccctgcaagaatgggggcacctgcgccgtggcctccaacaccgcccgcgggttcatctgcaagtgccctgcgggcttcgagggcgccacgtgtgagaatgacgctcgtacctgcggcagcctgcgctgcctcaacggcggcacatgcatctccggcccgcgcagccccacctgcctgtgcctgggccccttcacgggccccgaatgccagttcccggccagcagcccctgcctgggcggcaacccctgctacaaccaggggacctgtgagcccacatccgagagccccttctaccgttgcctgtgccccgccaaattcaacgggctcttgtgccacatcctggactacagcttcgggggtggggccgggcgcgacatccccccgccgctgatcgaggaggcgtgcgagctgcccgagtgccaggaggacgcgggcaacaaggtctgcagcctgcagtgcaacaaccacgcgtgcggctgggacggcggtgactgctccctcaacttcaatgacccctggaagaactgcacgcagtctctgcagtgctggaagtacttcagtgacggccactgtgacagccagtgcaactcagccggctgcctcttcgacggctttgactgccagcgtgcggaaggccagtgcaaccccctgtacgaccagtactgcaaggaccacttcagcgacgggcactgcgaccagggctgcaacagcgcggagtgcgagtgggacgggctggactgtgcggagcatgtacccgagaggctggcggccggcacgctggtggtggtggtgctgatgccgccggagcagctgcgcaacagctccttccacttcctgcgggagctcagccgcgtgctgcacaccaacgtggtcttcaagcgtgacgcacacggccagcagatgatcttcccctactacggccgcgaggaggagctgcgcaagcaccccatcaagcgtgccgccgagggctgggccgcacctgacgccctgctgggccaggtgaaggcctcgctgctccctggtggcagcgagggtgggcggcggcggagggagctggaccccatggacgtccgcggctccatcgtctacctggagattgacaaccggcagtgtgtgcaggcctcctcgcagtgcttccagagtgccaccgacgtggccgcattcctgggagcgctcgcctcgctgggcagcctcaacatcccctacaagatcgaggccgtgcagagtgagaccgtggagccgcccccgccggcgcagctgcacttcatgtacgtggcggcggccgcctttgtgcttctgttcttcgtgggctgcggggtgctgctgtcccgcaagcgccggcggcagcatggccagctctggttccctgagggcttcaaagtgtctgaggccagcaagaagaagcggcgggagcccctcggcgaggactccgtgggcctcaagcccctgaagaacgcttcagacggtgccctcatggacgacaaccagaatgagtggggggacgaggacctggagaccaagaagttccggttcgaggagcccgtggttctgcctgacctggacgaccagacagaccaccggcagtggactcagcagcacctggatgccgctgacctgcgcatgtctgccatggcccccacaccgccccagggtgaggttgacgccgactgcatggacgtcaatgtccgcgggcctgatggcttcaccccgctcatgatcgcctcctgcagcgggggcggcctggagacgggcaacagcgaggaagaggaggacgcgccggccgtcatctccgacttcatctaccagggcgccagcctgcacaaccagacagaccgcacgggcgagaccgccttgcacctggccgcccgctactcacgctctgatgccgccaagcgcctgctggaggccagcgcagatgccaacatccaggacaacatgggccgcaccccgctgcatgcggctgtgtctgccgacgcacaaggtgtcttccagatcctgatccggaaccgagccacagacctggatgcccgcatgcatgatggcacgacgccactgatcctggctgcccgcctggccgtggagggcatgctggaggacctcatcaactcacacgccgacgtcaacgccgtagatgacctgggcaagtccgccctgcactgggccgccgccgtgaacaatgtggatgccgcagttgtgctcctgaagaacggggctaacaaagatatgcagaacaacagggaggagacacccctgtttctggccgcccgggagggcagctacgagaccgccaaggtgctgctggaccactttgccaaccgggacatcacggatcatatggaccgcctgccgcgcgacatcgcacaggagcgcatgcatcacgacatcgtgaggctgctggacgagtacaacctggtgcgcagcccgcagctgcacggagccccgctggggggcacgcccaccctgtcgcccccgctctgctcgcccaacggctacctgggcagcctcaagcccggcgtgcagggcaagaaggtccgcaagcccagcagcaaaggcctggcctgtggaagcaaggaggccaaggacctcaaggcacggaggaagaagtcccaggacggcaagggctgcctgctggacagctccggcatgctctcgcccgtggactccctggagtcaccccatggctacctgtcagacgtggcctcgccgccactgctgccctccccgttccagcagtctccgtccgtgcccctcaaccacctgcctgggatgcccgacacccacctgggcatcgggcacctgaacgtggcggccaagcccgagatggcggcgctgggtgggggcggccggctggcctttgagactggcccacctcgtctctcccacctgcctgtggcctctggcaccagcaccgtcctgggctccagcagcggaggggccctgaatttcactgtgggcgggtccaccagtttgaatggtcaatgcgagtggctgtcccggctgcagagcggcatggtgccgaaccaatacaaccctctgcgggggagtgtggcaccaggccccctgagcacacaggccccctccctgcagcatggcatggtaggcccgctgcacagtagccttgctgccagcgccctgtcccagatgatgagctaccagggcctgcccagcacccggctggccacccagcctcacctggtgcagacccagcaggtgcagccacaaaacttacagatgcagcagcagaacctgcagccagcaaacatccagcagcagcaaagcctgcagccgccaccaccaccaccacagccgcaccttggcgtgagctcagcagccagcggccacctgggccggagcttcctgagtggagagccgagccaggcagacgtgcagccactgggccccagcagcctggcggtgcacactattctgccccaggagagccccgccctgcccacgtcgctgccatcctcgctggtcccacccgtgaccgcagcccagttcctgacgcccccctcgcagcacagctactcctcgcctgtggacaacacccccagccaccagctacaggtgcctgagcaccccttcctcaccccgtcccctgagtcccctgaccagtggtccagctcgtccccgcattccaacgtctccgactggtccgagggcgtctccagccctcccaccagcatgcagtcccagatcgcccgcattccggaggccttcaagtaaacggcgcgccccacgagaccccggcttcctttcccaagccttcgggcgtctgtgtgcgctctgtggatgccagggccgaccagaggagcctttttaaaacacatgtttttatacaaaataagaacgaggattttaattttttttagtatttatttatgtacttttattttacacagaaacactgcctttttatttatatgtactgttttatctggccccaggtagaaacttttatctattctgagaaaacaagcaagttctgagagccagggttttcctacgtaggatgaaaagattcttctgtgtttataaaatataaacaaagattcatgatttataaatgccatttatttattgattccttttttcaaaatccaaaaagaaatgatgttggagaagggaagttgaacgagcatagtccaaaaagctcctggggcgtccaggccgcgccctttccccgacgcccacccaaccccaagccagcccggccgctccaccagcatcacctgcctgttaggagaagctgcatccagaggcaaacggaggcaaagctggctcaccttccgcacgcggattaatttgcatctgaaataggaaacaagtgaaagcatatgggttagatgttgccatgtgttttagatggtttcttgcaagcatgcttgtgaaaatgtgttctcggagtgtgtatgccaagagtgcacccatggtaccaatcatgaatctttgtttcaggttcagtattatgtagttgttcgttggttatacaagttcttggtccctccagaaccaccccggccccctgcccgttcttgaaatgtaggcatcatgcatgtcaaacatgagatgtgtggactgtggcacttgcctgggtcacacacggaggcatcctacccttttctggggaaagacactgcctgggctgaccccggtggcggccccagcacctcagcctgcacagtgtcccccaggttccgaagaagatgctccagcaacacagcctgggccccagctcgcgggacccgaccccccgtgggctcccgtgttttgtaggagacttgccagagccgggcacattgagctgtgcaacgccgtgggctgcgtcctttggtcctgtccccgcagccctggcagggggcatgcggtcgggcaggggctggagggaggcgggggctgcccttgggccacccctcctagtttgggaggagcagatttttgcaataccaagtatagcctatggcagaaaaaatgtctgtaaatatgtttttaaaggtggattttgtttaaaaaatcttaatgaatgagtctgttgtgtgtcatgccagtgagggacgtcagacttggctcagctcggggagccttagccgcccatgcactggggacgctccgctgccgtgccgcctgcactcctcagggcagcctcccccggctctacgggggccgcgtggtgccatccccagggggcatgaccagatgcgtcccaagatgttgatttttactgtgttttataaaatagagtgtagtttacagaaaaagactttaaaagtgatctacatgaggaactgtagatgatgtatttttttcatcttttttgttaactgatttgcaataaaaatgatactgatggtga

SEQ ID NO: 160127 - DNA, 11389 bp, Homo sapiens
  Payload ID: 11318
  Gene Symbol: NOTCH2
  Gene Name: notch 2
  Uniprot ID: Q04721
  ENST ID: ENST00000256646
  CDS Start-End: 221-7636
aaacttcgggcggcggctgaggcggcggccgaggagcggcggactcggggcgcggggagtcgaggcatttgcgcctgggcttcggagcgtagcgccagggcctgagcctttgaagcaggaggaggggaggagagagtggggctcctctatcgggaccccctccccatgtggatctgcccaggcggcggcggcggcggcggaggaggaggcgaccgagaagatgcccgccctgcgccccgctctgctgtgggcgctgctggcgctctggctgtgctgcgcggcccccgcgcatgcattgcagtgtcgagatggctatgaaccctgtgtaaatgaaggaatgtgtgttacctaccacaatggcacaggatactgcaaatgtccagaaggcttcttgggggaatattgtcaacatcgagacccctgtgagaagaaccgctgccagaatggtgggacttgtgtggcccaggccatgctggggaaagccacgtgccgatgtgcctcagggtttacaggagaggactgccagtactcaacatctcatccatgctttgtgtctcgaccctgcctgaatggcggcacatgccatatgctcagccgggatacctatgagtgcacctgtcaagtcgggtttacaggtaaggagtgccaatggacggatgcctgcctgtctcatccctgtgcaaatggaagtacctgtaccactgtggccaaccagttctcctgcaaatgcctcacaggcttcacagggcagaaatgtgagactgatgtcaatgagtgtgacattccaggacactgccagcatggtggcacctgcctcaacctgcctggttcctaccagtgccagtgccctcagggcttcacaggccagtactgtgacagcctgtatgtgccctgtgcaccctcaccttgtgtcaatggaggcacctgtcggcagactggtgacttcacttttgagtgcaactgccttccaggttttgaagggagcacctgtgagaggaatattgatgactgccctaaccacaggtgtcagaatggaggggtttgtgtggatggggtcaacacttacaactgccgctgtcccccacaatggacaggacagttctgcacagaggatgtggatgaatgcctgctgcagcccaatgcctgtcaaaatgggggcacctgtgccaaccgcaatggaggctatggctgtgtatgtgtcaacggctggagtggagatgactgcagtgagaacattgatgattgtgccttcgcctcctgtactccaggctccacctgcatcgaccgtgtggcctccttctcttgcatgtgcccagaggggaaggcaggtctcctgtgtcatctggatgatgcatgcatcagcaatccttgccacaagggggcactgtgtgacaccaaccccctaaatgggcaatatatttgcacctgcccacaaggctacaaaggggctgactgcacagaagatgtggatgaatgtgccatggccaatagcaatccttgtgagcatgcaggaaaatgtgtgaacacggatggcgccttccactgtgagtgtctgaagggttatgcaggacctcgttgtgagatggacatcaatgagtgccattcagacccctgccagaatgatgctacctgtctggataagattggaggcttcacatgtctgtgcatgccaggtttcaaaggtgtgcattgtgaattagaaataaatgaatgtcagagcaacccttgtgtgaacaatgggcagtgtgtggataaagtcaatcgtttccagtgcctgtgtcctcctggtttcactgggccagtttgccagattgatattgatgactgttccagtactccgtgtctgaatggggcaaagtgtatcgatcacccgaatggctatgaatgccagtgtgccacaggtttcactggtgtgttgtgtgaggagaacattgacaactgtgaccccgatccttgccaccatggtcagtgtcaggatggtattgattcctacacctgcatctgcaatcccgggtacatgggcgccatctgcagtgaccagattgatgaatgttacagcagcccttgcctgaacgatggtcgctgcattgacctggtcaatggctaccagtgcaactgccagccaggcacgtcaggggttaattgtgaaattaattttgatgactgtgcaagtaacccttgtatccatggaatctgtatggatggcattaatcgctacagttgtgtctgctcaccaggattcacagggcagagatgtaacattgacattgatgagtgtgcctccaatccctgtcgcaagggtgcaacatgtatcaacggtgtgaatggtttccgctgtatatgccccgagggaccccatcaccccagctgctactcacaggtgaacgaatgcctgagcaatccctgcatccatggaaactgtactggaggtctcagtggatataagtgtctctgtgatgcaggctgggttggcatcaactgtgaagtggacaaaaatgaatgcctttcgaatccatgccagaatggaggaacttgtgacaatctggtgaatggatacaggtgtacttgcaagaagggctttaaaggctataactgccaggtgaatattgatgaatgtgcctcaaatccatgcctgaaccaaggaacctgctttgatgacataagtggctacacttgccactgtgtgctgccatacacaggcaagaattgtcagacagtattggctccctgttccccaaacccttgtgagaatgctgctgtttgcaaagagtcaccaaattttgagagttatacttgcttgtgtgctcctggctggcaaggtcagcggtgtaccattgacattgacgagtgtatctccaagccctgcatgaaccatggtctctgccataacacccagggcagctacatgtgtgaatgtccaccaggcttcagtggtatggactgtgaggaggacattgatgactgccttgccaatccttgccagaatggaggttcctgtatggatggagtgaatactttctcctgcctctgccttccgggtttcactggggataagtgccagacagacatgaatgagtgtctgagtgaaccctgtaagaatggagggacctgctctgactacgtcaacagttacacttgcaagtgccaggcaggatttgatggagtccattgtgagaacaacatcaatgagtgcactgagagctcctgtttcaatggtggcacatgtgttgatgggattaactccttctcttgcttgtgccctgtgggtttcactggatccttctgcctccatgagatcaatgaatgcagctctcatccatgcctgaatgagggaacgtgtgttgatggcctgggtacctaccgctgcagctgccccctgggctacactgggaaaaactgtcagaccctggtgaatctctgcagtcggtctccatgtaaaaacaaaggtacttgcgttcagaaaaaagcagagtcccagtgcctatgtccatctggatgggctggtgcctattgtgacgtgcccaatgtctcttgtgacatagcagcctccaggagaggtgtgcttgttgaacacttgtgccagcactcaggtgtctgcatcaatgctggcaacacgcattactgtcagtgccccctgggctatactgggagctactgtgaggagcaactcgatgagtgtgcgtccaacccctgccagcacggggcaacatgcagtgacttcattggtggatacagatgcgagtgtgtcccaggctatcagggtgtcaactgtgagtatgaagtggatgagtgccagaatcagccctgccagaatggaggcacctgtattgaccttgtgaaccatttcaagtgctcttgcccaccaggcactcggggcctactctgtgaagagaacattgatgactgtgcccggggtccccattgccttaatggtggtcagtgcatggataggattggaggctacagttgtcgctgcttgcctggctttgctggggagcgttgtgagggagacatcaacgagtgcctctccaacccctgcagctctgagggcagcctggactgtatacagctcaccaatgactacctgtgtgtttgccgtagtgcctttactggccggcactgtgaaaccttcgtcgatgtgtgtccccagatgccctgcctgaatggagggacttgtgctgtggccagtaacatgcctgatggtttcatttgccgttgtcccccgggattttccggggcaaggtgccagagcagctgtggacaagtgaaatgtaggaagggggagcagtgtgtgcacaccgcctctggaccccgctgcttctgccccagtccccgggactgcgagtcaggctgtgccagtagcccctgccagcacgggggcagctgccaccctcagcgccagcctccttattactcctgccagtgtgccccaccattctcgggtagccgctgtgaactctacacggcaccccccagcacccctcctgccacctgtctgagccagtattgtgccgacaaagctcgggatggcgtctgtgatgaggcctgcaacagccatgcctgccagtgggatgggggtgactgttctctcaccatggagaacccctgggccaactgctcctccccacttccctgctgggattatatcaacaaccagtgtgatgagctgtgcaacacggtcgagtgcctgtttgacaactttgaatgccaggggaacagcaagacatgcaagtatgacaaatactgtgcagaccacttcaaagacaaccactgtgaccaggggtgcaacagtgaggagtgtggttgggatgggctggactgtgctgctgaccaacctgagaacctggcagaaggtaccctggttattgtggtattgatgccacctgaacaactgctccaggatgctcgcagcttcttgcgggcactgggtaccctgctccacaccaacctgcgcattaagcgggactcccagggggaactcatggtgtacccctattatggtgagaagtcagctgctatgaagaaacagaggatgacacgcagatcccttcctggtgaacaagaacaggaggtggctggctctaaagtctttctggaaattgacaaccgccagtgtgttcaagactcagaccactgcttcaagaacacggatgcagcagcagctctcctggcctctcacgccatacaggggaccctgtcataccctcttgtgtctgtcgtcagtgaatccctgactccagaacgcactcagctcctctatctccttgctgttgctgttgtcatcattctgtttattattctgctgggggtaatcatggcaaaacgaaagcgtaagcatggctctctctggctgcctgaaggtttcactcttcgccgagatgcaagcaatcacaagcgtcgtgagccagtgggacaggatgctgtggggctgaaaaatctctcagtgcaagtctcagaagctaacctaattggtactggaacaagtgaacactgggtcgatgatgaagggccccagccaaagaaagtaaaggctgaagatgaggccttactctcagaagaagatgaccccattgatcgacggccatggacacagcagcaccttgaagctgcagacatccgtaggacaccatcgctggctctcacccctcctcaggcagagcaggaggtggatgtgttagatgtgaatgtccgtggcccagatggctgcaccccattgatgttggcttctctccgaggaggcagctcagatttgagtgatgaagatgaagatgcagaggactcttctgctaacatcatcacagacttggtctaccagggtgccagcctccaggcccagacagaccggactggtgagatggccctgcaccttgcagcccgctactcacgggctgatgctgccaagcgtctcctggatgcaggtgcagatgccaatgcccaggacaacatgggccgctgtccactccatgctgcagtggcagctgatgcccaaggtgtcttccagattctgattcgcaaccgagtaactgatctagatgccaggatgaatgatggtactacacccctgatcctggctgcccgcctggctgtggagggaatggtggcagaactgatcaactgccaagcggatgtgaatgcagtggatgaccatggaaaatctgctcttcactgggcagctgctgtcaataatgtggaggcaactcttttgttgttgaaaaatggggccaaccgagacatgcaggacaacaaggaagagacacctctgtttcttgctgcccgggaggggagctatgaagcagccaagatcctgttagaccattttgccaatcgagacatcacagaccatatggatcgtcttccccgggatgtggctcgggatcgcatgcaccatgacattgtgcgccttctggatgaatacaatgtgaccccaagccctccaggcaccgtgttgacttctgctctctcacctgtcatctgtgggcccaacagatctttcctcagcctgaagcacaccccaatgggcaagaagtctagacggcccagtgccaagagtaccatgcctactagcctccctaaccttgccaaggaggcaaaggatgccaagggtagtaggaggaagaagtctctgagtgagaaggtccaactgtctgagagttcagtaactttatcccctgttgattccctagaatctcctcacacgtatgtttccgacaccacatcctctccaatgattacatcccctgggatcttacaggcctcacccaaccctatgttggccactgccgcccctcctgccccagtccatgcccagcatgcactatctttttctaaccttcatgaaatgcagcctttggcacatggggccagcactgtgcttccctcagtgagccagttgctatcccaccaccacattgtgtctccaggcagtggcagtgctggaagcttgagtaggctccatccagtcccagtcccagcagattggatgaaccgcatggaggtgaatgagacccagtacaatgagatgtttggtatggtcctggctccagctgagggcacccatcctggcatagctccccagagcaggccacctgaagggaagcacataaccacccctcgggagcccttgccccccattgtgactttccagctcatccctaaaggcagtattgcccaaccagcgggggctccccagcctcagtccacctgccctccagctgttgcgggccccctgcccaccatgtaccagattccagaaatggcccgtttgcccagtgtggctttccccactgccatgatgccccagcaggacgggcaggtagctcagaccattctcccagcctatcatcctttcccagcctctgtgggcaagtaccccacacccccttcacagcacagttatgcttcctcaaatgctgctgagcgaacacccagtcacagtggtcacctccagggtgagcatccctacctgacaccatccccagagtctcctgaccagtggtcaagttcatcaccccactctgcttctgactggtcagatgtgaccaccagccctacccctgggggtgctggaggaggtcagcggggacctgggacacacatgtctgagccaccacacaacaacatgcaggtttatgcgtgagagagtccacctccagtgtagagacataactgacttttgtaaatgctgctgaggaacaaatgaaggtcatccgggagagaaatgaagaaatctctggagccagcttctagaggtaggaaagagaagatgttcttattcagataatgcaagagaagcaattcgtcagtttcactgggtatctgcaaggcttattgattattctaatctaataagacaagtttgtggaaatgcaagatgaatacaagccttgggtccatgtttactctcttctatttggagaataagatggatgcttattgaagcccagacattcttgcagcttggactgcattttaagccctgcaggcttctgccatatccatgagaagattctacactagcgtcctgttgggaattatgccctggaattctgcctgaattgacctacgcatctcctcctccttggacattcttttgtcttcatttggtgcttttggttttgcacctctccgtgattgtagccctaccagcatgttatagggcaagacctttgtgcttttgatcattctggcccatgaaagcaactttggtctcctttcccctcctgtcttcccggtatcccttggagtctcacaaggtttactttggtatggttctcagcacaaacctttcaagtatgttgtttctttggaaaatggacatactgtattgtgttctcctgcatatatcattcctggagagagaaggggagaagaatacttttcttcaacaaattttgggggcaggagatcccttcaagaggctgcaccttaatttttcttgtctgtgtgcaggtcttcatataaactttaccaggaagaagggtgtgagtttgttgtttttctgtgtatgggcctggtcagtgtaaagttttatccttgatagtctagttactatgaccctccccacttttttaaaaccagaaaaaggtttggaatgttggaatgaccaagagacaagttaactcgtgcaagagccagttacccacccacaggtccccctacttcctgccaagcattccattgactgcctgtatggaacacatttgtcccagatctgagcattctaggcctgtttcactcactcacccagcatatgaaactagtcttaactgttgagcctttcctttcatatccacagaagacactgtctcaaatgttgtacccttgccatttaggactgaactttccttagcccaagggacccagtgacagttgtcttccgtttgtcagatgatcagtctctactgattatcttgctgcttaaaggcctgctcaccaatctttctttcacaccgtgtggtccgtgttactggtatacccagtatgttctcactgaagacatggactttatatgttcaagtgcaggaattggaaagttggacttgttttctatgatccaaaacagccctataagaaggttggaaaaggaggaactatatagcagcctttgctattttctgctaccatttcttttcctctgaagcggccatgacattccctttggcaactaacgtagaaactcaacagaacattttcctttcctagagtcaccttttagatgataatggacaactatagacttgctcattgttcagactgattgcccctcacctgaatccactctctgtattcatgctcttggcaatttctttgactttcttttaagggcagaagcattttagttaattgtagataaagaatagttttcttcctcttctccttgggccagttaataattggtccatggctacactgcaacttccgtccagtgctgtgatgcccatgacacctgcaaaataagttctgcctgggcattttgtagatattaacaggtgaattcccgactcttttggtttgaatgacagttctcattccttctatggctgcaagtatgcatcagtgcttcccacttacctgatttgtctgtcggtggccccatatggaaaccctgcgtgtctgttggcataatagtttacaaatggttttttcagtcctatccaaatttattgaaccaacaaaaataattacttctgccctgagataagcagattaagtttgttcattctctgctttattctctccatgtggcaacattctgtcagcctctttcatagtgtgcaaacattttatcattctaaatggtgactctctgcccttggacccatttattattcacagatggggagaacctatctgcatggacctctgtggaccacagcgtacctgcccctttctgccctcctgctccagccccacttctgaaagtatcagctactgatccagccactggatattttatatcctcccttttccttaagcacaatgtcagaccaaattgcttgtttctttttcttggactactttaatttggatcctttgggtttggagaaagggaatgtgaaagctgtcattacagacaacaggtttcagtgatgaggaggacaacactgcctttcaaactttttactgatctcttagattttaagaactcttgaattgtgtggtatctaataaaagggaaggtaagatggataatcactttctcatttgggttctgaattggagactcagtttttatgagacacatcttttatgccatgtatagatcctcccctgctatttttggtttatttttattgttataaatgctttctttctttgactcctcttctgcctgcctttggggataggtttttttgtttgtttatttgcttcctctgttttgttttaagcatcattttcttatgtgaggtggggaagggaaaggtatgagggaaagagagtctgagaattaaaatattttagtataagcaattggctgtgatgctcaaatccattgcatcctcttattgaatttgccaatttgtaatttttgcataataaagaaccaaaggtgtaatgttttgttgagaggtggtttagggattttggccctaaccaatacattgaatgtatgatgactatttgggaggacacatttatgtacccagaggcccccactaataagtggtactatggttacttccttgtgtacatttctcttaaaagtgatattatatctgtttgtatgagaaacccagtaaccaataaaatgaccgcatattcctgactaaacgtagtaaggaaaatgcacactttgtttttacttttccgtttcattctaaaggtagttaagatgaaatttatatgaaagcatttttatcacaaaataaaaaaggtttgccaagctcagtggtgttgtattttttattttccaatactgcatccatggcctggcagtgttacctcatgatgtcataatttgctgagagagcaaattttcttttctttctgaatcccacaaagcctagcaccaaacttctttttttcttcctttaattagatcataaataaatgatcctggggaaaaagcatctgtcaaataggaaacatcacaaaactgagcactcttctgtgcactagccatagctggtgacaaacagatggttgctcagggacaaggtgccttccaatggaaatgcgaagtagttgctatagcaagaattgggaactgggatataagtcataatattaattatgctgttatgtaaatgattggtttgtaacattccttaagtgaaatttgtgtagaacttaatatacaggattataaaataatattttgtgtataaatttgttataagttcacattcatacatttatttataaagtcagtgagatatttgaacatgaa

SEQ ID NO: 160128 - DNA, 5046 bp, Homo sapiens
  Payload ID: 11318
  Gene Symbol: NOTCH2
  Gene Name: notch 2
  ENST ID: ENST00000602566
  CDS Start-End: 447-1154
agacatgtgggttctttcaaacatactggacttcctccttaggttttagttgtgttagttaatagttgaatgttgaaggagaggatgccaagggatattaaagaagttgtccagtgtacagaagcttactggaaggagtggccaactagttaaaggtttgacacctcaatatcaacaaaatgccaagtggatcattttgactctcacagcaatccaactggacatttgaccatgccccgtggtcagtggagagcttcttctctgaaggccacttttatctagcacatcaaggctatacacctctttcactaagaagaatttggcacttttatgttgtgagagctgagattcaccattctccaccatcctgagaagagctttgatagaagggctactcctgagcattgcagtgtcgagatggctatgaaccctgtgtaaatgaaggaatgtgtgttacctaccacaatggcacaggatactgcaaatgtccagaaggcttcttgggggaatattgtcaacatcgagacccctgtgagaagaaccgctgccagaatggtgggacttgtgtggcccaggccatgctggggaaagccacgtgccgatgtgcctcagggtttacaggagaggactgccagtactcaacatctcatccatgctttgtgtctcgaccctgcctgaatggcggcacatgccatatgctcagccgggatacctatgagtgcacctgtcaagtcgggtttacaggtaaggagtgccaatggacggatgcctgcctgtctcatccctgtgcaaatggaagtacctgtaccactgtggccaaccagttctcctgcaaatgcctcacaggcttcacagggcagaaatgtgagactgatgtcaatgagtgtgacattccaggacactgccagcatggtggcacctgcctcaacctgcctggttcctaccagtgccagtgccctcagggcttcacaggccagtactgtgacagcctgtatgtgccctgtgcaccctcaccttgtgtcaatggaggcacctgtcggcagactggtgacttcacttttgagtgcaactgccttccagaaacagtgagaaataagaggaacagagctctgggaaagggacaggcaagtctggaatggaaaagaacacgatgagaattagacactggaaaatatgtatgtgtggttaataaagtgctttaaactgaattgacattaacagtaggtgatcaactttcctatgtgcttgtgcttttgcttttgatggagtaattcattgttttcttatccacctaaatgcacccagctgcccttgattttctctgggctactggccttcacaaccctctcccatgtaccctctctgactttggggtaaccctcccctaacttaaagctagagaattctgaaactgaggaggggatcctctgttaatcagtgagcactttttgatgagctgatagatgatatatgagagactatgcgtggcacaatactttgttacactcttcactgatacaagtgttctagagtgcacacacaacccaaagatagaaacaaaaagaggagcagtgtcggggagcttggggcctggtgttccatggagagggagaaaggaacaagcctggccaattcattcaactccttataaaaatgatgaggaggctgaaaaccaagaattttgattgggaacagaatacaagcagctggagcagatgaattactaagcaacaaagatcctgtttttatacaaatatccttagtacaaaaacaaaagaaggaaaactgtaggggggagtaatgtgctaagtaagcagaattgcctcaaaaagaagttgttctagttactctttcagagtgggaatcttagattctggtattgtggatatggttcacatataatgggattgtgtgttttattttggagagattaaaggtcataggttggtcctcagtataaaatcaactggtaatttattcatttcatttggtaaaaatgtattgactgcctgctatgttctaggcaccatgctatgtatttggaatacagctatacaaagcattgtcacataattgaaatgaaaactttatattatttaagtcacaagaacaagctatttaattatattacttttagtttctcttttaataaagaatagataatgctatcattctagatactaaataagtgttttcttaacataatattactattcactttatcttgtagaagaaataactaaaatacgtctgtcttcactcctgcatttgtttgcattttaagggttaaagacagaaatagaaatgtaaacaactttattttgaaaatatttcaatattgcaaatatctctgggtctgatattctagtaatctaattggctagtaattgatgttagtgtgatttattgttgaaggctaaatgtgtttttcagtttcaagaaaattgcttttaataattgcctagaacaagaggttgatttggcagcaagatgttgacgggaagttagagaagtcaataaaggaagtttttagctgagagagagtgattattcactcccatagcctctgcattgttatccattagccacgataagaaccttagggaattctgagagtgtgtccaggaaaggatctgtcaaactagaatagtatctcctccttgagaaaggaaataaccaaggattccgcagctgagaggctgccagggctagtgaaatagagtaaggaaatcttggctgtctcttattctctggttgtagtttaacgcaagacacttatttactcactgatggtgtgtgtgtatgtgggaggggagattagcatgaggggtgggaatggggagatttgatgaagagaaaactaacatttttttggtgactcaggaactgtgccaggtacttccatgcttattagctcaattacacaaaaatcttgggaccaggtattatttttcaagtcttcccacatgaagtaactgaagtttggagatgttaagtgattcacccaaagttgtacagctaatatgtggttaggctgggtcctgaaaccgaggcagtttattttcaaagcctttgctttgtgcatcttactgcgccacattgcactgcacatctgcttcctgaaagcactttgtaggtgtgtaaaacttttcgttaaatgctttaagctgtttgggttaaaaatatatgttcatgttataagaaaaccaagacactcctaattataatcaaatagtacttgttacatatcaatatgtgtgtgtgtgtgtgtgtgtgtgtgtgtgtgtgtgtgtgtgtatatatatatggcattgtgcagatgtttaaaagtagttacatagactagttcttgcttttcagggtcccataatctaaaccagatgacttcagctttggataaatatatagaaggaaatttaaagagaattcaaaacaatagatgatgcagtgacactgtgaataaatgttatttatacagtttgtaagatttcatgctcattgttcgtatgtcccaggtggagttcagaaaatattcacttcatttccacaaagggaaatagtgcctagagatggttttcttttaaaaagtccttttcataatgcagtgcccttccttccattgcccttcattccattgcttcccatgcttgtcaagagactaaaatgttacttatagtaatagtcactatctcaatgtaaatagcacccttatttgatgagaattattatttcagttctaaaaatggggaaacaaagtcagcaggaggcaaagtagcttgttaaagtattctgcaactttcaaatggttgcttccactgcatttcacgtcttggcacttctaattgagggttactctaaccaccctatttaaaattgtaactgtcccccacccccttaattactaaccctggtctactttttgttttctttttctgtaactcttatcttcttactatataatttatactatataatttacttcattatgtctattgtttattgtctgtcttttccaaattctactgcctcttaccctctccagaatgaaaactagtatctttgtttttgtttactgatgtaacccaaacacctacaaacagtgcccagtatatactaggcccgcaaatatatattggctgactgactgtatggtttagtatcatgtcatagtattgagactgtaactttggtcttctcattttcttctttgtattgtgcgtcctagacttagtttggcctctccttttgtccttgtatactctaatactggataagaattttggagtctttttcaactctgagtcagtgaatgccacataacttagtgactatatttaaatggttaatttacaattttttccctgcaaaggatactgtagtcactgtgagtattttagtattattgtaggactcaagagggaattaaaactacaaaaatgactcgtcttgtatgacacagaaagaaatgtttcttcacagagggaggagaaaaatatcttcaagagagaactaattgaatcaaatcaatgaaccatgtctcatctttttggataagtaactgttagtaatccagacacttcatgagctttcattatgtaaagtctttagcagaagctaaaggaggggcaccaaccacagtaattttaacttaagaacaaaatggagcatgaaaataaattattaaatcatttactcccactatttttgggttagggccaataatggggagagaaagaggtagactagttttgtgtttgtggctattttaatagagtagcacaagtaatcaaaaaacagtaggctgttttgaatttactggctgtcccttatgagttcacagttagattggactgtcctcaatgtactttcttttttttctttctttcccacatctctttatttctctgattttgtttaaacttcataaagagctctctgatctttcctttccaaacaatgaaggtttatcctttgtaaactacctctgtactccacaggctgatgatatatgatatccctatatcattaaagtaaagcctaagcaca

SEQ ID NO: 160129 - DNA, 2954 bp, Homo sapiens
  Payload ID: 11318
  Gene Symbol: NOTCH2
  Gene Name: notch 2
  ENST ID: ENST00000579475
  CDS Start-End: 277-2868
tcaacaaaatgccaagtggatcattttgactctcacagcaatccaactggacatttgaccatgccccgtggtcagtggagagcttcttctctgaaggccacttttatctagcacatcaaggctatacacctctttcactaagaagaatttggcacttttatgttgtgagagctgagattcaccattctccaccatcctgagaagagctttgatagaagggctactcctgaggcattgcagtgtcgagatggctatgaaccctgtgtaaatgaaggaatgtgtgttacctaccacaatggcacaggatactgcaaatgtccagaaggcttcttgggggaatattgtcaacatcgagacccctgtgagaagaaccgctgccagaatggtgggacttgtgtggcccaggccatgctggggaaagccacgtgccgatgtgcctcagggtttacaggagaggactgccagtactcaacatctcatccatgctttgtgtctcgaccctgcctgaatggcggcacatgccatatgctcagccgggatacctatgagtgcacctgtcaagtcgggtttacaggtaaggagtgccaatggacggatgcctgcctgtctcatccctgtgcaaatggaagtacctgtaccactgtggccaaccagttctcctgcaaatgcctcacaggcttcacagggcagaaatgtgagactgatgtcaatgagtgtgacattccaggacactgccagcatggtggcacctgcctcaacctgcctggttcctaccagtgccagtgccctcagggcttcacaggccagtactgtgacagcctgtatgtgccctgtgcaccctcaccttgtgtcaatggaggcacctgtcggcagactggtgacttcacttttgagtgcaactgccttccaggttttgaagggagcacctgtgagaggaatattgatgactgccctaaccacaggtgtcagaatggaggggtttgtgtggatggggtcaacacttacaactgccgctgtcccccacaatggacaggacagttctgcacagaggatgtggatgaatgcctgctgcagcccaatgcctgtcaaaatgggggcacctgtgccaaccgcaatggaggctatggctgtgtatgtgtcaacggctggagtggagatgactgcagtgagaacattgatgattgtgccttcgcctcctgtactccaggctccacctgcatcgaccgtgtggcctccttctcttgcatgtgcccagaggggaaggcaggtctcctgtgtcatctggatgatgcatgcatcagcaatccttgccacaagggggcactgtgtgacaccaaccccctaaatgggcaatatatttgcacctgcccacaaggctacaaaggggctgactgcacagaagatgtggatgaatgtgccatggccaatagcaatccttgtgagcatgcaggaaaatgtgtgaacacggatggcgccttccactgtgagtgtctgaagggttatgcaggacctcgttgtgagatggacatcaatgagtgccattcagacccctgccagaatgatgctacctgtctggataagattggaggcttcacatgtctgtgcatgccaggtttcaaaggtgtgcattgtgaattagaaataaatgaatgtcagagcaacccttgtgtgaacaatgggcagtgtgtggataaagtcaatcgtttccagtgcctgtgtcctcctggtttcactgggccagtttgccagattgatattgatgactgttccagtactccgtgtctgaatggggcaaagtgtatcgatcacccgaatggctatgaatgccagtgtgccacaggtttcactggtgtgttgtgtgaggagaacattgacaactgtgaccccgatccttgccaccatggtcagtgtcaggatggtattgattcctacacctgcatctgcaatcccgggtacatgggcgccatctgcagtgaccagattgatgaatgttacagcagcccttgcctgaacgatggtcgctgcattgacctggtcaatggctaccagtgcaactgccagccaggcacgtcaggggttaattgtgaaattaattttgatgactgtgcaagtaacccttgtatccatggaatctgtatggatggcattaatcgctacagttgtgtctgctcaccaggattcacagggcagagatgtaacattgacattgatgagtgtgcctccaatccctgtcgcaagggtgcaacatgtatcaacggtgtgaatggtttccgctgtatatgccccgagggaccccatcaccccagctgctactcacaggtgaacgaatgcctgagcaatccctgcatccatggaaactgtactggaggtctcagtggatataagtgtctctgtgatgcaggctgggttggcatcaactgtgaagtggacaaaaatgaatgcctttcgaatccatgccagaatggaggaacttgtgacaatctggtgaatggatacaggtgtacttgcaagaagggctttaaaggctataactgccaggtgaatattgatgaatgtgcctcaaatccatgcctgaaccaaggaacctgctttgatgacataagtggctacacttgccactgtgtgctgccatacacaggtgggtcctggaggtaccagcagggaccagaggggatacttgaccttgctttgtcagtgcctgagtctcagtgcccaggtctgtggggctgtaatgctcctccgagggctcactcctcagttgtccttcctgcctttactgactggatcttgagctttgaggaaacattgtggcctcctaagatgcaagtggtggacagtcatttgcctacattgtactttagtatttgaaagaaatttttttttaattgtatgtggctggaaccaggcacatagatgatggttgtctatcatttgaatgtttccaggacattagc

SEQ ID NO: 160130 - DNA, 5041 bp, Homo sapiens
  Payload ID: 11318
  Gene Symbol: NOTCH2
  Gene Name: notch 2
  ENST ID: ENST00000612822
  CDS Start-End: 447-1157
agacatgtgggttctttcaaacatactggacttcctccttaggttttagttgtgttagttaatagttgaatgttgaaggagaggatgccaagggatattaaagaagttgtccagtgtacagaagcttactggaaggagtggccaactagttaaaggtttgacacctcaatatcaacaaaatgccaagtggatcattttgactctcacagcaatccaactggacatttgaccatgccccgtggtcagtggagagcttcttctctgaaggccacttttatctagcacatcaaggctatacacctctttcactaagaagaatttggcacttttatgttgtgagagctgagattcaccattctccaccatcctgagaagagctttgatagaagggctactcctgagcattgcagtgtcgagatggctatgaaccctgtgtaaatgaaggaatgtgtgttacctaccacaatggcacaggatactgcaaatgtccagaaggcttcttgggggaatattgtcaacatcgagacccctgtgagaagaaccgctgccagaatggtgggacttgtgtggcccaggccatgctggggaaagccacgtgccgatgtgcctcagggtttacaggagaggactgccagtactcaacatctcatccatgctttgtgtctcgaccctgcctgaatggcggcacatgccatatgctcagccgggatacctatgagtgcacctgtcaagtcgggtttacaggtaaggagtgccaatggacggatgcctgcctgtctcatccctgtgcaaatggaagtacctgtaccactgtggccaaccagttctcctgcaaatgcctcacaggcttcacagggcagaaatgtgagactgatgtcaatgagtgtgacattccaggacactgccagcatggtggcacctgcctcaacctgcctggttcctaccagtgccagtgccctcagggcttcacaggccagtactgtgacagcctgtatgtgccctgtgcaccctcaccttgtgtcaatggaggcacctgtcggcagactggtgacttcacttttgagtgcaactgccttccagaaacagtgagaagaggaacagagctctgggaaagggacaggcaagtctggaatggaaaagaacacgatgagaattagacactggaaaatatgtatgtgtggttaataaagtgctttaaactgaattgacattaacagtaggtgatcaactttcctatgtgcttgtgcttttgcttttgatggagtaattcattgttttcttatccacctaaatgcacccagctgcccttgattttctctgggctactggccttcacaaccctctcccatgtaccctctctgactttggggtaaccctcccctaacttaaagctagagaattctgaaactgaggaggggatcctctgttaatcagtgagcactttttgatgagctgatagatgatatatgagagactatgcgtggcacaatactttgttacactcttcactgatacaagtgttctagagtgcacacacaacccaaagatagaaacaaaaagaggagcagtgtcggggagcttggggcctggtgttccatggagagggagaaaggaacaagcctggccaattcattcaactccttataaaaatgatgaggaggctgaaaaccaagaattttgattgggaacagaatacaagcagctggagcagatgaattactaagcaacaaagatcctgtttttatacaaatatccttagtacaaaaacaaaagaaggaaaactgtaggggggagtaatgtgctaagtaagcagaattgcctcaaaaagaagttgttctagttactctttcagagtgggaatcttagattctggtattgtggatatggttcacatataatgggattgtgtgttttattttggagagattaaaggtcataggttggtcctcagtataaaatcaactggtaatttattcatttcatttggtaaaaatgtattgactgcctgctatgttctaggcaccatgctatgtatttggaatacagctatacaaagcattgtcacataattgaaatgaaaactttatattatttaagtcacaagaacaagctatttaattatattacttttagtttctcttttaataaagaatagataatgctatcattctagatactaaataagtgttttcttaacataatattactattcactttatcttgtagaagaaataactaaaatacgtctgtcttcactcctgcatttgtttgcattttaagggttaaagacagaaatagaaatgtaaacaactttattttgaaaatatttcaatattgcaaatatctctgggtctgatattctagtaatctaattggctagtaattgatgttagtgtgatttattgttgaaggctaaatgtgtttttcagtttcaagaaaattgcttttaataattgcctagaacaagaggttgatttggcagcaagatgttgacgggaagttagagaagtcaataaaggaagtttttagctgagagagagtgattattcactcccatagcctctgcattgttatccattagccacgataagaaccttagggaattctgagagtgtgtccaggaaaggatctgtcaaactagaatagtatctcctccttgagaaaggaaataaccaaggattccgcagctgagaggctgccagggctagtgaaatagagtaaggaaatcttggctgtctcttattctctggttgtagtttaacgcaagacacttatttactcactgatggtgtgtgtgtatgtgggaggggagattagcatgaggggtgggaatggggagatttgatgaagagaaaactaacatttttttggtgactcaggaactgtgccaggtacttccatgcttattagctcaattacacaaaaatcttgggaccaggtattatttttcaagtcttcccacatgaagtaactgaagtttggagatgttaagtgattcacccaaagttgtacagctaatatgtggttaggctgggtcctgaaaccgaggcagtttattttcaaagcctttgctttgtgcatcttactgcgccacattgcactgcacatctgcttcctgaaagcactttgtaggtgtgtaaaacttttcgttaaatgctttaagctgtttgggttaaaaatatatgttcatgttataagaaaaccaagacactcctaattataatcaaatagtacttgttacatatcaatatgtgtgtgtgtgtgtgtgtgtgtgtgtgtgtgtgtgtgtgtgtatatatatatggcattgtgcagatgtttaaaagtagttacatagactagttcttgcttttcagggtcccataatctaaaccagatgacttcagctttggataaatatatagaaggaaatttaaagagaattcaaaacaatagatgatgcagtgacactgtgaataaatgttatttatacagtttgtaagatttcatgctcattgttcgtatgtcccaggtggagttcagaaaatattcacttcatttccacaaagggaaatagtgcctagagatggttttcttttaaaaagtccttttcataatgcagtgcccttccttccattgcccttcattccattgcttcccatgcttgtcaagagactaaaatgttacttatagtaatagtcactatctcaatgtaaatagcacccttatttgatgagaattattatttcagttctaaaaatggggaaacaaagtcagcaggaggcaaagtagcttgttaaagtattctgcaactttcaaatggttgcttccactgcatttcacgtcttggcacttctaattgagggttactctaaccaccctatttaaaattgtaactgtcccccacccccttaattactaaccctggtctactttttgttttctttttctgtaactcttatcttcttactatataatttatactatataatttacttcattatgtctattgtttattgtctgtcttttccaaattctactgcctcttaccctctccagaatgaaaactagtatctttgtttttgtttactgatgtaacccaaacacctacaaacagtgcccagtatatactaggcccgcaaatatatattggctgactgactgtatggtttagtatcatgtcatagtattgagactgtaactttggtcttctcattttcttctttgtattgtgcgtcctagacttagtttggcctctccttttgtccttgtatactctaatactggataagaattttggagtctttttcaactctgagtcagtgaatgccacataacttagtgactatatttaaatggttaatttacaattttttccctgcaaaggatactgtagtcactgtgagtattttagtattattgtaggactcaagagggaattaaaactacaaaaatgactcgtcttgtatgacacagaaagaaatgtttcttcacagagggaggagaaaaatatcttcaagagagaactaattgaatcaaatcaatgaaccatgtctcatctttttggataagtaactgttagtaatccagacacttcatgagctttcattatgtaaagtctttagcagaagctaaaggaggggcaccaaccacagtaattttaacttaagaacaaaatggagcatgaaaataaattattaaatcatttactcccactatttttgggttagggccaataatggggagagaaagaggtagactagttttgtgtttgtggctattttaatagagtagcacaagtaatcaaaaaacagtaggctgttttgaatttactggctgtcccttatgagttcacagttagattggactgtcctcaatgtactttcttttttttctttctttcccacatctctttatttctctgattttgtttaaacttcataaagagctctctgatctttcctttccaaacaatgaaggtttatcctttgtaaactacctctgtactccacaggctgatgatatatgatatccctatatcattaaagtaaagcctaagcac

SEQ ID NO: 160131 - DNA, 1874 bp, Homo sapiens
  Payload ID: 11319
  Gene Symbol: NOTCH2NL
  Gene Name: notch 2 N-terminal like
  Uniprot ID: Q7Z3S9
  ENST ID: ENST00000362074
  CDS Start-End: 363-1073
gctgcacacccgagaaagtttcagccaaacttcgggcggcggctgaggcggcggccgaggagcggcggactcggggcgcggggagtcgaggcatttgcgctgggcttcggagcgtagcgccagggcctgagcctttgaagcaggaggaggggaggagagagtggggctcctctatcgggaccccctccccatgtggatctgcccaggcggccgcggcggcggcggcggaggaggcgaccgagaagatacccgccctgcgccccgctctgctgtgggcgctgctggcgctctggctgtgctgcgcgacccccgcgcatgcattgcagtgtcgagatggctatgaaccctgtgtaaatgaaggaatgtgtgttacctaccacaatggcacaggatactgcaaatgtccagaaggcttcttgggggaatattgtcaacatcgagacccctgtgagaagaaccgctgccagaatggtgggacttgtgtggcccaggccatgctggggaaagccacgtgccgatgtgcctcagggtttacaggagaggactgccagtactcgacatctcatccatgctttgtgtctcgaccttgcctgaatggcggcacatgccatatgctcagccgggatacctatgagtgcacctgtcaagtcgggtttacaggtaaggagtgccaatggaccgatgcctgcctgtctcatccctgtgcaaatggaagtacctgtaccactgtggccaaccagttctcctgcaaatgcctcacaggcttcacagggcagaagtgtgagactgatgtcaatgagtgtgacattccaggacactgccagcatggtggcacctgcctcaacctgcctggttcctaccagtgccagtgccttcagggcttcacaggccagtactgtgacagcctgtatgtgccctgtgcaccctcgccttgtgtcaatggaggcacctgtcggcagactggtgacttcacttttgagtgcaactgccttccagaaacagtgagaagaggaacagagctctgggaaagagacagggaagtctggaatggaaaagaacacgatgagaattagacactggaaaatatgtatgtgtggttaataaagtgctttaaactgaattgacattaacagtgggtgatcaactttactatgtgcttgtgcttttgcttttgatggagtaattcattgttttcttatccacctaaatgcacccagctgcccttgattttctctgggctactggccttcacaaccctctcccatgtaccctctctgactttggggtaaccctcccctaacttaaagctagagaattctgaaactgaggaggggatcctctgttaatcagtgagcactttttgatgagctgatagatgatatatgagagactatgcgtggcacaatactttgttacactcttcactgatacaagtgttctagagtgtacacacaacccaaagatagaaataaaaagaggagcagtgtcggggagcttggggcctggtgttccatggagagggagaaaggaacaagcttgaccaattcattcaactccttataaaaatgatgaggaggctgaaaaccaagaattttgattgggaacagaatacaagcagctgaatcagatgaattactaagcaacaaagatcctgtttttatacaaatatccttagtacaaaaacaaaagaaggaaaactgtaggggggagtaatgtgctaagtaagcagaattgcctcaaaaagaagttgttctagttactctttcagagtgggaatcttagattctggtattgtggatatggttcacatataatgggattgtgtgttttattttggagggattaaaggtcatagtttggtcctcagtataaaa

SEQ ID NO: 160132 - DNA, 5042 bp, Homo sapiens
  Payload ID: 11319
  Gene Symbol: NOTCH2NL
  Gene Name: notch 2 N-terminal like
  Uniprot ID: Q7Z3S9
  ENST ID: ENST00000578207
  CDS Start-End: 445-1155
acatgtgggttctttcaaacatactggacttcctccttaggttttagttgtgttagtcaatagttgaatgttgaaggagaggatgccaagggatattaaagaagttgtccagtgtacagaagcttactggaaggagtggccaactagttaaaggtttgacacctcaatatcaacaaaatgccaagtggatcattttgactctcacagcaatccaactggacatttgaccatgccccgtggtcagtggagagcttcttctctgaaggccacttttatctagcacatcaaggctatacacctctttcactaagaagaatttgacacttttatgttgtgagagctgagattcaccattctccaccatcctgagaagagctttgatagaagggctactcgtgagcattgcagtgtcgagatggctatgaaccctgtgtaaatgaaggaatgtgtgttacctaccacaatggcacaggatactgcaaatgtccagaaggcttcttgggggaatattgtcaacatcgagacccctgtgagaagaaccgctgccagaatggtgggacttgtgtggcccaggccatgctggggaaagccacgtgccgatgtgcctcagggtttacaggagaggactgccagtactcgacatctcatccatgctttgtgtctcgaccttgcctgaatggcggcacatgccatatgctcagccgggatacctatgagtgcacctgtcaagtcgggtttacaggtaaggagtgccaatggaccgatgcctgcctgtctcatccctgtgcaaatggaagtacctgtaccactgtggccaaccagttctcctgcaaatgcctcacaggcttcacagggcagaagtgtgagactgatgtcaatgagtgtgacattccaggacactgccagcatggtggcacctgcctcaacctgcctggttcctaccagtgccagtgccttcagggcttcacaggccagtactgtgacagcctgtatgtgccctgtgcaccctcgccttgtgtcaatggaggcacctgtcggcagactggtgacttcacttttgagtgcaactgccttccagaaacagtgagaagaggaacagagctctgggaaagagacagggaagtctggaatggaaaagaacacgatgagaattagacactggaaaatatgtatgtgtggttaataaagtgctttaaactgaattgacattaacagtgggtgatcaactttactatgtgcttgtgcttttgcttttgatggagtaattcattgttttcttatccacctaaatgcacccagctgcccttgattttctctgggctactggccttcacaaccctctcccatgtaccctctctgactttggggtaaccctcccctaacttaaagctagagaattctgaaactgaggaggggatcctctgttaatcagtgagcactttttgatgagctgatagatgatatatgagagactatgcgtggcacaatactttgttacactcttcactgatacaagtgttctagagtgtacacacaacccaaagatagaaataaaaagaggagcagtgtcggggagcttggggcctggtgttccatggagagggagaaaggaacaagcttgaccaattcattcaactccttataaaaatgatgaggaggctgaaaaccaagaattttgattgggaacagaatacaagcagctgaatcagatgaattactaagcaacaaagatcctgtttttatacaaatatccttagtacaaaaacaaaagaaggaaaactgtaggggggagtaatgtgctaagtaagcagaattgcctcaaaaagaagttgttctagttactctttcagagtgggaatcttagattctggtattgtggatatggttcacatataatgggattgtgtgttttattttggagggattaaaggtcatagtttggtcctcagtataaaatcaactggtaatttattcatttcatttggtaaaaatgtattgactgcctgctatgttctaggcaccatgctatgtatttggaatacagctatacaaagcattgtcacataattgaaatgaaaattttatattatttaagtcacaagaacaagctatttaattatattacttttagtttctcttttaataaagaatagataatgctatcattctagatactaaataagtattttcttaacataatattactatccactttatcttgtagaagaaataactaaaatacatctgtcttcactcctgtatttgtttgcattttaaggattaaagacagaaatagaaatgtaaacaactttattttgaaaatatttcaacactgcaaatatctctgggtctgatattctagtaatctaattggctagtaattgatgttagtgtgatttattgttgaaggctaaatgtgtttttcagtttcaagaaaattgcttttaataattgcctagaacaagaggttgatttggcagcaagatgttgacgggaagttagagaagtcaataaaggaagtttttagctgagagagagtgattattcactcccatagcctctgcattgttatccattagccacgataagaaccttagggaattctgagagtgtgtccaggaaaggatctgtcaaactagaatagtatctcctccttgagaaaggaaataaccaaggattccgcagctgagaggctgccagggctagtgaaatagagtaaggaaatcttggctgtctcttattctctggttgtagtttaacgcaagacacttatttactcactgatggtgtgtgtgtgtgtgggaggggagattagcatgaggggtgggaatggggagattcgatgaagagaaaactaacatttttttggtgactcaggaactgtgccaggtacttccatgcttattagctcaattacacaaaaatcttgggaccaggtattatttttcaagtcttcccacatgaagtaactgaagtttggagatgttaagtgattcacccaaagttgtacagctaatatgtggttaggctgggtcctgaaaccgaggcagtttattttcaaagcctttgctttgtgcatcttactgcgccacattgcactgcacatctgcttcctgaaagcactttgtaggtgtgtaaaacttttcgttaaatgctttaagctgtttgggttaaaaatatatgttcatgttataagaaaaccaagacactcctaattataatcaaatagtacttgttacatatcaatatgtgtgtgtgtgtgtgtgtgtgtgtgtgtgtgtgtgtgtgtgtgtgtgtgtgtatggcgttgtgcagatgtttaaaagtagttacatagactagttcttgcttttcagggtcccataatctaaaccagatgacttcagctttggataaatatatagaaggaaatttaaagagaattcaaaacaatagatgatgcagtgacactgtgaataaatgttatttatacagtttgtaagatttcatgctcattgttcatatgtcccaggtggagttcagaaaatattctcttcatttccacaaaggggaatagtgcctggagatggttttcttttaaaaagtccttttcataatgcagtgcccttccttccattgcccttcattccattgcttcccatgcttgtcaagagactaaaatgttacttatagtaatagtcactatctcaatgtaaatagcacccttatttgatgagaattattatttcagttctaaaaatggggaaacaaagtcagcaggaggcaaagtagcttgttaaagtattctgcaactttcaaatggttgcttccactgcatttcacgtcttggcacttctaattgagggttactctaaccaccctatttaaaattgtaactgtcccccacccccttaattactaaccctggtctactttttgttttctttttctgtaactcttatcttcttactatataatttatactatataatttacttcattatgtctattgttcattgtctgtcttttccaaattctactgcctcttaccctctccagaatgaaaactagtatctttgtttttgtttactgatgtaacccaaacacctacaaacagtgcccagtatatactaggcccacaaatatatattggctgactgactgtatggtttagtatcatgtcatagtattgagactgtaactttggtcttctcattttcttctttgtattgtgcgtcctagacttagtttggcctctccttttgtccttgtatactctaatactggataagaattttggagtctttttcaactctgagtcagtgaatgccacataacttagtgactatatttaaatggttaatttacaattttttccctgcaaaggatactgtagtcactgtgagtattttagtattattgtaggactcaagagggaattaaaactacaaaaatgactcctcttgtatgacacagaaagaaatgtttcttcacagagggaggagaaaaatatcttcaagagagaactaatagaatcaaatcaatgaaccatgtctcatctttttggataagtaactgttagtaatccagacacttcatgagctttcattatgtaaagtctttagcagaagctaaaggaggggcaccaaccacagtaattttaacttaagaacaaaatggagcatgaaaataaattattaaatcatttactcccactatttttgggttagggccaataatggggagagaaagaggtagactagttttgtgtttgtggctattttaatagagtagcacaagtaatcaaaaaacagtaggctgttttgaatttactggctgtcccttatgagttcacagttagattggactgtcctcaatgtactttcttttttttctttctttcccacatctctttatttctctgattttgtttaaacttcataaagagctctctgatctttcctttccaaacaatgaaggtttatcctttgtaaactacctctgtactccacaggctgatgatatgtgatatccctatatcattaaagtaaagcctaagcaca

SEQ ID NO: 160133 - DNA, 1954 bp, Homo sapiens
  Payload ID: 11319
  Gene Symbol: NOTCH2NL
  Gene Name: notch 2 N-terminal like
  Uniprot ID: Q7Z3S9
  ENST ID: ENST00000579793
  CDS Start-End: 363-1055
gctgcacacccgagaaagtttcagccaaacttcgggcggcggctgaggcggcggccgaggagcggcggactcggggcgcggggagtcgaggcatttgcgctgggcttcggagcgtagcgccagggcctgagcctttgaagcaggaggaggggaggagagagtggggctcctctatcgggaccccctccccatgtggatctgcccaggcggccgcggcggcggcggcggaggaggcgaccgagaagatacccgccctgcgccccgctctgctgtgggcgctgctggcgctctggctgtgctgcgcgacccccgcgcatgcattgcagtgtcgagatggctatgaaccctgtgtaaatgaaggaatgtgtgttacctaccacaatggcacaggatactgcaaatgtccagaaggcttcttgggggaatattgtcaacatcgagacccctgtgagaagaaccgctgccagaatggtgggacttgtgtggcccaggccatgctggggaaagccacgtgccgatgtgcctcagggtttacaggagaggactgccagtactcgacatctcatccatgctttgtgtctcgaccttgcctgaatggcggcacatgccatatgctcagccgggatacctatgagtgcacctgtcaagtcgggtttacaggtaaggagtgccaatggaccgatgcctgcctgtctcatccctgtgcaaatggaagtacctgtaccactgtggccaaccagttctcctgcaaatgcctcacaggcttcacagggcagaagtgtgagactgatgtcaatgagtgtgacattccaggacactgccagcatggtggcacctgcctcaacctgcctggttcctaccagtgccagtgccttcagggcttcacaggccagtactgtgacagcctgtatgtgccctgtgcaccctcgccttgtgtcaatggaggcacctgtcggcagactggtgacttcacttttgagtgcaactgccttccagcaacatggccaatctttcctaagctgctcagcttacaagaaaaggaatcatactgctaagaattcaaacttcagcagtcatagggagccttgggaggaccccgaatcactgatggaattgcgcagtgcatggagatggctcagcaggatgagggtaaatgcaggggcaagtccaggccatactgagagacaatgagtggcgctgatgaggacaaagataaaatcaaaagtttgtgcttcatcttcaaaaactcaagctgataacaaacttggcctgatgagaaataataagtatttttctatttacatgagaatttaatctcaaaacagaaatcagaaaaatatgaagtccagggcataaaacctaaaactattgctcatatttattctttctaaatagagcaaagtgtacaatcttctccataagacatacattgtggttataaaaaggcaaaagtcttagtgagaatcattggtattccatagaagagtgaattaaacacagccaagggaagacccacgtctcatacttctcttgtatattccaaagttccagggaaattccaggtgatagaggttatttcccatactgttaaagcaaggtttcagacacttctgaattttggtcccagtactctagaagggcacacctctgtcctggaaaataatacaagaatgaatactcttcccgtgacccattctggtcattcttccagcatcacaaaaaccaaaaaatggaaatatggccaaatacgtgattagctgtccctcatcttcaggtttcttatctgttacttatagataatagcattaccttaaggattatgatgaagatacaatgtccaaatataaacacagttttgagcaaaatgccttgtacgaattggtcaatgaataattactaaatatgtgaatatttactggattgtatggatcctatgaataattactgaataatt

SEQ ID NO: 160134 - DNA, 8666 bp, Homo sapiens
  Payload ID: 11320
  Gene Symbol: NOTCH3
  Gene Name: notch 3
  Uniprot ID: Q9UM47
  ENST ID: ENST00000263388
  CDS Start-End: 77-7042
gcggcgcggaggctggcccgggacgcgcccggagcccagggaaggagggaggaggggagggtcgcggccggccgccatggggccgggggcccgtggccgccgccgccgccgtcgcccgatgtcgccgccaccgccaccgccacccgtgcgggcgctgcccctgctgctgctgctagcggggccgggggctgcagcccccccttgcctggacggaagcccgtgtgcaaatggaggtcgttgcacccagctgccctcccgggaggctgcctgcctgtgcccgcctggctgggtgggtgagcggtgtcagctggaggacccctgtcactcaggcccctgtgctggccgtggtgtctgccagagttcagtggtggctggcaccgcccgattctcatgccggtgcccccgtggcttccgaggccctgactgctccctgccagatccctgcctcagcagcccttgtgcccacggtgcccgctgctcagtggggcccgatggacgcttcctctgctcctgcccacctggctaccagggccgcagctgccgaagcgacgtggatgagtgccgggtgggtgagccctgccgccatggtggcacctgcctcaacacacctggctccttccgctgccagtgtccagctggctacacagggccactatgtgagaaccccgcggtgccctgtgcaccctcaccatgccgtaacgggggcacctgcaggcagagtggcgacctcacttacgactgtgcctgtcttcctgggtttgagggtcagaattgtgaagtgaacgtggacgactgtccaggacaccgatgtctcaatggggggacatgcgtggatggcgtcaacacctataactgccagtgccctcctgagtggacaggccagttctgcacggaggacgtggatgagtgtcagctgcagcccaacgcctgccacaatgggggtacctgcttcaacacgctgggtggccacagctgcgtgtgtgtcaatggctggacaggcgagagctgcagtcagaatatcgatgactgtgccacagccgtgtgcttccatggggccacctgccatgaccgcgtggcttctttctactgtgcctgccccatgggcaagactggcctcctgtgtcacctggatgacgcctgtgtcagcaacccctgccacgaggatgctatctgtgacacaaatccggtgaacggccgggccatttgcacctgtcctcccggcttcacgggtggggcatgtgaccaggatgtggacgagtgctctatcggcgccaacccctgcgagcacttgggcaggtgcgtgaacacgcagggctccttcctgtgccagtgcggtcgtggctacactggacctcgctgtgagaccgatgtcaacgagtgtctgtcggggccctgccgaaaccaggccacgtgcctcgaccgcataggccagttcacctgtatctgtatggcaggcttcacaggaacctattgcgaggtggacattgacgagtgtcagagtagcccctgtgtcaacggtggggtctgcaaggaccgagtcaatggcttcagctgcacctgcccctcgggcttcagcggctccacgtgtcagctggacgtggacgaatgcgccagcacgccctgcaggaatggcgccaaatgcgtggaccagcccgatggctacgagtgccgctgtgccgagggctttgagggcacgctgtgtgatcgcaacgtggacgactgctcccctgacccatgccaccatggtcgctgcgtggatggcatcgccagcttctcatgtgcctgtgctcctggctacacgggcacacgctgcgagagccaggtggacgaatgccgcagccagccctgccgccatggcggcaaatgcctagacctggtggacaagtacctctgccgctgcccttctgggaccacaggtgtgaactgcgaagtgaacattgacgactgtgccagcaacccctgcacctttggagtctgccgtgatggcatcaaccgctacgactgtgtctgccaacctggcttcacagggcccctttgtaacgtggagatcaatgagtgtgcttccagcccatgcggcgagggaggttcctgtgtggatggggaaaatggcttccgctgcctctgcccgcctggctccttgcccccactctgcctccccccgagccatccctgtgcccatgagccctgcagtcacggcatctgctatgatgcacctggcgggttccgctgtgtgtgtgagcctggctggagtggcccccgctgcagccagagcctggcccgagacgcctgtgagtcccagccgtgcagggccggtgggacatgcagcagcgatggaatgggtttccactgcacctgcccgcctggtgtccagggacgtcagtgtgaactcctctccccctgcaccccgaacccctgtgagcatgggggccgctgcgagtctgcccctggccagctgcctgtctgctcctgcccccagggctggcaaggcccacgatgccagcaggatgtggacgagtgtgctggccccgcaccctgtggccctcatggtatctgcaccaacctggcagggagtttcagctgcacctgccatggagggtacactggcccttcctgcgatcaggacatcaatgactgtgaccccaacccatgcctgaacggtggctcgtgccaagacggcgtgggctccttttcctgctcctgcctccctggtttcgccggcccacgatgcgcccgcgatgtggatgagtgcctgagcaacccctgcggcccgggcacctgtaccgaccacgtggcctccttcacctgcacctgcccgccaggctacggaggcttccactgcgaacaggacctgcccgactgcagccccagctcctgcttcaatggcgggacctgtgtggacggcgtgaactcgttcagctgcctgtgccgtcccggctacacaggagcccactgccaacatgaggcagacccctgcctctcgcggccctgcctacacgggggcgtctgcagcgccgcccaccctggcttccgctgcacctgcctcgagagcttcacgggcccgcagtgccagacgctggtggattggtgcagccgccagccttgtcaaaacgggggtcgctgcgtccagactggggcctattgcctttgtccccctggatggagcggacgcctctgtgacatccgaagcttgccctgcagggaggccgcagcccagatcggggtgcggctggagcagctgtgtcaggcgggtgggcagtgtgtggatgaagacagctcccactactgcgtgtgcccagagggccgtactggtagccactgtgagcaggaggtggacccctgcttggcccagccctgccagcatggggggacctgccgtggctatatggggggctacatgtgtgagtgtcttcctggctacaatggtgataactgtgaggacgacgtggacgagtgtgcctcccagccctgccagcacgggggttcatgcattgacctcgtggcccgctatctctgctcctgtcccccaggaacgctgggggtgctctgcgagattaatgaggatgactgcggcccaggcccaccgctggactcagggccccggtgcctacacaatggcacctgcgtggacctggtgggtggtttccgctgcacctgtcccccaggatacactggtttgcgctgcgaggcagacatcaatgagtgtcgctcaggtgcctgccacgcggcacacacccgggactgcctgcaggacccaggcggaggtttccgttgcctttgtcatgctggcttctcaggtcctcgctgtcagactgtcctgtctccctgcgagtcccagccatgccagcatggaggccagtgccgtcctagcccgggtcctgggggtgggctgaccttcacctgtcactgtgcccagccgttctggggtccgcgttgcgagcgggtggcgcgctcctgccgggagctgcagtgcccggtgggcgtcccatgccagcagacgccccgcgggccgcgctgcgcctgccccccagggttgtcgggaccctcctgccgcagcttcccggggtcgccgccgggggccagcaacgccagctgcgcggccgccccctgtctccacgggggctcctgccgccccgcgccgctcgcgcccttcttccgctgcgcttgcgcgcagggctggaccgggccgcgctgcgaggcgcccgccgcggcacccgaggtctcggaggagccgcggtgcccgcgcgccgcctgccaggccaagcgcggggaccagcgctgcgaccgcgagtgcaacagcccaggctgcggctgggacggcggcgactgctcgctgagcgtgggcgacccctggcggcaatgcgaggcgctgcagtgctggcgcctcttcaacaacagccgctgcgaccccgcctgcagctcgcccgcctgcctctacgacaacttcgactgccacgccggtggccgcgagcgcacttgcaacccggtgtacgagaagtactgcgccgaccactttgccgacggccgctgcgaccagggctgcaacacggaggagtgcggctgggatgggctggattgtgccagcgaggtgccggccctgctggcccgcggcgtgctggtgctcacagtgctgctgccgccagaggagctactgcgttccagcgccgactttctgcagcggctcagcgccatcctgcgcacctcgctgcgcttccgcctggacgcgcacggccaggccatggtcttcccttaccaccggcctagtcctggctccgaaccccgggcccgtcgggagctggcccccgaggtgatcggctcggtagtaatgctggagattgacaaccggctctgcctgcagtcgcctgagaatgatcactgcttccccgatgcccagagcgccgctgactacctgggagcgttgtcagcggtggagcgcctggacttcccgtacccactgcgggacgtgcggggggagccgctggagcctccagaacccagcgtcccgctgctgccactgctagtggcgggcgctgtcttgctgctggtcattctcgtcctgggtgtcatggtggcccggcgcaagcgcgagcacagcaccctctggttccctgagggcttctcactgcacaaggacgtggcctctggtcacaagggccggcgggaacccgtgggccaggacgcgctgggcatgaagaacatggccaagggtgagagcctgatgggggaggtggccacagactggatggacacagagtgcccagaggccaagcggctaaaggtagaggagccaggcatgggggctgaggaggctgtggattgccgtcagtggactcaacaccatctggttgctgctgacatccgcgtggcaccagccatggcactgacaccaccacagggcgacgcagatgctgatggcatggatgtcaatgtgcgtggcccagatggcttcaccccgctaatgctggcttccttctgtgggggggctctggagccaatgccaactgaagaggatgaggcagatgacacatcagctagcatcatctccgacctgatctgccagggggctcagcttggggcacggactgaccgtactggcgagactgctttgcacctggctgcccgttatgcccgtgctgatgcagccaagcggctgctggatgctggggcagacaccaatgcccaggaccactcaggccgcactcccctgcacacagctgtcacagccgatgcccagggtgtcttccagattctcatccgaaaccgctctacagacttggatgcccgcatggcagatggctcaacggcactgatcctggcggcccgcctggcagtagagggcatggtggaagagctcatcgccagccatgctgatgtcaatgctgtggatgagcttgggaaatcagccttacactgggctgcggctgtgaacaacgtggaagccactttggccctgctcaaaaatggagccaataaggacatgcaggatagcaaggaggagacccccctattcctggccgcccgcgagggcagctatgaggctgccaagctgctgttggaccactttgccaaccgtgagatcaccgaccacctggacaggctgccgcgggacgtagcccaggagagactgcaccaggacatcgtgcgcttgctggatcaacccagtgggccccgcagcccccccggtccccacggcctggggcctctgctctgtcctccaggggccttcctccctggcctcaaagcggcacagtcggggtccaagaagagcaggaggccccccgggaaggcggggctggggccgcaggggccccgggggcggggcaagaagctgacgctggcctgcccgggccccctggctgacagctcggtcacgctgtcgcccgtggactcgctggactccccgcggcctttcggtgggccccctgcttcccctggtggcttcccccttgaggggccctatgcagctgccactgccactgcagtgtctctggcacagcttggtggcccaggccgggcgggtctagggcgccagccccctggaggatgtgtactcagcctgggcctgctgaaccctgtggctgtgcccctcgattgggcccggctgcccccacctgcccctccaggcccctcgttcctgctgccactggcgccgggaccccagctgctcaacccagggacccccgtctccccgcaggagcggcccccgccttacctggcagtcccaggacatggcgaggagtacccggcggctggggcacacagcagccccccaaaggcccgcttcctgcgggttcccagtgagcacccttacctgaccccatcccccgaatcccctgagcactgggccagcccctcacctccctccctctcagactggtccgaatccacgcctagcccagccactgccactggggccatggccaccaccactggggcactgcctgcccagccacttcccttgtctgttcccagctcccttgctcaggcccagacccagctggggccccagccggaagttacccccaagaggcaagtgttggcctgagacgctcgtcagttcttagatcttgggggcctaaagagacccccgtcctgcctcctttctttctctgtctcttccttccttttagtctttttcatcctcttctctttccaccaaccctcctgcatccttgccttgcagcgtgaccgagataggtcatcagcccagggcttcagtcttcctttatttataatgggtgggggctaccacccaccctctcagtcttgtgaagagtctgggacctccttcttccccacttctctcttccctcattcctttctctctccttctggcctctcatttccttacactctgacatgaatgaattattattatttttatttttctttttttttttacattttgtatagaaacaaattcatttaaacaaacttattattattattttttacaaaatatatatatggagatgctccctccccctgtgaaccccccagtgcccccgtggggctgagtctgtgggcccattcggccaagctggattctgtgtacctagtacacaggcatgactgggatcccgtgtaccgagtacacgacccaggtatgtaccaagtaggcacccttgggcgcacccactggggccaggggtcgggggagtgttgggagcctcctccccaccccacctccctcacttcactgcattccagatgggacatgttccatagccttgctggggaagggcccactgccaactccctctgccccagccccacccttggccatctccctttgggaactagggggctgctggtgggaaatgggagccagggcagatgtatgcattcctttgtgtccctgtaaatgtgggactacaagaagaggagctgcctgagtggtactttctcttcctggtaatcctctggcccagcctcatggcagaatagaggtatttttaggctatttttgtaatatggcttctggtcaaaatccctgtgtagctgaattcccaagccctgcattgtacagccccccactcccctcaccacctaataaaggaatagttaacactcagtgttgttggtctgtgtctaggtaaggtggggagtggtggcagtgggacttctatctcccccacccagggctaacttgagctcccatcttggggtaaatacatttgacttgccagtctacttatgcttcctcttttggcagatgactaccgattggattagtggttgtcacctgacttaagctgagccaatcagattcttttgctcgagaactttctttaatggagaggctaagaaagttgtcagttggtggagctcttaaggtcacaatcagatttagaaatatcagtggccaattcgaggtggtgggcaaagagacaagcaaacagggcagaagaatgaagctaatattcagggagaatcagaaatgagagctcaaatggctccttgagggctgggggggttatctcggctcccagtgcagttatcaattccagttaattgagtgttcattccattgagatcaacaggtatttattaattgctttctaagtatctgatcatggttctgcatgaatttcacttttacttcatgctcctatgggttttggagataaccttggacccatgtaataaatacttctttacttgtgcca

SEQ ID NO: 160135 - DNA, 559 bp, Homo sapiens
  Payload ID: 11320
  Gene Symbol: NOTCH3
  Gene Name: notch 3
  ENST ID: ENST00000597756
  CDS Start-End: 1-532
tcagcttggggcacggactgaccgtactggcgagactgctttgcacctggctgcccgttatgcccgtgctgatgcagccaagcggctgctggatgctggggcagacaccaatgcccaggaccactcaggccgcactcccctgcacacagctgtcacagccgatgcccagggtgtcttccagattctcatccgaaaccgctctacagacttggatgcccgcatggcagatggctcaacggcactgatcctggcggcccgcctggcagtagagggcatggtggaagagctcatcgccagccatgctgatgtcaatgctgtggatgagcttgggaaatcagccttacactgggctgcggctgtgaacaacgtggaagccactttggccctgctcaaaaatggagccaataaggacatgcaggatagcaaggtgagccccagcccttggtccactgggtgtcagcagtggcacagtgccattgcaatccagcctgggcaacagagtgagactctctcaaaaaacaaaacaaaataaaaccccaaacattggattaaaatataa

SEQ ID NO: 160136 - DNA, 564 bp, Homo sapiens
  Payload ID: 11320
  Gene Symbol: NOTCH3
  Gene Name: notch 3
  ENST ID: ENST00000595514
  CDS Start-End: 1-353
gcctgatgggggaggtggccacagactggatggacacagagtgcccagaggccaagcggctaaaggtagaggagccaggcatgggggctgaggaggctgtggattgccgtcagtggactcaacaccatctggttgctgctgacatccgcgtggcaccagccatggcactgacaccaccacagggcgacgcagatgctgatggcatggatgtcaatgtgcgtggcccagattctcatccgaaaccgctctacagacttggatgcccgcatggcagatggctcaacggcactgatcctggcggcccgcctggcagtagagggcatggtggaagagctcatcgccagccatgctgatgtcaatgctgtggatgagcttgggaaatcagccttacactgggctgcggctgtgaacaacgtggaagccactttggccctgctcaaaaatggagccaataaggacatgcaggatagcaaggaggagacccccctattcctggccgcccgcgagggcagctatgaggctgccaagctgctgttggaccactttgccaaccgtgagatcacc

SEQ ID NO: 160137 - DNA, 3858 bp, Homo sapiens
  Payload ID: 11320
  Gene Symbol: NOTCH3
  Gene Name: notch 3
  ENST ID: ENST00000601011
  CDS Start-End: 1-3858
gggccgggggcccgtggccgccgccgccgccgtcgcccgatgtcgccgccaccgccaccgccacccgtgcgggcgctgcccctgctgctgctgctagcggggccgggggctgcagcccccccttgcctggacggaagcccgtgtgcaaatggaggtcgttgcacccagctgccctcccgggaggctgcctgcctgtgcccgcctggctgggtgggtgagcggtgtcagctggaggacccctgtcactcaggcccctgtgctggccgtggtgtctgccagagttcagtggtggctggcaccgcccgattctcatgccggtgcccccgtggcttccgaggccctgactgctccctgccagatccctgcctcagcagcccttgtgcccacggtgcccgctgctcagtggggcccgatggacgcttcctctgctcctgcccacctggctaccagggccgcagctgccgaagcgacgtggatgagtgccgggtgggtgagccctgccgccatggtggcacctgcctcaacacacctggctccttccgctgccagtgtccagctggctacacagggccactatgtgagaaccccgcggtgccctgtgcaccctcaccatgccgtaacgggggcacctgcaggcagagtggcgacctcacttacgactgtgcctgtcttcctgggtttgagggtcagaattgtgaagtgaacgtggacgactgtccaggacaccgatgtctcaatggggggacatgcgtggatggcgtcaacacctataactgccagtgccctcctgagtggacaggccagttctgcacggaggacgtggatgagtgtcagctgcagcccaacgcctgccacaatgggggtacctgcttcaacacgctgggtggccacagctgcgtgtgtgtcaatggctggacaggcgagagctgcagtcagaatatcgatgactgtgccacagccgtgtgcttccatggggccacctgccatgaccgcgtggcttctttctactgtgcctgccccatgggcaagactggcctcctgtgtcacctggatgacgcctgtgtcagcaacccctgccacgaggatgctatctgtgacacaaatccggtgaacggccgggccatttgcacctgtcctcccggcttcacgggtggggcatgtgaccaggatgtggacgagtgctctatcggcgccaacccctgcgagcacttgggcaggtgcgtgaacacgcagggctccttcctgtgccagtgcggtcgtggctacactggacctcgctgtgagaccgatgtcaacgagtgtctgtcggggccctgccgaaaccaggccacgtgcctcgaccgcataggccagttcacctgtatctgtatggcaggcttcacaggaacctattgcgaggtggacattgacgagtgtcagagtagcccctgtgtcaacggtggggtctgcaaggaccgagtcaatggcttcagctgcacctgcccctcgggcttcagcggctccacgtgtcagctggacgtggacgaatgcgccagcacgccctgcaggaatggcgccaaatgcgtggaccagcccgatggctacgagtgccgctgtgccgagggctttgagggcacgctgtgtgatcgcaacgtggacgactgctcccctgacccatgccaccatggtcgctgcgtggatggcatcgccagcttctcatgtgcctgtgctcctggctacacgggcacacgctgcgagagccaggtggacgaatgccgcagccagccctgccgccatggcggcaaatgcctagacctggtggacaagtacctctgccgctgcccttctgggaccacaggtgtgaactgcgaagtgaacattgacgactgtgccagcaacccctgcacctttggagtctgccgtgatggcatcaaccgctacgactgtgtctgccaacctggcttcacagggcccctttgtaacgtggagatcaatgagtgtgcttccagcccatgcggcgagggaggttcctgtgtggatggggaaaatggcttccgctgcctctgcccgcctggctccttgcccccactctgcctccccccgagccatccctgtgcccatgagccctgcagtcacggcatctgctatgatgcacctggcgggttccgctgtgtgtgtgagcctggctggagtggcccccgctgcagccagagcctggcccgagacgcctgtgagtcccagccgtgcagggccggtgggacatgcagcagcgatggaatgggtttccactgcacctgcccgcctggtgtccagggacgtcagtgtgaactcctctccccctgcaccccgaacccctgtgagcatgggggccgctgcgagtctgcccctggccagctgcctgtctgctcctgcccccagggctggcaagacccatgcctgaacggtggctcgtgccaagacggcgtgggctccttttcctgctcctgcctccctggtttcgccggcccacgatgcgcccgcgatgtggatgagtgcctgagcaacccctgcggcccgggcacctgtaccgaccacgtggcctccttcacctgcacctgcccgccaggctacggaggcttccactgcgaacaggacctgcccgactgcagccccagctcctgcttcaatggcgggacctgtgtggacggcgtgaactcgttcagctgcctgtgccgtcccggctacacaggagcccactgccaacatgaggcagacccctgcctctcgcggccctgcctacacgggggcgtctgcagcgccgcccaccctggcttccgctgcacctgcctcgagagcttcacgggcccgcagtgccagacgctggtggattggtgcagccgccagccttgtcaaaacgggggtcgctgcgtccagactggggcctattgcctttgtccccctggatggagcggacgcctctgtgacatccgaagcttgccctgcagggaggccgcagcccagatcggggtgcggctggagcagctgtgtcaggcgggtgggcagtgtgtggatgaagacagctcccactactgcgtgtgcccagagggccgtactggtagccactgtgagcaggaggtggacccctgcttggcccagccctgccagcatggggggacctgccgtggctatatggggggctacatgtgtgagtgtcttcctggctacaatggtgataactgtgaggacgacgtggacgagtgtgcctcccagccctgccagcacgggggttcatgcattgacctcgtggcccgctatctctgctcctgtcccccaggaacgctgggggtgctctgcgagattaatgaggatgactgcggcccaggcccaccgctggactcagggccccggtgcctacacaatggcacctgcgtggacctggtgggtggtttccgctgcacctgtcccccaggatacactggtttgcgctgcgaggcagacatcaatgagtgtcgctcaggtgcctgccacgcggcacacacccgggactgcctgcaggacccaggcggaggtttccgttgcctttgtcatgctggcttctcaggtcctcgctgtcagactgtcctgtctccctgcgagtcccagccatgccagcatggaggccagtgccgtcctagcccgggtcctgggggtgggctgaccttcacctgtcactgtgcccagccgttctggggtccgcgttgcgagcgggtggcgcgctcctgccgggagctgcagtgcccggtgggcgtcccatgccagcagacgccccgcgggccgcgctgcgcctgccccccagggttgtcgggaccctcctgccgcagcttcccggggtcgccgccgggggccagcaacgccagctgc

SEQ ID NO: 160138 - DNA, 6745 bp, Homo sapiens
  Payload ID: 11321
  Gene Symbol: NOTCH4
  Gene Name: notch 4
  Uniprot ID: Q99466
  ENST ID: ENST00000375023
  CDS Start-End: 140-6151
agacgtgaggcttgcagcaggccgaggaggaagaagaggggcagtgggagcagaggaggtggctcctgccccagtgagagctctgagggtccctgcctgaagagggacagggaccggggcttggagaaggggctgtggaatgcagcccccttcactgctgctgctgctgctgctgctgctgctgctatgtgtctcagtggtcagacccagagggctgctgtgtgggagtttcccagaaccctgtgccaatggaggcacctgcctgagcctgtctctgggacaagggacctgccagtgtgcccctggcttcctgggtgagacgtgccagtttcctgacccctgccagaacgcccagctctgccaaaatggaggcagctgccaagccctgcttcccgctcccctagggctccccagctctccctctccattgacacccagcttcttgtgcacttgcctccctggcttcactggtgagagatgccaggccaagcttgaagacccttgtcctccctccttctgttccaaaaggggccgctgccacatccaggcctcgggccgcccacagtgctcctgcatgcctggatggacaggtgagcagtgccagcttcgggacttctgttcagccaacccatgtgttaatggaggggtgtgtctggccacatacccccagatccagtgccactgcccaccgggcttcgagggccatgcctgtgaacgtgatgtcaacgagtgcttccaggacccaggaccctgccccaaaggcacctcctgccataacaccctgggctccttccagtgcctctgccctgtggggcaggagggtccacgttgtgagctgcgggcaggaccctgccctcctaggggctgttcgaatgggggcacctgccagctgatgccagagaaagactccacctttcacctctgcctctgtcccccaggtttcataggcccagactgtgaggtgaatccagacaactgtgtcagccaccagtgtcagaatgggggcacttgccaggatgggctggacacctacacctgcctctgcccagaaacctggacaggctgggactgctccgaagatgtggatgagtgtgagacccagggtccccctcactgcagaaacgggggcacctgccagaactctgctggtagctttcactgcgtgtgtgtgagtggctggggcggcacaagctgtgaggagaacctggatgactgtattgctgccacctgtgccccgggatccacctgcattgaccgggtgggctctttctcctgcctctgcccacctggacgcacaggactcctgtgccacttggaagacatgtgtctgagccagccgtgccatggggatgcccaatgcagcaccaaccccctcacaggctccacactctgcctgtgtcagcctggctattcggggcccacctgccaccaggacctggacgagtgtctgatggcccagcaaggcccaagtccctgtgaacatggcggttcctgcctcaacactcctggctccttcaactgcctctgtccacctggctacacaggctcccgttgtgaggctgatcacaatgagtgcctctcccagccctgccacccaggaagcacctgtctggacctacttgccaccttccactgcctctgcccgccaggcttagaagggcagctctgtgaggtggagaccaacgagtgtgcctcagctccctgcctgaaccacgcggattgccatgacctgctcaacggcttccagtgcatctgcctgcctggattctccggcacccgatgtgaggaggatatcgatgagtgcagaagctctccctgtgccaatggtgggcagtgccaggaccagcctggagccttccactgcaagtgtctcccaggctttgaagggccacgctgtcaaacagaggtggatgagtgcctgagtgacccatgtcccgttggagccagctgccttgatcttccaggagccttcttttgcctctgcccctctggtttcacaggccagctctgtgaggttcccctgtgtgctcccaacctgtgccagcccaagcagatatgtaaggaccagaaagacaaggccaactgcctctgtcctgatggaagccctggctgtgccccacctgaggacaactgcacctgccaccacgggcactgccagagatcctcatgtgtgtgtgacgtgggttggacggggccagagtgtgaggcagagctagggggctgcatctctgcaccctgtgcccatggggggacctgctacccccagccctctggctacaactgcacctgccctacaggctacacaggacccacctgtagtgaggagatgacagcttgtcactcagggccatgtctcaatggcggctcctgcaaccctagccctggaggctactactgcacctgccctccaagccacacagggccccagtgccaaaccagcactgactactgtgtgtctgccccgtgcttcaatgggggtacctgtgtgaacaggcctggcaccttctcctgcctctgtgccatgggcttccagggcccgcgctgtgagggaaagctccgccccagctgtgcagacagcccctgtaggaatagggcaacctgccaggacagccctcagggtccccgctgcctctgccccactggctacaccggaggcagctgccagactctgatggacttatgtgcccagaagccctgcccacgcaattcccactgcctccagactgggccctccttccactgcttgtgcctccagggatggaccgggcctctctgcaaccttccactgtcctcctgccagaaggctgcactgagccaaggcatagacgtctcttccctttgccacaatggaggcctctgtgtcgacagcggcccctcctatttctgccactgcccccctggattccaaggcagcctgtgccaggatcacgtgaacccatgtgagtccaggccttgccagaacggggccacctgcatggcccagcccagtgggtatctctgccagtgtgccccaggctacgatggacagaactgctcaaaggaactcgatgcttgtcagtcccaaccctgtcacaaccatggaacctgtactcccaaacctggaggattccactgtgcctgccctccaggctttgtggggctacgctgtgagggagacgtggacgagtgtctggaccagccctgccaccccacaggcactgcagcctgccactctctggccaatgccttctactgccagtgtctgcctggacacacaggccagtggtgtgaggtggagatagacccctgccacagccaaccctgctttcatggagggacctgtgaggccacagcaggatcacccctgggtttcatctgccactgccccaagggttttgaaggccccacctgcagccacagggccccttcctgcggcttccatcactgccaccacggaggcctgtgtctgccctcccctaagccaggcttcccaccacgctgtgcctgcctcagtggctatgggggtcctgactgcctgaccccaccagctcctaaaggctgtggccctccctccccatgcctatacaatggcagctgctcagagaccacgggcttggggggcccaggctttcgatgctcctgccctcacagctctccagggccccggtgtcagaaacccggagccaaggggtgtgagggcagaagtggagatggggcctgcgatgctggctgcagtggcccgggaggaaactgggatggaggggactgctctctgggagtcccagacccctggaagggctgcccctcccactctcggtgctggcttctcttccgggacgggcagtgccacccacagtgtgactctgaagagtgtctgtttgatggctacgactgtgagacccctccagcctgcactccagcctatgaccagtactgccatgatcacttccacaacgggcactgtgagaaaggctgcaacactgcagagtgtggctgggatggaggtgactgcaggcctgaagatggggacccagagtgggggccctccctggccctgctggtggtactgagccccccagccctagaccagcagctgtttgccctggcccgggtgctgtccctgactctgagggtaggactctgggtaaggaaggatcgtgatggcagggacatggtgtacccctatcctggggcccgggctgaagaaaagctaggaggaactcgggaccccacctatcaggagagagcagcccctcaaacgcagcccctgggcaaggagaccgactccctcagtgctgggtttgtggtggtcatgggtgtggatttgtcccgctgtggccctgaccacccggcatcccgctgtccctgggaccctgggcttctactccgcttccttgctgcgatggctgcagtgggagccctggagcccctgctgcctggaccactgctggctgtccaccctcatgcagggaccgcaccccctgccaaccagcttccctggcctgtgctgtgctccccagtggccggggtgattctcctggccctaggggctcttctcgtcctccagctcatccggcgtcgacgccgagagcatggagctctctggctgccccctggtttcactcgacggcctcggactcagtcagctccccaccgacgccggcccccactaggcgaggacagcattggtctcaaggcactgaagccaaaggcagaagttgatgaggatggagttgtgatgtgctcaggccctgaggagggagaggaggtgggccaggctgaagaaacaggcccaccctccacgtgccagctctggtctctgagtggtggctgtggggcgctccctcaggcagccatgctaactcctccccaggaatctgagatggaagcccctgacctggacacccgtggacctgatggggtgacacccctgatgtcagcagtttgctgtggggaagtacagtccgggaccttccaaggggcatggttgggatgtcctgagccctgggaacctctgctggatggaggggcctgtccccaggctcacaccgtgggcactggggagacccccctgcacctggctgcccgattctcccggccaaccgctgcccgccgcctccttgaggctggagccaaccccaaccagccagaccgggcagggcgcacaccccttcatgctgctgtggctgctgatgctcgggaggtctgccagcttctgctccgtagcagacaaactgcagtggacgctcgcacagaggacgggaccacacccttgatgctggctgccaggctggcggtggaagacctggttgaagaactgattgcagcccaagcagacgtgggggccagagataaatgggggaaaactgcgctgcactgggctgctgccgtgaacaacgcccgagccgcccgctcgcttctccaggccggagccgataaagatgcccaggacaacagggagcagacgccgctattcctggcggcgcgggaaggagcggtggaagtagcccagctactgctggggctgggggcagcccgagagctgcgggaccaggctgggctagcgccggcggacgtcgctcaccaacgtaaccactgggatctgctgacgctgctggaaggggctgggccaccagaggcccgtcacaaagccacgccgggccgcgaggctgggcccttcccgcgcgcacggacggtgtcagtaagcgtgcccccgcatgggggcggggctctgccgcgctgccggacgctgtcagccggagcaggccctcgtgggggcggagcttgtctgcaggctcggacttggtccgtagacttggctgcgcgggggggcggggcctattctcattgccggagcctctcgggagtaggagcaggaggaggcccgacccctcgcggccgtaggttttctgcaggcatgcgcgggcctcggcccaaccctgcgataatgcgaggaagatacggagtggctgccgggcgcggaggcagggtctcaacggatgactggccctgtgattgggtggccctgggagcttgcggttctgcctccaacattccgatcccgcctccttgccttactccgtccccggagcggggatcacctcaacttgactgtggtcccccagccctccaagaaatgcccataaaccaaggaggagagggtaaaaaatagaagaatacatggtagggaggaattccaaaaatgattacccattaaaaggcaggctggaaggccttcctggttttaagatggatcccccaaaatgaagggttgtgagtttagtttctctcctaaaatgaatgtatgcccaccagagcagacatcttccacgtggagaagctgcagctctggaaagagggtttaagatgctaggatgaggcaggcccagtcctcctccagaaaataagacaggccacaggagggcagagtggagtggaaatacccctaagttggaaccaagaattgcaggcatatgggatgtaagatgttctttcctatatatggtttccaaagggtgcccctatgatccattgtccccactgcccacaaatggctgacaaatatttattgggcacctactatgtgccaggcactgtgtaggtgctgaaaagtggccaagggccacccccgctgatgactccttgcattccctcccctcacaacaaagaactccactgtggggatgaagcgcttcttctagccactgctatcgctatttaagaaccctaaatctgtcacccataataaagctgatttgaagtgtta

SEQ ID NO: 160139 - DNA, 6745 bp, Homo sapiens
  Payload ID: 11321
  Gene Symbol: NOTCH4
  Gene Name: notch 4
  ENST ID: ENST00000383264
  CDS Start-End: 140-6151
agacgtgaggcttgcagcaggccgaggaggaagaagaggggcagtgggagcagaggaggtggctcctgccccagtgagagctctgagggtccctgcctgaagagggacagggaccggggcttggagaaggggctgtggaatgcagcccccttcactgctgctgctgctgctgctgctgctgctgctatgtgtctcagtggtcagacccagagggctgctgtgtgggagtttcccagaaccctgtgccaatggaggcacctgcctgagcctgtctctgggacaagggacctgccagtgtgcccctggcttcctgggtgagacgtgccagtttcctgacccctgccagaacgcccagctctgccaaaatggaggcagctgccaagccctgcttcctgctcccctagggctccccagctctccctctccattgacacccagcttcttgtgcacttgcctccctggcttcactggtgagagatgccaggccaagcttgaagacccttgtcctccctccttctgttccaaaaggggccgctgccacatccaggcctcgggccgcccacagtgctcctgcatgcctggatggacaggtgagcagtgccagcttcgggacttctgttcagccaacccatgtgttaatggaggggtgtgtctggccacatacccccagatccagtgccactgcccaccgggcttcgagggccatgcctgtgaacgtgatgtcaacgagtgcttccaggacccaggaccctgccccaaaggcacctcctgccataacaccctgggctccttccagtgcctctgccctgtggggcaggagggtccacgttgtgagctgcgggcaggaccctgccctcctaggggctgttcgaatgggggcacctgccagctgatgccagagaaagactccacctttcacctctgcctctgtcccccaggtttcataggcccagactgtgaggtgaatccagacaactgtgtcagccaccagtgtcagaatgggggcacttgccaggatgggctggacacctacacctgcctctgcccagaaacctggacaggctgggactgctccgaagatgtggatgagtgtgagacccagggtccccctcactgcagaaacgggggcacctgccagaactctgctggtagctttcactgcgtgtgtgtgagtggctggggcggcacaagctgtgaggagaacctggatgactgtattgctgccacctgtgccccgggatccacctgcattgaccgggtgggctctttctcctgcctctgcccacctggacgcacaggactcctgtgccacttggaagacatgtgtctgagccagccgtgccatggggatgcccaatgcagcaccaaccccctcacaggctccacactctgcctgtgtcagcctggctattcggggcccacctgccaccaggacctggacgagtgtctgatggcccagcaaggcccaagtccctgtgaacatggcggttcctgcctcaacactcctggctccttcaactgcctctgtccacctggctacacaggctcccgttgtgaggctgatcacaatgagtgcctctcccagccctgccacccaggaagcacctgtctggacctacttgccaccttccactgcctctgcccgccaggcttagaagggcagctctgtgaggtggagaccaacgagtgtgcctcagctccctgcctgaaccacgcggattgccatgacctgctcaacggcttccagtgcatctgcctgcctggattctccggcacccgatgtgaggaggatatcgatgagtgcagaagctctccctgtgccaatggtgggcagtgccaggaccagcctggagccttccactgcaagtgtctcccaggctttgaagggccacgctgtcaaacagaggtggatgagtgcctgagtgacccatgtcccgttggagccagctgccttgatcttccaggagccttcttttgcctctgcccctctggtttcacaggccagctctgtgaggttcccctgtgtgctcccaacctgtgccagcccaagcagatatgtaaggaccagaaagacaaggccaactgcctctgtcctgatggaagccctggctgtgccccacctgaggacaactgcacctgccaccacgggcactgccagagatcctcatgtgtgtgtgacgtgggttggacggggccagagtgtgaggcagagctagggggctgcatctctgcaccctgtgcccatggggggacctgctacccccagccctctggctacaactgcacctgccctacaggctacacaggacccacctgtagtgaggagatgacagcttgtcactcagggccatgtctcaatggcggctcctgcaaccctagccctggaggctactactgcacctgccctccaagccacacagggccccagtgccaaaccagcactgactactgtgtgtctgccccgtgcttcaatgggggtacctgtgtgaacaggcctggcaccttctcctgcctctgtgccatgggcttccagggcccgcgctgtgagggaaagctccgccccagctgtgcagacagcccctgtaggaatagggcaacctgccaggacagccctcagggtccccgctgcctctgccccactgtctacaccggaggcagctgccagactctgatggacttatgtgcccagaagccctgcccacgcaattcccactgcctccagactgggccctccttccactgcttgtgcctccagggatggaccgggcctctctgcaaccttccactgtcctcctgccagaaggctgcactgagccaaggcatagacgtctcttccctttgccacaatggaggcctctgtgtcgacagcggcccctcctatttctgccactgcccccctggattccaaggcagcctgtgccaggatcacgtgaacccatgtgagtccaggccttgccagaacggggccacctgcatggcccagcccagtgggtatctctgccagtgtgccccaggctacgatggacagaactgctcaaaggaactcgatgcttgtcagtcccaaccctgtcacaaccatggaacctgtactcccaaacctggaggcttccactgtgcctgccctccaggctttgtggggctacgctgtgagggagacgtggacgagtgtctggaccagccctgccaccccacaggcactgcagcctgccactctctggccaatgccttctactgccagtgtctgcctggacacacaggccagtggtgtgaggtggagatagacccctgccacagccaaccctgctttcatggagggacctgtgaggccacagcaggatcacccctgggtttcatctgccactgccccaagggttttgaaggccccacctgcagccacagggccccttcctgcggcttccatcactgccaccacggaggcctgtgtctgccctcccctaagccaggcttcccaccacgctgtgcctgcctcagtggctatgggggtcctgactgcctgaccccaccagctcctaaaggctgtggccctccctccccatgcctatacaatggcagctgctcagagaccacgggcttggggggcccaggctttcgatgctcctgccctcacagctctccagggccccggtgtcagaaacccggagccaaggggtgtgagggcagaagtggagatggggcctgcgatgctggctgcagtggcccgggaggaaactgggatggaggggactgctctctgggagtcccagacccctggaagggctgcccctcccactctcggtgctggcttctcttccgggacgggcagtgccacccacagtgtgactctgaagagtgtctgtttgatggctacgactgtgagacccctccagcctgcactccagcctatgaccagtactgccatgatcacttccacaacgggcactgtgagaaaggctgcaacactgcagagtgtggctgggatggaggtgactgcaggcctgaagatggggacccagagtgggggccctccctggccctgctggtggtactgagccccccagccctagaccagcagctgtttgccctggcccgggtgctgtccctgactctgagggtaggactctgggtaaggaaggatcgtgatggcagggacatggtgtacccctatcctggggcccgggctgaagaaaagctaggaggaactcgggaccccacctatcaggagagagcagcccctcaaacgcagcccctgggcaaggagaccgactccctcagtgctgggtttgtggtggtcatgggtgtggatttgtcccgctgtggccctgaccacccggcatcccgctgtccctgggaccctgggcttctactccgcttccttgctgcgatggctgcagtgggagccctggagcccctgctgcctggaccactgctggctgtccaccctcatgcagggaccgcaccccctgccaaccagcttccctggcctgtgctgtgctccccagtggccggggtgattctcctggccctaggggctcttctcgtcctccagctcatccggcgtcgacgccgagagcatggagctctctggctgccccctggtttcactcgacggcctcggactcagtcagctccccaccgacgccggcccccactaggcgaggacagcattggtctcaaggcactgaagccaaaggcagaagttgatgaggatggagttgtgatgtgctcaggccctgaggagggagaggaggtgggccaggctgaagaaacaggcccaccctccacgtgccagctctggtctctgagtggtggctgtggggcgctccctcaggcagccatgctaactcctccccaggaatctgagatggaagcccctgacctggacacccgtggacctgatggggtgacacccctgatgtcagcagtttgctgtggggaagtacagtccgggaccttccaaggggcatggttgggatgtcctgagccctgggaacctctgctggatggaggggcctgtccccaggctcacaccgtgggcactggggagacccccctgcacctggctgcccgattctcccggccaaccgctgcccgccgcctccttgaggctggagccaaccccaaccagccagaccgggcagggcgcacaccccttcatgctgctgtggctgctgatgctcgggaggtctgccagcttctgctccgtagcagacaaactgcagtggacgctcgcacagaggacgggaccacacccttgatgctggctgccaggctggcggtggaagacctggttgaagaactgattgcagcccaagcagacgtgggggccagagataaatgggggaaaactgcgctgcactgggctgctgccgtgaacaacgcccgagccgcccgctcgcttctccaggccggagccgataaagatgcccaggacaacagggagcagacgccgctattcctggcggcgcgggaaggagcggtggaagtagcccagctactgctggggctgggggcagcccgagagctgcgggaccaggctgggctagcgccggcggacgtcgctcaccaacgtaaccactgggatctgctgacgctgctggaaggggctgggccaccagaggcccgtcacaaagccacgccgggccgcgaggctgggcccttcccgcgcgcacggacggtgtcagtaagcgtgcccccgcatgggggcggggctctgccgcgctgccggacgctgtcagccggagcaggccctcgtgggggcggagcttgtctgcaggctcggacttggtccgtagacttggctgcgcgggggggcggggcctattctcattgccggagcctctcgggagtaggagcaggaggaggcccgacccctcgcggccgtaggttttctgcaggcatgcgcgggcctcggcccaaccctgcgataatgcgaggaagatacggagtggctgccgggcgcggaggcagggtctcaacggatgactggccctgtgattgggtggccctgggagcttgcggttctgcctccaacattccgatcccgcctccttgccttactccgtccccggagcggggatcacctcaacttgactgtggtcccccagccctccaagaaatgcccataaaccaaggaggagagggtaaaaaatagaagaatacatggtagggaggaattccaaaaatgattacccattaaaaggcaggctggaaggccttcctggttttaagatggatcccccaaaatgaagggttgtgagtttagtttctctcctaaaatgaatgtatgcccaccagagcagacatcttccacgtggagaagctgcagctctggaaagagggtttaagatgctaggatgaggcaggcccagtcctcctccagaaaataagacaggccacaggagggcagagtggagtggaaatacccctaagttggaaccaagaattgcaggcatatgggatgtaagatgttctttcctatatatggtttccaaagggtgcccctatgatccattgtccccactgcccacaaatggctgacaaatatttattgggcacctactatgtgccaggcactgtgtaggtgctgaaaagtggccaagggccacccccgctgatgactccttgcattccctcccctcacaacaaagaactccactgtggggatgaagcgcttcttctagccactgctatcgctatttaagaaccctaaatctgtcacccataataaagctgatttgaagtgtta

SEQ ID NO: 160140 - DNA, 6742 bp, Homo sapiens
  Payload ID: 11321
  Gene Symbol: NOTCH4
  Gene Name: notch 4
  ENST ID: ENST00000454571
  CDS Start-End: 140-6148
agacgtgaggcttgcagcaggccgaggaggaagaagaggggcagtgggagcagaggaggtggctcctgccccagtgagagctctgagggtccctgcctgaagagggacagggactggggcttggagaaggggctgtggaatgcagcccccttcactgctgctgctgctgctgctgctgctgctatgtgtctcagtggtcagacccagagggctgctgtgtgggagtttcccagaaccctgtgccaatggaggcacctgcctgagcctgtctctgggacaagggacctgccagtgtgcccctggcttcctgggtgagacgtgccagtttcctgacccctgccagaacgcccagctctgccaaaatggaggcagctgccaagccctgcttcccgctcccctagggctccccagctctccctctccattgacacccagcttcttgtgcacttgcctccctggcttcactggcgagagatgccaggcccagcttgaagacccttgtcctccctccttctgttccaaaaggggccgctgccacatccaggcctcgggccgcccacagtgctcctgcatgcctggatggacaggtgagcagtgccagcttcgggacttctgttcagccaacccatgtgttaatggaggggtgtgtctggccacatacccccagatccagtgccactgcccaccgggcttcgagggccatgcctgtgaacgtgatgtcaacgagtgcttccaggacccaggaccctgccccaaaggcacctcctgccataacaccctgggctccttccagtgcctctgccctgtggggcaggagggtccacgttgtgagctgcgggcaggaccctgccctcctaggggctgttcgaatgggggcacctgccagctgatgccagagaaagactccacctttcacctctgcctctgtcccccaggtttcataggcccagactgtgaggtgaatccagacaactgtgtcagccaccagtgtcagaatgggggcacttgccaggatgggctggacacctacacctgcctctgcccagaaacctggacaggctgggactgctccgaagatgtggatgagtgtgagacccagggtccccctcactgcagaaacgggggcacctgccagaactctgctggtagctttcactgcgtgtgtgtgagtggctggggcggcacaagctgtgaggagaacctggatgactgtattgctgccacctgtgccccgggatccacctgcattgaccgggtgggctctttctcctgcctctgcccacctggacgcacaggactcctgtgccacttggaagacatgtgtctgagccagccgtgccatggggatgcccaatgcagcaccaaccccctcacaggctccacactctgcctgtgtcagcctggctattcggggcccacctgccaccaggacctggacgagtgtctgatggcccagcaaggcccaagtccctgtgaacatggcggttcctgcctcaacactcctggctccttcaactgcctctgtccacctggctacacaggctcccgttgtgaggctgatcacaatgagtgcctctcccagccctgccacccaggaagcacctgtctggacctacttgccaccttccactgcctctgcccgccaggcttagaagggcagctctgtgaggtggagaccaacgagtgtgcctcagctccctgcctgaaccacgcggattgccatgacctgctcaacggcttccagtgcatctgcctgcctggattctccggcacccgatgtgaggaggatatcgatgagtgcagaagctctccctgtgccaatggtgggcagtgccaggaccagcctggagccttccactgcaagtgtctcccaggctttgaagggccacgctgtcaaacagaggtggatgagtgcctgagtgacccatgtcccgttggagccagctgccttgatcttccaggagccttcttttgcctctgcccctctggtttcacaggccagctctgtgaggttcccctgtgtgctcccaacctgtgccagcccaagcagatatgtaaggaccagaaagacaaggccaactgcctctgtcctgatggaagccctggctgtgccccacctgaggacaactgcacctgccaccacgggcactgccagagatcctcatgtgtgtgtgacgtgggttggacggggccagagtgtgaggcagagctagggggctgcatctctgcaccctgtgcccatggggggacctgctacccccagccctctggctacaactgcacctgccctacaggctacacaggacccacctgtagtgaggagatgacagcttgtcactcagggccatgtctcaatggcggctcctgcaaccctagccctggaggctactactgcacctgccctccaagccacacagggccccagtgccaaaccagcactgactactgtgtgtctgccccgtgcttcaatgggggtacctgtgtgaacaggcctggcaccttctcctgcctctgtgccatgggcttccagggcccgcgctgtgagggaaagctccgccccagctgtgcagacagcccctgtaggaatagggcaacctgccaggacagccctcagggtccccgctgcctctgccccactggctacaccggaggcagctgccagactctgatggacttatgtgcccagaagccctgcccacgcaattcccactgcctccagactgggccctccttccactgcttgtgcctccagggatggaccgggcctctctgcaaccttccactgtcctcctgccagaaggctgcactgagccaaggcatagacgtctcttccctttgccacaatggaggcctctgtgtcgacagcggcccctcctatttctgccactgcccccctggattccaaggcagcctgtgccaggatcacgtgaacccatgtgagtccaggccttgccagaacggggccacctgcatggcccagcccagtgggtatctctgccagtgtgccccaggctacgatggacagaactgctcaaaggaactcgatgcttgtcagtcccaaccctgtcacaaccatggaacctgtactcccaaacctggaggcttccactgtgcctgccctccaggctttgtggggctacgctgtgagggagacgtggacgagtgtctggaccagccctgccaccccacaggcactgcagcctgccactctctggccaatgccttctactgccagtgtctgcctggacacacaggccagtggtgtgaggtggagatagacccctgccacagccaaccctgctttcatggagggacctgtgaggccacagcaggatcacccctgggtttcatctgccactgccccaagggttttgaaggccccacctgcagccacagggccccttcctgcggcttccatcactgccaccacggaggcctgtgtctgccctcccctaagccaggcttcccaccacgctgtgcctgcctcagtggctatgggggtcctgactgcctgaccccaccagctcctaaaggctgtggccctccctccccatgcctatacaatggcagctgctcagagaccacgggcttggggggcccaggctttcgatgctcctgccctcacagctctccagggccccggtgtcagaaacccggagccaaggggtgtgagggcagaagtggagatggggcctgcgatgctggctgcagtggcccgggaggaaactgggatggaggggactgctctctgggagtcccagacccctggaagggctgcccctcccactctcggtgctggcttctcttccgggacgggcagtgccacccacagtgtgactctgaagagtgtctgtttgatggctacgactgtgagacccctccagcctgcactccagcctatgaccagtactgccatgatcacttccacaacgggcactgtgagaaaggctgcaacactgcagagtgtggctgggatggaggtgactgcaggcctgaagatggggacccagagtgggggccctccctggccctgctggtggtactgagccccccagccctagaccagcagctgtttgccctggcccgggtgctgtccctgactctgagggtaggactctgggtaaggaaggatcgtgatggcagggacatggtgtacccctatcctggggcccgggctgaagaaaagctaggaggaactcgggaccccacctatcaggagagagcagcccctcaaacacagcccctgggcaaggagaccgactccctcagtgctgggtttgtggtggtcatgggtgtggatttgtcccgctgtggccctgaccacccggcatcccgctgtccctgggaccctgggcttctactccgcttccttgctgcgatggctgcagtgggagccctggagcccctgctgcctggaccactgctggctgtccaccctcatgcagggaccgcaccccctgccaaccagcttccctggcctgtgctgtgctccccagtggccggggtgattctcctggccctaggggctcttctcgtcctccagctcatccggcgtcgacgccgagagcatggagctctctggctgccccctggtttcactcgacggcctcggactcagtcagctccccaccgacgccggcccccactaggcgaggacagcattggtctcaaggcactgaagccaaaggcagaagttgatgaggatggagttgtgatgtgctcaggccctgaggagggagaggaggtgggccaggctgaagaaacaggcccaccctccacgtgccagctctggtctctgagtggtggctgtggggcgctccctcaggcagccatgctaactcctccccaggaatctgagatggaagcccctgacctggacacccgtggacctgatggggtgacacccctgatgtcagcagtttgctgtggggaagtacagtccgggaccttccaaggggcatggttgggatgtcctgagccctgggaacctctgctggatggaggggcctgtccccaggctcacaccgtgggcactggggagacccccctgcacctggctgcccgattctcccggccaaccgctgcccgccgcctccttgaggctggagccaaccccaaccagccagaccgggcagggcgcacaccccttcatgctgctgtggctgctgatgctcgggaggtctgccagcttctgctccgtagcagacaaactgcagtggacgctcgcacagaggacgggaccacacccttgatgctggctgccaggctggcggtggaagacctggttgaagaactgattgcagcccaagcagacgtgggggccagagataaatgggggaaaactgcgctgcactgggctgctgccgtgaacaacgcccgagccgcccgctcgcttctccaggccggagccgataaagatgcccaggacaacagggagcagacgccgctattcctggcggcgcgggaaggagcggtggaagtagcccagctactgctggggctgggggcagcccgagagctgcgggaccaggctgggctagcgccggcggacgtcgctcaccaacgtaaccactgggatctgctgacgctgctggaaggggctgggccaccagaggcccgtcacaaagccacgccgggccgcgaggctgggcccttcccgcgcgcacggacggtgtcagtaagcgtgcccccgcatgggggcggggctctgccgcgctgccggacgctgtcagccggagcaggccctcgtgggggcggagcttgtctgcaggctcggacttggtccgtagacttggctgcgcgggggggcggggcctattctcattgccggagcctctcgggagtaggagcaggaggaggcccgacccctcgcggccgtaggttttctgcaggcatgcgcgggcctcggcccaaccctgcgataatgcgaggaagatacggagtggctgccgggcgcggaggcagggtctcaacggatgactggccctgtgattgggtggccctgggagcttgcggttctgcctccaacattccgatcccgcctccttgccttactccgtccccggagcggggatcacctcaacttgactgtggtcccccagccctccaagaaatgcccataaaccaaggaggagagggtaaaaaatagaagaatacatggtagggaggaattccaaaaatgattacccattaaaaggcaggctggaaggccttcctggttttaagatggatcccccaaaatgaagggttgtgagtttagtttctctcctaaaatgaatgtatgcccaccagagcagacatcttccacgtggagaagctgcagctctggaaagagggtttaagatgctaggatgaggcaggcccagtcctcctccagaaaataagacaggccacaggagggcagagtggagtggaaatacccctaagttggaaccaagaattgcaggcatatgggatgtaagatgttctttcctatatatggtttccaaagggtgcccctatgatccattgtccccactgcccacaaatggctgacaaatatttattgggcacctactatgtgccaggcactgtgtaggtgctgaaaagtggccaagggccacccccgctgatgactccttgcattccctcccctcacaacaaagaactccactgtggggatgaagcgcttcttctagccactgctatcgctatttaagaaccctaaatctgtcacccataataaagctgatttgaagtgtta

SEQ ID NO: 160141 - DNA, 3741 bp, Homo sapiens
  Payload ID: 11321
  Gene Symbol: NOTCH4
  Gene Name: notch 4
  Uniprot ID: Q99466
  ENST ID: ENST00000425600
  CDS Start-End: 1-3147
tgtgccccaggctacgatggacagaactgctcaaaggaactcgatgcttgtcagtcccaaccctgtcacaaccatggaacctgtactcccaaacctggaggcttccactgtgcctgccctccaggctttgtggggctacgctgtgagggagacgtggacgagtgtctggaccagccctgccaccccacaggcactgcagcctgccactctctggccaatgccttctactgccagtgtctgcctggacacacaggccagtggtgtgaggtggagatagacccctgccacagccaaccctgctttcatggagggacctgtgaggccacagcaggatcacccctgggtttcatctgccactgccccaagggttttgaaggccccacctgcagccacagggccccttcctgcggcttccatcactgccaccacggaggcctgtgtctgccctcccctaagccaggcttcccaccacgctgtgcctgcctcagtggctatgggggtcctgactgcctgaccccaccagctcctaaaggctgtggccctccctccccatgcctatacaatggcagctgctcagagaccacgggcttggggggcccaggctttcgatgctcctgccctcacagctctccagggccccggtgtcagaaacccggagccaaggggtgtgagggcagaagtggagatggggcctgcgatgctggctgcagtggcccgggaggaaactgggatggaggggactgctctctgggagtcccagacccctggaagggctgcccctcccactctcggtgctggcttctcttccgggacgggcagtgccacccacagtgtgactctgaagagtgtctgtttgatggctacgactgtgagacccctccagcctgcactccagcctatgaccagtactgccatgatcacttccacaacgggcactgtgagaaaggctgcaacactgcagagtgtggctgggatggaggtgactgcaggcctgaagatggggacccagagtgggggccctccctggccctgctggtggtactgagccccccagccctagaccagcagctgtttgccctggcccgggtgctgtccctgactctgagggtaggactctgggtaaggaaggatcgtgatggcagggacatggtgtacccctatcctggggcccgggctgaagaaaagctaggaggaactcgggaccccacctatcaggagagagcagcccctcaaacgcagcccctgggcaaggagaccgactccctcagtgctgggtttgtggtggtcatgggtgtggatttgtcccgctgtggccctgaccacccggcatcccgctgtccctgggaccctgggcttctactccgcttccttgctgcgatggctgcagtgggagccctggagcccctgctgcctggaccactgctggctgtccaccctcatgcagggaccgcaccccctgccaaccagcttccctggcctgtgctgtgctccccagtggccggggtgattctcctggccctaggggctcttctcgtcctccagctcatccggcgtcgacgccgagagcatggagctctctggctgccccctggtttcactcgacggcctcggactcagtcagctccccaccgacgccggcccccactaggcgaggacagcattggtctcaaggcactgaagccaaaggcagaagttgatgaggatggagttgtgatgtgctcaggccctgaggagggagaggaggtgggccaggctgaagaaacaggcccaccctccacgtgccagctctggtctctgagtggtggctgtggggcgctccctcaggcagccatgctaactcctccccaggaatctgagatggaagcccctgacctggacacccgtggacctgatggggtgacacccctgatgtcagcagtttgctgtggggaagtacagtccgggaccttccaaggggcatggttgggatgtcctgagccctgggaacctctgctggatggaggggcctgtccccaggctcacaccgtgggcactggggagacccccctgcacctggctgcccgattctcccggccaaccgctgcccgccgcctccttgaggctggagccaaccccaaccagccagaccgggcagggcgcacaccccttcatgctgctgtggctgctgatgctcgggaggtctgccagcttctgctccgtagcagacaaactgcagtggacgctcgcacagaggacgggaccacacccttgatgctggctgccaggctggcggtggaagacctggttgaagaactgattgcagcccaagcagacgtgggggccagagataaatgggggaaaactgcgctgcactgggctgctgccgtgaacaacgcccgagccgcccgctcgcttctccaggccggagccgataaagatgcccaggacaacagggagcagacgccgctattcctggcggcgcgggaaggagcggtggaagtagcccagctactgctggggctgggggcagcccgagagctgcgggaccaggctgggctagcgccggcggacgtcgctcaccaacgtaaccactgggatctgctgacgctgctggaaggggctgggccaccagaggcccgtcacaaagccacgccgggccgcgaggctgggcccttcccgcgcgcacggacggtgtcagtaagcgtgcccccgcatgggggcggggctctgccgcgctgccggacgctgtcagccggagcaggccctcgtgggggcggagcttgtctgcaggctcggacttggtccgtagacttggctgcgcgggggggcggggcctattctcattgccggagcctctcgggagtaggagcaggaggaggcccgacccctcgcggccgtaggttttctgcaggcatgcgcgggcctcggcccaaccctgcgataatgcgaggaagatacggagtggctgccgggcgcggaggcagggtctcaacggatgactggccctgtgattgggtggccctgggagcttgcggttctgcctccaacattccgatcccgcctccttgccttactccgtccccggagcggggatcacctcaacttgactgtggtcccccagccctccaagaaatgcccataaaccaaggaggagagggtaaaaaatagaagaatacatggtagggaggaattccaaaaatgattacccattaaaaggcaggctggaaggccttcctggttttaagatggatcccccaaaatgaagggttgtgagtttagtttctctcctaaaatgaatgtatgcccaccagagcagacatcttccacgtggagaagctgcagctctggaaagagggtttaagatgctaggatgaggcaggcccagtcctcctccagaaaataagacaggccacaggagggcagagtggagtggaaatacccctaagttggaaccaagaattgcaggcatatgggatgtaagatgttctttcctatatatggtttccaaagggtgcccctatgatccattgtccccactgcccacaaatggctgacaaatatttattgggcacctactatgtgccaggcactgtgtaggtgctgaaaagtggccaagggccacccccgctgatgactccttgcattccctcccctcacaacaaagaactccactgtggggatgaagcgcttcttctagccactgctatcgctatttaagaaccctaaatctgtcacccataataaagctgatttgaagtgtta

SEQ ID NO: 160142 - DNA, 6745 bp, Homo sapiens
  Payload ID: 11321
  Gene Symbol: NOTCH4
  Gene Name: notch 4
  Uniprot ID: Q99466
  ENST ID: ENST00000457094
  CDS Start-End: 140-6151
agacgtgaggcttgcagcaggccgaggaggaagaagaggggcagtgggagcagaggaggtggctcctgccccagtgagagctctgagggtccctgcctgaagagggacagggaccggggcttggagaaggggctgtggaatgcagcccccttcactgctgctgctgctgctgctgctgctgctgctatgtgtctcagtggtcagacccagagggctgctgtgtgggagtttcccagaaccctgtgccaatggaggcacctgcctgagcctgtctctgggacaagggacctgccagtgtgcccctggcttcctgggtgagacgtgccagtttcctgacccctgccagaacgcccagctctgccaaaatggaggcagctgccaagccctgcttcccgctcccctagggctccccagctctccctctccattgacacccagcttcttgtgcacttgcctccctggcttcactggtgagagatgccaggccaagcttgaagacccttgtcctccctccttctgttccaaaaggggccgctgccacatccaggcctcgggccgcccacagtgctcctgcatgcctggatggacaggtgagcagtgccagcttcgggacttctgttcagccaacccatgtgttaatggaggggtgtgtctggccacatacccccagatccagtgccactgcccaccgggcttcgagggccatgcctgtgaacgtgatgtcaacgagtgcttccaggacccaggaccctgccccaaaggcacctcctgccataacaccctgggctccttccagtgcctctgccctgtggggcaggagggtccacgttgtgagctgcgggcaggaccctgccctcctaggggctgttcgaatgggggcacctgccagctgatgccagagaaagactccacctttcacctctgcctctgtcccccaggtttcataggcccagactgtgaggtgaatccagacaactgtgtcagccaccagtgtcagaatgggggcacttgccaggatgggctggacacctacacctgcctctgcccagaaacctggacaggctgggactgctccgaagatgtggatgagtgtgagacccagggtccccctcactgcagaaacgggggcacctgccagaactctgctggtagctttcactgcgtgtgtgtgagtggctggggcggcacaagctgtgaggagaacctggatgactgtattgctgccacctgtgccccgggatccacctgcattgaccgggtgggctctttctcctgcctctgcccacctggacgcacaggactcctgtgccacttggaagacatgtgtctgagccagccgtgccatggggatgcccaatgcagcaccaaccccctcacaggctccacactctgcctgtgtcagcctggctattcggggcccacctgccaccaggacctggacgagtgtctgatggcccagcaaggcccaagtccctgtgaacatggcggttcctgcctcaacactcctggctccttcaactgcctctgtccacctggctacacaggctcccgttgtgaggctgatcacaatgagtgcctctcccagccctgccacccaggaagcacctgtctggacctacttgccaccttccactgcctctgcccgccaggcttagaagggcagctctgtgaggtggagaccaacgagtgtgcctcagctccctgcctgaaccacgcggattgccatgacctgctcaacggcttccagtgcatctgcctgcctggattctccggcacccgatgtgaggaggatatcgatgagtgcagaagctctccctgtgccaatggtgggcagtgccaggaccagcctggagccttccactgcaagtgtctcccaggctttgaagggccacgctgtcaaacagaggtggatgagtgcctgagtgacccatgtcccgttggagccagctgccttgatcttccaggagccttcttttgcctctgcccctctggtttcacaggccagctctgtgaggttcccctgtgtgctcccaacctgtgccagcccaagcagatatgtaaggaccagaaagacaaggccaactgcctctgtcctgatggaagccctggctgtgccccacctgaggacaactgcacctgccaccacgggcactgccagagatcctcatgtgtgtgtgacgtgggttggacggggccagagtgtgaggcagagctagggggctgcatctctgcaccctgtgcccatggggggacctgctacccccagccctctggctacaactgcacctgccctacaggctacacaggacccacctgtagtgaggagatgacagcttgtcactcagggccatgtctcaatggcggctcctgcaaccctagccctggaggctactactgcacctgccctccaagccacacagggccccagtgccaaaccagcactgactactgtgtgtctgccccgtgcttcaatgggggtacctgtgtgaacaggcctggcaccttctcctgcctctgtgccatgggcttccagggcccgcgctgtgagggaaagctccgccccagctgtgcagacagcccctgtaggaatagggcaacctgccaggacagccctcagggtccccgctgcctctgccccactggctacaccggaggcagctgccagactctgatggacttatgtgcccagaagccctgcccacgcaattcccactgcctccagactgggccctccttccactgcttgtgcctccagggatggaccgggcctctctgcaaccttccactgtcctcctgccagaaggctgcactgagccaaggcatagacgtctcttccctttgccacaatggaggcctctgtgtcgacagcggcccctcctatttctgccactgcccccctggattccaaggcagcctgtgccaggatcacgtgaacccatgtgagtccaggccttgccagaacggggccacctgcatggcccagcccagtgggtatctctgccagtgtgccccaggctacgatggacagaactgctcaaaggaactcgatgcttgtcagtcccaaccctgtcacaaccatggaacctgtactcccaaacctggaggcttccactgtgcctgccctccaggctttgtggggctacgctgtgagggagacgtggacgagtgtctggaccagccctgccaccccacaggcactgcagcctgccactctctggccaatgccttctactgccagtgtctgcctggacacacaggccagtggtgtgaggtggagatagacccctgccacagccaaccctgctttcatggagggacctgtgaggccacagcaggatcacccctgggtttcatctgccactgccccaagggttttgaaggccccacctgcagccacagggccccttcctgcggcttccatcactgccaccacggaggcctgtgtctgccctcccctaagccaggcttcccaccacgctgtgcctgcctcagtggctatgggggtcctgactgcctgaccccaccagctcctaaaggctgtggccctccctccccatgcctatacaatggcagctgctcagagaccacgggcttggggggcccaggctttcgatgctcctgccctcacagctctccagggccccggtgtcagaaacccggagccaaggggtgtgagggcagaagtggagatggggcctgcgatgctggctgcagtggcccgggaggaaactgggatggaggggactgctctctgggagtcccagacccctggaagggctgcccctcccactctcggtgctggcttctcttccgggacgggcagtgccacccacagtgtgactctgaagagtgtctgtttgatggctacgactgtgagacccctccagcctgcactccagcctatgaccagtactgccatgatcacttccacaacgggcactgtgagaaaggctgcaacactgcagagtgtggctgggatggaggtgactgcaggcctgaagatggggacccagagtgggggccctccctggccctgctggtggtactgagccccccagccctagaccagcagctgtttgccctggcccgggtgctgtccctgactctgagggtaggactctgggtaaggaaggatcgtgatggcagggacatggtgtacccctatcctggggcccgggctgaagaaaagctaggaggaactcgggaccccacctatcaggagagagcagcccctcaaacgcagcccctgggcaaggagaccgactccctcagtgctgggtttgtggtggtcatgggtgtggatttgtcccgctgtggccctgaccacccggcatcccgctgtccctgggaccctgggcttctactccgcttccttgctgcgatggctgcagtgggagccctggagcccctgctgcctggaccactgctggctgtccaccctcatgcagggaccgcaccccctgccaaccagcttccctggcctgtgctgtgctccccagtggccggggtgattctcctggccctaggggctcttctcgtcctccagctcatccggcgtcgacgccgagagcatggagctctctggctgccccctggtttcactcgacggcctcggactcagtcagctccccaccgacgccggcccccactaggcgaggacagcattggtctcaaggcactgaagccaaaggcagaagttgatgaggatggagttgtgatgtgctcaggccctgaggagggagaggaggtgggccaggctgaagaaacaggcccaccctccacgtgccagctctggtctctgagtggtggctgtggggcgctccctcaggcagccatgctaactcctccccaggaatctgagatggaagcccctgacctggacacccgtggacctgatggggtgacacccctgatgtcagcagtttgctgtggggaagtacagtccgggaccttccaaggggcatggttgggatgtcctgagccctgggaacctctgctggatggaggggcctgtccccaggctcacaccgtgggcactggggagacccccctgcacctggctgcccgattctcccggccaaccgctgcccgccgcctccttgaggctggagccaaccccaaccagccagaccgggcagggcgcacaccccttcatgctgctgtggctgctgatgctcgggaggtctgccagcttctgctccgtagcagacaaactgcagtggacgctcgcacagaggacgggaccacacccttgatgctggctgccaggctggcggtggaagacctggttgaagaactgattgcagcccaagcagacgtgggggccagagataaatgggggaaaactgcgctgcactgggctgctgccgtgaacaacgcccgagccgcccgctcgcttctccaggccggagccgataaagatgcccaggacaacagggagcagacgccgctattcctggcggcgcgggaaggagcggtggaagtagcccagctactgctggggctgggggcagcccgagagctgcgggaccaggctgggctagcgccggcggacgtcgctcaccaacgtaaccactgggatctgctgacgctgctggaaggggctgggccaccagaggcccgtcacaaagccacgccgggccgcgaggctgggcccttcccgcgcgcacggacggtgtcagtaagcgtgcccccgcatgggggcggggctctgccgcgctgccggacgctgtcagccggagcaggccctcgtgggggcggagcttgtctgcaggctcggacttggtccgtagacttggctgcgcgggggggcggggcctattctcattgccggagcctctcgggagtaggagcaggaggaggcccgacccctcgcggccgtaggttttctgcaggcatgcgcgggcctcggcccaaccctgcgataatgcgaggaagatacggagtggctgccgggcgcggaggcagggtctcaacggatgactggccctgtgattgggtggccctgggagcttgcggttctgcctccaacattccgatcccgcctccttgccttactccgtccccggagcggggatcacctcaacttgactgtggtcccccagccctccaagaaatgcccataaaccaaggaggagagggtaaaaaatagaagaatacatggtagggaggaattccaaaaatgattacccattaaaaggcaggctggaaggccttcctggttttaagatggatcccccaaaatgaagggttgtgagtttagtttctctcctaaaatgaatgtatgcccaccagagcagacatcttccacgtggagaagctgcagctctggaaagagggtttaagatgctaggatgaggcaggcccagtcctcctccagaaaataagacaggccacaggagggcagagtggagtggaaatacccctaagttggaaccaagaattgcaggcatatgggatgtaagatgttctttcctatatatggtttccaaagggtgcccctatgatccattgtccccactgcccacaaatggctgacaaatatttattgggcacctactatgtgccaggcactgtgtaggtgctgaaaagtggccaagggccacccccgctgatgactccttgcattccctcccctcacaacaaagaactccactgtggggatgaagcgcttcttctagccactgctatcgctatttaagaaccctaaatctgtcacccataataaagctgatttgaagtgtta

SEQ ID NO: 160143 - DNA, 6745 bp, Homo sapiens
  Payload ID: 11321
  Gene Symbol: NOTCH4
  Gene Name: notch 4
  Uniprot ID: Q99466
  ENST ID: ENST00000439349
  CDS Start-End: 140-6151
agacgtgaggcttgcagcaggccgaggaggaagaagaggggcagtgggagcagaggaggtggctcctgccccagtgagagctctgagggtccctgcctgaagagggacagggaccggggcttggagaaggggctgtggaatgcagcccccttcactgctgctgctgctgctgctgctgctgctgctatgtgtctcagtggtcagacccagagggctgctgtgtgggagtttcccagaaccctgtgccaatggaggcacctgcctgagcctgtctctgggacaagggacctgccagtgtgcccctggcttcctgggtgagacgtgccagtttcctgacccctgccagaacgcccagctctgccaaaatggaggcagctgccaagccctgcttcccgctcccctagggctccccagctctccctctccattgacacccagcttcttgtgcacttgcctccctggcttcactggcgagagatgccaggcccagcttgaagacccttgtcctccctccttctgttccaaaaggggccgctgccacatccaggcctcgggccgcccacagtgctcctgcatgcctggatggacaggtgagcagtgccagcttcgggacttctgttcagccaacccatgtgttaatggaggggtgtgtctggccacatacccccagatccagtgccactgcccaccgggcttcgagggccatgcctgtgaacgtgatgtcaacgagtgcttccaggacccaggaccctgccccaaaggcacctcctgccataacaccctgggctccttccagtgcctctgccctgtggggcaggagggtccacgttgtgagctgcgggcaggaccctgccctcctaggggctgttcgaatgggggcacctgccagctgatgccagagaaagactccacctttcacctctgcctctgtcccccaggtttcataggcccagactgtgaggtgaatccagacaactgtgtcagccaccagtgtcagaatgggggcacttgccaggatgggctggacacctacacctgcctctgcccagaaacctggacaggctgggactgctccgaagatgtggatgagtgtgagacccagggtccccctcactgcagaaacgggggcacctgccagaactctgctggtagctttcactgcgtgtgtgtgagtggctggggcggcacaagctgtgaggagaacctggatgactgtattgctgccacctgtgccccgggatccacctgcattgaccgggtgggctctttctcctgcctctgcccacctggacgcacaggactcctgtgccacttggaagacatgtgtctgagccagccgtgccatggggatgcccaatgcagcaccaaccccctcacaggctccacactctgcctgtgtcagcctggctattcggggcccacctgccaccaggacctggacgagtgtctgatggcccagcaaggcccaagtccctgtgaacatggcggttcctgcctcaacactcctggctccttcaactgcctctgtccacctggctacacaggctcccgttgtgaggctgatcacaatgagtgcctctcccagccctgccacccaggaagcacctgtctggacctacttgccaccttccactgcctctgcccgccaggcttagaagggcagctctgtgaggtggagaccaacgagtgtgcctcagctccctgcctgaaccacgcggattgccatgacctgctcaacggcttccagtgcatctgcctgcctggattctccggcacccgatgtgaggaggatatcgatgagtgcagaagctctccctgtgccaatggtgggcagtgccaggaccagcctggagccttccactgcaagtgtctcccaggctttgaagggccacgctgtcaaacagaggtggatgagtgcctgagtgacccatgtcccgttggagccagctgccttgatcttccaggagccttcttttgcctctgcccctctggtttcacaggccagctctgtgaggttcccctgtgtgctcccaacctgtgccagcccaagcagatatgtaaggaccagaaagacaaggccaactgcctctgtcctgatggaagccctggctgtgccccacctgaggacaactgcacctgccaccacgggcactgccagagatcctcatgtgtgtgtgacgtgggttggacggggccagagtgtgaggcagagctagggggctgcatctctgcaccctgtgcccatggggggacctgctacccccagccctctggctacaactgcacctgccctacaggctacacaggacccacctgtagtgaggagatgacagcttgtcactcagggccatgtctcaatggcggctcctgcaaccctagccctggaggctactactgcacctgccctccaagccacacagggccccagtgccaaaccagcactgactactgtgtgtctgccccgtgcttcaatgggggtacctgtgtgaacaggcctggcaccttctcctgcctctgtgccatgggcttccagggcccgcgctgtgagggaaagctccgccccagctgtgcagacagcccctgtaggaatagggcaacctgccaggacagccctcagggtccccgctgcctctgccccactggctacaccggaggcagctgccagactctgatggacttatgtgcccagaagccctgcccacgcaattcccactgcctccagactgggccctccttccactgcttgtgcctccagggatggaccgggcctctctgcaaccttccactgtcctcctgccagaaggctgcactgagccaaggcatagacgtctcttccctttgccacaatggaggcctctgtgtcgacagcggcccctcctatttctgccactgcccccctggattccaaggcagcctgtgccaggatcacgtgaacccatgtgagtccaggccttgccagaacggggccacctgcatggcccagcccagtgggtatctctgccagtgtgccccaggctacgatggacagaactgctcaaaggaactcgatgcttgtcagtcccaaccctgtcacaaccatggaacctgtactcccaaacctggaggcttccactgtgcctgccctccaggctttgtggggctacgctgtgagggagacgtggacgagtgtctggaccagccctgccaccccacaggcactgcagcctgccactctctggccaatgccttctactgccagtgtctgcctggacacacaggccagtggtgtgaggtggagatagacccctgccacagccaaccctgctttcatggagggacctgtgaggccacagcaggatcacccctgggtttcatctgccactgccccaagggttttgaaggccccacctgcagccacagggccccttcctgcggcttccatcactgccaccacggaggcctgtgtctgccctcccctaagccaggcttcccaccacgctgtgcctgcctcagtggctatgggggtcctgactgcctgaccccaccagctcctaaaggctgtggccctccctccccatgcctatacaatggcagctgctcagagaccacgggcttggggggcccaggctttcgatgctcctgccctcacagctctccagggccccggtgtcagaaacccggagccaaggggtgtgagggcagaagtggagatggggcctgcgatgctggctgcagtggcccgggaggaaactgggatggaggggactgctctctgggagtcccagacccctggaagggctgcccctcccactctcggtgctggcttctcttccgggacgggcagtgccacccacagtgtgactctgaagagtgtctgtttgatggctacgactgtgagacccctccagcctgcactccagcctatgaccagtactgccatgatcacttccacaacgggcactgtgagaaaggctgcaacactgcagagtgtggctgggatggaggtgactgcaggcctgaagatggggacccagagtgggggccctctctggccctgctggtggtactgagccccccagccctagaccagcagctgtttgccctggcccgggtgctgtccctgactctgagggtaggactctgggtaaggaaggatcgtgatggcagggacatggtgtacccctatcctggggcccgggctgaagaaaagctaggaggaactcgggaccccacctatcaggagagagcagcccctcaaacgcagcccctgggcaaggagaccgactccctcagtgctgggtttgtggtggtcatgggtgtggatttgtcccgctgtggccctgaccacccggcatcccgctgtccctgggaccctgggcttctactccgcttccttgctgcgatggctgcagtgggagccctggagcccctgctgcctggaccactgctggctgtccaccctcatgcagggaccgcaccccctgccaaccagcttccctggcctgtgctgtgctccccagtggccggggtgattctcctggccctaggggctcttctcgtcctccagctcatccggcgtcgacgccgagagcatggagctctctggctgccccctggtttcactcgacggcctcggactcagtcagctccccaccgacgccggcccccactaggcgaggacagcattggtctcaaggcactgaagccaaaggcagaagttgatgaggatggagttgtgatgtgctcaggccctgaggagggagaggaggtgggccaggctgaagaaacaggcccaccctccacgtgccagctctggtctctgagtggtggctgtggggcgctccctcaggcagccatgctaactcctccccaggaatctgagatggaagcccctgacctggacacccgtggacctgatggggtgacacccctgatgtcagcagtttgctgtggggaagtacagtccgggaccttccaaggggcatggttgggatgtcctgagccctgggaacctctgctggatggaggggcctgtccccaggctcacaccgtgggcactggggagacccccctgcacctggctgcccgattctcccggccaaccgctgcccgccgcctccttgaggctggagccaaccccaaccagccagaccgggcagggcgcacaccccttcatgctgctgtggctgctgatgctcgggaggtctgccagcttctgctccgtagcagacaaactgcagtggacgctcgcacagaggacgggaccacacccttgatgctggctgccaggctggcggtggaagacctggttgaagaactgattgcagcccaagcagacgtgggggccagagataaatgggggaaaactgcgctgcactgggctgctgccgtgaacaacgcccgagccgcccgctcgcttctccaggccggagccgataaagatgcccaggacaacagggagcagacgccgctattcctggcggcgcgggaaggagcggtggaagtagcccagctactgctggggctgggggcagcccgagagctgcgggaccaggctgggctagcgccggcggacgtcgctcaccaacgtaaccactgggatctgctgacgctgctggaaggggctgggccaccagaggcccgtcacaaagccacgccgggccgcgaggctgggcccttcccgcgcgcacggacggtgtcagtaagcgtgcccccgcatgggggcggggctctgccgcgctgccggacgctgtcagccggagcaggccctcgtgggggcggagcttgtctgcaggctcggacttggtccgtagacttggctgcgcgggggggcggggcctattctcattgccggagcctctcgggagtaggagcaggaggaggcccgacccctcgcggccgtaggttttctgcaggcatgcgcgggcctcggcccaaccctgcgataatgcgaggaagatacggagtggctgccgggcgcggaggcagggtctcaacggatgactggccctgtgattgggtggccctgggagcttgcggttctgcctccaacattccgatcccgcctccttgccttactccgtccccggagcggggatcacctcaacttgactgtggtcccccagccctccaagaaatgcccataaaccaaggaggagagggtaaaaaatagaagaatacatggtagggaggaattccaaaaatgattacccattaaaaggcaggctggaaggccttcctggttttaagatggatcccccaaaatgaagggttgtgagtttagtttctctcctaaaatgaatgtatgcccaccagagcagacatcttccacgtggagaagctgcagctctggaaagagggtttaagatgctaggatgaggcaggcccagtcctcctccagaaaataagacaggccacaggagggcagagtggagtggaaatacccctaagttggaaccaagaattgcaggcatatgggatgtaagatgttctttcctatatatggtttccaaagggtgcccctatgatccattgtccccactgcccacaaatggctgacaaatatttattgggcacctactatgtgccaggcactgtgtaggtgctgaaaagtggccaagggccacccccgctgatgactccttgcattccctcccctcacaacaaagaactccactgtggggatgaagcgcttcttctagccactgctatcgctatttaagaaccctaaatctgtcacccataataaagctgatttgaagtgtta

SEQ ID NO: 160144 - DNA, 6751 bp, Homo sapiens
  Payload ID: 11321
  Gene Symbol: NOTCH4
  Gene Name: notch 4
  ENST ID: ENST00000437843
  CDS Start-End: 140-6157
agacgtgaggcttgcagcaggccgaggaggaagaagaggggcagtgggagcagaggaggtggctcctgccccagtgagagctctgagggtccctgcctgaagagggacagggaccggggcttggagaaggggctgtggaatgcagcccccttcactgctgctgctgctgctgctgctgctgctgctgctgctatgtgtctcagtggtcagacccagagggctgctgtgtgggagtttcccagaaccctgtgccaatggaggcacctgcctgagcctgtctctgggacaagggacctgccagtgtgcccctggcttcctgggtgagacgtgccagtttcctgacccctgccagaacgcccagctctgccaaaatggaggcagctgccaagccctgcttcccgctcccctagggctccccagctctccctctccattgacacccagcttcttgtgcacttgcctccctggcttcactggcgagagatgccaggcccagcttgaagacccttgtcctccctccttctgttccaaaaggggccgctgccacatccaggcctcgggccgcccacagtgctcctgcatgcctggatggacaggtgagcagtgccagcttcgggacttctgttcagccaacccatgtgttaatggaggggtgtgtctggccacatacccccagatccagtgccactgcccaccgggcttcgagggccatgcctgtgaacgtgatgtcaacgagtgcttccaggacccaggaccctgccccaaaggcacctcctgccataacaccctgggctccttccagtgcctctgccctgtggggcaggagggtccacgttgtgagctgcgggcaggaccctgccctcctaggggctgttcgaatgggggcacctgccagctgatgccagagaaagactccacctttcacctctgcctctgtcccccaggtttcataggcccagactgtgaggtgaatccagacaactgtgtcagccaccagtgtcagaatgggggcacttgccaggatgggctggacacctacacctgcctctgcccagaaacctggacaggctgggactgctccgaagatgtggatgagtgtgaggcccagggtccccctcactgcagaaacgggggcacctgccagaactctgctggtagctttcactgcgtgtgtgtgagtggctggggcggcacaagctgtgaggagaacctggatgactgtattgctgccacctgtgccccgggatccacctgcattgaccgggtgggctctttctcctgcctctgcccacctggacgcacaggactcctgtgccacttggaagacatgtgtctgagccagccgtgccatggggatgcccaatgcagcaccaaccccctcacaggctccacactctgcctgtgtcagcctggctattcggggcccacctgccaccaggacctggacgagtgtctgatggcccagcaaggcccaagtccctgtgaacatggcggttcctgcctcaacactcctggctccttcaactgcctctgtccacctggctacacaggctcccgttgtgaggctgatcacaatgagtgcctctcccagccctgccacccaggaagcacctgtctggacctacttgccaccttccactgcctctgcccgccaggcttagaagggcagctctgtgaggtggagaccaacgagtgtgcctcagctccctgcctgaaccacgcggattgccatgacctgctcaacggcttccagtgcatctgcctgcctggattctccggcacccgatgtgaggaggatatcgatgagtgcagaagctctccctgtgccaatggtgggcagtgccaggaccagcctggagccttccactgcaagtgtctcccaggctttgaagggccacgctgtcaaacagaggtggatgagtgcctgagtgacccatgtcccgttggagccagctgccttgatcttccaggagccttcttttgcctctgcccctctggtttcacaggccagctctgtgaggttcccctgtgtgctcccaacctgtgccagcccaagcagatatgtaaggaccagaaagacaaggccaactgcctctgtcctgatggaagccctggctgtgccccacctgaggacaactgcacctgccaccacgggcactgccagagatcctcatgtgtgtgtgacgtgggttggacggggccagagtgtgaggcagagctagggggctgcatctctgcaccctgtgcccatggggggacctgctacccccagccctctggctacaactgcacctgccctacaggctacacaggacccacctgtagtgaggagatgacagcttgtcactcagggccatgtctcaatggcggctcctgcaaccctagccctggaggctactactgcacctgccctccaagccacacagggccccagtgccaaaccagcactgactactgtgtgtctgccccgtgcttcaatgggggtacctgtgtgaacaggcctggcaccttctcctgcctctgtgccatgggcttccagggcccgcgctgtgagggaaagctccgccccagctgtgcagacagcccctgtaggaatagggcaacctgccaggacagccctcagggtccccgctgcctctgccccactggctacaccggaggcagctgccagactctgatggacttatgtgcccagaagccctgcccacgcaattcccactgcctccagactgggccctccttccactgcttgtgcctccagggatggaccgggcctctctgcaaccttccactgtcctcctgccagaaggctgcactgagccaaggcatagacgtctcttccctttgccacaatggaggcctctgtgtcgacagcggcccctcctatttctgccactgcccccctggattccaaggcagcctgtgccaggatcacgtgaacccatgtgagtccaggccttgccagaacggggccacctgcatggcccagcccagtgggtatctctgccagtgtgccccaggctacgatggacagaactgctcaaaggaactcgatgcttgtcagtcccaaccctgtcacaaccatggaacctgtactcccaaacctggaggcttccactgtgcctgccctccaggctttgtggggctacgctgtgagggagacgtggacgagtgtctggaccagccctgccaccccacaggcactgcagcctgccactctctggccaatgccttctactgccagtgtctgcctggacacacaggccagtggtgtgaggtggagatagacccctgccacagccaaccctgctttcatggagggacctgtgaggccacagcaggatcacccctgggtttcatctgccactgccccaagggttttgaaggccccacctgcagccacagggccccttcctgcggcttccatcactgccaccacggaggcctgtgtctgccctcccctaagccaggcttcccaccacgctgtgcctgcctcagtggctatgggggtcctgactgcctgaccccaccagctcctaaaggctgtggccctccctccccatgcctatacaatggcagctgctcagagaccacgggcttggggggcccaggctttcgatgctcctgccctcacagctctccagggccccggtgtcagaaacccggagccaaggggtgtgagggcagaagtggagatggggcctgcgatgctggctgcagtggcccgggaggaaactgggatggaggggactgctctctgggagtcccagacccctggaagggctgcccctcccactctcggtgctggcttctcttccgggacgggcagtgccacccacagtgtgactctgaagagtgtctgtttgatggctacgactgtgagacccctccagcctgcactccagcctatgaccagtactgccatgatcacttccacaacgggcactgtgagaaaggctgcaacactgcagagtgtggctgggatggaggtgactgcaggcctgaagatggggacccagagtgggggccctccctggccctgctggtggtactgagccccccagccctagaccagcagctgtttgccctggcccgggtgctgtccctgactctgagggtaggactctgggtaaggaaggatcgtgatggcagggacatggtgtacccctatcctggggcccgggctgaagaaaagctaggaggaactcgggaccccacctatcaggagagagcagcccctcaaacgcagcccctgggcaaggagaccgactccctcagtgctgggtttgtggtggtaatgggtgtggatttgtcccgctgtggccctgaccacccggcatcccgctgtccctgggaccctgggcttctactccgcttccttgctgcgatggctgcagtgggagccctggagcccctgctgcctggaccactgctggctgtccaccctcatgcagggaccgcaccccctgccaaccagcttccctggcctgtgctgtgctccccagtggccggggtgattctcctggccctaggggctcttctcgtcctccagctcatccggcgtcgacgccgagagcatggagctctctggctgccccctggtttcactcgacggcctcggactcagtcagctccccaccgacgccggcccccactaggcgaggacagcattggtctcaaggcactgaagccaaaggcagaagttgatgaggatggagttgtgatgtgctcaggccctgaggagggagaggaggtgggccaggctgaagaaacaggcccaccctccacgtgccagctctggtctctgagtggtggctgtggggcgctccctcaggcagccatgctaactcctccccaggaatctgagatggaagcccctgacctggacacccgtggacctgatggggtgacacccctgatgtcagcagtttgctgtggggaagtacagtccgggaccttccaaggggcatggttgggatgtcctgagccctgggaacctctgctggatggaggggcctgtccccaggctcacaccgtgggcactggggagacccccctgcacctggctgcccgattctcccggccaaccgctgcccgccgcctccttgaggctggagccaaccccaaccagccagaccgggcagggcgcacaccccttcatgctgctgtggctgctgatgctcgggaggtctgccagcttctgctccgtagcagacaaactgcagtggacgctcgcacagaggacgggaccacacccttgatgctggctgccaggctggcggtggaagacctggttgaagaactgattgcagcccaagcagacgtgggggccagagataaatgggggaaaactgcgctgcactgggctgctgccgtgaacaacgcccgagccgcccgctcgcttctccaggccggagccgataaagatgcccaggacaacagggagcagacgccgctattcctggcggcgcgggaaggagcggtggaagtagcccagctactgctggggctgggggcagcccgagagctgcgggaccaggctgggctagcgccggcggacgtcgctcaccaacgtaaccactgggatctgctgacgctgctggaaggggctgggccaccagaggcccgtcacaaagccacgccgggccgcgaggctgggcccttcccgcgcgcacggacggtgtcagtaagcgtgcccccgcatgggggcggggctctgccgcgctgccggacgctgtcagccggagcaggccctcgtgggggcggagcttgtctgcaggctcggacttggtccgtagacttggctgcgcgggggggcggggcctattctcattgccggagcctctcgggagtaggagcaggaggaggcccgacccctcgcggccgtaggttttctgcaggcatgcgcgggcctcggcccaaccctgcgataatgcgaggaagatacggagtggctgccgggcgcggaggcagggtctcaacggatgactggccctgtgattgggtggccctgggagcttgcggttctgcctccaacattccgatcccgcctccttgccttactccgtccccggagcggggatcacctcaacttgactgtggtcccccagccctccaagaaatgcccataaaccaaggaggagagggtaaaaaatagaagaatacatggtagggaggaattccaaaaatgattacccattaaaaggcaggctggaaggccttcctggttttaagatggatcccccaaaatgaagggttgtgagtttagtttctctcctaaaatgaatgtatgcccaccagagcagacatcttccacgtggagaagctgcagctctggaaagagggtttaagatgctaggatgaggcaggcccagtcctcctccagaaaataagacaggccacaggagggcagagtggagtggaaatacccctaagttggaaccaagaattgcaggcatatgggatgtaagatgttctttcctatatatggtttccaaagggtgcccctatgatccattgtccccactgcccacaaatggctgacaaatatttattgggcacctactatgtgccaggcactgtgtaggtgctgaaaagtggccaagggccacccccgctgatgactccttgcattccctcccctcacaacaaagaactccactgtggggatgaagcgcttcttctagccactgctatcgctatttaagaaccctaaatctgtcacccataataaagctgatttgaagtgtta

SEQ ID NO: 160145 - DNA, 1726 bp, Homo sapiens
  Payload ID: 11322
  Gene Symbol: NLE1
  Gene Name: notchless homolog 1 (Drosophila)
  ENST ID: ENST00000360831
  CDS Start-End: 29-1360
ctctttctcctccacgtggggacgcaggatggcggcagcagtgccggacgaggcggtggcgcgcgatgtgcagcggttgctagtgcagttccaggatgagggcgggcagctgctgggttccccgttcgacgtgcccgtggacatcaccccggacaggctgcagctcgtgtgcaacgcgctactggcccaggaggatcccctgccactggctttctttgtccacgatgctgagatcgtctcctcactggggaagacgttggagtcccaggcagtggagacagagaaggtcctagacatcatctaccagccacaggctatcttcagagtccgggctgtgactcgctgcaccagctccttggagggtcacagtgaggcagtcatttctgtggccttcagccctacgggaaagtacctggccagtggctctggagacaccaccattctcctctgggacccaagcacagggaagcaggtgggcaggaccctcgctggccacagcaagtggatcacaggcctgagctgggagcccctccatgcgaaccctgagtgccgctatgtggccagcagctccaaggatggcagtgtgcggatctgggacacaactgcaggccgctgtgagcgcatcctcaccgggcacacccagtcggtcacctgtctccggtggggaggggacgggcttctctactctgcctcccaggaccgcaccatcaaagtctggagagctcatgacggtgtgctgtgccggactctgcaaggccacggccactgggtgaacaccatggccctcagcactgactatgccctgcgcactggggcctttgaacctgctgaggcctcagttaatccccaagacctccaaggatccttgcaggagttgaaggagagggctctgagccgatacaacctcgtgcggggccagggtccagagaggctggtgtctggctccgacgacttcaccttattcctgtggtccccagcagaggacaaaaagcctctcactcggatgacaggacaccaagctctcatcaaccaggtgctcttctctcctgactcccgcatcgtggctagtgcctcctttgacaagtccatcaagctgtgggatggcaggacgggcaagtacctggcttccctacgcggccacgtggctgccgtgtaccagattgcgtggtcagctgacagtcggctcctggtcagcggcagcagtgacagcacactgaaggtgtgggatgtgaaggcccagaagctggccatggacctgcccggccacgcggatgaggtatatgctgttgactggagtccagatggccagagagtggcaagtggtgggaaggacaaatgcctccggatatggaggagatgagacggcccgaagttctctctgacccccacctcgactcggcctctgccagctgccttccctgccagagaacaaaggctgagatggcagtgcacacaccctccccaccagtggggacctgagaatgcgtgtggcctgctgtcctcgatagaccggaatggggttttcccacagatccccgcctgtggcacaccccagagccagaaatcgaaggtcacaggaagttgtcactgaacttggcccgtgtctgctactctgtaccttgctggtacagacaggggtggtgggcagccaggctctatgagtgggcccctagtgtcagctctgtacagggtcagatcccaggttctatgaccaaataagtaactt

SEQ ID NO: 160146 - DNA, 2588 bp, Homo sapiens
  Payload ID: 11322
  Gene Symbol: NLE1
  Gene Name: notchless homolog 1 (Drosophila)
  Uniprot ID: Q9NVX2
  ENST ID: ENST00000442241
  CDS Start-End: 41-1498
ctgtctgccgggctctttctcctccacgtggggacgcaggatggcggcagcagtgccggacgaggcggtggcgcgcgatgtgcagcggttgctagtgcagttccaggatgagggcgggcagctgctgggttccccgttcgacgtgcccgtggacatcaccccggacaggctgcagctcgtgtgcaacgcgctactggcccaggaggatcccctgccactggctttctttgtccacgatgctgagatcgtctcctcactggggaagacgttggagtcccaggcagtggagacagagaaggtcctagacatcatctaccagccacaggctatcttcagagtccgggctgtgactcgctgcaccagctccttggagggtcacagtgaggcagtcatttctgtggccttcagccctacgggaaagtacctggccagtggctctggagacaccaccgtgcgcttctgggatctcagcacagagacaccacatttcacatgcaagggacacagacactgggtccttagtatatcctggtctccagatggcaggaagctggcctcaggctgcaagaatggccagattctcctctgggacccaagcacagggaagcaggtgggcaggaccctcgctggccacagcaagtggatcacaggcctgagctgggagcccctccatgcgaaccctgagtgccgctatgtggccagcagctccaaggatggcagtgtgcggatctgggacacaactgcaggccgctgtgagcgcatcctcaccgggcacacccagtcggtcacctgtctccggtggggaggggacgggcttctctactctgcctcccaggaccgcaccatcaaagtctggagagctcatgacggtgtgctgtgccggactctgcaaggccacggccactgggtgaacaccatggccctcagcactgactatgccctgcgcactggggcctttgaacctgctgaggcctcagttaatccccaagacctccaaggatccttgcaggagttgaaggagagggctctgagccgatacaacctcgtgcggggccagggtccagagaggctggtgtctggctccgacgacttcaccttattcctgtggtccccagcagaggacaaaaagcctctcactcggatgacaggacaccaagctctcatcaaccaggtgctcttctctcctgactcccgcatcgtggctagtgcctcctttgacaagtccatcaagctgtgggatggcaggacgggcaagtacctggcttccctacgcggccacgtggctgccgtgtaccagattgcgtggtcagctgacagtcggctcctggtcagcggcagcagtgacagcacactgaaggtgtgggatgtgaaggcccagaagctggccatggacctgcccggccacgcggatgaggtatatgctgttgactggagtccagatggccagagagtggcaagtggtgggaaggacaaatgcctccggatatggaggagatgagacggcccgaagttctctctgacccccacctcgactcggcctctgccagctgccttccctgccagagaacaaaggctgagatggcagtgcacacaccctccccaccagtggggacctgagaatgcgtgtggcctgctgtcctcgatagaccggaatggggttttcccacagatccccgcctgtggcacaccccagagccagaaatcgaaggtcacaggaagttgtcactgaacttggcccgtgtctgctactctgtaccttgctggtacagacaggggtggtgggcagccaggctctatgagtgggcccctagtgtcagctctgtacagggtcagatcccaggttctatgaccaaataagtaacttaagttttgtgtgttgggttctaattccttgtcctagaatccccatgactcaatcaaggactgtgctaaatgagattgtccagcccccgcccttgcactggactacgccaaaaccacactgaccaggcacttgccttccctctcttcccccgtgttggtaagagagaggccagttgtgatagtggccaaggagaatctagggctgtattgttgtccactgcagtaggcaccggccacatgtgactgctggcatgaaatagaagtgcagttcctccatcgcactgggtaaggcctccagtattggacagcacacagaaaggttttcatcatcaagagagttctgctggtcagccctgctccaggggatgcctctgccttcgcatagcacactgcttgaggccctgccaggcaccaagcactgccctgggcccatgggatagagcggggaaggtgatggctcttccagaggattccctcagatggggaggcagcagtatgagctctgagcagaagtgggtattgttgatacagaggaagttctttgccacgagaactttcaagcagtgaaaggaattcccatcaggactcagaccccaggccgagatcttgccctgaatgtaccctgcctctgctttctcctgcatcccatgctaagcagggtcatggtctgaactactcagattggatttccaaaccatccttgtataaactgctcagaactagca

SEQ ID NO: 160147 - DNA, 580 bp, Homo sapiens
  Payload ID: 11322
  Gene Symbol: NLE1
  Gene Name: notchless homolog 1 (Drosophila)
  ENST ID: ENST00000588642
  CDS Start-End: 23-286
ctcctccacgtggggacgcaggatggcggcagcagtgccggacgaggcggtggcgcgcgatgtgcagcggttgctagtgcagttccaggatgagggcgggcagctgctgggttccccgttcgacgtgcccgtggacatcaccccggacaggctgcagctcgtgtgcaacgcgctactggcccaggtacctggccagtggctctggagacaccaccgtgcgcttctgggatctcagcacagagacaccacatttcacatgcaagggacacagacactgggtccttagtatatcctggtctccagatggcaggaagctggcctcaggctgcaagaatggccagattctcctctgggacccaagcacagggaagcaggtgggcaggaccctcgctggccacagcaagtggatcacaggcctgagctgggagcccctccatgcgaaccctgagtgccgctatgtggccagcagctccaaggatggcagtgtgcggatctgggacacaactgcaggccgctgtgagcgcatcctcaccgggcacacccagtcggtcacctgtctccggtggggaggggacgggct

SEQ ID NO: 160148 - DNA, 5286 bp, Homo sapiens
  Payload ID: 11322
  Gene Symbol: NLE1
  Gene Name: notchless homolog 1 (Drosophila)
  Uniprot ID: Q9NVX2
  ENST ID: ENST00000586869
  CDS Start-End: 1021-1602
ggacgcaggatggcggcagcagtgccggtgggtgtgcgtggatgggggcggggggcgtcgccgcggggcgctagggcccgggtccctgaggcctgagagaggcgaagtggggcccttctgggcgggcgaccagactgactcccgccccacttgctcgcgcaggacgaggcggtggcgcgcgatgtgcagcggttgctagtgcagttccaggatgagggcgggcagctgctgggttccccgttcgacgtgcccgtggacatcaccccggacaggctgcagctcgtgtgcaacgcgctactggcccaggaggatcccctgccactggctttctttgtccacgatgctgagatcgtctcctcactggggaagacgttggagtcccaggcagtggagacagagaaggtcctagacatcatctaccagccacaggctatcttcagagtccgggctgtgactcgctgcaccagctccttggagggtcacagtgaggcagtcatttctgtggccttcagccctacgggaaagtacctggccagtggctctggagacaccaccgtgcgcttctgggatctcagcacagagacaccacatttcacatgcaagggacacagacactgggtccttagtatatcctggtctccagatggcaggaagctggcctcaggctgcaagaatggccagattctcctctgggacccaagcacagggaagcaggtgggcaggaccctcgctggccacagcaagtggatcacaggcctgagctgggagcccctccatgcgaaccctgagtgccgctatgtggccagcagctccaaggatggcagtgtgcggatctgggacacaactgcaggccgctgtgagcgcatcctcaccgggcacacccagtcggtcacctgtctccggtggggaggggacgggcttctctactctgcctcccaggaccgcaccatcaaagtctggagagctcatgacggtgtgctgtgccggactctgcaaggccacggccactgggtgaacaccatggccctcagcactgactatgccctgcgcactggggcctttgaacctgctgaggcctcagttaatccccaagacctccaaggatccttgcaggagttgaaggagagggctctgagccgatacaacctcgtgcggggccagggtccagagaggctggtgtctggctccgacgacttcaccttattcctgtggtccccagcagaggacaaaaagcctctcactcggatgacaggacaccaagctctcatcaaccaggtgctcttctctcctgactcccgcatcgtggctagtgcctcctttgacaagtccatcaagctgtgggatggcaggacgggcaagtacctggcttccctacgcggccacgtggctgccgtgtaccagattgcgtggtcagctgacagtcggctcctggtcagcggcagcagtgacagcacactgaaggtgtgggatgtgaaggcccagaagctggccatggacctgcccggccacgcggatgaggtatatgctgttgactggagtccagatggccagagagtggcaagtggtgggaaggacaaatgcctccggatatggaggagatgagacggcccgaagttctctctgacccccacctcgactcggcctctgccagctgccttccctgccagagaacaaaggctgagatggcagtgcacacaccctccccaccagtggggacctgagaatgcgtgtggcctgctgtcctcgatagaccggaatggggttttcccacagatccccgcctgtggcacaccccagagccagaaatcgaaggtcacaggaagttgtcactgaacttggcccgtgtctgctactctgtaccttgctggtacagacaggggtggtgggcagccaggctctatgagtgggcccctagtgtcagctctgtacagggtcagatcccaggttctatgaccaaataagtaacttaagttttgtgtgttgggttctaattccttgtcctagaatccccatgactcaatcaaggactgtgctaaatgagattgtccagcccccgcccttgcactggactacgccaaaaccacactgaccaggcacttgccttccctctcttcccccgtgttggtaagagagaggccagttgtgatagtggccaaggagaatctagggctgtattgttgtccactgcagtaggcaccggccacatgtgactgctggcatgaaatagaagtgcagttcctccatcgcactgggtaaggcctccagtattggacagcacacagaaaggttttcatcatcaagagagttctgctggtcagccctgctccaggggatgcctctgccttcgcatagcacactgcttgaggccctgccaggcaccaagcactgccctgggcccatgggatagagcggggaaggtgatggctcttccagaggattccctcagatggggaggcagcagtatgagctctgagcagaagtgggtattgttgatacagaggaagttctttgccacgagaactttcaagcagtgaaaggaattcccatcaggactcagaccccaggccgagatcttgccctgaatgtaccctgcctctgctttctcctgcatcccatgctaagcagggtcatggtctgaactactcagattggatttccaaaccatccttgtataaactgctcagaactagcatcttgctccttcttaccctcctccacccttgtctgtgcttttgggttttgcgcgtcacctagctgtggtgcttggcctccaccttgcacatatctgcagtgaggctacataagaagcgaacaaaactatcagccactgagctccttggtgccagctgtttgtctgctgtgctctcagactgcaccaggcctggaaggttctcaagctccaaaacttttgatgaggaaacaacataagaaatgattagcccatgccctcacatctagtaagagaaagctgggattaaaccaggccctgccccaaagcttattgtgcactttgtaccacatccctccgtccagagctcaagctagtttgacagttcatgggccaccacgtctgtccatgacagctatttctgtatttttctggtgtaagagccttttagtcttagagcaccagtctccctgttcccctaccccgccccactggggaaggggtgatggcagcatcctattgcctagctgcctgttttctatctccccacccatgtagactctgtcctggtggaagctaggaggtgggtgccagccagcccatctgaggctgtctgcagcataaagcagactttagggtgctggatgacctgcagttctttaatgagggacctagacccagcccagatttggaggaggagggagtctagcagctgtgggcagtggctgagcctggcatggcctggcctgagatgcctccaggtgaatggggcccctatgtagccttggccccagcccaggggtggggtgcccataccactctgccagaccccgggcccgcagggtgctggtggtatggtaggtctcatggctctggtttctgagggcctggggttgaagctgaaagtaggtgaggggtgtcctggggccctcccccttaacagggaaataggtattccagatcctccagcctccgcatctcctccggcccgatggacacgatcttttgccggggttccttgcgccgcacggtgatctggatggggtagttctcaggaaagctgctgaagtcagtggccagggttgcaaactgaagtgaaacaagaaaacccttcagagttccttcccagatctgaacctggctctctctctgtctctatcaccccttttttttctgtctgctgactcagaccttaaacagccttatccaacctagccattgacgcaggaaacaggtgcaaagatgcatgactcaagcctgtacctcctcattatgggatatttccaaccaaagggctgtctgtactcaggcctctatacccccatacccctaccccatacccaggctgttcccttcttcgtccccctttagcctcttgtcttccctatttctttcaatgcccttgacttcccagcctactcacaatcatgggcactgaattgcagagtctaaaaaccaatggctttggaaggggaacattatagtgatgttgaaaaatacattcgtttgcattcctagtgggccccagagtggcttaatccttaaacctcccagaagcatgcattctggaattgatgcttcttgacccaggcagaaggaaagctagccagatgagtcatgtgggcataggggtgttcccaacctccaaagccctggttccctggctttggacttctctccacccccaaggcccctcttttcccagggctcactttgtagggcttgcaccacttccccaccccagctgtgttggctgcacggacactgaggcagtaacacgtgttaggctttagctccatcagcttgacagtagtgcccaaaatcttgttgaagatccatggacgattctttgcctcgggcaactcattctcctgtgtcttggccacctcctgtaacaggagctggtagaaactgaccggctgcttgcccaaggcgtaggtccaggaaatctaggggaagagagagccccgaggcttcctcagatatgtcctgtccttcctgtcccttcaccctcccaactggggtcaggacgtcccatgcccatcccctgctcctgctggggcccaggcaggtcagatggaaggtgcaaggtactgcagcactgagtgtggaacccctgccccgaagcatgtactactctcctgggcagccccacccactttagggtacaccctcattccatatttcttatacgccaggggtcctcaacccttgggccaccaactgatagcagtccatggcctgttaggaactggatagcacagcaggaggagattggtgggcgagcaagcgaagcttcatctgtatttacagctgctccccacggctcagggtaccacctgagctctgcctcctgtcagatcagcagaggcattagattcccataggcacgtgaaccctattgtgaattgtatgggagggatctaagttgaatgctccttatgagaatctaatgcctgatgatctgtcattgtctcccatcacccccaaatgggaccctctcgttgcaggaaaacaagctcagggctcccacagtttctacattatggtgagttgtataattatttcattatatattacaatgtaataataatagaaataaagtacacaataaatgt

SEQ ID NO: 160149 - DNA, 1107 bp, Homo sapiens
  Payload ID: 11322
  Gene Symbol: NLE1
  Gene Name: notchless homolog 1 (Drosophila)
  ENST ID: ENST00000588019
  CDS Start-End: 1-914
gcagctccaaggatggcagtgtgcggatctgggacacaactgcaggccgctgtgagcgcatcctcaccgggcacacccagtcggtcacctgtctccggtggggaggggacgggcttctctactctgcctcccaggaccgcaccatcaaagtctggagagctcatgacggtgtgctgtgccggactctgcaaggccacggccactgggtgaacaccatggccctcagcactgactatgccctgcgcactggggcctttgaacctgctgaggcctcagttaatccccaagacctccaaggatccttgcaggagttgaaggagagggctctgagccgatacaacctcgtgcggggccagggtccagagaggctggtgtctggctccgacgacttcaccttattcctgtggtccccagcagaggacaaaaagcctctcactcggatgacaggacaccaagctctcatcaaccaggtgctcttctctcctgactcccgcatcgtggctagtgcctcctttgacaagtccatcaagctgtgggatggcaggacgggcaaagatgactttcactctgtcacctggtgttcaagtggctcgagtgcagcggcacgatcttggctcattacaacctctgcttcctgggttcaagtgattctcctgcctcagcctcccaggtacctggcttccctacgcggccacgtggctgccgtgtaccagattgcgtggtcagctgacagtcggctcctggtcagcggcagcagtgacagcacactgaaggtgtgggatgtgaaggcccagaagctggccatggacctgcccggccacgcggatgaggtatatgctgttgactggagtccagatggccagagagtggcaagtggtgggaaggacaaatgcctccggatatggaggagatgagacggcccgaagttctctctgacccccacctcgactcggcctctgccagctgccttccctgccagagaacaaaggctgagatggcagtgcacacaccctccccaccagtggggacctgagaatgcgtgtggcctgctgtcctcgatagaccggaatggggttttcccacagatccccgcctgtggcacacccc

SEQ ID NO: 160150 - DNA, 1017 bp, Homo sapiens
  Payload ID: 11322
  Gene Symbol: NLE1
  Gene Name: notchless homolog 1 (Drosophila)
  ENST ID: ENST00000589367
  CDS Start-End: 30-413
gctctttctcctccacgtggggacgcaggatggcggcagcagtgccggacgaggcggtggcgcgcgatgtgcagcggttgctagtgcagttccaggatgagggcgggcagctgctgggttccccgttcgacgtgcccgtggacatcaccccggacaggctgcagctcgtgtgcaacgcgctactggcccaggaggatcccctgccactggctttctttgtccacgatgctgagatcgtctcctcactggggaagacgttggagtcccaggcagtggagacagagaaggtcctagacatcatctaccagccacaggctatcttcagagtccgggctgtgactcgctgcaccagctccttggagggtcacagtgaggcagtcatttctgtggccttcagccctacgggaaagtaaggacagctgcagactcatggagggggtacctggccagtggctctggagacaccaccgtgcgcttctgggatctcagcacagagacaccacatttcacatgcaagggacacagacactgggtccttagtatatcctggtctccagatggcaggaagctggcctcaggctgcaagaatggccagattctcctctgggacccaagcacagggaagcaggtgggcaggaccctcgctggccacagcaagtggatcacaggcctgagctgggagcccctccatgcgaaccctgagtgccgctatgtggccagcagctccaaggatggcagtgtgcggatctgggacacaactgcaggccgctgtgagcgcatcctcaccgggcacacccagtcggtcacctgtctccggtggggaggggacgggcttctctactctgcctcccaggaccgcaccatcaaagtctggagagctcatgacggtgtgctgtgccggactctgcaaggccacggccactgggtgaacaccatggccctcagcactgactatgccctgcgcactggggcctttgaacctgctgaggcctcagttaatccccaagacctccaagg

SEQ ID NO: 160151 - DNA, 1770 bp, Homo sapiens
  Payload ID: 11323
  Gene Symbol: NRARP
  Gene Name: NOTCH-regulated ankyrin repeat protein
  Uniprot ID: Q7Z6K4
  ENST ID: ENST00000356628
  CDS Start-End: 324-668
ggcgccttgggaccgcgtgggagccgcagccgaaccgagtagggaccgggaccgcgcggcgccgccgtccccggccgggcccggcccccgcgagccgagcgcgcgcccccgtcgcccacccgggcgcggctggatgcggcggggtccccgcggcggcgacccccggccccgagcgcccggagcgcccagaggcggcgtgcggggcccggggacgccgcgccctccatgcgccgaggcgcgccccgagacagccgggggcccgcgccgcagccgccgcccgcgctgagccccggcccggcccgcggcccgcgcccggcggcagcatgagccaggccgagctgtccacctgctccgcgccgcagacgcagcgcatcttccaggaggctgtgcgcaagggcaacacgcaggagctgcagtcgctgctgcagaacatgaccaactgcgagttcaacgtgaactcgttcgggcccgagggccagacggcgctgcaccagtcggtcatcgacggcaacctggagctcgtgaagctgctggtcaagttcggcgccgacatccgcctggccaaccgcgacggctggagcgcgctgcacatcgccgcgttcggtggccaccaggacatcgtgctctatctcatcaccaaggcgaagtacgcggccagcggccggtgatgcccgccgggaccccggaccccggccctgcgcccgcgtcgtctctgctgtaccttcccgccaactacctcggtgcgcgcccggctcgcaggccccgccagaaggcccgtggccacggcgaatacggcgcgtgcgtcccggccccagggtccggcagccccgccggccgagcgcctccctgcggcctagccgggcccggccgggccggagcagcttcccacggcccccacccgctcgcctgcccgccgcctcgcgggtgggggcggggcgcgggctccagccccttttgaaatttgagtctcgcaaccagcaagttcggaatcccgagataccggatcctctgcgcaaaatgttttctcccgaaggtgaaaggcgggcggcgggagccgaaggcggactcggagcgctccgccgccgccttcaggacccgcccgcaggcccgggacgcgccgatgccggctgcagccgaggagcagccccgaggtccgaggtccgcgccgctggcgcgcggccgaggagacgctcggctgttcgctgttgctggtgttctaaactatttatcttgtgtgtgtacatttgtgggtggagtttgtgcgcctggtttttttgtttggaaaacactgcgtggtcaatgtggttatgggggggagtgatgcatttttttctagtcttaaaactaaaaacttgagtctaccatttcttggttgcactgaaaataccgcccagcctgatggtgttcccgtgctgtccctcccccttcccttctccccgcgtctacctccccaccccgttctgttccccctccctccttctccctctccctcaaatccgtgagttttggaagccccagggcctctctcccccgcccctcctggatgaggccaccatcccccaaaccggcttgttttgcagtttccccaggatcctggaagctcgctggcgctcgagggtggcggggacacgggggggtgggtgaaggttcgttaccttttctagtgcgttctatcatagttaacggttgcacacttttttaaaaaaagtaaatggatttgccacaattaaatgtcataacatttatgacagaatataaaatattaacata

SEQ ID NO: 160152 - DNA, 2749 bp, Homo sapiens
  Payload ID: 11324
  Gene Symbol: NOTO
  Gene Name: notochord homeobox
  Uniprot ID: A8MTQ0
  ENST ID: ENST00000398468
  CDS Start-End: 410-1165
agctccgcctctgcaaggccccggggaaacgggcatcccttcttcagtgagcaaaggagaaagacggagcccggtggctgggtgtttcgcccaggatcaccagcgagctcagagtcctccccacgaccgccccagggtgggcatttttaaaagcggaggaagggagggaacacactctttggtgctgtgcccaccttgcctcgcacagagcgggcgctcacaggctttgggggccccgcccggaccgcagtggggagaggccgccccatgccccgccccgccaaatttaagagccttcgccgagcgccaggaggttcccagacaaccggtcttgctcgctgccttttgcagaatcttctcacttctcccgagctcccttccttgcgtccgtccgggcaacggccgcgtcatgcctagccccaggccgcgaggcagcccgccacccgctccctcgggctctcgggtccgacctccgcgctctggccgctctccggcgcccaggtcccctactggcccgaacacgccccgcgctcccggacgcttcgagtcccctttctcggtcgaggccatcctggcgaggcccgacccctgcgcgccggcggcctcccagccgtcgggctccgcctgcgtccacccggccttctggaccgctgcttccctgtgcgccaccgggggtctgccctgggcttgcccgacatcgtggctgcccgcctacctgagcgtaggtttttaccctgtgccagggccgcgcgtggctcccgtctgcggcctgctgggcttcggcgtcacagggttggagctggctcactgctcaggactctgggccttcccagactgggccccaacggaggacctacaggacactgagagacagcaaaagagagtccgaactatgtttaacttggagcagctggaagagttggagaaagtgtttgcaaaacagcacaatctggtggggaagaagagagcccagctggcagctcggctcaaacttacagagaaccaggtgagagtctggttccagaaccgcagggtcaagtatcagaagcagcaaaagctgagggcagcagttacatctgccgaggctgcctccctggatgagccttccagcagctccatcgccagtatccagagtgatgatgccgagtcaggagtggacggctgaagactgggacagaggccctagccaggctgcctggactagttcctcctgggggtacccactggagctccctgcctcacacctcaacgaaaagcctcctcaaccagaagaatctgagctgtcaagcagggacccccttttctatactgattcctggaaactggaataatgtaatgattggaggcacagactctggccttcagctatgtccttggccaacctatggaacttccgagccttttttctttatctgtataatgggtgcattcataacttagatcacccaggggtgagaagatgtctgtaaagcaataatgtgccatgcacagtgcaaagtgtgtggttactgttaaggcttgtaggcccctgagtagagaagaccaactggaaaaaaaaaagtttttttcttctgctgtcaccccacaacaatcaacacagaacacttctgtgaccaaacgtataggggtgtaccccacattccaacctccagttcagcaaattctgacatgatctacctgcaggtagtgtctgaccccacagattcagggctcattccacatggcagcccctcctttcttttttttttgagacagactgcagtggcgcgatcttggctcaccgccacctccgcctcccgggttcaagcgattctcctgcctcagcctcccgagcagctgggactataggcgcatgccaccatgcctggctaatttttatatttttagtagagacggggtttcatcatatggtcaggctggtcttgaactgctgaccttgtgatccacccacctcggcctcccaaagtgctgggattacatgtgtgagccaccacccggcccaaccctgccctttttgttttttatggagtcttaaggtctaccagtcatcagtcaactcattagcatatgaaaagacatcacttcagagattctagggattttaggagttctatgccaggaaatcgagatgaagaccaaatatatatttcataatatcacagctcccctcacctgggggagtaatacctgtaccagcaattaatattttcctggcctggctgtggagaaggaacctctttgaataagcatctgggcatagaagactcttcaccatcagaaggagttgagagcaaagaagagaaggtagactgtttagcccacttcacaaagtttcccaacgttttcttgttttgtctgaactgttaccattctcagaagaagctcaggcccagcagcaaagacaaggactcgctctgtcacccagactggagtgcagtggtgcaatcatagctcacggcagcctcaacctcctgggctctagtgatcctcccaccttagcctcctaagcagctgggactacaggcgcgtgacaccacgcctggctaatttttaacattttttgtagagacaacgtccacttgttgcccaggctggtcttgaattccaggcttcaagtggttctcctgccttggcctcccaaagccccatctttttatagaataatttgtgtatgccaaggctggcattttgtcataaactctgctgtgttttcacaggacagttataatttccccctttcatgactctg

SEQ ID NO: 160153 - DNA, 2329 bp, Homo sapiens
  Payload ID: 11325
  Gene Symbol: NOTUM
  Gene Name: notum pectinacetylesterase homolog (Drosophila)
  Uniprot ID: Q6P988
  ENST ID: ENST00000409678
  CDS Start-End: 385-1875
ctcccccctccgccgagcccgggcggcggcggcggcacatctaacgcgcgggcacccgggccgccgcggcccccgcaaataagcccagcctcggcccccgccgctcattggcgcgggccgcagccagcgcacccagaccctgcgctgccctcggacggccgggcgcggagccccagctgcggaggccgacggcacccggccccgagcgcctcgacgccgagccgcgcgcgccttctccgccaggcccggcgggcgggagcgggggcgagggagcaggagcggccagtgcccccgacacccccggcccggcacccccggcccggcatcccccgccgccgccgccgccgcctcaaggccgcccgctccccgcaggtggacgcggccatgggccgaggggtgcgcgtgctgctgctgctgagcctgctgcactgcgccgggggcagcgagggcaggaagacctggcggcgccggggtcagcagccgcctcctcccccgcggaccgaggcggcgccggcggccggacagcccgtggagagcttcccgctggacttcacggccgtggagggtaacatggacagcttcatggcgcaagtcaagagcctggcgcagtccctgtacccctgctccgcgcagcagctcaacgaggacctgcgcctgcacctcctactcaacacctcggtgacctgcaacgacggcagccccgccggctactacctgaaggagtccaggggcagccggcggtggctcctcttcctggaaggcggctggtactgcttcaaccgcgagaactgcgactccagatacgacaccatgcggcgcctcatgagctcccgggactggccgcgcactcgcacaggcacagggatcctgtcctcacagccggaggagaacccctactggtggaacgcaaacatggtcttcatcccctactgctccagtgatgtttggagcggggcttcatccaagtctgagaagaacgagtacgccttcatgggcgccctcatcatccaggaggtggtgcgggagcttctgggcagagggctgagcggggccaaggtgctgctgctggccgggagcagcgcggggggcaccggggtgctcctgaatgtggaccgtgtggctgagcagctggagaagctgggctacccagccatccaggtgcgaggcctggctgactccggctggttcctggacaacaagcagtatcgccacacagactgcgtcgacacgatcacgtgcgcgcccacggaggccatccgccgtggcatcaggtactggaacggggtggtcccggagcgctgccgacgccagttccaggagggcgaggagtggaactgcttctttggctacaaggtctacccgaccctgcgctgccctgtgttcgtggtgcagtggctgtttgacgaggcacagctgacggtggacaacgtgcacctgacggggcagccggtgcaggagggcctgcggctgtacatccagaacctcggccgcgagctgcgccacacactcaaggacgtgccggccagctttgcccccgcctgcctctcccatgagatcatcatccggagccactggacggatgtccaggtgaaggggacgtcgctgccccgagcactgcactgctgggacaggagcctccatgacagccacaaggccagcaagacccccctcaagggctgccccgtccacctggtggacagctgcccctggccccactgcaacccctcatgccccaccgtccgagaccagttcacggggcaagagatgaacgtggcccagttcctcatgcacatgggcttcgacatgcagacggtggcccagccgcagggactggagcccagtgagctgctggggatgctgagcaacggaagctaggcagactgtctggaggaggagccggcactgaggggcccagacacccgctgccccagtgccacctcaccccccaccagcaggccctcccgtctcttcgggacagggccccagccgtcccccctgtctgggtctgcccactgccctcctgccccggctttccctgcccctctcccacagcccagccagagacaagggacctgctgtcatccccatctgtggcctgggggtccttcctgacaacgagggggtagccagaagagaagcactggattcctcagtccaccagctcagacagcacccaccggccccacccatcaagcccttttatattattttataaagtgacttttttattactttaattttttaaaaaaaggaaaataagaatatatgatgaatgatattgttttgtaactttttaaaaatgattttaaagagacaaaaaagaacctca

SEQ ID NO: 160154 - DNA, 996 bp, Homo sapiens
  Payload ID: 11325
  Gene Symbol: NOTUM
  Gene Name: notum pectinacetylesterase homolog (Drosophila)
  ENST ID: ENST00000425009
  CDS Start-End: 110-996
agagggggagcgcagccgagccgggcgcaccagcgggacggcgcagggccaggggcgctgagaggacggggccactgggccgcccgcgctggccgcggtggacgcggccatgggccgaggggtgcgcgtgctgctgctgctgagcctgctgcactgcgccgggggcagcgagggcaggaagacctggcggcgccggggtcagcagccgcctcctcccccgcggaccgaggcggcgccggcggccggacagcccgtggagagcttcccgctggacttcacggccgtggagggtaacatggacagcttcatggcgcaagtcaagagcctggcgcagtccctgtacccctgctccgcgcagcagctcaacgaggacctgcgcctgcacctcctactcaacacctcggtgacctgcaacgacggcagccccgccggctactacctgaaggagtccaggggcagccggcggtggctcctcttcctggaaggcggctggtactgcttcaaccgcgagaactgcgactccagatacgacaccatgcggcgcctcatgagctcccgggactggccgcgcactcgcacaggcacagggatcctgtcctcacagccggaggagaacccctactggtggaacgcaaacatggtcttcatcccctactgctccagtgatgtttggagcggggcttcatccaagtctgagaagaacgagtacgccttcatgggcgccctcatcatccaggaggtggtgcgggagcttctgggcagagggctgagcggggccaaggtgctgctgctggccgggagcagcgcggggggcaccggggtgctcctgaatgtggaccgtgtggctgagcagctggagaagctgggctacccagccatccaggtgcgaggcctggctgactccggctggttcctggacaacaagcagtatcgccacacagactgcgtcgacacgatcacgtgcgcgcccacggaggccatccgccgtggcatcag

SEQ ID NO: 160155 - DNA, 813 bp, Homo sapiens
  Payload ID: 11325
  Gene Symbol: NOTUM
  Gene Name: notum pectinacetylesterase homolog (Drosophila)
  ENST ID: ENST00000477214
  CDS Start-End: 222-813
gtgcgaccgtcgcgcgcggccggaacaggtggcgcgttccctccgccggagctgggcgcgcggggcgcggcgggtcggcagccctggccgaccccccgcggtgcgtcctcccccgcagctactacctgaaggagtccaggggcagccggcggtggctcctcttcctggaaggcggctggtactgcttcaaccgcgagaactgcgactccagatacgacaccatgcggcgcctcatgagctcccgggactggccgcgcactcgcacaggcacagggatcctgtcctcacagccggaggagaacccctactggtggaacgcaaacatggtcttcatcccctactgctccagtgatgtttggagcggggcttcatccaagtctgagaagaacgagtacgccttcatgggcgccctcatcatccaggaggtggtgcgggagcttctgggcagagggctgagcggggccaaggtgctgctgctggccgggagcagcgcggggggcaccggggtgctcctgaatgtggaccgtgtggctgagcagctggagaagctgggctacccagccatccaggtgcgaggcctggctgactccggctggttcctggacaacaagcagtatcgccacacagactgcgtcgacacgatcacgtgcgcgcccacggaggccatccgccgtggcatcaggtactggaacggggtggtcccggagcgctgccgacgccagttccaggagggcgaggagtggaactgcttctttggctacaaggtctacccgaccctgcgctgccctgtgttcgtggtgcagtggctgtttg

SEQ ID NO: 160156 - DNA, 5048 bp, Homo sapiens
  Payload ID: 11326
  Gene Symbol: NPC1L1
  Gene Name: NPC1-like 1
  Uniprot ID: Q9UHC9
  ENST ID: ENST00000289547
  CDS Start-End: 57-4136
cttggctgttcctgaggcctggcctggctccccgctgaccccttcccagacctgggatggcggaggccggcctgaggggctggctgctgtgggccctgctcctgcgcttggcccagagtgagccttacacaaccatccaccagcctggctactgcgccttctatgacgaatgtgggaagaacccagagctgtctggaagcctcatgacactctccaacgtgtcctgcctgtccaacacgccggcccgcaagatcacaggtgatcacctgatcctattacagaagatctgcccccgcctctacaccggccccaacacccaagcctgctgctccgccaagcagctggtatcactggaagcgagtctgtcgatcaccaaggccctcctcacccgctgcccagcctgctctgacaattttgtgaacctgcactgccacaacacgtgcagccccaatcagagcctcttcatcaatgtgacccgcgtggcccagctaggggctggacaactcccagctgtggtggcctatgaggccttctaccagcatagctttgccgagcagagctatgactcctgcagccgtgtgcgcgtccctgcagctgccacgctggctgtgggcaccatgtgtggcgtgtatggctctgccctttgcaatgcccagcgctggctcaacttccagggagacacaggcaatggtctggccccactggacatcaccttccacctcttggagcctggccaggccgtggggagtgggattcagcctctgaatgagggggttgcacgttgcaatgagtcccaaggtgacgacgtggcgacctgctcctgccaagactgtgctgcatcctgtcctgccatagcccgcccccaggccctcgactccaccttctacctgggccagatgccgggcagtctggtcctcatcatcatcctctgctctgtcttcgctgtggtcaccatcctgcttgtgggattccgtgtggcccccgccagggacaaaagcaagatggtggaccccaagaagggcaccagcctctctgacaagctcagcttctccacccacaccctccttggccagttcttccagggctggggcacgtgggtggcttcgtggcctctgaccatcttggtgctatctgtcatcccggtggtggccttggcagcgggcctggtctttacagaactcactacggaccccgtggagctgtggtcggcccccaacagccaagcccggagtgagaaagctttccatgaccagcatttcggccccttcttccgaaccaaccaggtgatcctgacggctcctaaccggtccagctacaggtatgactctctgctgctggggcccaagaacttcagcggaatcctggacctggacttgctgctggagctgctagagctgcaggagaggctgcggcacctccaggtatggtcgcccgaagcacagcgcaacatctccctgcaggacatctgctacgcccccctcaatccggacaataccagtctctacgactgctgcatcaacagcctcctgcagtatttccagaacaaccgcacgctcctgctgctcacagccaaccagacactgatggggcagacctcccaagtcgactggaaggaccattttctgtactgtgccaatgccccgctcaccttcaaggatggcacagccctggccctgagctgcatggctgactacggggcccctgtcttccccttccttgccattggggggtacaaaggaaaggactattctgaggcagaggccctgatcatgacgttctccctcaacaattaccctgccggggacccccgtctggcccaggccaagctgtgggaggaggccttcttagaggaaatgcgagccttccagcgtcggatggctggcatgttccaggtcacgttcatggctgagcgctctctggaagacgagatcaatcgcaccacagctgaagacctgcccatctttgccaccagctacattgtcatattcctgtacatctctctggccctgggcagctattccagctggagccgagtgatggtggactccaaggccacgctgggcctcggcggggtggccgtggtcctgggagcagtcatggctgccatgggcttcttctcctacttgggtatccgctcctccctggtcatcctgcaagtggttcctttcctggtgctgtccgtgggggctgataacatcttcatctttgttctcgagtaccagaggctgccccggaggcctggggagccacgagaggtccacattgggcgagccctaggcagggtggctcccagcatgctgttgtgcagcctctctgaggccatctgcttcttcctaggggccctgacccccatgccagctgtgcggacctttgccctgacctctggccttgcagtgatccttgacttcctcctgcagatgtcagcctttgtggccctgctctccctggacagcaagaggcaggaggcctcccggttggacgtctgctgctgtgtcaagccccaggagctgcccccgcctggccagggagaggggctcctgcttggcttcttccaaaaggcttatgcccccttcctgctgcactggatcactcgaggtgttgtgctgctgctgtttctcgccctgttcggagtgagcctctactccatgtgccacatcagcgtgggactggaccaggagctggccctgcccaaggactcgtacctgcttgactatttcctctttctgaaccgctacttcgaggtgggggccccggtgtactttgttaccaccttgggctacaacttctccagcgaggctgggatgaatgccatctgctccagtgcaggctgcaacaacttctccttcacccagaagatccagtatgccacagagttccctgagcagtcttacctggccatccctgcctcctcctgggtggatgacttcattgactggctgaccccgtcctcctgctgccgcctttatatatctggccccaataaggacaagttctgcccctcgaccgtcaactctctgaactgcctaaagaactgcatgagcatcacgatgggctctgtgaggccctcggtggagcagttccataagtatcttccctggttcctgaacgaccggcccaacatcaaatgtcccaaaggcggcctggcagcatacagcacctctgtgaacttgacttcagatggccaggttttagacacagttgccattctgtcacccaggctggagtacagtggcacaatctcggctcactgcaacctctacctcctggattcaacctccaggttcatggcctatcacaagcccctgaaaaactcacaggattacacagaagctctgcgggcagctcgagagctggcagccaacatcactgctgacctgcggaaagtgcctggaacagacccggcttttgaggtcttcccctacacgatcaccaatgtgttttatgagcagtacctgaccatcctccctgaggggctcttcatgctcagcctctgccttgtgcccaccttcgctgtctcctgcctcctgctgggcctggacctgcgctccggcctcctcaacctgctctccattgtcatgatcctcgtggacactgtcggcttcatggccctgtggggcatcagttacaatgctgtgtccctcatcaacctggtctcggcggtgggcatgtctgtggagtttgtgtcccacattacccgctcctttgccatcagcaccaagcccacctggctggagagggccaaagaggccaccatctctatgggaagtgcggtgtttgcaggtgtggccatgaccaacctgcctggcatccttgtcctgggcctcgccaaggcccagctcattcagatcttcttcttccgcctcaacctcctgatcactctgctgggcctgctgcatggcttggtcttcctgcccgtcatcctcagctacgtggggcctgacgttaacccggctctggcactggagcagaagcgggctgaggaggcggtggcagcagtcatggtggcctcttgcccaaatcacccctcccgagtctccacagctgacaacatctatgtcaaccacagctttgaaggttctatcaaaggtgctggtgccatcagcaacttcttgcccaacaatgggcggcagttctgatacagccagaggccctgtctaggctctatggccctgaaccaaagggttatggggatcttccttgtgactgccccttgacacacgccctcctcaaatcctaggggaggccattcccatgagactgcctgtcactggaggatggcctgctcttgaggtatccaggcagcaccactgatggctcctctgctcccatagtgggtccccagtttccaagtcacctaggccttgggcagtgcctcctcctgggcctgggtctggaagttggcaggaacagacacactccatgtttgtcccacactcactcactttcctaggagcccacttctcatccaacttttcccttctcagttcctctctcgaaagtcttaattctgtgtcagtaagtctttaacacgtagcagtgtccctgagaacacagacaatgaccactaccctgggtgtgatatcacaggaggccagagagaggcaaaggctcaggccaagagccaacgctgtgggaggccggtcggcagccactccctccagggcgcacctgcaggtctgccatccacggccttttctggcaagagaagggcccaggaaggatgctctcataaggcccaggaaggatgctctcataagcaccttggtcatggattagcccctcctggaaaatggtgttgggtttggtctccagctccaatacttattaaggctgttgctgccagtcaaggccacccaggagtctgaaggctgggagctcttggggctgggctggtcctcccatcttcacctcgggcctggatcccaggcctcaaaccagcccaacccgagcttttggacagctctccagaagcatgaactgcagtggagatgaagatcctggctctgtgctgtgcacataggtgtttaataaacatttgttggcagaaa

SEQ ID NO: 160157 - DNA, 4141 bp, Homo sapiens
  Payload ID: 11326
  Gene Symbol: NPC1L1
  Gene Name: NPC1-like 1
  ENST ID: ENST00000381160
  CDS Start-End: 57-4055
cttggctgttcctgaggcctggcctggctccccgctgaccccttcccagacctgggatggcggaggccggcctgaggggctggctgctgtgggccctgctcctgcgcttggcccagagtgagccttacacaaccatccaccagcctggctactgcgccttctatgacgaatgtgggaagaacccagagctgtctggaagcctcatgacactctccaacgtgtcctgcctgtccaacacgccggcccgcaagatcacaggtgatcacctgatcctattacagaagatctgcccccgcctctacaccggccccaacacccaagcctgctgctccgccaagcagctggtatcactggaagcgagtctgtcgatcaccaaggccctcctcacccgctgcccagcctgctctgacaattttgtgaacctgcactgccacaacacgtgcagccccaatcagagcctcttcatcaatgtgacccgcgtggcccagctaggggctggacaactcccagctgtggtggcctatgaggccttctaccagcatagctttgccgagcagagctatgactcctgcagccgtgtgcgcgtccctgcagctgccacgctggctgtgggcaccatgtgtggcgtgtatggctctgccctttgcaatgcccagcgctggctcaacttccagggagacacaggcaatggtctggccccactggacatcaccttccacctcttggagcctggccaggccgtggggagtgggattcagcctctgaatgagggggttgcacgttgcaatgagtcccaaggtgacgacgtggcgacctgctcctgccaagactgtgctgcatcctgtcctgccatagcccgcccccaggccctcgactccaccttctacctgggccagatgccgggcagtctggtcctcatcatcatcctctgctctgtcttcgctgtggtcaccatcctgcttgtgggattccgtgtggcccccgccagggacaaaagcaagatggtggaccccaagaagggcaccagcctctctgacaagctcagcttctccacccacaccctccttggccagttcttccagggctggggcacgtgggtggcttcgtggcctctgaccatcttggtgctatctgtcatcccggtggtggccttggcagcgggcctggtctttacagaactcactacggaccccgtggagctgtggtcggcccccaacagccaagcccggagtgagaaagctttccatgaccagcatttcggccccttcttccgaaccaaccaggtgatcctgacggctcctaaccggtccagctacaggtatgactctctgctgctggggcccaagaacttcagcggaatcctggacctggacttgctgctggagctgctagagctgcaggagaggctgcggcacctccaggtatggtcgcccgaagcacagcgcaacatctccctgcaggacatctgctacgcccccctcaatccggacaataccagtctctacgactgctgcatcaacagcctcctgcagtatttccagaacaaccgcacgctcctgctgctcacagccaaccagacactgatggggcagacctcccaagtcgactggaaggaccattttctgtactgtgccaatgccccgctcaccttcaaggatggcacagccctggccctgagctgcatggctgactacggggcccctgtcttccccttccttgccattggggggtacaaaggaaaggactattctgaggcagaggccctgatcatgacgttctccctcaacaattaccctgccggggacccccgtctggcccaggccaagctgtgggaggaggccttcttagaggaaatgcgagccttccagcgtcggatggctggcatgttccaggtcacgttcatggctgagcgctctctggaagacgagatcaatcgcaccacagctgaagacctgcccatctttgccaccagctacattgtcatattcctgtacatctctctggccctgggcagctattccagctggagccgagtgatggtggactccaaggccacgctgggcctcggcggggtggccgtggtcctgggagcagtcatggctgccatgggcttcttctcctacttgggtatccgctcctccctggtcatcctgcaagtggttcctttcctggtgctgtccgtgggggctgataacatcttcatctttgttctcgagtaccagaggctgccccggaggcctggggagccacgagaggtccacattgggcgagccctaggcagggtggctcccagcatgctgttgtgcagcctctctgaggccatctgcttcttcctaggggccctgacccccatgccagctgtgcggacctttgccctgacctctggccttgcagtgatccttgacttcctcctgcagatgtcagcctttgtggccctgctctccctggacagcaagaggcaggaggcctcccggttggacgtctgctgctgtgtcaagccccaggagctgcccccgcctggccagggagaggggctcctgcttggcttcttccaaaaggcttatgcccccttcctgctgcactggatcactcgaggtgttgtgctgctgctgtttctcgccctgttcggagtgagcctctactccatgtgccacatcagcgtgggactggaccaggagctggccctgcccaaggactcgtacctgcttgactatttcctctttctgaaccgctacttcgaggtgggggccccggtgtactttgttaccaccttgggctacaacttctccagcgaggctgggatgaatgccatctgctccagtgcaggctgcaacaacttctccttcacccagaagatccagtatgccacagagttccctgagcagtcttacctggccatccctgcctcctcctgggtggatgacttcattgactggctgaccccgtcctcctgctgccgcctttatatatctggccccaataaggacaagttctgcccctcgaccgtcaactctctgaactgcctaaagaactgcatgagcatcacgatgggctctgtgaggccctcggtggagcagttccataagtatcttccctggttcctgaacgaccggcccaacatcaaatgtcccaaaggcggcctggcagcatacagcacctctgtgaacttgacttcagatggccaggttttagcctccaggttcatggcctatcacaagcccctgaaaaactcacaggattacacagaagctctgcgggcagctcgagagctggcagccaacatcactgctgacctgcggaaagtgcctggaacagacccggcttttgaggtcttcccctacacgatcaccaatgtgttttatgagcagtacctgaccatcctccctgaggggctcttcatgctcagcctctgccttgtgcccaccttcgctgtctcctgcctcctgctgggcctggacctgcgctccggcctcctcaacctgctctccattgtcatgatcctcgtggacactgtcggcttcatggccctgtggggcatcagttacaatgctgtgtccctcatcaacctggtctcggcggtgggcatgtctgtggagtttgtgtcccacattacccgctcctttgccatcagcaccaagcccacctggctggagagggccaaagaggccaccatctctatgggaagtgcggtgtttgcaggtgtggccatgaccaacctgcctggcatccttgtcctgggcctcgccaaggcccagctcattcagatcttcttcttccgcctcaacctcctgatcactctgctgggcctgctgcatggcttggtcttcctgcccgtcatcctcagctacgtggggcctgacgttaacccggctctggcactggagcagaagcgggctgaggaggcggtggcagcagtcatggtggcctcttgcccaaatcacccctcccgagtctccacagctgacaacatctatgtcaaccacagctttgaaggttctatcaaaggtgctggtgccatcagcaacttcttgcccaacaatgggcggcagttctgatacagccagaggccctgtctaggctctatggccctgaaccaaagggttatggggatcttccttgtgactgccccttgacacacgcc

SEQ ID NO: 160158 - DNA, 2554 bp, Homo sapiens
  Payload ID: 11326
  Gene Symbol: NPC1L1
  Gene Name: NPC1-like 1
  Uniprot ID: Q9UHC9
  ENST ID: ENST00000423141
  CDS Start-End: 57-2231
cttggctgttcctgaggcctggcctggctccccgctgaccccttcccagacctgggatggcggaggccggcctgaggggctggctgctgtgggccctgctcctgcgcttggcccagagtgagccttacacaaccatccaccagcctggctactgcgccttctatgacgaatgtgggaagaacccagagctgtctggaagcctcatgacactctccaacgtgtcctgcctgtccaacacgccggcccgcaagatcacaggtgatcacctgatcctattacagaagatctgcccccgcctctacaccggccccaacacccaagcctgctgctccgccaagcagctggtatcactggaagcgagtctgtcgatcaccaaggccctcctcacccgctgcccagcctgctctgacaattttgtgaacctgcactgccacaacacgtgcagccccaatcagagcctcttcatcaatgtgacccgcgtggcccagctaggggctggacaactcccagctgtggtggcctatgaggccttctaccagcatagctttgccgagcagagctatgactcctgcagccgtgtgcgcgtccctgcagctgccacgctggctgtgggcaccatgtgtggcgtgtatggctctgccctttgcaatgcccagcgctggctcaacttccagggagacacaggcaatggtctggccccactggacatcaccttccacctcttggagcctggccaggccgtggggagtgggattcagcctctgaatgagggggttgcacgttgcaatgagtcccaaggtgacgacgtggcgacctgctcctgccaagactgtgctgcatcctgtcctgccatagcccgcccccaggccctcgactccaccttctacctgggccagatgccgggcagtctggtcctcatcatcatcctctgctctgtcttcgctgtggtcaccatcctgcttgtgggattccgtgtggcccccgccagggacaaaagcaagatggtggaccccaagaagggcaccagcctctctgacaagctcagcttctccacccacaccctccttggccagttcttccagggctggggcacgtgggtggcttcgtggcctctgaccatcttggtgctatctgtcatcccggtggtggccttggcagcgggcctggtctttacagaactcactacggaccccgtggagctgtggtcggcccccaacagccaagcccggagtgagaaagctttccatgaccagcatttcggccccttcttccgaaccaaccaggtgatcctgacggctcctaaccggtccagctacaggtatgactctctgctgctggggcccaagaacttcagcggaatcctggacctggacttgctgctggagctgctagagctgcaggagaggctgcggcacctccaggtatggtcgcccgaagcacagcgcaacatctccctgcaggacatctgctacgcccccctcaatccggacaataccagtctctacgactgctgcatcaacagcctcctgcagtatttccagaacaaccgcacgctcctgctgctcacagccaaccagacactgatggggcagacctcccaagtcgactggaaggaccattttctgtactgtgccaatgccccgctcaccttcaaggatggcacagccctggccctgagctgcatggctgactacggggcccctgtcttccccttccttgccattggggggtacaaaggaaaggactattctgaggcagaggccctgatcatgacgttctccctcaacaattaccctgccggggacccccgtctggcccaggccaagctgtgggaggaggccttcttagaggaaatgcgagccttccagcgtcggatggctggcatgttccaggtcacgttcatggctgagcgctctctggaagacgagatcaatcgcaccacagctgaagacctgcccatctttgccaccagctacattgtcatattcctgtacatctctctggccctgggcagctattccagctggagccgagtgatggtggactccaaggccacgctgggcctcggcggggtggccgtggtcctgggagcagtcatggctgccatgggcttcttctcctacttgggtatccgctcctccctggtcatcctgcaagtggttcctttcctggtgctgtccgtgggggctgataacatcttcatctttgttctcgagtaccaggggccctgacccccatgccagctgtgcggacctttgccctgacctctggccttgcagtgatccttgacttcctcctgcagatgtcagcctttgtggccctgctctccctggacagcaagaggcaggaggtaggggcagctgggccagtactgagggacctgcccctgggttcccaccatggcagggagatggggtggctttaccaccacagagatggcccagagaatggggtgggggacaggggcattgtgccaggagagtaatatttaggccatgtattctccaatttcctacagaaaaataaatttgttttgacaattttttaaatataa

SEQ ID NO: 160159 - DNA, 4826 bp, Homo sapiens
  Payload ID: 11326
  Gene Symbol: NPC1L1
  Gene Name: NPC1-like 1
  ENST ID: ENST00000546276
  CDS Start-End: 57-3917
cttggctgttcctgaggcctggcctggctccccgctgaccccttcccagacctgggatggcggaggccggcctgaggggctggctgctgtgggccctgctcctgcgcttggcccagagtgagccttacacaaccatccaccagcctggctactgcgccttctatgacgaatgtgggaagaacccagagctgtctggaagcctcatgacactctccaacgtgtcctgcctgtccaacacgccggcccgcaagatcacaggtgatcacctgatcctattacagaagatctgcccccgcctctacaccggccccaacacccaagcctgctgctccgccaagcagctggtatcactggaagcgagtctgtcgatcaccaaggccctcctcacccgctgcccagcctgctctgacaattttgtgaacctgcactgccacaacacgtgcagccccaatcagagcctcttcatcaatgtgacccgcgtggcccagctaggggctggacaactcccagctgtggtggcctatgaggccttctaccagcatagctttgccgagcagagctatgactcctgcagccgtgtgcgcgtccctgcagctgccacgctggctgtgggcaccatgtgtggcgtgtatggctctgccctttgcaatgcccagcgctggctcaacttccagggagacacaggcaatggtctggccccactggacatcaccttccacctcttggagcctggccaggccgtggggagtgggattcagcctctgaatgagggggttgcacgttgcaatgagtcccaaggtgacgacgtggcgacctgctcctgccaagactgtgctgcatcctgtcctgccatagcccgcccccaggccctcgactccaccttctacctgggccagatgccgggcagtctggtcctcatcatcatcctctgctctgtcttcgctgtggtcaccatcctgcttgtgggattccgtgtggcccccgccagggacaaaagcaagatggtggaccccaagaagggcaccagcctctctgacaagctcagcttctccacccacaccctccttggccagttcttccagggctggggcacgtgggtggcttcgtggcctctgaccatcttggtgctatctgtcatcccggtggtggccttggcagcgggcctggtctttacagaactcactacggaccccgtggagctgtggtcggcccccaacagccaagcccggagtgagaaagctttccatgaccagcatttcggccccttcttccgaaccaaccaggtgatcctgacggctcctaaccggtccagctacaggtatgactctctgctgctggggcccaagaacttcagcggaatcctggacctggacttgctgctggagctgctagagctgcaggagaggctgcggcacctccaggtatggtcgcccgaagcacagcgcaacatctccctgcaggacatctgctacgcccccctcaatccggacaataccagtctctacgactgctgcatcaacagcctcctgcagtatttccagaacaaccgcacgctcctgctgctcacagccaaccagacactgatggggcagacctcccaagtcgactggaaggaccattttctgtactgtgccaatgccccgctcaccttcaaggatggcacagccctggccctgagctgcatggctgactacggggcccctgtcttccccttccttgccattggggggtacaaaggaaaggactattctgaggcagaggccctgatcatgacgttctccctcaacaattaccctgccggggacccccgtctggcccaggccaagctgtgggaggaggccttcttagaggaaatgcgagccttccagcgtcggatggctggcatgttccaggtcacgttcatggctgagcgctctctggaagacgagatcaatcgcaccacagctgaagacctgcccatctttgccaccagctacattgtcatattcctgtacatctctctggccctgggcagctattccagctggagccgagtgatggtggactccaaggccacgctgggcctcggcggggtggccgtggtcctgggagcagtcatggctgccatgggcttcttctcctacttgggtatccgctcctccctggtcatcctgcaagtggttcctttcctggtgctgtccgtgggggctgataacatcttcatctttgttctcgagtaccagaggctgccccggaggcctggggagccacgagaggtccacattgggcgagccctaggcagggtggctcccagcatgctgttgtgcagcctctctgaggccatctgcttcttcctaggggccctgacccccatgccagctgtgcggacctttgccctgacctctggccttgcagtgatccttgacttcctcctgcagatgtcagcctttgtggccctgctctccctggacagcaagaggcaggaggcctcccggttggacgtctgctgctgtgtcaagccccaggagctgcccccgcctggccagggagaggggctcctgcttggcttcttccaaaaggcttatgcccccttcctgctgcactggatcactcgaggtgttgtggtgggggccccggtgtactttgttaccaccttgggctacaacttctccagcgaggctgggatgaatgccatctgctccagtgcaggctgcaacaacttctccttcacccagaagatccagtatgccacagagttccctgagcagtcttacctggccatccctgcctcctcctgggtggatgacttcattgactggctgaccccgtcctcctgctgccgcctttatatatctggccccaataaggacaagttctgcccctcgaccgtcaactctctgaactgcctaaagaactgcatgagcatcacgatgggctctgtgaggccctcggtggagcagttccataagtatcttccctggttcctgaacgaccggcccaacatcaaatgtcccaaaggcggcctggcagcatacagcacctctgtgaacttgacttcagatggccaggttttagcctccaggttcatggcctatcacaagcccctgaaaaactcacaggattacacagaagctctgcgggcagctcgagagctggcagccaacatcactgctgacctgcggaaagtgcctggaacagacccggcttttgaggtcttcccctacacgatcaccaatgtgttttatgagcagtacctgaccatcctccctgaggggctcttcatgctcagcctctgccttgtgcccaccttcgctgtctcctgcctcctgctgggcctggacctgcgctccggcctcctcaacctgctctccattgtcatgatcctcgtggacactgtcggcttcatggccctgtggggcatcagttacaatgctgtgtccctcatcaacctggtctcggcggtgggcatgtctgtggagtttgtgtcccacattacccgctcctttgccatcagcaccaagcccacctggctggagagggccaaagaggccaccatctctatgggaagtgcggtgtttgcaggtgtggccatgaccaacctgcctggcatccttgtcctgggcctcgccaaggcccagctcattcagatcttcttcttccgcctcaacctcctgatcactctgctgggcctgctgcatggcttggtcttcctgcccgtcatcctcagctacgtggggcctgacgttaacccggctctggcactggagcagaagcgggctgaggaggcggtggcagcagtcatggtggcctcttgcccaaatcacccctcccgagtctccacagctgacaacatctatgtcaaccacagctttgaaggttctatcaaaggtgctggtgccatcagcaacttcttgcccaacaatgggcggcagttctgatacagccagaggccctgtctaggctctatggccctgaaccaaagggttatggggatcttccttgtgactgccccttgacacacgccctcctcaaatcctaggggaggccattcccatgagactgcctgtcactggaggatggcctgctcttgaggtatccaggcagcaccactgatggctcctctgctcccatagtgggtccccagtttccaagtcacctaggccttgggcagtgcctcctcctgggcctgggtctggaagttggcaggaacagacacactccatgtttgtcccacactcactcactttcctaggagcccacttctcatccaacttttcccttctcagttcctctctcgaaagtcttaattctgtgtcagtaagtctttaacacgtagcagtgtccctgagaacacagacaatgaccactaccctgggtgtgatatcacaggaggccagagagaggcaaaggctcaggccaagagccaacgctgtgggaggccggtcggcagccactccctccagggcgcacctgcaggtctgccatccacggccttttctggcaagagaagggcccaggaaggatgctctcataaggcccaggaaggatgctctcataagcaccttggtcatggattagcccctcctggaaaatggtgttgggtttggtctccagctccaatacttattaaggctgttgctgccagtcaaggccacccaggagtctgaaggctgggagctcttggggctgggctggtcctcccatcttcacctcgggcctggatcccaggcctcaaaccagcccaacccgagcttttggacagctctccagaagcatgaactgcagtggagatgaagatcctggctctgtgctgtgcacataggtgtttaataaacatttgttggcag

SEQ ID NO: 160160 - DNA, 782 bp, Homo sapiens
  Payload ID: 11327
  Gene Symbol: NPHP3-ACAD11
  Gene Name: NPHP3-ACAD11 readthrough (NMD candidate)
  ENST ID: ENST00000383282
  CDS Start-End: 60-512
gttccgttccgctgcccagtcctgctggtactcactaggtagtagcggcaacggacgccatggggaccgcctcgtcgctcgtgagccccgcgggcggggaagtgatcgaggacacgtacggggcgggcggcggcgaggcctgcgagatcccggtggaggtgaagcccaaggcccgcctgctgcgcaactcgttccgccgaggcgcgggggcggcagcaggggccgggcccgggtcgctgccccgcggggtgggcgcgggcgggctgctgggggccagcttcaagtccactggctcgtcggtgccagagctggagtacgcggcggccgagtacgagcggctcaggaaggagtacgagatctttcgcgtcagcaagaaccaggagttgttgtccatgggccgccgcgaggccaagctggacacggagaacaagcggctgcgggccgaactgcagggtctcgctgcggtggcacgatcgcggctcactgcaacctggaactcctgggctcaatgatcctcccgcctcggcctcctaaagttctgggattacaggagtgagccaccgcgcctggtccccgcttttctatttctggtttattcattgaggcacctagaagaaattagccggaaagtgtcctgaggaggcaaatgccaatctccagctccactgccgcccccgcgcccaccccctcagaaggctggtgacatctgttgaagcaactcagcaaactcttcctaggagtttcacccccctccccaccataaaaattttaagtgggtctcc

SEQ ID NO: 160161 - DNA, 7784 bp, Homo sapiens
  Payload ID: 11327
  Gene Symbol: NPHP3-ACAD11
  Gene Name: NPHP3-ACAD11 readthrough (NMD candidate)
  ENST ID: ENST00000471702
  CDS Start-End: 105-2015
ctgccccgccccgtcccgttccgttcctctgccccaccccgtcccgttccgttccgctgcccagtcctgctggtactcactaggtagtagcggcaacggacgccatggggaccgcctcgtcgctcgtgagccccgcgggcggggaagtgatcgaggacacgtacggggcgggcggcggcgaggcctgcgagatcccggtggaggtgaagcccaaggcccgcctgctgcgcaactcgttccgccgaggcgcgggggcggcagcaggggccgggcccgggtcgctgccccgcggggtgggcgcgggcgggctgctgggggccagcttcaagtccactggctcgtcggtgccagagctggagtacgcggcggccgagtacgagcggctcaggaaggagtacgagatctttcgcgtcagcaagaaccaggagttgttgtccatgggccgccgcgaggccaagctggacacggagaacaagcggctgcgggccgaactgcaggcacttcaaaaaacgtatcagaagatacttcgagaaaaagaaagtgctttagaagcgaaataccaagcaatggagagagcagcaacatttgaacatgacagagataaagttaaaaggcaattcaagatttttagggagaccaaagaaaatgaaattcaggacttactgagggccaagagggagttggagagcaaacttcagaggctacaggctcagggtatccaagtatttgatcctggggagtctgattcagatgacaactgtacagatgtcactgctgctggaacccaatgtgaatattggactggcggagccttgggaagtgaaccttccataggaagcatgatccagcttcagcagtccttcagaggccctgagtttgcccatagttctatagatgtggaaggaccctttgcaaatgttaatagagatgactgggatattgctgtagctagtttattacaagttactcctctgttttcacattctctgtggagtaacactgtcagatgttacctcatttatacagatgaaacccagcctgagatggatcttttccttaaggactattcacctaaacttaagagaatgtgcgagacaatgggatattttttccatgctgtttattttccaatagatgttgaaaatcaatacctcactgtaagaaaatgggaaattgagaaaagttctttagttattttatttattcacttaacattaccaagccttttattggaagactgtgaagaagcttttctgaaaaaccctgaaggaaaacctcgattaatctttcatcgtttggaagatggaaaagtcagttctgactctgtccagcaattgattgatcaagtttctaatctaaacaagaccagcaaagccaagatcattgatcactcaggagatcctgcagaaggagtatataaaacttatatttgtgtagaaaagattattaaacaggacatactgggttttgagaacacagacttggagactaaggatttgggcagtgaggattccattccagaagaagatgattttggtgatgttctgtgggacatacatgatgaacaagagcaaatggaaacttttcagcaggcttctaattcagcccatgagttgggatttgagaaatattaccaacgccttaatgatctagtggcagcaccagccccgattccacctcttctcgtgtctggaggaccaggttctgggaagtctcttcttttatcaaagtggattcaattacaacagaagaattcccccaacacactgattctttcccattttgtgggaaggcccatgtcaaccagctcagagtcctccttgattattaaacgactaactctaaagttgatgcagcactcttggtcagtctctgctctgacactggatcctgctaagcttctggaagaatttccacgttggctggaaaaactctctgctcgtcatcaaggcagcatcatcatcgttattgattctatagatcaagttcaggttgtggcctacacttcatcttgatcccttaagtccaaaagatgcaaaatctattataattgcagaatgccactctgtagacattaaattgagtaaagagcaggagaagaagctagaacgacactgtcgttctgctacaacctgcaatgccctttatgtcacccttttcggcaaaatgatcgcgcgtgctgggagagcaggcaatttagataaaatccttcatcagtgtttccagtgtcaagatactctttcattatatagacttgttctgcactctatccgggagtccatggcaaatgatgtggataaagagctaatgaagcagatcctctgccttgtcaatgttagtcacaatggtgtgagtgaatcagaactgatggaactctatcctgagatgtcctggactttcttgacctcccttattcacagtttatacaaaatgtgtttgttgacttatggatgtggcttgcttaggtttcaacatctgcaggcttgggaaacagtgagattggagtacctggaaggccccactgttacttcttcatacaggcaaaagctaatcaactatttcaccttgcagctaagtcaggacagagtgacttggagaagtgcagatgaactcccgtggctttttcagcagcagggaagtaaacagaagctgcatgattgccttcttaatctctttgtgtctcaaaacctttataaaaggggacactttgctgagttgctgagttattggcagtttgttggcaaagacaaaagtgcaatggcaacagaatacttcgattcattgaagcagtatgagaaaaactgcgaaggcgaggacaacatgagttgcttagctgatctttatgaaaccttggggcgatttctcaaggatctaggccttctcagtcaggccatagtacctttgcagaggtctttagagattcgagaaacagctttagatcccgatcacccaagagtagcccagtccctccaccaactagcaagtgtatacgtgcagtggaagaagtttggcaatgcagaacaactgtataaacaggcgttggaaatctcagaaaatgcttatggtgcggaccatccatatactgctcgtgaacttgaagcacttgcaactttgtaccagaaacaaaataaatatgaacaagctgaacattttaggaaaaaatcctttaaaattcatcagaaagctataaagaaaaaaggcaacttgtacggatttgcccttttacgtagacgggctttacagttagaagagcttacattaggtaaggacacacctgataatgctcggaccctcaatgaactgggtgttctctactatcttcaaaataacctggaaacagctgaccagtttctgaagcgttccttagaaatgagggagcgagttctaggaccagatcaccctgactgtgctcagtctttgaataatctggcagctctatgcaatgaaaagaaacagtatgataaagcagaagaactttatgaaagagctttagatattcggagacgtgcattagctcctgatcacccttctttggcatatacggtgaagcatcttgccatcttgtataagaaaatggggaaacttgacaaagctgtacctttgtatgaattggctgttgaaattcgacagaaatcttttggcccaaagcaccctagtgtagctactgccttggtgaacttagctgttctttatagccaaatgaaaaaacacgttgaagctttgccattatatgaaagagcattaaagatttatgaagatagcctgggtcggatgcatcctcgagttggagaaacactgaaaaatttagctgtgcttagctatgaaggaggagattttgaaaaagctgctgaattatacaaaagggcaatggaaataaaagaagcagaaacatcactcttgggtggaaaagctccttcacgccattcatcaagtggagacacgtttagcttaaaaacagctcattctcctaatgttttccttcagcaaggacaaaggaaagtccaatccaaccttttatctccagaagggctttcaaacatatgtgctcaggaaaaaaccaccaggttcacttcttcctaaagcacatcagattgatagagaatttaaagtccagaaagccttgttttcaattggattccccgttcccaagcctatactgtactgcagtgatacttctgtcattggaacagaattttacgtaatggaacatgtgcagggtcgaatcttccgtgatttaacaattcctggacttagcccagcagaacgttcagccatatatgtggccacggtagaaacattggctcagttacattccttgaatatacagtcactgcagctggaaggatatggtataggtgctgggtactgcaaaagacaggtatcaacctggacaaagcaatatcaagctgcagctcatcaggacatccctgccatgcaacagctatcggagtggctaatgaagaacttgcccgataatgacaatgaagagaatttgattcatggagatttcagactagataacatagttttccaccctaaagagtgtcgagttatagcagtgctggattgggagctgtcaaccattggtcatcctttgtcagacttagctcatttttccctgttctacttttggccaaggacagttccaatgataaatcaaggttcttatagtgaaaactcagggataccatcaatggaagaactgatttcaatatattgccgctgcaggggaattaattctattcttcctaactggaatttctttcttgccctttcatattttaagatggctggaatagcacagggagtatatagcagatatcttctgggaaataattcatctgaggatagctttttatttgccaatattgtgcaacctctggcagaaactggactacaactctccaaacgaactttcagtactgtactaccacagattgatactactggacagttgtttgtacagactcggaaaggtcaggaagttcttattaaggtgaagcatttcatgaaacaacacattcttccagctgaaaagattatgagactgatgcactgccctactgcgctaaggaggcaacctcctctttctaagagcttttctttctctttaatgttctgtagttttactatgctctggcttcattggctttccgaatttgaggattgctgtcttatcagttccgaaaacttttaagagaggtaactgagttctatgttcaaaatgaaaattcagtggacaagtggggaaaacctttagtgattgataaactcaaggaaatggccaaagtcgagggtctctggaacttgtttttgccagctgtcagcggactcagccacgtggactatgccttgattgctgaagaaacaggaaaatgcttttttgctccagatgtctttaactgccaagcaccagacacagggaatatggaggttctgcacctgtatggaagtgaggaacagaagaaacagtggcttgagcctcttcttcaagggaacattacctcttgcttctgtatgacagaacctgatgtagcttcaagtgatgccacgaatattgaatgcagcatccaacgagatgaagatagctatgtaattaacggcaaaaaatggtggagcagtggagctgggaatcccaagtgcaaaattgcaattgttttgggaagaactcaaaatacttctctctccaggtaattaaacaattctgattgagaaacctgtgtaggaatgagccagtcttcctcctatctaggtaatttacttaaaattcactgtttggactcacaaatcataatgtaagatatgagagtaaatgtcatatatttgtatttcacaagtattttctaacaggtgtttttggaaaacattatagggagtattgctgaacattcttcgctgtggaattttcagtattagaaagtgttgctaaattatcaaagctgtttggattaaattatcagacaaattttttcagacctgtgtaatgaagtgattagatgtttagatcaaaggcaataatcttgaaatgtttaattatatatataagttcccagttaccattgttgagcagtgagaagcttcaatcaaacaactcatttattttcaaatcattgtttctgttccagatcacagcctgcatcagactatgttggtgtacgtcttttacacagttcccattccagtcatcactgcttacatgactacatgaaaacatcaaaaagacaattgtgattctgcttattatctgttttatttttcttcttagcaaactttttctaatacaatttttcttttgactagacacaaacagcacagcatgattcttgttcccatgaacacacctggagtaaaaataataaggcctttgtcagtttttggctacacagataattttcatggaggacattttgagatccattttaatcaagtgcgagttcctgccacaaatctaatactaggtgaaggtaggggatttgaaatttcccaaggccgccttggacctggcagaatccaccactgtatgagaacagtaggtttggcggaacgcgctttgcagatcatgtgtgagcgggcaacacaaaggatagctttcaagaagaagttgtatgcacatgaggttgtggctcactggattgctgaaagccgcattgccattgagaagatccgcttgttgactctgaaagctgctcacagcatggacactctgggcagtgctggcgctaagaaagagattgcaatgatcaaagtggctgccccacgggctgtcagcaaaatcgttgactgggccatccaggtgtgcggaggtgctggtgtttcccaggattaccctctggctaacatgtatgctataacccgagttttgcgtttagcagatggacctgacgaagttcatctttcagcaatcgcaacaatggagctgcgggaccaagccaaaagactgacagccaagatataaggagggtggcactgccacatcccactggcagaaactctcctttatacaaacttcattggctccaacatttgaatctcatatttttgtagcagtttgagcacagggttaattattcatttgtggtaaagattatagcatctattttgatcagtgggttttattatttcaagggtcacacagggttaagttcagtaagaaatgctgtagctgttgtcattcaatctagtgcctccttgaggccaggagttcaggaccagcctgggcaacatagcgagacccccattgctacaaaaaatttaaaaatgaaacaagtgtggtggcacatgcttgtagtcctagctacttgggaggctgaggcaggaggattgcttgagtctaggagtttgaggttacagtaagctgtgatcgtgacatggcctccagcctgggtgaccgagtgagactgtttctaaaaataaaaacaaaaaataaatttcttcttgaggtggggtggaggtggggagcaagaatttgacctggctctgatccctggtgtgttgtgtgggcctctttaacgtttgccactgagccttaacctcactgtacttcactgtacttcacacgcattggtgttaacattttaatcttagaagaccctgacccactgagggtttgttgtgagaattgctgaagccacgtagaagcaccttgaaatctgtaaaaccacaagaaagtactttataaaaggtatccttatttgaagtggataaatcttgtaactcgaaaagttgtgatttagaagacaggattgtttttgaacattaggaattaaaggctatatctggtcctt

SEQ ID NO: 160162 - DNA, 695 bp, Homo sapiens
  Payload ID: 11327
  Gene Symbol: NPHP3-ACAD11
  Gene Name: NPHP3-ACAD11 readthrough (NMD candidate)
  ENST ID: ENST00000632629
  CDS Start-End: 1-695
ttccttagaaatgagggagcgagttctaggaccagatcaccctgactgtgctcagtctttgaataatctggcagctctatgcaatgaaaagaaacagtatgataaagcagaagaactttatgaaagagctttagatattcggagacgtgcattagctcctgatcacccttctttggcatatacggtgaagcatcttgccatcttgtataagaaaatggggaaacttgacaaagctgtacctttgtatgaattggctgttgaaattcgacagaaatcttttggcccaaagcaccctagtgtagctactgccttggtgaacttagctgttctttatagccaaatgaaaaaacacgttgaagctttgccattatatgaaagagcattaaagatttatgaagatagcctgggtcggatgcatcctcgagttggagaaacactgaaaaatttagctgtgcttagctatgaaggaggagattttgaaaaagctgctgaattatacaaaagggcaatggaaataaaagaagcagaaacatcactcttgggtggaaaagctccttcacgccattcatcaagtggagacacgtttagcttaaaaacagctcattctcctaatgttttccttcagcaaggacaaagagcaggaaagtccaatccaaccttttatctccagaagggctttcaaacatatgtgctca

SEQ ID NO: 160163 - DNA, 4415 bp, Homo sapiens
  Payload ID: 11328
  Gene Symbol: NPLOC4
  Gene Name: NPL4 homolog, ubiquitin recognition factor
  Uniprot ID: Q8TAT6
  ENST ID: ENST00000331134
  CDS Start-End: 217-2043
aacctggtttcccggcctcgcgcccgaggggagcgtattgagcgaggcaccgggacgtcggcggctggcggagccgggcgggcgaagctggagcggcggtggcggcggcgtagggaggccggggccggggctgaggccgcggccgggtctgcgaggcccttggggcggcaggcggcggcggcccggggctcgagcccggaggcaggagcagccgccatggccgagagcatcataattcgtgtccagtccccggatggagtgaagcggatcacagcaacaaagagagaaacagcagcaacatttttgaaaaaggttgcaaaggagtttggcttccaaaataatggcttctcggtttacatcaatagaaacaagaccggagagataacagcctcctccaacaaatccctcaacttgctaaaaatcaagcatggcgatttgttgttcctgtttccctcgagccttgctgggccctcatctgaaatggagacgtcagttccaccgggcttcaaagtctttggcgctcccaacgtggtggaggatgagattgatcagtacctcagcaaacaggacgggaagatttacagaagccgagacccacagctatgccgccacggccctttggggaaatgcgtgcactgcgtccctctagagccattcgatgaggactatctaaaccatctcgagcctcccgtgaagcacatgtccttccacgcctacatccggaagctgactggaggggctgacaaggggaagtttgttgccctggagaacatcagctgcaagattaagtcagggtgcgaggggcacctcccgtggccgaatggcatctgtactaagtgccagccgagcgccatcacgctgaacagacagaagtacaggcatgtggacaatatcatgtttgagaatcacaccgtcgctgaccgctttcttgacttctggagaaagacagggaaccagcattttgggtacttatacggacggtacacggagcacaaagacattccccttggcatcagggctgaagtggctgcgatttatgagccacctcagattggtacacagaacagcttggagcttcttgaggatccaaaagctgaagtggtcgatgaaattgctgccaaacttggcctgcggaaggttggctggatatttacagacctcgtctcagaagatacccgaaagggtaccgtccgctacagtcgaaataaggacacctatttcctaagttcagaagagtgcatcactgcaggagacttccagaacaagcatcccaacatgtgccggctctctccagacggacattttggatccaagtttgttactgcagtggctacaggtggtcctgacaaccaagtccactttgaagggtaccaggtgtccaatcagtgtatggcactggtccgtgatgagtgtttgctgccatgcaaggacgccccggagcttggctacgccaaggagtctagcagtgagcagtacgtgcctgatgtgttttataaggacgtagacaagtttggcaacgagatcacccagctggcccggcccctgcctgtggagtatctcatcatagacatcacaacaactttccccaaggatccagtttacactttttctatttcgcaaaatccatttcctattgaaaaccgggatgtattgggtgagacacaggacttccatagcttggccacctatttgtctcagaatacctcatctgtgttcttggataccatctcagatttccacctcttgctgttcctggtcaccaatgaagttatgcctctgcaggacagcatcagcttgctgctggaggccgtgcggaccagaaatgaggagctcgcccagacatggaagaggtctgagcagtgggccaccatcgagcagctgtgcagcacagttggcgggcagctcccaggtctccatgagtacggcgccgtcgggggctccacacacacggccactgcagccatgtgggcctgtcagcactgcacgttcatgaaccagccaggcacaggccactgcgagatgtgcagcctccccaggacctagggcgcctgccctctgctggctaggaccgggcccagcccagcccttcctgaagccagaagcgttgctgagtgtgttccctgtaactgccccatagtgggcagccctggaggaacaaggggctggctgtcctgggctccctgacccactgaagcttctcagcacgttcctccctggagagcgggcgccacggctggtattctgcaggctgaatgcagtctccagactggaaacgcagagcggctcctcacgcctaatcctgttgacaagtcccccgccgtgttggaaagacctctcgcctctacgtggcacctggaattggggcgcacagggaggggccgatgctgccaccacccagccttctctttattttcagtgctttttgtttggcctccctgcccccatgtttttctggctgggagctcttggttacccccttgtctgactgcttggtggcaggcaccctgcctgtgagggccactttcctcttctagtagctgttgtctggtggggacgcagtggccctggacacggctcccctctgcaggtctgcaggtcggtttgctgcctgccctcctcctctcacccgatgtccaggtgggattttaaagtctgcattggttataataacagttatcagtaattcctgcccagaagacttttatttatttttttttaagataaaaactgcacaaaaggggagtgagagagactagtttccacatccttccctcctttagtgaagcccccgaggttgtgtccagggtgatgagtgtggacgggggcaccagtcagttctcccttgaagtaaacctcagtgcctgagacttttctaccaagccacacagctgcagcaactgcagatactgcgggctgagcaggagcagtggtggcgcctgccctgaggctgccctgcgatggcctgggtgggagagctgggtcaccggtgccgatgctctggccctccccaatacgctgcttcgtcccactgcaccgcctggctgagggcgttaggggctgtgcctcttgtgagggccatttgggacctccctggggcactgcacaattgatagtgtaccaatagagggagactgggcgatctggaacagcacgtggtggggtcctgcttgtgtgctctgcgttcctctgtggcgtggccaggccggggcatggctcttacccggggagtggtgggcatctcgatgcttctttgccttaatgatggccacatctgggctgctctgcacccacgggagaggctggcccagctgcagactgcttagggacttctgtgtccatcctggggggtaagcccacgtgacccacattcttggcactatgaacagagaacatttgcctgttggcttctgaagtggtcagggccatggctgacacctccaggtccgcctggcatgggacaccaagtggaaggcccaagcagctcatctgctcttgggaccaggggccagttgggttgggtctggtcacggcagagctattgtggagggtcaggaagggtggagaggagctgggttgaagcggactgctgcggatgcaactcccagcttgcccaccgcgggctgtctgctctccctcctagcagctgtcacactgaagttttgtcctctgctgtctcctctggtcctgagatgagctgtgagcctaggtggccaaggcttcctgcattgcttccctgtgagtccaaggccttcccccaccactgggcagaggctggacagcacggacttctagagagagccgcgttgccagttcctctcccactcgctcgtccttatccaccacgctattatagtttccgttgtcctccaccagcatttcccttactctgaagttccggcattcacatcattcatgttttcttttgtcttttagctaaaggaaaagcattggcgatttgtctgattctggttttgagttactctttgttcagtaatgcactttattttattgtccaaagagagtcagagctaagcatacaggcttgggggtgagccctgctgtgagagttcaggccctgggaggctcagccacctcctcttgtgggaaggaggtctcagccccacctcgcatcttcacctgcccttggtgtggacacaccctctcatgctaccagcaccataatccagtgggggtgactgggtgcacacctgcccaggtgaacacagcggctgccagtctcctggtcccgagaggaggtggggcctggccctggctccctccaaccagctgctcctgggacacaggtgctcctgcttcggctctgtttcggctcacaggtgtgcatcactgggcttggatttgcattacattgaccccagccctgcagtggaacctaataaaagcgcctgaagcaa

SEQ ID NO: 160164 - DNA, 5538 bp, Homo sapiens
  Payload ID: 11328
  Gene Symbol: NPLOC4
  Gene Name: NPL4 homolog, ubiquitin recognition factor
  Uniprot ID: Q8TAT6
  ENST ID: ENST00000374747
  CDS Start-End: 131-1984
gctggagcggcggtggcggcggcgtagggaggccggggccggggctgaggccgcggccgggtctgcgaggcccttggggcggcaggcggcggcggcccggggctcgagcccggaggcaggagcagccgccatggccgagagcatcataattcgtgtccagtccccggatggagtgaagcggatcacagcaacaaagagagaaacagcagcaacatttttgaaaaaggttgcaaaggagtttggcttccaaaataatggcttctcggtttacatcaatagaaacaagaccggagagataacagcctcctccaacaaatccctcaacttgctaaaaatcaagcatggcgatttgttgttcctgtttccctcgagccttgctgggccctcatctgaaatggagacgtcagttccaccgggcttcaaagtctttggcgctcccaacgtggtggaggatgagattgatcagtacctcagcaaacaggacgggaagatttacagaagccgagacccacagctatgccgccacggccctttggggaaatgcgtgcactgcgtccctctagagccattcgatgaggactatctaaaccatctcgagcctcccgtgaagcacatgtccttccacgcctacatccggaagctgactggaggggctgacaaggggaagtttgttgccctggagaacatcagctgcaagattaagtcagggtgcgaggggcacctcccgtggccgaatggcatctgtactaagtgccagccgagcgccatcacgctgaacagacagaagtacaggcatgtggacaatatcatgtttgagaatcacaccgtcgctgaccgctttcttgacttctggagaaagacagggaaccagcattttgggtacttatacggacggtacacggagcacaaagacattccccttggcatcagggctgaagtggctgcgatttatgagccacctcagattggtacacagaacagcttggagcttcttgaggatccaaaagctgaagtggtcgatgaaattgctgccaaacttggcctgcggaaggttggctggatatttacagacctcgtctcagaagatacccgaaagggtaccgtccgctacagtcgaaataaggacacctatttcctaagttcagaagagtgcatcactgcaggagacttccagaacaagcatcccaacatgtgccggctctctccagacggacattttggatccaagtttgttactgcagtggctacaggtggtcctgacaaccaagtccactttgaagggtaccaggtgtccaatcagtgtatggcactggtccgtgatgagtgtttgctgccatgcaaggacgccccggagcttggctacgccaaggagtctagcagtgagcagtacgtgcctgatgtgttttataaggacgtagacaagtttggcaacgagatcacccagctggcccggcccctgcctgtggagtatctcatcatagacatcacaacaactttccccaaggatccagtttacactttttctatttcgcaaaatccatttcctattgaaaaccgggatgtattgggtgagacacaggacttccatagcttggccacctatttgtctcagaatacctcatctgtgttcttggataccatctcagatttccacctcttgctgttcctggtcaccaatgaagttatgcctctgcaggacagcatcagcttgctgctggaggccgtgcggaccagaaatgaggagctcgcccagacatggaagaggtctgagcagtgggccaccatcgagcagctgtgcagtgagtacccccaccccctgccccggcaccccgtggctggggccggagagcagcccactctgcacagctccccactgccggtggtgccctggattccgcacccagctgcatcctggcaggtgccatcggcaatgcaacgagtagagactcggcctccctgccaggcacgtggcaggctccggtgatggagcagacatgttgtccaggccgtacgtcttaggtacacagccctgtaaattttataaacctgtacatcagagatactaatctccaggcatcctaggagcactttgaacatcattgtcttaagagaatcagaaactttatggaagcgccggaagcgtgggaccttttggtctccttgagaatttccctttagtgcttaaagctgtaaggaggagaagcctgcagcatccatgttgttgctggtggacactacggaacggaccgcaggcattgcgtgtcttccggaccctcagtcaccaggtcctgaacgattccccactcgtgagaaccttctgtcagcattgctgcagggactcctcacgcaccgtggtgcctcgtgcagcccgagtgccctgagtccctgcagctgagagcaccagagtgcccgggagctacggccctggacaaatgctagaatccttctgttaacacagccttcaaaagacacatcaaacacctttataccatttcctgtttttttttttttttttgagacggagtttggctcttgtcacccaggctggagtgtggtggcgtgatcttgcctcactgcaacctccacctcctgggttcaaacgattctcctgcctcagcctcctgagtagctgggactacaggcatgtgccaccatgcctggataatttttgtattcttagtagagccagggtttcaccatgttagccaggctggtctcgaactcctgaccttgtgatctgcttgcctctgcctcccagagtgttgggattacaggtgtgagccaccacgcccagccgaggttttcttttcacacaattctttgtttattatttttatttttgtagagacagggtctcactctattgccgaggctggagtgcagttgcacaatcgtaactcactgcagcctcaaactccaggctcaagtgatctttctgcttcagcctgctgagtaactgggaccacaggcttgcaacaccacacccagctaattcttggggctttgttgttgctttttatttgtttgttttttaaaaataattttaacttattttagattcacagggtacatgtgcaggtttgtcacctgggtatattgcctgatgctgaggttggggtatgattgatcacatcacccaggtactacacatagtacctaatagtttttcagcccgccctgctctttgtgtgtgtgtgtgtgtgtgtgtgtgtgtgtgtgttttgagctggagcctcaccctgtctcccaggctggagtgcagtggcgcaatcttagctcactgcaaactctgcctcctgggttgaagcaattcccctccctcagcctcccgagtagctgggattacagatgtgtaccaccacacctggcgttgccatctttatgtacgtgagtacccatgtttagctcccacttataaatgaaaacatgtagtatttggtttgctgttcctgcattagtttgcttagaataatggccttcaactgcatccatgttgctgcaaaggacatgatttcattcctttttatggctgcaaaattttttaatatttttgtatcaatgaggtctcactgtgttgcccagactggtctcaaactttggcctcaagcattccttgcacctcagcctcacaaagtcctgagattatacctgggagccactgcacccagccctttgatgcagttctaacaatgacaccagtcttttttttttttttcttttttgtttcccttttagagacagggtttcactctgttgcctaggctggagtgcagtggagtgatcatagctcactacagccttcaattcctgagctcaagcgatcctcctgcatcagctttcggagtacctaggagtataaacatgagccactacacccaactaatgtttttggttggtgttttttttttttctttaagagatagggttggccgggcccggtggctggctcacacctgtaatcccagcactttgggaggctgaggcaggtggatcacaacgtcaagggattgagaccatcctggccaacatggtgaaaccccatttctgttaaaactacaaaaattagctgggcatggtggcgagcgcctgtaatcccagctactcaggaggctgaggcaggagaatcacttgacccaggaagcgtaggttgtagtgagctgagatcgtgccactgtactccagcctgggcgacagagcaagactctgtctcaaaaaaaaaaaaaagatgtggtcttgccatgttgcccaggctggtctcaaactcctaggctcaagtgatcttcctgccttggttcccaaagtgctgagattacagctgtgagccactgcacctgaccttttttttttcccccctccttttttttttgagacaggttctcactctgtcacccaggctgaagtgcagtggcatttgaggtcagtctcaccttgacctccccaggctcaaacaatcctcccgcctcagcctcctgagcagctgggactacaagcatgtgccaccatccctggctgattttttaaatttgttgtagagatgaggtctcactatgttgcccaggctggtcttgaactcttgggcccaagcgatcctcccgcctcagtgctgagattgcagtggtaagccaccatgtccagccaactctttaataataggcagttctgactggtgtaagttctgactggtatctcactgtggttttaatttgcatctctgatgattagtgatgttgggcattttttcatgggttttttgtttgtttgttttgagacaaagtcttgttctgttgcccaggctggagtgcagtagtgtgatctcagctcactgcagcctccacctcccgggttcaagccattgtccagcctctgcctcctaagtagctggaattacaggtggctgccaccacacccagctaatttttttagttttagtagagacagggtttctccatgttggccaggctggtctcaaactcctgacctcaagtgatccacccacctcggcttcccaaagtgctgggattataggtgtgagccaccgcgcccggccctcatgggttgttttgttttgttttgagacggaatctcaccctgtcacccaggctgcagtgcaatctcatgatctccacttactgcaacctccacgtcctgggttcaagtgatactcctgcctcagcctcccgagtagctgggactacaggcgtgcacccacgcctggctaatttttatatttttagtagagatggggtttcaccatgttggtcaggctggtctggaactcctgacctcaggtgatccacctgcctcggtctcccaaagtgctgggattacagacgtgtatacacaagacacaaagatcagctcaggatgggtcataggcctaatggtaaaaggtaaaactatgaagcaggctgggcatgatgtctcatagctataatcctaacactctaggaggccaaagctggaggacactgtagcccagaagtgtgagaccagcccacacagcatagtgaagccccgtctgtacaaaaaaacaatatt

SEQ ID NO: 160165 - DNA, 559 bp, Homo sapiens
  Payload ID: 11328
  Gene Symbol: NPLOC4
  Gene Name: NPL4 homolog, ubiquitin recognition factor
  ENST ID: ENST00000572824
  CDS Start-End: 1-518
tttacactttttctatttcgcaaaatccatttcctattgaaaaccgggatgtattgggtgagacacagacagagtctcactctatcacccaggctggagtgcagtggtgcgatcttggctcactacaacctccacctcctgggttcaagcgattcttctgcttcagcctcctgagtagctgggattataggacttccatagcttggccacctatttgtctcagaatacctcatctgtgttcttggataccatctcagatttccacctcttgctgttcctggtcaccaatgaagttatgcctctgcaggacagcatcagcttgctgctggaggccgtgcggaccagaaatgaggagctcgcccagacatggaagaggtctgagcagtgggccaccatcgagcagctgtgcagcacagttggcgggcagctcccaggtctccatgagtacggcgccgtcgggggctccacacacacggccactgcagccatgtgggcctgtcagcactgcacgttcatgaaccagccaggcacaggccactgcgagatgtgcagcctcccc

SEQ ID NO: 160166 - DNA, 654 bp, Homo sapiens
  Payload ID: 11328
  Gene Symbol: NPLOC4
  Gene Name: NPL4 homolog, ubiquitin recognition factor
  ENST ID: ENST00000573519
  CDS Start-End: 1-436
gcaaaatccatttcctattgaaaaccgggatgtattgggtgagacacaggacttccatagcttggccacctatttgtctcagaatacctcatctgtgttcttggataccatctcagatttccacctcttgctgttcctggtcaccaatgaagttatgcctctgcaggacagcatcagcttgctgctggaggccgtgcggaccagaaatgaggagctcgcccagacatggaagaggtctgagcagtgggccaccatcgagcagctgtgcacctcccgagtagctgggattacagatgtgtaccaccacacctggcgttgccatctttatgcacagttggcgggcagctcccaggtctccatgagtacggcgccgtcgggggctccacacacacggccactgcagccatgtgggcctgtcagcactgcacgttcatgaaccagccaggcacaggccactgcgagatgtgcagcctccccaggacctagggcgcctgccctctgctggctaggaccgggcccagcccagcccttcctgaagccagaagcgttgctgagtgtgttccctgtaactgccccatagtgggcagccctggaggaacaaggggctggctgtcctgggctccctgacccactgaagcttctcagcacgttcct

SEQ ID NO: 160167 - DNA, 564 bp, Homo sapiens
  Payload ID: 11328
  Gene Symbol: NPLOC4
  Gene Name: NPL4 homolog, ubiquitin recognition factor
  ENST ID: ENST00000573212
  CDS Start-End: 1-333
actttccccaaggatccagtttacactttttctatttcgcaaaatccatttcctattgaaaaccgggatgtattgggtgagacacaggacttccatagcttggccacctatttgtctcagaatacctcatctgtgttcttggataccatctcagatttccacctcttgctgttcctggtcaccaatgaagttatgcctctgcaggacagcatcagcttgctgctggaggccgtgcggaccagaaatgaggagctcgcccagacatggaagaggtctgagcagtgggccaccatcgagcagctgtgcaagacagggtttcactctgttgcctaggctggagtgcagtggagtgatcatagctcactacagccttcaattcctgagctcaagcgatcctcctgcatcagctttcggagtacctaggagtataaacatgagccactacacccaactaatgtttttggcacagttggcgggcagctcccaggtctccatgagtacggcgccgtcgggggctccacacacacggccactgcagccatgtgggcctgtcagcactgcacg

SEQ ID NO: 160168 - DNA, 676 bp, Homo sapiens
  Payload ID: 11328
  Gene Symbol: NPLOC4
  Gene Name: NPL4 homolog, ubiquitin recognition factor
  ENST ID: ENST00000571714
  CDS Start-End: 1-549
ggcaacgagatcacccagctggcccggcccctgcctgtggagtatctcatcatagacatcacaacaactttccccaaggatccagtttacactttttctatttcgcaaaatccatttcctattgaaaaccgggatgtattgggtgagacacaggacttccatagcttggccacctatttgtctcagaatacctcatctgtgttcttggataccatctcagatttccacctcttgctgttcctggtcaccaatgaagttatgcctctgcaggacagcatcagcttgctgctggaggccgtgcggaccagaaatgaggagctcgcccagacatggaagaggtctgagcagtgggccaccatcgagcagctgtgcagttcacgccattctccttcctcagccttcctagtagctgggattacaggtgcgcaccaccacccccaggcacagttggcgggcagctcccaggtctccatgagtacggcgccgtcgggggctccacacacacggccactgcagccatgtgggcctgtcagcactgcacgttcatgaaccagccaggcacaggccactgcgagatgtgcagcctccccaggacctagggcgcctgccctctgctggctaggaccgggcccagcccagcccttcctgaagccagaagcgttgctgagtgtgttcc

SEQ ID NO: 160169 - DNA, 414 bp, Homo sapiens
  Payload ID: 11328
  Gene Symbol: NPLOC4
  Gene Name: NPL4 homolog, ubiquitin recognition factor
  ENST ID: ENST00000570324
  CDS Start-End: 1-176
gcgctcccaacgtggtggaggatgagattgatcagtacctcagcaaacaggacgggaagatttacagaagccgagacccacagctatgccgccacggccctttggggaaatgcgtgcactgcgtccctctagagggggaagtttgttgccctggagaacatcagctgcaagattaagtcagggtgcgaggggcacctcccgtggccgaatggcatctgtactaagtgccagccgagcgccatcacgctgaacagacagaagtacaggcatgtggacaatatcatgtttgagaatcacaccgtcgctgaccgctttcttgacttctggagaaagacagggaaccagcattttgggtacttatacggacggtacacggagcacaaagacattccccttggcatcagggctgaagtg

SEQ ID NO: 160170 - DNA, 2365 bp, Homo sapiens
  Payload ID: 11328
  Gene Symbol: NPLOC4
  Gene Name: NPL4 homolog, ubiquitin recognition factor
  ENST ID: ENST00000574897
  CDS Start-End: 150-557
gcggagccgggcgggcgaagctggagcggcggtggcggcggcgtagggaggccggggccggggctgaggccgcggccgggtctgcgaggcccttggggcggcaggcggcggcggcccggggctcgagcccggaggcaggagcagccgccatggccgagagcatcataattcgtgtccagtccccggatggagtgaagcggatcacagcaacaaagagagaaacagcagcaacatttttgaaaaaggttgcaaaggagtttggcttccaaaataatggcttctcggtttacatcaatagaaacaagaccggagagataacagcctcctccaacaaatccctcaacttgctaaaaatcaagcatggcgatttgttgttcctgtttccctcgagccttgctgggccctcatctgaaatggagacgtcagttccaccgggcttcaaagtctttggcgctcccaacgtggtggaggatgagattgatcagtacctcagcaaacaggacgggaagatttacagaagccgagacccacagctccattcgatgaggactatctaaaccatctcgagcctcccgtgaagcacatgtccttccacgcctacatccggaagctgactggaggggctgacaaggggaagtttgttgccctggagaacatcagctgcaagattaagtcagggtgcgaggggcacctcccgtggccgaatggcatctgtactaagtgccagccgagcgccatcacgctgaacagacagaagtacaggcatgtggacaatatcatgtttgagaatcacaccgtcgctgaccgctttcttgacttctggagaaagacagggaaccagcattttgggtacttatacggacggtacacggagcacaaagacattccccttggcatcagggctgaagtggctgcgatttatgagccacctcagattggtacacagaacagcttggagcttcttgaggatccaaaagctgaagtggtcgatgaaattgctgccaaacttggcctgcggaaggttggctggatatttacagacctcgtctcagaagatacccgaaagggtaccgtccgctacagtcgaaataaggacacctatttcctaagttcagaagagtgcatcactgcaggagacttccagaacaagcatcccaacatgtgccggctctctccagacggacattttggatccaagtttgttactgcagtggctacaggtggtcctgacaaccaagtccactttgaagggtaccaggtgtccaatcagtgtatggcactggtccgtgatgagtgtttgctgccatgcaaggacgccccggagcttggctacgccaaggagtctagcagtgagcagtacgtgcctgatgtgttttataaggacgtagacaagtttggcaacgagatcacccagctggcccggcccctgcctgtggagtatctcatcatagacatcacaacaactttccccaaggatccagtttacactttttctatttcgcaaaatccatttcctattgaaaaccgggatgtattgggtgagacacaggacttccatagcttggccacctatttgtctcagaatacctcatctgtgttcttggataccatctcagatttccacctcttgctgttcctggtcaccaatgaagttatgcctctgcaggacagcatcagcttgctgctggaggccgtgcggaccagaaatgaggagctcgcccagacatggaagaggtctgagcagtgggccaccatcgagcagctgtgcagtgagtacccccaccccctgccccggcaccccgtggctggggccggagagcagcccactctgcacagctccccactgccggtggtgccctggattccgcacccagctgcatcctggcaggtgccatcggcaatgcaacgagtagagactcggcctccctgccaggcacgtggcaggctccggtgatggagcagacatgttgtccaggccgtacgtcttaggtacacagccctgtaaattttataaacctgtacatcagagatactaatctccaggcatcctaggagcactttgaacatcattgtcttaagagaatcagaaactttatggaagcgccggaagcgtgggaccttttggtctccttgagaatttccctttagtgcttaaagctgtaaggaggagaagcctgcagcatccatgttgttgctggtggacactacggaacggaccgcaggcattgcgtgtcttccggaccctcagtcaccaggtcctgaacgattccccactcgtgagaaccttctgtcagcattgctgcagggactcctcacgcaccgtggtgcctcgtgcagcccgagtgccctgagtccctgcagctga

SEQ ID NO: 160171 - DNA, 560 bp, Homo sapiens
  Payload ID: 11328
  Gene Symbol: NPLOC4
  Gene Name: NPL4 homolog, ubiquitin recognition factor
  ENST ID: ENST00000573876
  CDS Start-End: 206-376
gtttattttgtgtctgtattttgtctcaaaaccactcactcgggtatttgacatcaggcaccctgtgcctcttccctgcctgtgccttccctagtcagcccagggaactgcacctcctgctccgaggttcagctgctgcccatctgtctggacaggtggtgaaaggacagcatcagcttgctgctggaggccgtgcggaccagaaatgaggagctcgcccagacatggaagaggtctgagcagtgggccaccatcgagcagctgtgcagcacagttggcgggcagctcccaggtctccatgagtacggcgccgtcgggggctccacacacacggccactgcagccatgtgggcctgtcagcactgcacgttcatgaaccagccaggcacaggccactgcgagatgtgcagcctccccaggacctagggcgcctgccctctgctggctaggaccgggcccagcccagcccttcctgaagccagaagcgttgctgagtgtgttccctgtaactgccccatagtgggcagccctggaggaacaaggggctggctgtcctgggc

SEQ ID NO: 160172 - DNA, 946 bp, Homo sapiens
  Payload ID: 11328
  Gene Symbol: NPLOC4
  Gene Name: NPL4 homolog, ubiquitin recognition factor
  ENST ID: ENST00000572760
  CDS Start-End: 256-426
actcactcgggtatttgacatcaggcaccctgtgcctcttccctgcctgtgccttccctagtcagcccagggaactgcacctcctgctccgaggttcagctgctgcccatctgtctggacaggtggtgaaaggtgaggctccctctacaccagagccaccttgctagtatactgcactatttttgcagtcatctgttggaagacattctctggaggacagcatcagcttgctgctggaggccgtgcggaccagaaatgaggagctcgcccagacatggaagaggtctgagcagtgggccaccatcgagcagctgtgcagcacagttggcgggcagctcccaggtctccatgagtacggcgccgtcgggggctccacacacacggccactgcagccatgtgggcctgtcagcactgcacgttcatgaaccagccaggcacaggccactgcgagatgtgcagcctccccaggacctagggcgcctgccctctgctggctaggaccgggcccagcccagcccttcctgaagccagaagcgttgctgagtgtgttccctgtaactgccccatagtgggcagccctggaggaacaaggggctggctgtcctgggctccctgacccactgaagcttctcagcacgttcctccctggagagcgggcgccacggctggtattctgcaggctgaatgcagtctccagactggaaacgcagagcggctcctcacgcctaatcctgttgacaagtcccccgccgtgttggaaagacctctcgcctctacgtggcacctggaattggggcgcacagggaggggccgatgctgccaccacccagccttctctttattttcagtgctttttgtttggcctccctgcccccatgtttttctggctgggagctcttggttacccccttgtctgactgcttggtggcaggcaccctgcctgtg

SEQ ID NO: 160173 - DNA, 405 bp, Homo sapiens
  Payload ID: 11328
  Gene Symbol: NPLOC4
  Gene Name: NPL4 homolog, ubiquitin recognition factor
  ENST ID: ENST00000625705
  CDS Start-End: 1-405
atggaagccgtaataattcgtgtccagtccccggatggagtgaagcggatcacagcaacaaagagagaaacagcagcaacatttttgaaaaaggttgcaaaggagtttggcttccaaaataatggcttctcggtttacatcaatagaaacaagaccggagagataacagcctcctccaacaaatccctcaacttgctaaaaatcaagcatggcgatttgttgttcctgtttccctcgagccttgctgggccctcatctgaaatggagacgtcagttccaccgggcttcaaagtctttggcgctcccaacgtggtggaggatgagattgatcagtacctcagcaaacaggacgggaagatttacagaagccgagacccacagctccattcgatgaggactatctaa

SEQ ID NO: 160174 - DNA, 1700 bp, Homo sapiens
  Payload ID: 11329
  Gene Symbol: NPRL2
  Gene Name: NPR2-like, GATOR1 complex subunit
  Uniprot ID: Q8WTW4
  ENST ID: ENST00000232501
  CDS Start-End: 440-1582
atggaaattgtagttccctgctgcggtcccagttacagcgtgaatcccttagcgcaccgcctccccaagtgctgccagcatgctgcccctccacgctagggacttgcctgcctctgccgcagcgcagatctgatgcggtggtttcctccaaagaaagcgggatactccgggccctgccgcgcgcaccgccgctccgtcacggagccgctttacttccgggtgcgacgtctacccacccaggacttcctgggacgagccgtcccccgccccagccacgcctctgagtcgcgctgcgcaggcgccattgggcagagggattggcaagcttgcgtgccccagcgacacaggcctcgaggctgtctctgacaagtgttcacaggaggtggggacgcctctgcgcgaggaacgaggagctacgggcctgggcccggttattgccatgggcagcggctgccgcatcgaatgcatattcttcagcgagttccaccccacgctgggacccaagatcacctatcaggtccctgaagacttcatctcccgagagctgtttgacacagtccaagtgtacatcatcaccaagccagagctgcagaacaagcttatcactgtcacagctatggaaaagaagctgatcggctgtcctgtgtgcatcgaacacaagaagtacagccgcaatgctctcctcttcaacctgggcttcgtgtgtgatgcccaggccaagacctgcgccctcgagcccattgttaaaaagctggctggctatctgaccacactagagctagagagcagcttcgtgtccatggaggagagcaagcagaagttggtgcccatcatgaccatcttgctggaggagctaaatgcctcaggccggtgcactctgcccattgatgagtccaacaccatccacttgaaggtgattgagcagcggccagaccctccggtggcccaggagtatgatgtacctgtctttaccaaagacaaggaggatttcttcaactcacagtgggacctcactacacaacaaatcctgccctacattgatgggttccgccacatccagaagatttcagcagaggcagatgtggagctcaacctggtgcgcattgctatccagaacctgctgtactacggcgttgtgacactggtgtccatcctccagtactccaatgtatactgcccaacgcccaaggtccaggacctggtagatgacaagtccctgcaagaggcatgtctatcctacgtgaccaagcaagggcacaagagggccagtctccgggatgtgttccagctatactgcagcctgagccctggcactaccgtgcgagacctcattggccgccacccccagcagctgcagcatgttgatgaacggaagctgatccagttcgggcttatgaagaacctcatcaggcgactacagaagtatcctgtgcgggtgactcgggaagagcagagccaccctgcccggctttatacaggctgccacagctatgacgagatctgctgcaagacaggcatgagctaccatgagctggatgagcggcttgaaaatgaccccaacatcatcatctgctggaagtgaggctggtagtgactggatggacacattgctgtgggtagtccctcctactaggaggcttgtcatactgtctagaggttgactcttagttctgtaaataaagacatccatttcaaacagc

SEQ ID NO: 160175 - DNA, 1573 bp, Homo sapiens
  Payload ID: 11329
  Gene Symbol: NPRL2
  Gene Name: NPR2-like, GATOR1 complex subunit
  ENST ID: ENST00000433381
  CDS Start-End: 130-393
agagggattggcaagcttgcgtgccccagcgacacaggcctcgaggctgtctctgacaagtgttcacaggaggtggggacgcctctgcgcgaggaacgaggagctacgggcctgggcccggttattgccatgggcagcggctgccgcatcgaatgcatattcttcagcgagttccaccccacgctgggacccaagatcacctatcaggtccctgaagacttcatctcccgagagctgtttgacacagtccaagtgtacatcatcaccaagccagagctgcagaacaagcttatcactgtctatggaaaagaagctgatcggctgtcctgtgtgcatcgaacacaagaagtacagccgcaatgctctcctcttcaacctgggcttcgtgtgtgatgcccaggccaagacctgcgccctcgagcccattgttaaaaagctggctggctatctgaccacactagagagagcagcttcgtgtccatggaggagagcaagcagaagttggtgcccatcatgaccatcttgctggaggagctaaatgcctcaggccggtgcactctgcccattgatgagtccaacaccatccacttgaaggtgattgagcagcggccagaccctccggtggcccaggagtatgatgtacctgtctttaccaaagacaaggaggatttcttcaactcacagtgggacctcactacacaacaaatcctgccctacattgatgggttccgccacatccagaagatttcagcagaggcagatgtggagctcaacctggtgcgcattgctatccagaacctgctgtactacggcgttgtgacactggtgtccatcctccagtactccaatgtatactgcccaacgcccaaggtccaggacctggtagatgacaagtccctgcaagaggcatgtctatcctacgtgaccaagcaagggcacaagagggccagtctccgggatgtgttccagctatactgcagcctgagccctggcactaccgtgcgagacctcattggccgccacccccagcagctgcagcatgttgatgaacggtcagaggagaatttgctggggcatttgggagttacctgagggaagctagaccctttatgtctctcaggagccctggatcatggggcactgccaatccaagcaggcttcctggagatgatgggctacagagacaaaattgaagggagactacaggaaagggttggcctgcctgaaagaaggcctggccagggcgtcaccccgtcctctgatcctcaccctaggaagctgatccagttcgggcttatgaagaacctcatcaggcgactacagaagtatcctgtgcgggtgactcgggaagagcagagccaccctgcccggctttatacaggctgccacagctatgacgagatctgctgcaagacaggcatgagctaccatgagctggatgagcggcttgaaaatgaccccaacatcatcatctgctggaagtgaggctggtagtgactggatggacacattgctgtgggtagtccctcctactaggaggcttgtcatactgtctagaggttgactcttagtt

SEQ ID NO: 160176 - DNA, 1747 bp, Homo sapiens
  Payload ID: 11329
  Gene Symbol: NPRL2
  Gene Name: NPR2-like, GATOR1 complex subunit
  ENST ID: ENST00000451194
  CDS Start-End: 103-366
agcgacacaggcctcgaggctgtctctgacaagtgttcacaggaggtggggacgcctctgcgcgaggaacgaggagctacgggcctgggcccggttattgccatgggcagcggctgccgcatcgaatgcatattcttcagcgagttccaccccacgctgggacccaagatcacctatcaggtccctgaagacttcatctcccgagagctgtttgacacagtccaagtgtacatcatcaccaagccagagctgcagaacaagcttatcactgtctatggaaaagaagctgatcggctgtcctgtgtgcatcgaacacaagaagtacagccgcaatgctctcctcttcaacctgggcttcgtgtgtgatgcccaggccaagacctgcgccctcgagcccattgttaaaaagctggctggctatctgaccacactagaggtctgcaatgagatgggcttgggtttaccgacaggcagagttggggaaggtgttcccatgtctccaaagtcccccaaacctgggaccctgcaaaccagctcaggactcagggcagccaaccagccaggggtcctgggatgtgcccaccatgctttccatgctctgtctagctagagagcagcttcgtgtccatggaggagagcaagcagaagttggtgcccatcatgaccatcttgctggaggagctaaatgcctcaggccggtgcactctgcccattgatgagtccaacaccatccacttgaaggtgattgagcagcggccagaccctccggtggcccaggagtatgatgtacctgtctttaccaaagacaaggaggatttcttcaactcacagtgggacctcactacacaacaaatcctgccctacattgatgggttccgccacatccagaagatttcagcagaggcagatgtggagctcaacctggtgcgcattgctatccagaacctgctgtactacggcgttgtgacactggtgtccatcctccagtactccaatgtatactgcccaacgcccaaggtccaggacctggtagatgacaagtccctgcaagaggcatgtctatcctacgtgaccaagcaagggcacaagagggccagtctccgggatgtgttccagctatactgcagcctgagccctggcactaccgtgcgagacctcattggccgccacccccagcagctgcagcatgttgatgaacggtcagaggagaatttgctggggcatttgggagttacctgagggaagctagaccctttatgtctctcaggagccctggatcatggggcactgccaatccaagcaggcttcctggagatgatgggctacagagacaaaattgaagggagactacaggaaagggttggcctgcctgaaagaaggcctggccagggcgtcaccccgtcctctgatcctcaccctaggaagctgatccagttcgggcttatgaagaacctcatcaggcgactacagaagtatcctgtgcgggtgactcgggaagagcagagccaccctgcccggctttatacaggctgccacagctatgacgagatctgctgcaagacaggcatgagctaccatgagctggatgagcggcttgaaaatgaccccaacatcatcatctgctggaagtgaggctggtagtgactggatggacacattgctgtgggtagtccctcctactaggaggcttgtcatactgtctagaggttgactcttagttctgtaaataaagacatccatttcaaac

SEQ ID NO: 160177 - DNA, 939 bp, Homo sapiens
  Payload ID: 11329
  Gene Symbol: NPRL2
  Gene Name: NPR2-like, GATOR1 complex subunit
  ENST ID: ENST00000448302
  CDS Start-End: 130-393
agagggattggcaagcttgcgtgccccagcgacacaggcctcgaggctgtctctgacaagtgttcacaggaggtggggacgcctctgcgcgaggaacgaggagctacgggcctgggcccggttattgccatgggcagcggctgccgcatcgaatgcatattcttcagcgagttccaccccacgctgggacccaagatcacctatcaggtccctgaagacttcatctcccgagagctgtttgacacagtccaagtgtacatcatcaccaagccagagctgcagaacaagcttatcactgtctatggaaaagaagctgatcggctgtcctgtgtgcatcgaacacaagaagtacagccgcaatgctctcctcttcaacctgggcttcgtgtgtgatgcccaggccaagacctgcgccctcgagcccattgttaaaaagctggctggctatctgaccacactagagctagagagcagcttcgtgtccatggaggagagcaagcagaagttggtgcccatcatgaccatcttgctggaggagctaaatgcctcaggccggtgcactctgcccattgatgagtccaacaccatccacttgaaggtgattgagcagcggccagaccctccggtggcccaggagtatgatgtacctgtctttaccaaagacaaggaggatttcttcaactcacagtgggacctcactacacaacaaatcctgccctacattgatgggttccgccacatccagaagatttcagcagaggcagatgtggagctcaacctggtgcgcattgctatccagaacctgctgtactacggcgttgtgacactggtgtccatcctccagtactccaatgtatactgcccaacgcccaaggtccaggacctggtagatgacaagtccctgcaagaggcatgtctatcctacgtgaccaagcaagg

SEQ ID NO: 160178 - DNA, 1030 bp, Homo sapiens
  Payload ID: 11329
  Gene Symbol: NPRL2
  Gene Name: NPR2-like, GATOR1 complex subunit
  ENST ID: ENST00000418825
  CDS Start-End: 130-393
agagggattggcaagcttgcgtgccccagcgacacaggcctcgaggctgtctctgacaagtgttcacaggaggtggggacgcctctgcgcgaggaacgaggagctacgggcctgggcccggttattgccatgggcagcggctgccgcatcgaatgcatattcttcagcgagttccaccccacgctgggacccaagatcacctatcaggtccctgaagacttcatctcccgagagctgtttgacacagtccaagtgtacatcatcaccaagccagagctgcagaacaagcttatcactgtctatggaaaagaagctgatcggctgtcctgtgtgcatcgaacacaagaagtacagccgcaatgctctcctcttcaacctgggcttcgtgtgtgatgcccaggccaagacctgcgccctcgagcccattgttaaaaagctggctggctatctgaccacactagagagagcagcttcgtgtccatggaggagagcaagcagaagttggtgcccatcatgaccatcttgctggaggagctaaatgcctcaggccggtgcactctgcccattgatgagtccaacaccatccacttgaaggtgattgagcagcggccagaccctccggtggcccaggagtatgatgtacctgtctttaccaaagacaaggaggatttcttcaactcacagtgggacctcactacacaacaaatcctgccctacattgatgggttccgccacatccagaagatttcagcagaggcagatgtggagctcaacctggtgcgcattgctatccagaacctgctgtactacggcgttgtgacactggtgtccatcctccagtactccaatgtatactgcccaacgcccaaggtccaggacctggtagatgacaagtccctgcaagaggcatgtctatcctacgtgaccaagcaagggcacaagagggccagtctccgggatgtgttccagctatactgcagcctgagccctggcactaccgtgcgagacctcattggccgccacccccagc

SEQ ID NO: 160179 - DNA, 1364 bp, Homo sapiens
  Payload ID: 11329
  Gene Symbol: NPRL2
  Gene Name: NPR2-like, GATOR1 complex subunit
  ENST ID: ENST00000429366
  CDS Start-End: 53-226
gacgcctctgcgcgaggaacgaggagctacgggcctgggcccggttattgccatgggcagcggctgccgcatcgaatgcatattcttcagcgagttccaccccacgctgggacccaagatcacctatcaggtccctgaagacttcatctcccgagagctgtttgacacagtccaagtgtacatcatcaccaagccagagctgcagaacaagcttatcactgtctagagagcagcttcgtgtccatggaggagagcaagcagaagttggtgcccatcatgaccatcttgctggaggagctaaatgcctcaggccggtgcactctgcccattgatgagtccaacaccatccacttgaaggtgattgagcagcggccagaccctccggtggcccaggagtatgatgtacctgtctttaccaaagacaaggaggatttcttcaactcacagtgggacctcactacacaacaaatcctgccctacattgatgggttccgccacatccagaagatttcagcagaggcagatgtggagctcaacctggtgcgcattgctatccagaacctgctgtactacggcgttgtgacactggtgtccatcctccagtactccaatgtatactgcccaacgcccaaggtccaggacctggtagatgacaagtccctgcaagaggcatgtctatcctacgtgaccaagcaagggcacaagagggccagtctccgggatgtgttccagctatactgcagcctgagccctggcactaccgtgcgagacctcattggccgccacccccagcagctgcagcatgttgatgaacggtcagaggagaatttgctggggcatttgggagttacctgagggaagctagaccctttatgtctctcaggagccctggatcatggggcactgccaatccaagcaggcttcctggagatgatgggctacagagacaaaattgaagggagactacaggaaagggttggcctgcctgaaagaaggcctggccagggcgtcaccccgtcctctgatcctcaccctaggaagctgatccagttcgggcttatgaagaacctcatcaggcgactacagaagtatcctgtgcgggtgactcgggaagagcagagccaccctgcccggctttatacaggctgccacagctatgacgagatctgctgcaagacaggcatgagctaccatgagctggatgagcggcttgaaaatgaccccaacatcatcatctgctggaagtgaggctggtagtgactggatggacacattgctgtgggtagtccctcctactaggaggcttgtcatactgtctagaggttgactcttagttctgtaaataaagacatccatttcaaaca

SEQ ID NO: 160180 - DNA, 1006 bp, Homo sapiens
  Payload ID: 11329
  Gene Symbol: NPRL2
  Gene Name: NPR2-like, GATOR1 complex subunit
  ENST ID: ENST00000433999
  CDS Start-End: 94-267
ggcctcgaggctgtctctgacaagtgttcacaggaggtggggacgcctctgcgcgaggaacgaggagctacgggcctgggcccggttattgccatgggcagcggctgccgcatcgaatgcatattcttcagcgagttccaccccacgctgggacccaagatcacctatcaggtccctgaagacttcatctcccgagagctgtttgacacagtccaagtgtacatcatcaccaagccagagctgcagaacaagcttatcactgtgtgagaccctagctcgggcacagctatggaaaagaagctgatcggctgtcctgtgtgcatcgaacacaagaagtacagccgcaatgctctcctcttcaacctgggcttcgtgtgtgatgcccaggccaagacctgcgccctcgagcccattgttaaaaagctggctggctatctgaccacactagagctagagagcagcttcgtgtccatggaggagagcaagcagaagttggtgcccatcatgaccatcttgctggaggagctaaatgcctcaggccggtgcactctgcccattgatgagtccaacaccatccacttgaaggtgattgagcagcggccagaccctccggtggcccaggagtatgatgtacctgtctttaccaaagacaaggaggatttcttcaactcacagtgggacctcactacacaacaaatcctgccctacattgatgggttccgccacatccagaagatttcagcagaggcagatgtggagctcaacctggtgcgcattgctatccagaacctgctgtactacggcgttgtgacactggtgtccatcctccagtactccaatgtatactgcccaacgcccaaggtccaggacctggtagatgacaagtccctgcaagaggcatgtctatcctacgtgaccaagcaagggcacaagagggccagtctccgggatgtgttccagctatactgcagcctgagccctggcactaccgtgcgagacctcattg

SEQ ID NO: 160181 - DNA, 2784 bp, Homo sapiens
  Payload ID: 11330
  Gene Symbol: NPRL3
  Gene Name: NPR3-like, GATOR1 complex subunit
  ENST ID: ENST00000399953
  CDS Start-End: 246-1880
ccacccctgccctcctcaggccccctccgcctccacccctgccctcctcaggccccctccgcctccacccctgccctcctcaggccccctccgcctccacccctgccctcctcaggccccctgcgtccccgcctcgtcctcctcaggccccctccgcctccggctccgtcctcctcaggccccctccgcctccggctccgtcctcctctggccccctccgcccccggccccggccccacggcgggatgcgggacaacaccagccccatcagcgtgattctggtgagctcggggagcaggggcaataagctgctgttcaggtaccccttccagagaagccaggagcacccggcgtcccagacaagtaagccgcgtagcagatacgctgccagcaacacgggcgaccatgctgatgagcaggacggcgattccaggttttcagatgttattctggcaacaattttggcaaccaagtctgaaatgtgtggccaaaaatttgaactgaagattgataatgtgcgatttgttgggcacccaacactgctacagcatgctctggggcaggccaacgcagacccgtcagtgataaactgtctgcataacctgtcccgtcgtatcgccaccgtgctgcagcacgaggagcgccgctgccagtacctcacccgggaggccaagctgatcctggcgctccaggatgaggtgtccgccatggctgatggaaatgaaggtcctcagtccccattccatcacatcctgcccaagtgcaagctggccagggacctcaaggaagcttatgacagcctgtgcacgtcgggcgtagttcggcttcacatcaacagctggctggaggtgagcttctgcctgccccacaagatccactatgcggcctccagtctgatccccccagaggccatcgaacggagcctgaaagccatccgcccctaccatgccctgctgctgctcagtgatgagaagtccttgctgggtgagcttcctattgactgctcccctgccctagtgcgggtgatcaagaccacatctgctgtgaagaacctgcagcagctagcccaagatgcggacctggccttgctgcaggttttccagcttgcagctcatctggtgtactggggcaaggccatcatcatctacccgctgtgtgagaacaacgtctacatgctgtctcccaatgccagcgtatgtctgtactccccgctggccgagcagttctcccaccagttcccatctcatgacctgccgtccgttcttgccaagttctccttgccggtctccttgtcagaatttaggaatcccctggcccccgctgtgcaggagacccagctcatccagatggtggtgtggatgctgcagcgccggcttctcatccagctgcacacctatgtctgcctgatggcctcacccagcgaggaggagccccgtccgcgagaggacgacgtccccttcactgcccgggtcggcggtcgcagcctcagcacgcccaacgccctcagctttggctccccaaccagcagcgatgacatgaccctcaccagccccagcatggacaactccagcgcagagctacttcccagcggggactcgccactgaaccagaggatgacggagaacctgctggccagcctgtcggagcatgaacgcgcagccatcctcagtgtacccgcagcccagaaccctgaggacctccgcatgtttgccaggctccttcactacttccgcggccgccaccacctggaggagattatgtacaacgagaacacgcggcgctcccagctgctcatgctgtttgacaagttccgcagcgtgctggtggtgaccacccacgaggaccctgtcattgccgtcttccaggctctgctcccctgagcccaggcggagggcggaaggctgctggggtgcgcaggtgggcgctcgcgtctccccaccccagggctccccccgtgctgaggctgagccctcttggccctgaggcctggcattgggtggatgcgggctggccgtggcccagtgaagcctgcagagccccgctgtccttgcccctggtggttccgctgtggggctgctgccctctgtgttcctacgcttccctccagtccttgccgcacgcgtaggcatctccacgctggaggggggcctgccaggactcctgtctctgggtgaggccgcatccttcaaggcccatgtgggctgtgcgtttctcagaccctccttctgtccctacacctgctccttggaccccccagtctgtggccaccctgaagaatgtgcagaaacacttgtgtggcctgtccctgtctctctgacagccttctatttgtgaagtgccctgtggccccctccccagcacctctgtctgccatgcgcttcttcctcccaggctaccctgagcctttcctggcccagtcctcaccacagtccacagaagccgcaaacaggctcatagccaagctgtgacctggtcctgaccatctggggcacgagggcctgggctggccctgctaggctggagaagccctgtcacctgtgcacatcttgctggtggaggcatggcccactgtgcaggaccccaccctcgggggctttcggctcccacactgatgattctccccagcatccacaccgggcctggcgctacgtactcaggcccccagctctcgtgtcctggaggaagagctagctccagacatgggttgatcacctagaggagctctggctaaggcacagttttctagaaataaaacatttattcggtttttaaacaattaaaaaa

SEQ ID NO: 160182 - DNA, 512 bp, Homo sapiens
  Payload ID: 11330
  Gene Symbol: NPRL3
  Gene Name: NPR3-like, GATOR1 complex subunit
  ENST ID: ENST00000422814
  CDS Start-End: 95-304
ctccgcctccggctccgtcctcctcaggccccctccgcctccggctccgtcctcctctggccccctccgcccccggccccggccccacggcgggatgcgggacaacaccagccccatcagcgtgattctggccaacgcagacccgtcagtgataaactgtctgcataacctgtcccgtcgtatcgccaccgtgctgcagcacgaggagcgccgctgccagtacctcacccgggaggccaagctgatcctggcgctccaggatgaggtgtccgccatggctgatgcctgtgcacgtcgggcgtagttcggcttcacatcaacagctggctggaggtgagcttctgcctgccccacaagatccactatgcggcctccagtctgatccccccagaggccatcgaacggagcctgaaagccatccgcccctaccatgccctgctgctgctcagtgatgagaagtccttgctgggtgagcttcctattgactgctcccctgccctagtgcgggtgat

SEQ ID NO: 160183 - DNA, 616 bp, Homo sapiens
  Payload ID: 11330
  Gene Symbol: NPRL3
  Gene Name: NPR3-like, GATOR1 complex subunit
  ENST ID: ENST00000419636
  CDS Start-End: 69-616
ggccccctccgcctccggctccgtcctcctctggccccctccgcccccggccccggccccacggcgggatgcgggacaacaccagccccatcagcgtgattctggtgagctcggggagcaggggcaataagctgctgttcaggtaccccttccagagaagccaggagcacccggcgtcccagacaagtaagccgcgtagcagatacgctgccagcaacacgggcgaccatgctgatgagcaggacggcgattccagcgagccatgtcctccaaccgatgagcaattggttgcagggttttcagatgttattctggcaacaattttggcaaccaagtctgaaatgtgtggccaaaaatttgaactgaagattgataatgtgcgatttgttgggcacccaacactgctacagcatgctctggggcagatctccaaaacagatccttccccgaagagggaagcacctactatgattctttttaatgtggtgtttgcactgagggccaacgcagacccgtcagtgataaactgtctgcataacctgtcccgtcgtatcgccaccgtgctgcagcacgaggagcgccgctgccagtacctcacccgggaggccaagctgat

SEQ ID NO: 160184 - DNA, 794 bp, Homo sapiens
  Payload ID: 11330
  Gene Symbol: NPRL3
  Gene Name: NPR3-like, GATOR1 complex subunit
  ENST ID: ENST00000456528
  CDS Start-End: 104-364
cgccgaagtctcgcgagcccggagcgtggcacgtgggccccctccgcctccggctccgtcctcctctggccccctccgcccccggccccggccccacggcgggatgcgggacaacaccagccccatcagcgtgattctggtgagctcggggagcaggggcaataagctgctgttcaggtaccccttccagagaagccaggagcacccggcgtcccagacaagtaagccgcgtagcagatacgctgccagcaacacgggcgaccatgctgatgagcaggacggcgattccagacaaagtttcactctgtcgcccaaggctggagtgcagtggtgtgatctcggcttgctgcaacctcacctctagggttcaagcgattctcctgcctcagcctcccgagtagctgggattacaggcatccaccaccaaggttttcagatgttattctggcaacaattttggcaaccaagtctgaaatgtgtggccaaaaatttgaactgaagattgataatgtgcgatttgttgggcacccaacactgctacagcatgctctggggcaggccaacgcagacccgtcagtgataaactgtctgcataacctgtcccgtcgtatcgccaccgtgctgcagcacgaggagcgccgctgccagtacctcacccgggaggccaagctgatcctggcgctccaggatgaggtgtccgccatggctgatggaaatgaaggtcctcagtccccattccatcacatcctgcccaagtgcaagctggccagggacctcaaggaagcttatgacag

SEQ ID NO: 160185 - DNA, 936 bp, Homo sapiens
  Payload ID: 11330
  Gene Symbol: NPRL3
  Gene Name: NPR3-like, GATOR1 complex subunit
  ENST ID: ENST00000457916
  CDS Start-End: 95-271
ctccgcctccggctccgtcctcctcaggccccctccgcctccggctccgtcctcctctggccccctccgcccccggccccggccccacggcgggatgcgggacaacaccagccccatcagcgtgattctggtaagccgcgtagcagatacgctgccagcaacacgggcgaccatgctgatgagcaggacggcgattccaggttttcagatgttattctggcaacaattttggcaaccaagtctgaaatgtgtggccaaaaatttgaactgaagattgataatgtgcgatttgttgggcacccaacactgctacagcatgctctggggcagatctccaaaacagatccttccccgaagagggaagcacctactatgattctttttaatgtggtgtttgcactgagggccaacgcagacccgtcagtgataaactgtctgcataacctgtcccgtcgtatcgccaccgtgctgcagcacgaggagcgccgctgccagtacctcacccgggaggccaagctgatcctggcgctccaggatgaggtgtccgccatggctgatggaaatgaaggtcctcagtccccattccatcacatcctgcccaagtgcaagctggccagggacctcaaggaagcttatgacagcctgtgcacgtcgggcgtagttcggcttcacatcaacagctggctggaggtgagcttctgcctgccccacaagatccactatgcggcctccagtctgatccccccagaggccatcgaacggagcctgaaagccatccgcccctaccatgccctgctgctgctcagtgatgagaagtccttgctgggtgagcttcctattgactgctcccctgccctagtgcgggtgatcaagaccacatctgctgtgaagaacctgcagcagctagcccaagatgcggacctggccttgctgcag

SEQ ID NO: 160186 - DNA, 932 bp, Homo sapiens
  Payload ID: 11330
  Gene Symbol: NPRL3
  Gene Name: NPR3-like, GATOR1 complex subunit
  ENST ID: ENST00000483663
  CDS Start-End: 79-267
gtcctcctcaggccccctccgcctccggctccgtcctcctctggccccctccgcccccggccccggccccacggcgggatgcgggacaacaccagccccatcagcgtgattctggtgagctcggggagcaggggcaataagctgctgttcaggtaccccttccagagaagccaggagcacccggcgtcccagacaagttttcagatgttattctggcaacaattttggcaaccaagtctgaaatgtgtggccaaaaatttgaactgaagattgataatgtgcgatttgttgggcacccaacactgctacagcatgctctggggcagatctccaaaacagatccttccccgaagagggaagcacctactatgattctttttaatgtggtgtttgcactgagggccaacgcagacccgtcagtgataaactgtctgcataacctgtcccgtcgtatcgccaccgtgctgcagcacgaggagcgccgctgccagtacctcacccgggaggccaagctgatcctggcgctccaggatgaggtgtccgccatggctgatggaaatgaaggtcctcagtccccattccatcacatcctgcccaagtgcaagctggccagggacctcaaggaagcttatgacagcctgtgcacgtcgggcgtagttcggcttcacatcaacagctggctggaggtgagcttctgcctgccccacaagatccactatgcggcctccagtctgatccccccagaggccatcgaacggagcctgaaagccatccgcccctaccatgccctgctgctgctcagtgatgagaagtccttgctgggtgagcttcctattgactgctcccctgccctagtgcgggtgatcaagaccacatctgctgtgaagaacctgcagcagctagcccaagatgcggacctggccttgctgcag

SEQ ID NO: 160187 - DNA, 922 bp, Homo sapiens
  Payload ID: 11330
  Gene Symbol: NPRL3
  Gene Name: NPR3-like, GATOR1 complex subunit
  ENST ID: ENST00000468260
  CDS Start-End: 318-922
cgcgagcccggagcgtggcacgtgggtaagccgcgtagcagatacgctgccagcaacacgggcgaccatgctgatgagcaggacggcgattccagacaaagtttcactctgtcgcccaaggctggagtgcagtggtgtgatctcggcttgctgcaacctcacctctagggttcaagcgattctcctgcctcagcctcccgagtagctgggattacaggcatccaccaccaagcgagccatgtcctccaaccgatgagcaattggttgcagggttttcagatgttattctggcaacaattttggcaaccaagtctgaaatgtgtggccaaaaatttgaactgaagattgataatgtgcgatttgttgggcacccaacactgctacagcatgctctggggcagatctccaaaacagatccttccccgaagagggaagcacctactatgattctttttaatgtggtgtttgcactgagggccaacgcagacccgtcagtgataaactgtctgcataacctgtcccgtcgtatcgccaccgtgctgcagcacgaggagcgccgctgccagtacctcacccgggaggccaagctgatcctggcgctccaggatgaggtgtccgccatggctgatggaaatgaaggtcctcagtccccattccatcacatcctgcccaagtgcaagctggccagggacctcaaggaagcttatgacagcctgtgcacgtcgggcgtagttcggcttcacatcaacagctggctggaggtgagcttctgcctgccccacaagatccactatgcggcctccagtctgatccccccagaggccatcgaacggagcctgaaagccatccgcccctaccatgccctgctgctgctcagtgatgagaagtccttgctgggtgagcttcctattgactgctcccc

SEQ ID NO: 160188 - DNA, 2812 bp, Homo sapiens
  Payload ID: 11330
  Gene Symbol: NPRL3
  Gene Name: NPR3-like, GATOR1 complex subunit
  ENST ID: ENST00000621703
  CDS Start-End: 404-613
gtctcgcgagcccggagcgtggcacgtgggttggtaactgtggcgctgctccgcgtccaccaccacccctgtcctcctcaggccccctccgcctccacccctgccctcctcaggccccctccgcctccacccctgccctactcaggccccctccgcctccacccctgccctcctcaggccccctccgcctccacccctgccctcctcaggccccctccgcctccacccctgccctcctcaggccccctccgcctccacccctgccctcctcaggccccctgcgtccccgcctcgtcctcctcaggccccctccgcctccggctccgtcctcctcaggccccctccgcctccggctccgtcctcctctggccccctccgcccccggccccggccccacggcgggatgcgggacaacaccagccccatcagcgtgattctggtgagctcggggagcaggggcaataagctgctgttcaggtaccccttccagagaagccaggagcacccggcgtcccagacaagtaagccgcgtagcagatacgctgccagcaacacgggcgaccatgctgatgagcaggacggcgattccaggccaacgcagacccgtcagtgataaactgtctgcataacctgtcccgtcgtatcgccaccgtgctgcagcacgaggagcgccgctgccagtacctcacccgggaggccaagctgatcctggcgctccaggatgaggtgtccgccatggctgatggaaatgaaggtcctcagtccccattccatcacatcctgcccaagtgcaagctggccagggacctcaaggaagcttatgacagcctgtgcacgtcgggcgtagttcggcttcacatcaacagctggctggaggtgagcttctgcctgccccacaagatccactatgcggcctccagtctgatccccccagaggccatcgaacggagcctgaaagccatccgcccctaccatgccctgctgctgctcagtgatgagaagtccttgctgggtgagcttcctattgactgctcccctgccctagtgcgggtgatcaagaccacatctgctgtgaagaacctgcagcagctagcccaagatgcggacctggccttgctgcaggttttccagcttgcagctcatctggtgtactggggcaaggccatcatcatctacccgctgtgtgagaacaacgtctacatgctgtctcccaatgccagcgtatgtctgtactccccgctggccgagcagttctcccaccagttcccatctcatgacctgccgtccgttcttgccaagttctccttgccggtctccttgtcagaatttaggaatcccctggcccccgctgtgcaggagacccagctcatccagatggtggtgtggatgctgcagcgccggcttctcatccagctgcacacctatgtctgcctgatggcctcacccagcgaggaggagccccgtccgcgagaggacgacgtccccttcactgcccgggtcggcggtcgcagcctcagcacgcccaacgccctcagctttggctccccaaccagcagcgatgacatgaccctcaccagccccagcatggacaactccagcgcagagctacttcccagcggggactcgccactgaaccagaggatgacggagaacctgctggccagcctgtcggagcatgaacgcgcagccatcctcagtgtacccgcagcccagaaccctgaggacctccgcatgtttgccaggctccttcactacttccgcggccgccaccacctggaggagattatgtacaacgagaacacgcggcgctcccagctgctcatgctgtttgacaagttccgcagcgtgctggtggtgaccacccacgaggaccctgtcattgccgtcttccaggctctgctcccctgagcccaggcggagggcggaaggctgctggggtgcgcaggtgggcgctcgcgtctccccaccccagggctccccccgtgctgaggctgagccctcttggccctgaggcctggcattgggtggatgcgggctggccgtggcccagtgaagcctgcagagccccgctgtccttgcccctggtggttccgctgtggggctgctgccctctgtgttcctacgcttccctccagtccttgccgcacgcgtaggcatctccacgctggaggggggcctgccaggactcctgtctctgggtgaggccgcatccttcaaggcccatgtgggctgtgcgtttctcagaccctccttctgtccctacacctgctccttggaccccccagtctgtggccaccctgaagaatgtgcagaaacacttgtgtggcctgtccctgtctctctgacagccttctatttgtgaagtgccctgtggccccctccccagcacctctgtctgccatgcgcttcttcctcccaggctaccctgagcctttcctggcccagtcctcaccacagtccacagaagccgcaaacaggctcatagccaagctgtgacctggtcctgaccatctggggcacgagggcctgggctggccctgctaggctggagaagccctgtcacctgtgcacatcttgctggtggaggcatggcccactgtgcaggaccccaccctcgggggctttcggctcccacactgatgattctccccagcatccacaccgggcctggcgctacgtactcaggcccccagctctcgtgtcctggaggaagagctagctccagacatgggttgatcacctagaggagctctggctaaggcacagttttctagaaataaaacatttattcggtttttaaacaattaaaaaa

SEQ ID NO: 160189 - DNA, 2981 bp, Homo sapiens
  Payload ID: 11330
  Gene Symbol: NPRL3
  Gene Name: NPR3-like, GATOR1 complex subunit
  ENST ID: ENST00000622194
  CDS Start-End: 83-316
ctccgtcctcctcaggccccctccgcctccggctccgtcctcctctggccccctccgcccccggccccggccccacggcgggatgcgggacaacaccagccccatcagcgtgattctggtgagctcggggagcaggggcaataagctgctgttcaggtaccccttccagagaagccaggagcacccggcgtcccagacaagtaagccgcgtagcagatacgctgccagcaacacgggcgaccatgctgatgagcaggacggcgattccagatctccaaaacagatccttccccgaagagggaagcacctactatgattctttttaatgtggtgtttgcactgagggccaacgcagacccgtcagtgataaactgtctgcataacctgtcccgtcgtatcgccaccgtgctgcagcacgaggagcgccgctgccagtacctcacccgggaggccaagctgatcctggcgctccaggatgaggtgtccgccatggctgatggaaatgaaggtcctcagtccccattccatcacatcctgcccaagtgcaagctggccagggacctcaaggaagcttatgacagcctgtgcacgtcgggcgtagttcggcttcacatcaacagctggctggaggtgagcttctgcctgccccacaagatccactatgcggcctccagtctgatccccccagaggccatcgaacggagcctgaaagccatccgcccctaccatgccctgctgctgctcagtgatgagaagtccttgctgggtgagcttcctattgactgctcccctgccctagtgcgggtgatcaagaccacatctgctgtgaagaacctgcagcagctagcccaagatgcggacctggccttgctgcaggttttccagcttgcagctcatctggtgtactggggcaaggccatcatcatctacccgctgtgtgagaacaacgtctacatgctgtctcccaatgccagcgtatgtctgtactccccgctggccgagcagttctcccaccagttcccatctcatgacctgccgtccgttcttgccaagttctccttgccggtctccttgtcagaatttaggaatcccctggcccccgctgtgcaggagacccagctcatccagatggtggtgtggatgctgcagcgccggcttctcatccagctgcacacctatgtctgcctgatggcctcacccagcgaggaggagccccgtccgcgagaggacgacgtccccttcactgcccgggtcggcggtcgcagcctcagcacgcccaacgccctcagctttggctccccaaccagcagcgatgacatgaccctcaccagccccagcatggacaactccagcgcagagctacttcccagcggggactcgccactgaaccagaggatgacggagaacctgctggccagcctgtcggagcatgaacgcgcagccatcctcagtgtacccgcagcccagaaccctgaggacctccgcatgtttgccaggctccttcactacttccgcggccgccaccacctggaggagattatgtacaacgagaacacgcggcgctcccagctgctcatgctgtttgacaagttccgcagcgtgctggtggtgaccacccacgaggaccctgtcattgccgtcttccaggctctgctcccctgagcccaggcggagggcggaaggctgctggggtgcgcaggtgggcgctcgcgtctccccaccccagggctccccccgtgctgaggctgagccctcttggccctgaggcctggcattgggtggatgcgggctggccgtggcccagtgaagcctgcagagccccgctgtccttgcccctggtggttccgctgtggggctgctgccctctgtgttcctacgcttccctccagtccttgccgcacgcgtaggcatctccacgctggaggggggcctgccaggactcctgtctctgggtgaggccgcatccttcaaggcccatgtgggctgtgcgtttctcagaccctccttctgtccctacacctgctccttggaccccccagtctgtggccaccctgaagaatgtgcagaaacacttgtgtggcctgtccctgtctctctgacagccttctatttgtgaagtgccctgtggccccctccccagcacctctgtctgccatgcgcttcttcctcccaggctaccctgagcctttcctggcccagtcctcaccacagtccacagaagccgcaaacaggctcatagccaagctgtgacctggtcctgaccatctggggcacgagggcctgggctggccctgctaggctggagaagccctgtcacctgtgcacatcttgctggtggaggcatggcccactgtgcaggaccccaccctcgggggctttcggctcccacactgatgattctccccagcatccacaccgggcctggcgctacgtactcaggcccccagctctcgtgtcctggaggaagagctagctccagacatgggttgatcacctagaggagctctggctaaggcacagttttctagaaataaaacatttattcggtttttaaacaattaaaaaatcttgtctgggcaggccctttgctcaggcctgtgtgtcctgctcagccactctgtcgaccacactgacccaggggctgccccggacatagaagcggaggggtttccgggcccactcccctgcatggccgacgcccacccgggctgctgccactacagccggctcactgggctccaggggaccacgctccagccatacagcttcatcctgtgccaggtccctctggtcaaagctcttgttgatggccagggcctggcacagcttggaggggccactgcagagctcgcggtccttgaggacacggctggcggtgcctttccggagggtgctgcgaagctgacgcatggtctccagaccttccaggggctccagtgctcgcagcaagacgcaagccccgtcccctgtgggacggacag

SEQ ID NO: 160190 - DNA, 2881 bp, Homo sapiens
  Payload ID: 11330
  Gene Symbol: NPRL3
  Gene Name: NPR3-like, GATOR1 complex subunit
  Uniprot ID: Q12980
  ENST ID: ENST00000611875
  CDS Start-End: 287-1996
ttcccatccgcaccagcaagaggggcccctgtgccccaaacgcgaaccgtacggctccagacagcaccgcggaactcggtggcttccagaaggccccgcgcctgcgcattccgctgcctgcgcctgcgcctgcgcctgcgccgttctcccggccgccgccttagcacctcctccggacggtgtcgccgaagtctcgcgagcccggagcgtggcacgtgggccccctccgcctccggctccgtcctcctctggccccctccgcccccggccccggccccacggcgggatgcgggacaacaccagccccatcagcgtgattctggtgagctcggggagcaggggcaataagctgctgttcaggtaccccttccagagaagccaggagcacccggcgtcccagacaagtaagccgcgtagcagatacgctgccagcaacacgggcgaccatgctgatgagcaggacggcgattccaggttttcagatgttattctggcaacaattttggcaaccaagtctgaaatgtgtggccaaaaatttgaactgaagattgataatgtgcgatttgttgggcacccaacactgctacagcatgctctggggcagatctccaaaacagatccttccccgaagagggaagcacctactatgattctttttaatgtggtgtttgcactgagggccaacgcagacccgtcagtgataaactgtctgcataacctgtcccgtcgtatcgccaccgtgctgcagcacgaggagcgccgctgccagtacctcacccgggaggccaagctgatcctggcgctccaggatgaggtgtccgccatggctgatggaaatgaaggtcctcagtccccattccatcacatcctgcccaagtgcaagctggccagggacctcaaggaagcttatgacagcctgtgcacgtcgggcgtagttcggcttcacatcaacagctggctggaggtgagcttctgcctgccccacaagatccactatgcggcctccagtctgatccccccagaggccatcgaacggagcctgaaagccatccgcccctaccatgccctgctgctgctcagtgatgagaagtccttgctgggtgagcttcctattgactgctcccctgccctagtgcgggtgatcaagaccacatctgctgtgaagaacctgcagcagctagcccaagatgcggacctggccttgctgcaggttttccagcttgcagctcatctggtgtactggggcaaggccatcatcatctacccgctgtgtgagaacaacgtctacatgctgtctcccaatgccagcgtatgtctgtactccccgctggccgagcagttctcccaccagttcccatctcatgacctgccgtccgttcttgccaagttctccttgccggtctccttgtcagaatttaggaatcccctggcccccgctgtgcaggagacccagctcatccagatggtggtgtggatgctgcagcgccggcttctcatccagctgcacacctatgtctgcctgatggcctcacccagcgaggaggagccccgtccgcgagaggacgacgtccccttcactgcccgggtcggcggtcgcagcctcagcacgcccaacgccctcagctttggctccccaaccagcagcgatgacatgaccctcaccagccccagcatggacaactccagcgcagagctacttcccagcggggactcgccactgaaccagaggatgacggagaacctgctggccagcctgtcggagcatgaacgcgcagccatcctcagtgtacccgcagcccagaaccctgaggacctccgcatgtttgccaggctccttcactacttccgcggccgccaccacctggaggagattatgtacaacgagaacacgcggcgctcccagctgctcatgctgtttgacaagttccgcagcgtgctggtggtgaccacccacgaggaccctgtcattgccgtcttccaggctctgctcccctgagcccaggcggagggcggaaggctgctggggtgcgcaggtgggcgctcgcgtctccccaccccagggctccccccgtgctgaggctgagccctcttggccctgaggcctggcattgggtggatgcgggctggccgtggcccagtgaagcctgcagagccccgctgtccttgcccctggtggttccgctgtggggctgctgccctctgtgttcctacgcttccctccagtccttgccgcacgcgtaggcatctccacgctggaggggggcctgccaggactcctgtctctgggtgaggccgcatccttcaaggcccatgtgggctgtgcgtttctcagaccctccttctgtccctacacctgctccttggaccccccagtctgtggccaccctgaagaatgtgcagaaacacttgtgtggcctgtccctgtctctctgacagccttctatttgtgaagtgccctgtggccccctccccagcacctctgtctgccatgcgcttcttcctcccaggctaccctgagcctttcctggcccagtcctcaccacagtccacagaagccgcaaacaggctcatagccaagctgtgacctggtcctgaccatctggggcacgagggcctgggctggccctgctaggctggagaagccctgtcacctgtgcacatcttgctggtggaggcatggcccactgtgcaggaccccaccctcgggggctttcggctcccacactgatgattctccccagcatccacaccgggcctggcgctacgtactcaggcccccagctctcgtgtcctggaggaagagctagctccagacatgggttgatcacctagaggagctctggctaaggcacagttttctagaaataaaacatttattcgg

SEQ ID NO: 160191 - DNA, 3203 bp, Homo sapiens
  Payload ID: 11330
  Gene Symbol: NPRL3
  Gene Name: NPR3-like, GATOR1 complex subunit
  Uniprot ID: Q12980
  ENST ID: ENST00000620134
  CDS Start-End: 287-1996
ttcccatccgcaccagcaagaggggcccctgtgccccaaacgcgaaccgtacggctccagacagcaccgcggaactcggtggcttccagaaggccccgcgcctgcgcattccgctgcctgcgcctgcgcctgcgcctgcgccgttctcccggccgccgccttagcacctcctccggacggtgtcgccgaagtctcgcgagcccggagcgtggcacgtgggccccctccgcctccggctccgtcctcctctggccccctccgcccccggccccggccccacggcgggatgcgggacaacaccagccccatcagcgtgattctggtgagctcggggagcaggggcaataagctgctgttcaggtaccccttccagagaagccaggagcacccggcgtcccagacaagtaagccgcgtagcagatacgctgccagcaacacgggcgaccatgctgatgagcaggacggcgattccaggttttcagatgttattctggcaacaattttggcaaccaagtctgaaatgtgtggccaaaaatttgaactgaagattgataatgtgcgatttgttgggcacccaacactgctacagcatgctctggggcagatctccaaaacagatccttccccgaagagggaagcacctactatgattctttttaatgtggtgtttgcactgagggccaacgcagacccgtcagtgataaactgtctgcataacctgtcccgtcgtatcgccaccgtgctgcagcacgaggagcgccgctgccagtacctcacccgggaggccaagctgatcctggcgctccaggatgaggtgtccgccatggctgatggaaatgaaggtcctcagtccccattccatcacatcctgcccaagtgcaagctggccagggacctcaaggaagcttatgacagcctgtgcacgtcgggcgtagttcggcttcacatcaacagctggctggaggtgagcttctgcctgccccacaagatccactatgcggcctccagtctgatccccccagaggccatcgaacggagcctgaaagccatccgcccctaccatgccctgctgctgctcagtgatgagaagtccttgctgggtgagcttcctattgactgctcccctgccctagtgcgggtgatcaagaccacatctgctgtgaagaacctgcagcagctagcccaagatgcggacctggccttgctgcaggttttccagcttgcagctcatctggtgtactggggcaaggccatcatcatctacccgctgtgtgagaacaacgtctacatgctgtctcccaatgccagcgtatgtctgtactccccgctggccgagcagttctcccaccagttcccatctcatgacctgccgtccgttcttgccaagttctccttgccggtctccttgtcagaatttaggaatcccctggcccccgctgtgcaggagacccagctcatccagatggtggtgtggatgctgcagcgccggcttctcatccagctgcacacctatgtctgcctgatggcctcacccagcgaggaggagccccgtccgcgagaggacgacgtccccttcactgcccgggtcggcggtcgcagcctcagcacgcccaacgccctcagctttggctccccaaccagcagcgatgacatgaccctcaccagccccagcatggacaactccagcgcagagctacttcccagcggggactcgccactgaaccagaggatgacggagaacctgctggccagcctgtcggagcatgaacgcgcagccatcctcagtgtacccgcagcccagaaccctgaggacctccgcatgtttgccaggctccttcactacttccgcggccgccaccacctggaggagattatgtacaacgagaacacgcggcgctcccagctgctcatgctgtttgacaagttccgcagcgtgctggtggtgaccacccacgaggaccctgtcattgccgtcttccaggctctgctcccctgagcccaggcggagggcggaaggctgctggggtgcgcaggtgggcgctcgcgtctccccaccccagggctccccccgtgctgaggctgagccctcttggccctgaggcctggcattgggtggatgcgggctggccgtggcccagtgaagcctgcagagccccgctgtccttgcccctggtggttccgctgtggggctgctgccctctgtgttcctacgcttccctccagtccttgccgcacgcgtaggcatctccacgctggaggggggcctgccaggactcctgtctctgggtgaggccgcatccttcaaggcccatgtgggctgtgcgtttctcagaccctccttctgtccctacacctgctccttggaccccccagtctgtggccaccctgaagaatgtgcagaaacacttgtgtggcctgtccctgtctctctgacagccttctatttgtgaagtgccctgtggccccctccccagcacctctgtctgccatgcgcttcttcctcccaggctaccctgagcctttcctggcccagtcctcaccacagtccacagaagccgcaaacaggctcatagccaagctgtgacctggtcctgaccatctggggcacgagggcctgggctggccctgctaggctggagaagccctgtcacctgtgcacatcttgctggtggaggcatggcccactgtgcaggaccccaccctcgggggctttcggctcccacactgatgattctccccagcatccacaccgggcctggcgctacgtactcaggcccccagctctcgtgtcctggaggaagagctagctccagacatgggttgatcacctagaggagctctggctaaggcacagttttctagaaataaaacatttattcgggtttggaaaggccccttggattcctggctggggacaatgatgacctggaccctggccagaagagccctggccctccagcaaggcagcacctgctctgatgcacctgtgcacccctggccctcccagccacctgggagtccgaagcttagcctggaggtggccaagccagtccctactcttgggctgcggccacgtgaggctccgcatcagcagccaggggcgagcactagtggacaaagccagcaaatgcggcgttcctgtgagcagataccctcaaccagccagctgtcaaaagtatttcaagataaaatccaggccaagc

SEQ ID NO: 160192 - DNA, 14208 bp, Homo sapiens
  Payload ID: 11331
  Gene Symbol: NRDE2
  Gene Name: NRDE-2, necessary for RNA interference, domain containing
  Uniprot ID: Q9H7Z3
  ENST ID: ENST00000354366
  CDS Start-End: 234-3728
ccccttggccccgccccaccctgctttgccctgcctctccctgccccgccgcgccccagtcccttgacgaccctcctctctgggccccgcccctcccgcttcggggtcaagccccagagagcgccgcgaaaaccacatttcccagagtgcaccgcgacggcaggggtcctcagaccggcgctcgctcgccggcgccatccctatagagaagaacggaggtacggcctgtggtcatggcgctgttcccagcctttgcggggcttagtgaggctcccgatggcgggagctccaggaaagagttagactggctgagcaacccaagcttttgtgttggatccataacgtccctgagccaacaaactgaagcagctccagcccatgtttctgaagggttaccgctgacaaggagtcatctgaaatcagagtcttcagatgaaagtgacactaacaaaaagctcaaacaaacaagtagaaaaaagaagaaagagaaaaagaaaaaaaggaagcatcagcatcataagaaaacaaagaggaagcatgggccgtcgagtagcagcaggtctgagacagacaccgattctgaaaaggacaaaccttccagaggcgttggaggcagtaaaaaggaatctgaggaaccgaatcaaggaaataatgctgcagctgatactggacatcgctttgtttggcttgaggacattcaggctgtgacgggagaaaccttcagaacagataagaaaccagatcctgcgaactgggagtacaagtctctctaccgaggggatatagcaagatacaagaggaaaggagactcctgccttggcattaaccctaagaagcagtgcatatcttgggaagggacttccacagagaagaagcattcacgcaagcaggttgaacgctattttactaagaagagtgtgggattaatgaacatcgatggagttgccattagcagtaaaactgaacctccctcatctgagcccatctcctttataccagtgaaggacttggaagatgcggctcctgttacaacctggttgaatcctctggggatttatgatcagtcaaccacacattggctacaaggacagggtcctccagagcaggaatcaaagcagccagacgcacagccagacagcgagagtgcggctctcaaggccaaggtggaggagtttaacaggagggtgcgggagaatcctcgggatacgcagctgtggatggcatttgttgcttttcaggacgaggtcatgaaaagtcctggcctgtatgccatcgaggaaggagagcaggaaaagcgaaagaggtccctgaagctcattctggagaagaagctggccattctggagcgggccattgagagcaaccagagcagtgtggatctgaaactggccaagctgaagctctgcacagagttctgggagccctccactctggtcaaagagtggcagaaactgatatttttgcatcccaataatacagccctttggcagaaataccttttattttgccagagccagtttagtaccttttcgatatcaaaaattcacagtctttatggaaaatgcttgagcactttgtctgctgttaaggacggcagcatcttatctcaccctgcgttgcctggcacggaagaggccatgtttgcactctttcttcagcagtgccactttctgcggcaggctggccactctgagaaggccatctcattgttccaggccatggtggacttcaccttcttcaaacccgacagcgtgaaagatctgcctaccaaaggacaggtggaattctttgaacccttttgggacagtggagagccccgggctggggagaagggagcccgaggctggaaggcgtggatgcaccagcaggaacgaggtggctgggtggtcatcaacccagatgaggatgacgatgaaccagaagaggatgaccaggaaataaaagataagactctgcccaggtggcagatctggcttgctgctgagcgttcccgtgaccagaggcactggcggccctggcgccctgataagaccaagaagcaaaccgaggaagactgtgaggatcccgagagacaggtgttgtttgatgatattgggcaatctttgatcagactttccagccatgatcttcagttccagctggtggaggccttcctgcagttcttgggtgtgccttctggctttactcctccagcctcctgtctttatctggccatggatgagaacagcatctttgataatggactttatgatgaaaagcccttgacttttttcaaccctttgttttctggggctagctgtgttggccgcatggataggttgggctatcctcgctggaccaggggtcagaaccgagagggcgaggagttcatccgcaatgtcttccaccttgtcatgcctttattttcaggcaaagagaagtcccagctctgcttctcctggttacagtatgagattgcaaaggtcatttggtgcctgcacactaaaaacaagaagagattaaagtctcaagggaagaactgcaaaaaactagccaagaatctccttaaggagccagaaaactgcaacaacttttgcctgtggaagcagtatgcacatctggagtggttgcttggcaacacggaggatgccagaaaagtttttgacacagcacttggcatggcaggaagcagagaactgaaagactctgacctctgtgagctcagtctgctctatgctgagctggaggtggagctgtcgccagaagtgagaagggctgccacagctcgagctgttcacatattaaccaagctgactgagagcagcccctatgggccctacactggacaggtgttggctgttcacattttgaaagcgcgaaaggcttatgagcacgcactgcaggactgtttgggtgacagctgtgtctccaatccagctcccaccgattcctgtagccgcctaattagcctggctaaatgcttcatgctcttccagtatttgaccatagggattgatgctgctgtgcagatatacgaacaggtgtttgcaaaactgaacagttctgttttcccagaaggctctggcgagggggacagtgccagctcccagagttggaccagtgttctcgaagccatcacactgatgcacacgagcctgctgagattccacatgaaagtgagtgtttacccgctggcccctctgcgagaggcactctcacaggctttaaagttgtatccaggcaaccaggttctttggaggtcctatgtacagattcagaataagtcccacagtgccagcaaaaccaggagattttttgacacaatcaccaggtctgccaaacccttggagccttggttgtttgcaattgaagctgagaaactgaggaagagactggtggaaactgtccagaggttagacggtagagagatccacgccacaattcctgagaccggcttaatgcatcggatccaagccctgtttgaaaatgccatgcgcagcgacagtggcagccagtgccccttgctgtggaggatgtatttgaactttctggtttccttaggaaataaagaaagaagcaaaggtgtattctacaaagcacttcagaattgcccttgggcaaaggtgttgtacctggacgccgtggagtatttccccgatgagatgcaggagatcctggacctgatgactgagaaggagctccgggtgcgcctgccgctggaggagctggagctgctgctggaggattagagagcagcgggaaaacgggctgtgcctgcgaggccaagttgcccaccctgcggagctaggaggcgcgagcagagaacgtgtgtgttaggagaactcggcttttgaaatgttctttctcgatagtaataatgtgggctgccagcctctcacatcttgcacactttttgggtgtgtaaatgacacaaaagttatttacatattatatatgtgaatatgtgtatatatgtacatagccagagagtcatgccacgtggtcattaaaccgatgatgattgaggcgtggcagcgtccttgctcattctctccctgtgcgcagccagcactggcccccgcacggtgaatgtgttccctccgctggtgtcgtggtggtcctgccaggccctctctgagataaaggtctggtttttcagcactaggatgtcttccccaggctggtgagcaggagattttgctcttgtgttgagacccgcagttaacgcttggtgttctggcctgcacgcagtgtgtggcaagttccctgagtttacctcggcggcgatgcctccgcctggagctggaggggcagcgtgccctggggctgctgaaaaactcaggcctgtggagtcagaacccgctcttcagcaggtcccaggccacttgagtgtggaaggctgcccggggcactggcagcctctgggggaagcctgctcccaagccgtctaggagccgagcacgctgtaccgccagccccagccctgcctgcatgaggggcccggcacgcttgtgcagcaacgctgcttacactatgaaggccaaggctggcctggttctggtgttgcattcgagggctgtgaacagaatgaaatgtcaacatccatttttcagacttgttctgcctccgaagagatttttagtgctgagtgattttcactattaacatatggctggaaggaatggttttcttatcttctccgagctctagactggctagcttctctctggctttttttgttttgttttcctctctttagaattgctgtatacttgtatctcctcagcacatttagaaaagccagtgtataattttggctggcaactgacggacgcagcgggcagcagcaggcagggcagcgcacgagagcacctcccagggcacggtgggaaactggccagcccagccccactactgccctctcctgctcgtccccagtccctgagctacaggtggctgtaggcagaagcccaccgggtgttccttagcgacagacaggtcgtcagctgctccccttgatgccttttcacagaaacaaccctcaacttgaggaagttgagagctccactccgaggtggacttgctccccctccctgagagctaactggcttgaactgtcatgagttcctggctgcccacaaagagggaccttctccacccttgtcctctgcgtggggcagacatcagccagacatgtcaccgacctgattgggggcagggagtaggaagtccaggaccaaaccatgctccccatgacagcagctggcgcctcagtccccatctgactcatgtctcttctcatctggttcagaacttagaagggcgtggcctctgatcagctggttccctccaaaccccagtggcaacctgtcccttgagagccaggaatggctcttagcagtgggcagtgagcccccgagaggataaagcggctgctcgaacagattgcgagcacattacttgctgcatgggaggaggtttaaaacaaatcaaagattccttgagggcattttacagaaaacaagatgtcaagagcatcactgttgttatttaaaagcccatttgaggccaggcgcggtggctcacgtctgtaatcccagcactttgggaggccgaggcggacggatcacgaggtcaggagatcgagaccatcctggctaacatggtgaaacccccgtctctactaaaaatacaaaaaattagccgggcgtggtggctggcgcctgtagtcccagctactcggaaggctaaggcaggagaatggcgtgaacctgggaggcagagcttgcagtgagccaagatcgcgccactgcactccagcctgggcgacacagcaagactccgtctcgaaaaaaaaaaaaaaaaaacagcccgtttgagattgctgacatgaacttctgaaagatgactacgtgcctcccaagactaaccgtcagcttggagggctgagaagggggttcccagctggagtcaaacagtggctcatgtgtttcatcaggaacgctcgtcatttccccgaaggagtcactgatcacatcagaccacaggggtcggcccacctcgggtttgggacagtgttctttcctggaatgaagcagtggcaatgcctctggcacaggattgctgggcctgcaggaggccaggaggcacctctgtgctgtgttcccagtaggaggaggcagctactacttgtaaggcacacatatcattttgcattggaaaagtgaagataggcttgctgcagagggagtgatgggagagttcaccttaaattgttctactgaggaagggctccaaagagccagtgggttttccgcaggcagacggggttctccctgtccggctcaccagtgcaggaagccagggaagaaattactgtgggaattctgttatttcacaagcacttcatacctgcatccctgcacttggcaccgcaggcctcagtgaccagctgccgaaacggtaatttcagcattttggtcagtaagcaaactggagaagcagctggggtggggcgcagttcagcccgctaccctgacactctaggccctggcatttgctttagctgcttttgtagaattgacatgagggagactgtccctctagaggaaaacgctcagctattaccaatgaggaaaaggcaatactgatgtgctggggttttttgttttttttaatctcaaacttaggaaaagatgcaagtgcgttacaaagaattttgtttcctgaaccgtgtgagtcagttgctgagagtctgctacccgcccacgatacagacactgaacaggaagtcagcatggacgcagtactcctagcaggtcctcaggcccagtcatgtcctctaggaaaaggatccagttcaggagcaggagctgcacttggttgtcatctctttggtctccttctgattggaagctttttgacttccaagacgtggatacttttgaagtgttctgaatttgtagaatgttcctcagtttgtgtttgcctggtgtttcctcagcactggattcaggctaagcatctttggcaggagtgtgacagcactgacactcttgggtggcacgtactttcaaagtgcccattactgatgatgtgcatttgaccacttggtgaagacggtgtctgctgggcatctccagtgtgactttccctttctaactgaacagtgttttgtggcagactctcaaaatctgtaaataccccttcctcagcaaactttcagatcaattcatatgtattggggtgtgtgtgtgtgtgtgtgtgtgtgtgtgtgtgtgtgtgtgtgtgtgtgtgtagttccctatttaaagggctatactgtattccattaatagtaactgtttgttaggatgctcagattgtcccgagtttggccagtggaagccccttcacataggcttcggtgtccttaggacatgtccttatcattccttgagcactcccttgctttctggcaaaacagactttgggttcatcctgtcctttccctgcctagccccggaatcagccctcactccttttagtggagaataatacttttagcagcaaaggtctgggtctaggggtgctcactgcagttggggtgtcactgttcccaggtgctcccagtggacagaggtcgttcttgttttcttctttctgtgtctaactcctcagagaaacctggctcccactgtcctgtttacctgcctgactgcctccatacataagcagcctccctcccctgccaccaccccgtccctgcagatgccttcctcacccacttgggctctcatactgcacatcaggctgcccacactgactccccctatcggaccaccccagccctgcacatacaccccacacggatgccagcctcaccctgcccatgctgagtccccgtgctgtggtgttcctccacatggacagctccacaccctacttgggctgacacccgccctccccacaagcaccccgtccttaccctgcactgggccacccccacgtgtggatgtcctctgtggtaggcagagtggcgcccctaaagatggccacaccctaagccctggaacgtgtgaatgttacatggcaaaaggaactttgcagataaaaattaagaagattgtaaactttaaaacagggaaattatcctggatcatctgcatgggtccaatgcaatcacaaggatccataagaatagaaaaggcaggcagaaagaagggtcggtgggagagagggactgggcctgctgctgctggtggaaaatgaagtgccacgagtcaggagggagggtggccttcacagactggcaaaggcctcagctggcagccagcaaggaaatgctgacctcagctggcccacaactccaagaaattaaattctgccaacaataatcctcagcaaggaaacggattctcccttagagacgccagagggaacggtcctgccaacagcaagactttagcctggagacactcgtgttggacttctgacctacagaactgagataaaattgtggtttttatttatttatttatttatttttgagacggagtcttgctctgtcgcccaggctggagtgcagtgacgggatcttggctcactgcaacctccgcctcctgggttcaagcgattgtcctgcctcagcctcctgagtagctgggactacaggcacctgccaccacgcacagctaatttttgtatttttagtaaagatggggtttcaccatgttggccaggctggcctcaaacttctgaccttgtgatccgcctgcctcagcttcccaaagtgctgggattacaggcgtgagccaccgtgcctggccaaattgtgctgtttttaaacaaagcctgtggtaacttgttatagtattaacagaaaactaatacacactcctcattcagtgtgggccctacaacccacaccaggccacctgtcaagggaacgcttaccttgatctgtcccacttaatagctttaggcctgatttgttcagaaagagaaatgacggaaatagacggagaaagggaaggggaagttctgacatgtttctgaacaccttgaaagggatgagatttctgagcccaagggctcagaagggctttcaagatatctctaggaatcctcagtctcttgggaacaccagtagttattttctgccctcagagtgctaagaacatgcatggtccacaaaacttccaaaaaggaaagctgtacttcctttggaagcaatagccacattaacgcagcctttattatttaaacaacgaatatccctggctctgtggtagtgaccatttcccactgtaattaccgttgaacgccagctctgggggtgtgatgtggcgaacgcatagtgaggtccacactccttgggaccgcagcctgagttcctgtccaaaggcttccctgtagctgggtccacccacaggctgctgttgagcggtaggtgtgtgtggagactgcagaaacaggaagtgtttgtgaaagagcacgctttattgggaagcagactgctgcacagtgaccaacaggccacccaatgggcacttacacatcgtactccaaaagacacaggatgttttgctaataaaaatcagtgggaacagggattcctctgggcaactcccccaacctcatccctttcagggattgagaaatctcccaaccattttcctgatgacagccatggttcattagagatacagcccctcaggggtgccttcctgtttcttataaagaacattttctttagattttttgaagtcttcatttgttactttcattctacgttctcttaaggccatcagaccagcttctgtacagattgcctgtaagaaagaagagtgtgttcagaaagtgacatactcatttttattctaacaaggaattccaaaaaacctattctgaggccaggcgcggtggctcacacctgtaatcccagcactctgggaggccgaggcaggtggatcgcctaaggtcaggagttcaagaccagcctggccaacacggtgaaaccccatctctactaaaaatacaaaaagttagccagggacggtggcaggcacctgtaatcctagctactcgggaggctgaggcaggagaattgcttgaacccgggaggcagaggttacagtgagccgagatcgcgccactgcactctagcctgagcaacgagcgaaactctacctcaaaaaaaaaaaaaaaaaaatctgttctgaaataaagcatgagacacctagactaaacacaaattgcttatttgggaaagatttgatttttaaaaaaaatgttttaagcatcctattttctgaaaggatgtgaagtggcttaaactgggagttactgtaactaagactgacccaagggtcagggctgtgggttctagttttggctcaggttctaacaagctatgtggcttgtacaacaccacttttgttaaagagaataatattcctaggaaataaacaaaattatgccctgaaacttagaggcaattgacagtatatgtctatttcatttacttatagtcataaaagaacatgtattctggttagatactgtaagtggcagtatctatactatggaataatactacagagtatagcatttattccaatatatttaatttctcagtaattactggcccaaagtaaaagaaaacaataacccatgttacatgggttactgttattgttttaggcctgatctgtttagaaaggaaagagaaatgaaggaaatagatagagaaggacagcaaacaaacatattatgtgggttactgttattgttttctttttcttttggccagtaattactgtggcaaaaacaagatgtggcaaaaaacacaatcctggcacagaagtttgtttggtgatggccatcaggttatttacttcaaatggttcgggtgaaaagaaagttttgtgtatagaaagagaaaaagcaaacaggtaaaatgttaactcttggcaaatcactgtgctattgttgcaacttttttgaaggcttgaaaattgtcaaagtaagttcttatcttaaaattttaagatctttcaatttttaaaaaagaagatagattttacttgccaacagagacatctagttctctaggactaactgccaatgatccgtgggctcagggcaggtgctggcctggaaaggcactgcttgtgctgtccctacctaaccatggcatttatgcccaacgaaaacccagctctttccaggaaaagcaggtagaacccatattcaacgctgccagaccttgctgtaaattctggtcagctgggaggaaatgtcctaactcatgtacatttgtcataaaaccaagaagtataatctggtacaaccttccagaacacagattgggagatgaatgcagcgggtgcttggtccccactctgcggctctggggagagttctcccaggacatacccttcccctgacctgggactgagcagctacatttgacacaccttgagaaagtcacctgggcctaaggcttagtaccagcgactcagccttgtggctccaggtgatttagcgtcattcactgcataaaatgatgcattaagaatgacttcaatatcaagcacatataccatttggatgtaatcgtaaaccaatatgatgattaaaatacagacacccacctgtccaggccaaccaccatcccaagagcacatatagactctttcctgattgacggccacattcccagaaataagctgacacggctaggctctcaccttgatgtcagcaccagagaggtcatctttagccatgatcaggtcgtccagggttacatcatcagccagcgtcatcctgcttgtgtgaatctgaaagatgcgcttcttcgtcttttcatcaggcagggggaactcaatcttcctgtcaatgcggcctgcaggtacaaagagatttgaagtcacaccaacatccaaacccaggctcggccatggctcagaggcctcagcccatctccttacatacgaagtttcagtcggacagaattctgtgggaaggatgtctaaattttaaaaagtaaacatatatttttgtagtttgtagatttctacatttgaattctcttcatttaaaagaaactctctctgctttggtaccttcagaaataaatgaaaggagcaattcctgagtgaaactgggcagacctattgtgttaaaaacattacaaaagacagcaaacaaatcactgtttcttctgatgctacctgaatgtaaaaaggacaaatcctaccatcacatgaattatttcttccagaaaaagcagcaagttcttgaggctaaaaagggaatgttatggaaaagaaaagacaagacataagactggaattcaaagggccaaggtgcacagaccatatcatgctctgttttaaccctcatctcaagaggacctatttttttgtaaattatcctaagtttcactgcagtatttgcttttttatgtatcattttataggcctcccaaagcacacttaaacacaaatatataaacacattaatctccatgatgaaaccaaagcaaatttaacctggtctgataagtgctggatccaaagtttctattcggtttgtggccatgataactttcacatctcccctagaatcaaatccatccaactggttcagcagttccaacattgttcgctgaatttctctctcaccaccagaattggagtcatatctttggaaaaaaaaaaagggaaggaatgaagactcaactgatcgcctgctcaaggggaattacagcaaagacctcattgtgacaaaacaccttaacaaacattcctgtttcaactcacatggcactccctcaattatgctcggaaaaaataaattcagcaccccttgccatggtctgaatgtatttccccaaatttatgtgttgaaacttaatccctactgtgtggctaagagatgaggccttttggaaagggctaaaggcatgaggcagagccttatacagcatgagttccttctaaaaagagaaaaaggccttatacagcatgtattccttataaaaaatgctgcagggaactagtgtaggccctttttgctcttttgtttgtcccctgagcatttgtctcctctgcagaataggtgccatctcggaagcagagagcagccctcactagacatcaatgccagtgccttgatcttgggcttctcagcctccagaactgtgggaaatacatttctattctttatacaaataccagtcctaaggtattttgtttagcagcacaaatggactaagacgctcccatcagccaagttacagatcatattttttcatagcagtttctgtgtctgaaattgtatcatttattctgtttccatgtttggtatctgatccctacaacctgtgagctcctccagggcagagacttgtgctcacaactgtgtccctagagtccagatggtcctggatcagggcgggtgctcaagacatggttattcataactgaccaatctctccagacgttcacagttactgggcagttgttagctggctcctgggagagcagagcctaaagcatgcatggaaggccacgcacagcaagaactgtggccatagggagagccccctgagattgctcattctcaagagaagagctatgcggtgttccctactaaacaaggcaaaataagtatgagaaagtctacctttttgtcccaatggcgtcaatttcatcaataaacacgatggacggtgcatgttcttcagcaactcggaacaattcccgtacgagtttgggcccatcacctaggtacttctgaataagttcagagccaaccactctcaagaaagtggctgaggtttggtttgctactgctttggctaacaaggttttacctattttggatgaaaaagataaaaaaaaaaaagacaccttaagtgccattttaacttaaaaactcgtatcattaccaccttaaatggacaccaaaaacaggcgggccctcatgctaaggcatggcaccaattcaagtgtcacgacattccattctcctaagtagataagaggacatttagaaaaatctactaacatgtttggattatccttagctattttgctgaacttatgataacgtcagaaaatactttttacttggttattttccaaccttgacccagtttcccctgaaaagctgcgaactataattacctgtacgaagaattgcttcattccagtaatgaaataaatctcatttttttctctg

SEQ ID NO: 160193 - DNA, 3434 bp, Homo sapiens
  Payload ID: 11331
  Gene Symbol: NRDE2
  Gene Name: NRDE-2, necessary for RNA interference, domain containing
  ENST ID: ENST00000553409
  CDS Start-End: 7-138
gtggtcatggcgctgttcccagcctttgcggggcttagtgaggctcccgatggcgggagctccaggaaagtcaaggaaataatgctgcagctgatactggacatcgctttgtttggcttgaggacattcaggctgtgacgggagaaaccttcagaacagataagaaaccagatcctgcgaactgggagtacaagtctctctaccgaggggatatagcaagatacaagaggaaaggagactcctgccttggcattaaccctaagaagcagtgcatatcttgggaagggacttccacagagaagaagcattcacgcaagcaggttgaacgctattttactaagaagagtgtgggattaatgaacatcgatggagttgccattagcagtaaaactgaacctccctcatctgagcccatctcctttataccagtgaaggacttggaagatgcggctcctgttacaacctggttgaatcctctggggatttatgatcagtcaaccacacattggctacaaggacagggtcctccagagcaggaatcaaagcagccagacgcacagccagacagcgagagtgcggctctcaaggccaaggtggaggagtttaacaggagggtgcgggagaatcctcgggatacgcagctgtggatggcatttgttgcttttcaggacgaggtcatgaaaagtcctggcctgtatgccatcgaggaaggagagcaggaaaagcgaaagaggtccctgaagctcattctggagaagaagctggccattctggagcgggccattgagagcaaccagagcagtgtggatctgaaactggccaagctgaagctctgcacagagttctgggagccctccactctggtcaaagagtggcagaaactgatatttttgcatcccaataatacagccctttggcagaaataccttttattttgccagagccagtttagtaccttttcgatatcaaaaattcacagtctttatggaaaatgcttgagcactttgtctgctgttaaggacggcagcatcttatctcaccctgcgttgcctggcacggaagaggccatgtttgcactctttcttcagcagtgccactttctgcggcaggctggccactctgagaaggccatctcattgttccaggccatggtggacttcaccttcttcaaacccgacagcgtgaaagatctgcctaccaaaggacaggtggaattctttgaacccttttgggacagtggagagccccgggctggggagaagggagcccgaggctggaaggcgtggatgcaccagcaggaacgaggtggctgggtggtcatcaacccagatgaggatgacgatgaaccagaagaggatgaccaggaaataaaagataagactctgcccaggtggcagatctggcttgctgctgagcgttcccgtgaccagaggcactggcggccctggcgccctgataagaccaagaagcaaaccgaggaagactgtgaggatcccgagagacaggtgttgtttgatgatattgggcaatctttgatcagactttccagccatgatcttcagttccagctggtggaggccttcctgcagttcttgggtgtgccttctggctttactcctccagcctcctgtctttatctggccatggatgagaacagcatctttgataatggactttatgatgaaaagcccttgacttttttcaaccctttgttttctggggctagctgtgttggccgcatggataggttgggctatcctcgctggaccaggggtcagaaccgagagggcgaggagttcatccgcaatgtcttccaccttgtcatgcctttattttcaggcaaagagaagtcccagctctgcttctcctggttacagtatgagattgcaaaggtcatttggtgcctgcacactaaaaacaagaagagattaaagtctcaagggaagaactgcaaaaaactagccaagaatctccttaaggagccagaaaactgcaacaacttttgcctgtggaagcagtatgcacatctggagtggttgcttggcaacacggaggatgccagaaaagtttttgacacagcacttggcatggcaggaagcagagaactgaaagactctgacctctgtgagctcagtctgctctatgctgagctggaggtggagctgtcgccagaagtgagaagggctgccacagctcgagctgttcacatattaaccaagctgactgagagcagcccctatgggccctacactggacaggtgttggctgttcacattttgaaagcgcgaaaggcttatgagcacgcactgcaggactgtttgggtgacagctgtgtctccaatccagctcccaccgattcctgtagccgcctaattagcctggctaaatgcttcatgctcttccagtatttgaccatagggattgatgctgctgtgcagatatacgaacaggtgtttgcaaaactgaacagttctgttttcccagaaggctctggcgagggggacagtgccagctcccagagttggaccagtgttctcgaagccatcacactgatgcacacgagcctgctgagattccacatgaaagtgagtgtttacccgctggcccctctgcgagaggcactctcacaggctttaaagttgtatccaggcaaccaggttctttggaggtcctatgtacagattcagaataagtcccacagtgccagcaaaaccaggagattttttgacacaatcaccaggtctgccaaacccttggagccttggttgtttgcaattgaagctgagaaactgaggaagagactggtggaaactgtccagaggttagacggtagagagatccacgccacaattcctgagaccggcttaatgcatcggatccaagccctgtttgaaaatgccatgcgcagcgacagtggcagccagtgccccttgctgtggaggatgtatttgaactttctggtttccttaggaaataaagaaagaagcaaaggtgtattctacaaagcacttcagaattgcccttgggcaaaggtgttgtacctggacgccgtggagtatttccccgatgagatgcaggagatcctggacctgatgactgagaaggagctccgggtgcgcctgccgctggaggagctggagctgctgctggaggattagagagcagcgggaaaacgggctgtgcctgcgaggccaagttgcccaccctgcggagctaggaggcgcgagcagagaacgtgtgtgttaggagaactcggcttttgaaatgttctttctcgatagtaataatgtgggctgccagcctctcacatcttgcacactttttgggtgtgtaaatgacacaaaagttatttacatattatatatgtgaatatgtgtatatatgtacatagccagagagtcatgccacgtggtcattaaaccgatgatgattga

SEQ ID NO: 160194 - DNA, 612 bp, Homo sapiens
  Payload ID: 11331
  Gene Symbol: NRDE2
  Gene Name: NRDE-2, necessary for RNA interference, domain containing
  ENST ID: ENST00000554464
  CDS Start-End: 1-612
ttttcgatatcaaaaattcacagtctttatggaaaatgcttgagcactttgtctgctgttaaggacggcagcatcttatctcaccctgcgttgcctggcacggaagaggccatgtttgccgactctgaacataggatgaaagttgctgcactctttcttcagcagtgccactttctgcggcaggctggccactctgagaaggccatctcattgttccaggccatggtggacttcaccttcttcaaacccgacagcgtgaaagatctgcctaccaaaggacaggtggaattctttgaacccttttgggacagtggagagccccgggctggggagaagggagcccgaggctggaaggcgtggatgcaccagcaggaacgaggtggctgggtggtcatcaacccagatgaggatgacgatgaaccagaagaggatgaccaggaaataaaagataagactctgcccaggtggcagatctggcttgctgctgagcgttcccgtgaccagaggcactggcggccctggcgccctgataagaccaagaagcaaaccgaggaagactgtgaggatcccgagagacaggtgttgtttgatgatattgggcaatctttgatc

SEQ ID NO: 160195 - DNA, 2937 bp, Homo sapiens
  Payload ID: 11331
  Gene Symbol: NRDE2
  Gene Name: NRDE-2, necessary for RNA interference, domain containing
  ENST ID: ENST00000556189
  CDS Start-End: 1-682
tggacatcgctttgtttggcttgaggacattcaggctgtgacgggagaaaccttcagaacagataagaaaccagatcctgcgaactgggagtacaagtctctctaccgaggggatatagcaagatacaagaggaaaggagactcctgccttggcattaaccctaagaagcagtgcatatcttgggaagggacttccacagagaagaagcattcacgcaagcaggttgaacgctattttactaagaagagtgtgggattaatgaacatcgatggagttgccattagcagtaaaactgaacctccctcatctgagcccatctcctttataccagtgaaggacttggaagatgcggctcctgttacaacctggttgaatcctctggggatttatgatcagtcaaccacacattggctacaaggacagggtcctccagagcaggaatcaaagcagccagacgcacagccagacagcgagagtgcggctctcaaggccaaggtggaggagtttaacaggagggtgcgggagaatcctcgggatacgcagctgtggatggcatttgttgcttttcagcactctttcttcagcagtgccactttctgcggcaggctggccactctgagaaggccatctcattgttccaggccatggtggacttcaccttcttcaaacccgacagcgtgaaagatctgcctaccaaaggacaggtggaattctttgaacccttttgggacagtggagagccccgggctggggagaagggagcccgaggctggaaggcgtggatgcaccagcaggaacgaggtggctgggtggtcatcaacccagatgaggatgacgatgaaccagaagaggatgaccaggaaataaaagataagactctgcccaggtggcagatctggcttgctgctgagcgttcccgtgaccagaggcactggcggccctggcgccctgataagaccaagaagcaaaccgaggaagactgtgaggatcccgagagacaggtgttgtttgatgatattgggcaatctttgatcagactttccagccatgatcttcagttccagctggtggaggccttcctgcagttcttgggtgtgccttctggctttactcctccagcctcctgtctttatctggccatggatgagaacagcatctttgataatggactttatgatgaaaagcccttgacttttttcaaccctttgttttctggggctagctgtgttggccgcatggataggttgggctatcctcgctggaccaggggtcagaaccgagagggcgaggagttcatccgcaatgtcttccaccttgtcatgcctttattttcaggcaaagagaagtcccagctctgcttctcctggttacagtatgagattgcaaaggtcatttggtgcctgcacactaaaaacaagaagagattaaagtctcaagggaagaactgcaaaaaactagccaagaatctccttaaggagccagaaaactgcaacaacttttgcctgtggaagcagtatgcacatctggagtggttgcttggcaacacggaggatgccagaaaagtttttgacacagcacttggcatggcaggaagcagagaactgaaagactctgacctctgtgagctcagtctgctctatgctgagctggaggtggagctgtcgccagaagtgagaagggctgccacagctcgagctgttcacatattaaccaagctgactgagagcagcccctatgggccctacactggacaggtgttggctgttcacattttgaaagcgcgaaaggcttatgagcacgcactgcaggactgtttgggtgacagctgtgtctccaatccagctcccaccgattcctgtagccgcctaattagcctggctaaatgcttcatgctcttccagtatttgaccatagggattgatgctgctgtgcagatatacgaacaggtgtttgcaaaactgaacagttctgttttcccagaaggctctggcgagggggacagtgccagctcccagagttggaccagtgttctcgaagccatcacactgatgcacacgagcctgctgagattccacatgaaagtgagtgtttacccgctggcccctctgcgagaggcactctcacaggctttaaagttgtatccaggcaaccaggttctttggaggtcctatgtacagattcagaataagtcccacagtgccagcaaaaccaggagattttttgacacaatcaccaggtctgccaaacccttggagccttggttgtttgcaattgaagctgagaaactgaggaagagactggtggaaactgtccagaggttagacggtagagagatccacgccacaattcctgagaccggcttaatgcatcggatccaagccctgtttgaaaatgccatgcgcagcgacagtggcagccagtgccccttgctgtggaggatgtatttgaactttctggtttccttaggaaataaagaaagaagcaaaggtgtattctacaaagcacttcagaattgcccttgggcaaaggtgttgtacctggacgccgtggagtatttccccgatgagatgcaggagatcctggacctgatgactgagaaggagctccgggtgcgcctgccgctggaggagctggagctgctgctggaggattagagagcagcgggaaaacgggctgtgcctgcgaggccaagttgcccaccctgcggagctaggaggcgcgagcagagaacgtgtgtgttaggagaactcggcttttgaaatgttctttctcgatagtaataatgtgggctgccagcctctcacatcttgcacactttttgggtgtgtaaatgacacaaaagttatttacatattatatatgtgaatatgtgtatatatgtacatagccagagagtcatgccacgtggtcattaaaccgatgatgattgaggcgtg

SEQ ID NO: 160196 - DNA, 132 bp, Homo sapiens
  Payload ID: 11331
  Gene Symbol: NRDE2
  Gene Name: NRDE-2, necessary for RNA interference, domain containing
  ENST ID: ENST00000628832
  CDS Start-End: 1-132
atggcgctgttcccagcctttgcggggcttagtgaggctcccgatggcgggagctccaggaaagtcaaggaaataatgctgcagctgatactggacatcgctttgtttggcttgaggacattcaggctgtga

SEQ ID NO: 160197 - DNA, 1199 bp, Homo sapiens
  Payload ID: 11332
  Gene Symbol: NSA2
  Gene Name: NSA2 ribosome biogenesis homolog
  ENST ID: ENST00000296802
  CDS Start-End: 371-940
aggaggcgcgagccgcgccaaagtctgcaacggcctcaagtctcgacgccagcctaggcaaaaggcaatgtatctaaacgaaaagaaaataggctttctccgctctaccgcctcgggcagccacacctccacacttccggcggtgtaccggccaaatgccgcctgccagcaacttccgtcctcctagctaaaagcggaaaacagaggctcggaaccgctgcgtggttcttgctcttcactcggccgttttaaagggtgactctttcctgtcccggcctgcgtggtgtgggcttgtgggtctttgagacccgaaaattgagagcgttttcgcactccagcggctgctcctggcggctctgcggccgtcaccatgccacagaatgaatatattgaattacaccgtaaacgctatggataccgtttggattaccatgagaaaaagagaaagaaggaaagtcgagaggctcatgaacgttcaaagaaggcaaagaaaatgattggtctgaaggctaagctttaccataaacagcgtcatgctgagaaaatacaaatgaaaaagactatcaagatgcatgaaaagagaaacaccaaacaaaagaatgatgaaaagacaccacagggagcagtacctgcctatctgctggacagagagggacaatctcgagctaaagtactttccaatatgattaaacagaaaagaaaagagaaggcgggaaaatgggaagtccctctgcctaaagtacgtgcccagggagaaacagaagtattaaaagttattcgaacaggaaagagaaagaagaaggcatggaagagaatggttactaaagtgtgctttgttggagatggctttacaagaaaaccacctaaatatgaaagattcatcaggccaatggaaaatatgcccaggttaccaacaatcctgaaaatgatggatgtataaatgcagtcttactggtttgacagcaatttcatatataattattgaggactacacaccaattgaagaaactgccattactgtgatgtttctgaatactaccaaacagccatacatgtctgcaatgaagagatttattaaattgtaaacattaaagtggtccagttttataaatggtctttattttgaaatacgctttgaccccatgttcataaaactgaatgattgaaaaaaagcaaatatacaaatatcctacttcatc

SEQ ID NO: 160198 - DNA, 448 bp, Homo sapiens
  Payload ID: 11332
  Gene Symbol: NSA2
  Gene Name: NSA2 ribosome biogenesis homolog
  ENST ID: ENST00000515524
  CDS Start-End: 1-295
cagagagggacaatctcgagctaaagtactttccaatatgattaaacagaaaagaaaagagaaggcgggaaaatgggaagtccctctgcctaaagtacgtgcccagggagaaacagaagtattaaaagttattcgaacaggaaagagaaagaagaaggcatggaagagaatggttactaaagtgtgctttgttggagatggctttacaagaaaaccacctaaatatgaaagattcatcaggccaatggaaaatatgcccaggttaccaacaatcctgaaaatgatggatgtataaatgcagtcttactggtttgacagcaatttcatatataattattgaggactacacaccaattgaagaaactgccattactgtgatgtttctgaatactaccaaacagccatacatgtctgcaatgaagagatttattaaattgtaaacattaaa

SEQ ID NO: 160199 - DNA, 4594 bp, Homo sapiens
  Payload ID: 11332
  Gene Symbol: NSA2
  Gene Name: NSA2 ribosome biogenesis homolog
  Uniprot ID: O95478
  ENST ID: ENST00000610426
  CDS Start-End: 370-1152
ggaggcgcgagccgcgccaaagtctgcaacggcctcaagtctcgacgccagcctaggcaaaaggcaatgtatctaaacgaaaagaaaataggctttctccgctctaccgcctcgggcagccacacctccacacttccggcggtgtaccggccaaatgccgcctgccagcaacttccgtcctcctagctaaaagcggaaaacagaggctcggaaccgctgcgtggttcttgctcttcactcggccgttttaaagggtgactctttcctgtcccggcctgcgtggtgtgggcttgtgggtctttgagacccgaaaattgagagcgttttcgcactccagcggctgctcctggcggctctgcggccgtcaccatgccacagaatgaatatattgaattacaccgtaaacgctatggataccgtttggattaccatgagaaaaagagaaagaaggaaagtcgagaggctcatgaacgttcaaagaaggcaaagaaaatgattggtctgaaggctaagctttaccataaacagcgtcatgctgagaaaatacaaatgaaaaagactatcaagatgcatgaaaagagaaacaccaaacaaaagaatgatgaaaagacaccacagggagcagtacctgcctatctgctggacagagagggacaatctcgagctaaagtactttccaatatgattaaacagaaaagaaaagagaaggcgggaaaatgggaagtccctctgcctaaagtacgtgcccagggagaaacagaagtattaaaagttattcgaacaggaaagagaaagaagaaggcatggaagagaatggttactaaagtgtgctttgttggagatggctttacaagaaaaccacctaaatatgaaagattcatcaggccaatgggcttgcgtttcaagaaagcccatgtaacacatcctgaactgaaagccaccttttgcctaccaatacttggtgtaaagaagaatccctcatccccactgtatacaactttgggtgttattaccaaaggtactgtcattgaagtaaatgtgagcgaattgggccttgtgacacaaggaggcaaagttatttggggaaaatatgcccaggttaccaacaatcctgaaaatgatggatgtataaatgcagtcttactggtttgacagcaatttcatatataattattgaggactacacaccaattgaagaaactgccattactgtgatgtttctgaatactaccaaacagccatacatgtctgcaatgaagagatttattaaattgtaaacattaaagtggtccagttttataaatggtctttattttgaaatacgctttgaccccatgttcataaaactgaatgattgaaaaaaagcaaatatacaaatatcctacttcatcaatatctgcatttgtgagtgggtattcagcaatttcctgaaaaaaccaccagtgttcattgaaaatgcctttcaaaaaggttaatacacaattatgtgtctgagaatttaactgaagtatcttcaaaatctcgttaatcattaatcctaaaaaaggtaggtagcattaatacagatgttaagtttatagtgtttgtttacactagaagtatgtgagaagacactaaaagttcagaaatcttagagaaatcttttcacctgtgaaatccagtacagcaaaggtctagtgaattcacattctaaacatttttttcatctcatttaccatgtataataatacctacttggcactattttctacttgaatcatgaaaatgaaaaaaatatactaaagtctttgtactctcttagcattttctgtattctaaacaatatatttatactttcagaatagtattaagaattagtttaagtaactccagctaagttttaaaaggaaaaagaagactgcactgattccctgaggagaaatttatttgcagttacttagatgatgtaaaaaggtaaggatttacggttgtaacttggtgaaagcacttttgtgatctgttatatgttgtggttttaaggatggcgtatattacattaatctataatcaccacattgttttaaattgtttattttttttttaaagaagtctgtcttcagagtacaaccaatgtgattaattgtgcctttaacaaagtcattcaatgtctaaacaaattcagtatctgaaacatcttcatgaggaaaactgaaggaaaggaatttaaaaacacagaccaggaaacaatcacaaaatataggtttaattactacttttaaacttaaaaaaaaataaaaaccaagaaaacaaacataggtactccagtaagacttgctactctgaataatgtaacattttttctaagttctataaatatatactggaagttttagaacacatacagacgcttaggaaaagaaaggctagttccttggaaatgacgatccaggatgatacaatcacttgatgacagaaggtaagcctttcttacaattagattttagcagataattttaccactaatataaatgggtgatgtgtggatcacaagttctagaaggcgaataaaaatactgactccaggtaatttctggatactacaaaaatgaagtttgcttgttttttttagaaccaaaaatactatcttgtaaggtacaaagaaagcttgatattaagtatgaaaacataagcataacatttgtaactaatcacacccatgaaagacgactagatgacacctgaaacatttttcaaaatactgtaacacagatgagtaatattagtataaattttttatgtacattaagatctgtttcagtttgctggtgtgaccaaaccttagaaggtaatcccaagggataaagcagaacataagagcagatatttagatattagtacaggctcaatttgatgcaatcataaaccttcaagatttctagtcactgaaaccccattgtaggtagtgttctggagtctgctataagtaaatctttaatgactagatgttttccttaccatctacactgaatggaaataccatgaatatagacacattttaagtagaagactgacgttctaaatcatgctgtttgattttataaaaaaatcataatagaccctctcacctttaaaagttgtagaggagctttataataaattcttaaatatactaatttctgtgatgtctagcaattgaataatttaaacttgaaagaactaaaatactaataaccatctgctttatattacacaaggaaatatacacgtatgtacataaaaagtgaactcccttcacaaataagttcacaaaggactatgtgtaatgtgactggacattcaacaactagactagccggttgaaatcacattttcagtcctctgtaattgtgaaattttttctaatgccttgcaaaaactacagataactgattaagttcatgtaggttccttattgaagataaattgtggtataaattctatactcaagttactgaacatgagagttaggtttttccaagtgatctaacttttccctctataatctataaaccccaaaataacaatttctgtcagagagaatctgtaacagaagtgttcttgtgtgctgaacaaaaaacttctaaattgtttacaattcacttactatttaacccaaacaagtttaacaagaataagtttatactgttagcccccaatggtcatatatgattaataaacattttttgtaaactcaactatattcacacatcaagagttgagccagtgagctcaatctttaaaaaactacacttgtctaaagaaagtcttttagtgctcacttcggcagcacatatactaaaattagaacaatacagggaaaattagcatggcccctgtgcaaggatgacacaaattcatgaagcgtttccatgtttaaaataatttgaaaagaaagtattttaaacaaatccaagtaaaaataaaatatctacaagtgttttcaaatctaagaaatgaaacatgtaaagattaagaatttactgaatcttaacagagtatttccctttgtgatattgacagaagtttctcataaaatgtataaaacagcataaatgtttggtagattcactaatagtagtcatacttttttttttttacttagtattagcatttgttgaaaaaataaatggccaaagtgctttaattttcatttagaatgaaataatctggcttacctttgactaattaaagaaaatatagggtaatacaattgttcaaaatctaacacaaataggagcgtttactatttttgtctgctttaagattttaacttgatcgaaaataccaacatccccaaacaaaatttactgacctgacatcagcttactatagactgaatacactttcaacatcagtccttagctacctcaaataatgacacaaagtcttagtttcttttgcataaggatcaagatcaagctatttttaaaacaatttaaatggtctcaaaacattctccaacttaagtgcaaatttgagtacacataatatttccaaagagtagaactgtttttagattatctttggattctaataaccattttgtccatttttaaataaattacaaaaaataaca

SEQ ID NO: 160200 - DNA, 1067 bp, Homo sapiens
  Payload ID: 11333
  Gene Symbol: NSMCE1
  Gene Name: NSE1 homolog, SMC5-SMC6 complex component
  Uniprot ID: Q8WV22
  ENST ID: ENST00000361439
  CDS Start-End: 101-901
gcgttcgcgttcgccccgcctcaaaggaagaagagtccaccttgcgaccgtatccgctagcgcggcctgggatgcgcttgggctccctgttcgttcccacatgcagggcagcacaaggagaatgggcgtcatgactgatgtccaccggcgcttcctccagttgctgatgacccatggcgtgctagaggaatgggacgtgaagcgcttgcagacgcactgctacaaggtccatgaccgcaatgccaccgtagataagttggaggacttcatcaacaacattaacagtgtcttggagtccttgtatattgagataaagagaggagtcacggaagatgatgggagacccatttatgcgttggtgaatcttgctacaacttcaatttccaaaatggctacggattttgcagagaatgaactggatttgtttagaaaggctctggaactgattattgactcagaaaccggctttgcgtcttccacaaacatattgaacctggttgatcaacttaaaggcaagaagatgaggaagaaggaagcggagcaggtgctgcagaagtttgttcaaaacaagtggctgattgagaaggaaggggagttcaccctgcacggccgggccatcctggagatggagcaatacatccgggagacgtaccccgacgcggtgaagatctgcaatatctgtcacagcctcctcatccagggtcaaagctgcgaaacctgtgggatcaggatgcacttaccctgcgtggccaagtacttccagtcgaatgctgaaccgcgctgcccccactgcaacgactactggccccacgagatcccaaaagtcttcgaccctgagaaggagagggagtctggtgtcttgaaatcgaacaaaaagtccctgcggtccaggcagcattagccatcgtgccctgctgaggggctggctgccttgagtggcctgatcgccacagcccttcttggaagaaaggcgtccgtgtttcaggttccacgcgagtcacctctttcgtcttaatgttcaccgtccacagctttggaataaaccatcctgggaagttgctgcagcc

SEQ ID NO: 160201 - DNA, 472 bp, Homo sapiens
  Payload ID: 11333
  Gene Symbol: NSMCE1
  Gene Name: NSE1 homolog, SMC5-SMC6 complex component
  ENST ID: ENST00000567710
  CDS Start-End: 252-472
gcggcctgggatgcgcttgggctccctggtgaaaaagcaaaatataaaattcgattcaaactgtgattacatctatggaaaatacagcctttgccgaccaccctctttgtcccgccgccctccgtgctcccctctgttttgtgtacggagtttcttactttgtacaagtccgcagccgcttatgttacagccccgaggccagatgcgtttaaaatcgaggagttctcggagtttggaaagttcgttcccacatgcagggcagcacaaggagaatgggcgtcatgactgatgtccaccggcgcttcctccagttgctgatgacccatggcgtgctagaggaatgggacgtgaagcgcttgcagacgcactgctacaaggtccatgaccgcaatgccaccgtagataagttggaggacttcatcaacaacattaacagtgtcttggagtccttgtatattgagataaagagagg

SEQ ID NO: 160202 - DNA, 878 bp, Homo sapiens
  Payload ID: 11333
  Gene Symbol: NSMCE1
  Gene Name: NSE1 homolog, SMC5-SMC6 complex component
  ENST ID: ENST00000566087
  CDS Start-End: 67-279
gtccaccttgcgaccgtatccgctagcgcggcctgggatgcgcttgggctccctgttcgttcccacatgcagggcagcacaaggagaatgggcgtcatgactgatgtccaccggcgcttcctccagttgctgatgacccatggcgtgctagaggaatgggacgtgaagcgcttgcagacgcactgctacaaggtccatgaccgtatgtccttcatctctctgacctctgagaaagagaagcagcgatcctttctggctcgcctctgcattggttgctgagggtctgctgagagcccagggtctgctctcttgggccagctccactcctgcacccccgtctcatccagggcctgccctgccctgtcctcagtgctgtgctagcaggaccgcccgtccaccctgtctgtcgggagggctgtcagagggcaatgccaccgtagataagttggaggacttcatcaacaacattaacagtgtcttggagtccttgtatattgagataaagagaggagtcacggaagatgatgggagacccatttatgcgttggtgaatcttgctacaacttcaatttccaaaatggctacggattttgcagagaatgaactggatttgtttagaaaggctctggaactgattattgactcagaaaccggctttgcgtcttccacaaacatattgaacctggttgatcaacttaaaggcaagaagatgaggaagaaggaagcggagcaggtgctgcagaagtttgttcaaaacaagtggctgattgagaaggaaggggagttcaccctgcacggccgggccatcctggagatggagcaatacatccgggagacgtaccccgacgcggtgaagatctgcaatatctgtcacagcc

SEQ ID NO: 160203 - DNA, 1782 bp, Homo sapiens
  Payload ID: 11333
  Gene Symbol: NSMCE1
  Gene Name: NSE1 homolog, SMC5-SMC6 complex component
  ENST ID: ENST00000569236
  CDS Start-End: 283-495
aagagtccaccttgcgaccgtatccgctagcgcggcctgggatgcgcttgggctccctggtgaaaaagcaaaatataaaattcgattcaaactgtgattacatctatggaaaatacagcctttgccgaccaccctctttgtcccgccgccctccgtgctcccctctgttttgtgtacggagtttcttactttgtacaagtccgcagccgcttatgttacagccccgaggccagatgcgtttaaaatcgaggagttctcggagtttggaaagttcgttcccacatgcagggcagcacaaggagaatgggcgtcatgactgatgtccaccggcgcttcctccagttgctgatgacccatggcgtgctagaggaatgggacgtgaagcgcttgcagacgcactgctacaaggtccatgaccgtatgtccttcatctctctgacctctgagaaagagaagcagcgatcctttctggctcgcctctgcattggttgctgagggtctgctgagaggtgaggagcggcgctgcagcgtgtagtgaatgagctggtgcaccgatggagaggacggttcgtcactaagtgatctaccacagaccagccactctccttccacccggctcttcccagcattgttcactggccatgcttggaagtgcccatggcagttctcatctttgcatctgtgtgcctgaaggtccagagaatctttttccccaggcggttgggggaaagatgagagctacaggctgagaggtgaaatcctgtggcccctcacaaacctccccagccccgtgtcctgcccaccagcccttccttcttcccagcccagggtctgctctcttgggccagctccactcctgcacccccgtctcatccagggcctgccctgccctgtcctcagtgctgtgctagcaggaccgcccgtccaccctgtctgtcgggagggctgtcagagggcaatgccaccgtagataagttggaggacttcatcaacaacattaacagtgtcttggagtccttgtatattgagataaagagaggagtcacggaagatgatgggagacccatttatgcgttggtgaatcttgctacaacttcaatttccaaaatggctacggattttgcagagaatgaactggatttgtttagaaaggctctggaactgattattgactcagaaaccggctttgcgtcttccacaaacatattgaacctggttgatcaacttaaaggcaagaagatgaggaagaaggaagcggagcaggtgctgcagaagtttgttcaaaacaagtggctgattgagaaggaaggggagttcaccctgcacggccgggccatcctggagatggagcaatacatccgggagacgtaccccgacgcggtgaagatctgcaatatctgtcacagcctcctcatccagggtcaaagctgcgaaacctgtgggatcaggatgcacttaccctgcgtggccaagtacttccagtcgaatgctgaaccgcgctgcccccactgcaacgactactggccccacgagatcccaaaagtcttcgaccctgagaaggagagggagtctggtgtcttgaaatcgaacaaaaagtccctgcggtccaggcagcattagccatcgtgccctgctgaggggctggctgccttgagtggcctgatcgccacagcccttcttggaagaaaggcgtccgtgtttcaggttccacgcgagtcacctctttcgtcttaatgttcaccgtccacagctttggaataaaccatcctgggaagttgctgc

SEQ ID NO: 160204 - DNA, 625 bp, Homo sapiens
  Payload ID: 11333
  Gene Symbol: NSMCE1
  Gene Name: NSE1 homolog, SMC5-SMC6 complex component
  ENST ID: ENST00000564342
  CDS Start-End: 192-625
ggctgtggaactcggggactggggtcttggggtttcccccttcttgatggggaaactgaggcccagacaggggccgcagaaaacagcggactgggatgtcctcccgcaacacacacgcagacatctaaaaatcttactatttagtgaaaaatatttttaatcgtaattacgatttaacagttcgttcccacatgcagggcagcacaaggagaatgggcgtcatgactgatgtccaccggcgcttcctccagttgctgatgacccatggcgtgctagaggaatgggacgtgaagcgcttgcagacgcactgctacaaggtccatgaccgcaatgccaccgtagataagttggaggacttcatcaacaacattaacagtgtcttggagtccttgtatattgagataaagagaggagtcacggaagatgatgggagacccatttatgcgttggtgaatcttgctacaacttcaatttccaaaatggctacggattttgcagagaatgaactggatttgtttagaaaggctctggaactgattattgactcagaaaccggctttgcgtcttccacaaacatattgaacctggttgatcaacttaaaggcaagaagatgaggaagaagga

SEQ ID NO: 160205 - DNA, 493 bp, Homo sapiens
  Payload ID: 11333
  Gene Symbol: NSMCE1
  Gene Name: NSE1 homolog, SMC5-SMC6 complex component
  ENST ID: ENST00000563900
  CDS Start-End: 80-493
aggaaactaacatttattaagtgtttactagtagttctctcagtaatgaacttcattataattttatgttcgttcccacatgcagggcagcacaaggagaatgggcgtcatgactgatgtccaccggcgcttcctccagttgctgatgacccatggcgtgctagaggaatgggacgtgaagcgcttgcagacgcactgctacaaggtccatgaccgcaatgccaccgtagataagttggaggacttcatcaacaacattaacagtgtcttggagtccttgtatattgagataaagagaggagtcacggaagatgatgggagacccatttatgcgttggtgaatcttgctacaacttcaatttccaaaatggctacggattttgcagagaatgaactggatttgtttagaaaggctctggaactgattattgactcagaaaccggctttgcgtcttccacaaacatattgaacctggttgatcaacttaaaggc

SEQ ID NO: 160206 - DNA, 260 bp, Homo sapiens
  Payload ID: 11333
  Gene Symbol: NSMCE1
  Gene Name: NSE1 homolog, SMC5-SMC6 complex component
  ENST ID: ENST00000562039
  CDS Start-End: 1-237
cttaaaggcaagaagatgaggaagaaggaagcggagcaggtgctgcagaagtttgttcaaaacaagtggctgattgagaaggaaggggagttcaccctgcacggccgggccatcctggagatggagcaatacatccgggagacgtaccccgacgcggtgaagatctgcaatatctgtcacagcctcctcatccagaagtcttcgaccctgagaaggagagggagtctggtgtcttgaaatcgaacaaaaagtccctgcgg

SEQ ID NO: 160207 - DNA, 626 bp, Homo sapiens
  Payload ID: 11333
  Gene Symbol: NSMCE1
  Gene Name: NSE1 homolog, SMC5-SMC6 complex component
  ENST ID: ENST00000563273
  CDS Start-End: 47-626
cgctagcgcggcctgggatgcgcttgggctccctgttcgttcccacatgcagggcagcacaaggagaatgggcgtcatgactgatgtccaccggcgcttcctccagttgctgatgacccatggcgtgctagaggaatgggacgtgaagcgcttgcagacgcactgctacaaggtccatgaccgcaatgccaccgtagataagttggaggacttcatcaacaacattaacagtgtcttggagtccttgtatattgagataaagagaggagtcacggaagatgatgggagacccatttatgcgttggtgaatcttgctacaacttcaatttccaaaatggctacggattttgcagagaatgaactggatttgtttagaaaggctctggaactgattattgactcagaaaccggctttgcgtcttccacaaacatattgaacctggttgatcaacttaaaggcaagaagatgaggaagaaggaagcggagcaggtgctgcagaagtttgttcaaaacaagtggctgattgaggaaggggagttcaccctgcacggccgggccatcctggagatggagcaatacatccgggagacgtaccccgacgcggtgaagatctgcaatatctgtc

SEQ ID NO: 160208 - DNA, 1195 bp, Homo sapiens
  Payload ID: 11334
  Gene Symbol: NSMCE2
  Gene Name: NSE2/MMS21 homolog, SMC5-SMC6 complex SUMO ligase
  Uniprot ID: Q96MF7
  ENST ID: ENST00000287437
  CDS Start-End: 217-960
gcccgctctcacttttcagcggcaggcgaagggggctgaggaaaggaggtgggtctaggcaggggaaattggggtgccaccagacggagacagcttggactaccagaatcaagcactcttttggaagagggtaatctctctccaaaaactgaggacacttaccttccccatatattgagtccagctgtgtttggtggcccaggtactaatttcaagatgccaggacgttccagttcaaattcaggttcaactggtttcatctccttcagtggtgtagagtctgctctctcctccttgaaaaacttccaagcctgtatcaactctggtatggacacagcttctagtgttgctttggatcttgtggaaagtcagactgaagtgagtagtgaatatagtatggacaaggcaatggttgaatttgctacattggatcggcaactaaaccattatgtaaaggctgttcaatctacaataaatcatgtgaaagaagaacgtccagaaaaaataccagatttaaaattattggtagagaagaaatttttggctttacagagcaagaattctgatgcagactttcaaaataatgaaaaatttgtacagtttaaacaacagctgaaagaactaaagaagcaatgtggtcttcaagctgacagagaagctgacggaacagaaggagtggatgaagatataattgtgacccaaagtcagaccaacttcacctgccccattacaaaggaggaaatgaagaagccagtgaaaaataaagtgtgtggccacacctatgaagaggacgccattgttcgcatgattgagtccaggcaaaagcggaagaaaaaggcctattgccctcaaattggctgtagccacacggatataagaaagtcagatcttatccaggatgaagcacttagaagggcaattgagaaccataacaagaaaagacatcgtcattccgagtaggaaaagccacctgcctgcagggacaccagcagcctacctcctaccccagctgtctgttgagagcagtgctgaccccagcagttagggactggctgcatagcatacttgttgggggtaaaacttgttgcttttatgtgtgcttgaaaacatttttcaaagttacacaacagaaatgcaatcatattgtttatttttaagtgttctataatgttaaataaaactttgatcatctgca

SEQ ID NO: 160209 - DNA, 996 bp, Homo sapiens
  Payload ID: 11334
  Gene Symbol: NSMCE2
  Gene Name: NSE2/MMS21 homolog, SMC5-SMC6 complex SUMO ligase
  ENST ID: ENST00000517315
  CDS Start-End: 200-763
taatatgtggtcttttgtgactggctgttttcttagcataaggttttcaaggttcatccatgttgcatgtatcagtgagagaggtggatgctttggagcttttggctcagaaatgataatgtacataacacaggcagccatgagttaaaatgcaagttctgctatctgctagctctctgaagtgagtagtgaatatagtatggacaaggcaatggttgaatttgctacattggatcggcaactaaaccattatgtaaaggctgttcaatctacaataaatcatgtgaaagaagaacgtccagaaaaaataccagatttaaaattattggtagagaagaaatttttggctttacagagcaagaattctgatgcagactttcaaaataatgaaaaatttgtacagtttaaacaacagctgaaagaactaaagaagcaatgtggtcttcaagctgacagagaagctgacggaacagaaggagtggatgaagatataattgtgacccaaagtcagaccaacttcacctgccccattacaaaggaggaaatgaagaagccagtgaaaaataaagtgtgtggccacacctatgaagaggacgccattgttcgcatgattgagtccaggcaaaagcggaagaaaaaggcctattgccctcaaattggctgtagccacacggatataagaaagtcagatcttatccaggatgaagcacttagaagggcaattgagaaccataacaagaaaagacatcgtcattccgagtaggaaaagccacctgcctgcagggacaccagcagcctacctcctaccccagctgtctgttgagagcagtgctgaccccagcagttagggactggctgcatagcatacttgttgggggtaaaacttgttgcttttatgtgtgcttgaaaacatttttcaaagttacacaacagaaatgcaatcatattgtttatttttaagtgttctataatgttaaataaaactttgatcatctg

SEQ ID NO: 160210 - DNA, 664 bp, Homo sapiens
  Payload ID: 11334
  Gene Symbol: NSMCE2
  Gene Name: NSE2/MMS21 homolog, SMC5-SMC6 complex SUMO ligase
  ENST ID: ENST00000519712
  CDS Start-End: 1-285
ggttcaactggtttcatctccttcagtggtgtagagtctgctctctcctccttgaaaaacttccaagcctgtatcaactctggtatggacacagcttctagtgttgctttggatcttgtggaaagtcagactgaagtgagtagtgaatatagtatggacaaggcaatggttgaatttgctacattggatcggcaactaaaccattatgtaaaggctgttcaatctacaataaatcatctaggtgtggtggcgcacgcctgtagttccagctacttgggaggctgaagtgggaggatcacttgagcccaggagttcaagatcagcctggacaacatagtgaaagaagaacgtccagaaaaaataccagatttaaaattattggtagagaagaaatttttggctttacagagcaagaattctgatgcagactttcaaaataatgaaaaatttgtacagtttaaacaacagctgaaagaactaaagaagcaatgtaagtcaacatgctttgctttggttcggctttttgaaattagggaactgacttgatgaacagccccagttaactgattttataaagtttgcttatctgcttggcttgatcctcattctaagttgcgttttattgttgttgcaattctgtattttgtctaatttttggttcaaa

SEQ ID NO: 160211 - DNA, 787 bp, Homo sapiens
  Payload ID: 11334
  Gene Symbol: NSMCE2
  Gene Name: NSE2/MMS21 homolog, SMC5-SMC6 complex SUMO ligase
  ENST ID: ENST00000523741
  CDS Start-End: 370-787
agtttccacccctccctcaaggcggcggtcctcttctatccgcagtcccggacctggagcgggtcagaccccgacttccgcccctgactccccaggcggtcacatgaccgaagcggctgggagcagggaggggcatcatgtgaccactcgccggcgacggctgatgacgcaagagcccgctctcacttttcagcggcaggcgaagggggctgaggaaaggaggcttttaagaactgtgctattgttgacttcttcacagaatcaagcactcttttggaagagggtaatctctctccaaaaactgaggacacttaccttccccatatattgagtccagctgtgtttggtggcccaggtactaatttcaagatgccaggacgttccagttcaaattcaggttcaactggtttcatctccttcagtggtgtagagtctgctctctcctccttgaaaaacttccaagcctgtatcaactctggtatggacacagcttctagtgttgctttggatcttgtggaaagtcagactgaagtgagtagtgaatatagtatggacaaggcaatggttgaatttgctacattggatcggcaactaaaccattatgtaaaggctgttcaatctacaataaatcatgtgaaagaagaacgtccagaaaaaataccagatttaaaattattggtagagaagaaatttttggctttacagagcaagaattctgatgcagactttcaaaataatgaaaaatttgtacagtttaaacaacagctgaaagaactaaagaagcaat

SEQ ID NO: 160212 - DNA, 841 bp, Homo sapiens
  Payload ID: 11334
  Gene Symbol: NSMCE2
  Gene Name: NSE2/MMS21 homolog, SMC5-SMC6 complex SUMO ligase
  ENST ID: ENST00000517532
  CDS Start-End: 263-841
gacgcaagagcccgctctcacttttcagcggcaggcgaagggggctgaggaaaggaggtgggtctaggcaggggaaattggggtgccaccagacggagacagcttggactaccaggcttttaagaactgtgctattgttgacttcttcacagaatcaagcactcttttggaagagggtaatctctctccaaaaactgaggacacttaccttccccatatattgagtccagctgtgtttggtggcccaggtactaatttcaagatgccaggacgttccagttcaaattcaggttcaactggtttcatctccttcagtggtgtagagtctgctctctcctccttgaaaaacttccaagcctgtatcaactctggtatggacacagcttctagtgttgctttggatcttgtggaaagtcagactgaagtgagtagtgaatatagtatggacaaggcaatggttgaatttgctacattggatcggcaactaaaccattatgtaaaggctgttcaatctacaataaatcatgtgaaagaagaacgtccagaaaaaataccagatttaaaattattggtagagaagaaatttttggctttacagagcaagaattctgatgcagactttcaaaataatgaaaaatttgtacagtttaaacaacagctgaaagaactaaagaagcaatgtggtcttcaagctgacagagaagctgacggaacagaaggagtggatgaagatataattgtgacccaaagtcagaccaacttcacctgccccattacaaaggaggaaatgaagaagccagtgaaaaataaagtgtgtggccacacctatgaagaggacgcc

SEQ ID NO: 160213 - DNA, 765 bp, Homo sapiens
  Payload ID: 11334
  Gene Symbol: NSMCE2
  Gene Name: NSE2/MMS21 homolog, SMC5-SMC6 complex SUMO ligase
  ENST ID: ENST00000518146
  CDS Start-End: 191-433
cgaagggggctgaggaaaggaggtgggtctaggcaggggaaattggggtgccaccagacggagacagcttggactaccagaatcaagcactcttttggaagagggtaatctctctccaaaaactgaggacacttaccttccccatatattgagtccagctgtgtttggtggcccaggtactaatttcaagatgccaggacgttccagttcaaattcaggttcaactggtttcatctccttcagtggtgtagagtctgctctctcctccttgaaaaacttccaagcctgtatcaactctggtatggacacagcttctagtgttgctttggatcttgtggaaagtcagagtttttgggaagaagagcacagaggtcaagggcccttctcatcacgtcatatcaaagctagtgcaagtcatcaacatgaccagtaatgtcaaccttgatcacctggccctagtagtgtttgtcaagtttctttactggaaagctgaagtgagtagtgaatatagtatggacaaggcaatggttgaatttgctacattggatcggcaactaaaccattatgtaaaggctgttcaatctacaataaatcatgtgaaagaagaacgtccagaaaaaataccagatttaaaattattggtagagaagaaatttttggctttacagagcaagaattctgatgcagactttcaaaataatgaaaaatttgtacagtttaaacaacagctgaaagaactaaagaagcaatgtaagtcaacatgct

SEQ ID NO: 160214 - DNA, 1037 bp, Homo sapiens
  Payload ID: 11334
  Gene Symbol: NSMCE2
  Gene Name: NSE2/MMS21 homolog, SMC5-SMC6 complex SUMO ligase
  Uniprot ID: Q96MF7
  ENST ID: ENST00000522563
  CDS Start-End: 104-847
agcggcaggcgaagggggctgaggaaaggaggtgggtctaggcaggggaaattggggtgccaccagacggagacagcttggactaccaggtactaatttcaagatgccaggacgttccagttcaaattcaggttcaactggtttcatctccttcagtggtgtagagtctgctctctcctccttgaaaaacttccaagcctgtatcaactctggtatggacacagcttctagtgttgctttggatcttgtggaaagtcagactgaagtgagtagtgaatatagtatggacaaggcaatggttgaatttgctacattggatcggcaactaaaccattatgtaaaggctgttcaatctacaataaatcatgtgaaagaagaacgtccagaaaaaataccagatttaaaattattggtagagaagaaatttttggctttacagagcaagaattctgatgcagactttcaaaataatgaaaaatttgtacagtttaaacaacagctgaaagaactaaagaagcaatgtggtcttcaagctgacagagaagctgacggaacagaaggagtggatgaagatataattgtgacccaaagtcagaccaacttcacctgccccattacaaaggaggaaatgaagaagccagtgaaaaataaagtgtgtggccacacctatgaagaggacgccattgttcgcatgattgagtccaggcaaaagcggaagaaaaaggcctattgccctcaaattggctgtagccacacggatataagaaagtcagatcttatccaggatgaagcacttagaagggcaattgagaaccataacaagaaaagacatcgtcattccgagtaggaaaagccacctgcctgcagggacaccagcagcctacctcctaccccagctgtctgttgagagcagtgctgaccccagcagttagggactggctgcatagcatacttgttgggggtaaaacttgttgcttttatgtgtgcttgaaaacatttttcaaagttacacaacagaaatgcaatcatattgttta

SEQ ID NO: 160215 - DNA, 405 bp, Homo sapiens
  Payload ID: 11334
  Gene Symbol: NSMCE2
  Gene Name: NSE2/MMS21 homolog, SMC5-SMC6 complex SUMO ligase
  ENST ID: ENST00000518013
  CDS Start-End: 272-405
cttttcagcggcaggcgaagggggctgaggaaaggaggtgggtctaggcaggggaaattggggtgccaccagacggagacagcttggactaccagaattacagaagagcatgatcgtgttttccttggtcctctgcaaaagtgaagtttcactaaagtaataatcaagcactcttttggaagagggtaatctctctccaaaaactgaggacacttaccttccccatatattgagtccagctgtgtttggtggcccaggtactaatttcaagatgccaggacgttccagttcaaattcaggttcaactggtttcatctccttcagtggtgtagagtctgctctctcctccttgaaaaacttccaagcctgtatcaactctggtatggacacagcttctagtgttgc

SEQ ID NO: 160216 - DNA, 1183 bp, Homo sapiens
  Payload ID: 11334
  Gene Symbol: NSMCE2
  Gene Name: NSE2/MMS21 homolog, SMC5-SMC6 complex SUMO ligase
  ENST ID: ENST00000520866
  CDS Start-End: 226-699
gacgcaagagcccgctctcacttttcagcggcaggcgaagggggctgaggaaaggaggtgggtctaggcaggggaaattggggtgccaccagacggagacagcttggactaccagaatcaagcactcttttggaagagggtaatctctctccaaaaactgaggacacttaccttccccatatattgagtccagctgtgtttggtggcccaggtactaatttcaagatgccaggacgttccagttcaaattcaggttcaactggtttcatctccttcagtggtgtagagtctgctctctcctccttgaaaaacttccaagcctgtatcaactctggtatggacacagcttctagtgttgctttggatcttgtggaaagtcagactgaagtgagtagtgaatatagtatggacaaggcaatggttgaatttgctacattggatcggcaactaaaccattatgtaaaggctgttcaatctacaataaatcatgtgaaagaagaacgtccagaaaaaataccagatttaaaattattggtagagaagaaatttttggctttacagagcaagaattctgatgcagactttcaaaataatgaaaaatttgtacagtttaaacaacagctgaaagaactaaagaagcaatgtaagtcaacatgctttgctttggttcggctttttgaaattagggaactgacttgatgaacagccccagttaactgattttataaagtttgcttatctgcttggcttgatcctcattctaagttgcgttttattgttgttgcaattctgtattttgtctaatttttggttcaaatcagcctgctcatttctgaaagccaacagtttccacaaagtgctcagaaaatttcccagcagctagttatgtgtattgtcccattgctggggagggaaattgggaaaacaaaataaaagtgaaaactattttatttaaataacaatggtatcgttcaagttttaaactgctgtgccatgctttaaaataaccatactttgattctggttttgcctctttggagtaatattagctatgttttctctcagaagaccactttatcttctcaactatagaccaaaatctccttgatccattttagcattgtggtagtataaattccatgtggtttttaaattgttgccttcttaataaactattacattc

SEQ ID NO: 160217 - DNA, 848 bp, Homo sapiens
  Payload ID: 11334
  Gene Symbol: NSMCE2
  Gene Name: NSE2/MMS21 homolog, SMC5-SMC6 complex SUMO ligase
  ENST ID: ENST00000519010
  CDS Start-End: 168-641
gacgcaagagcccgctctcacttttcagcggcaggcgaagggggctgaggaaaggagaatcaagcactcttttggaagagggtaatctctctccaaaaactgaggacacttaccttccccatatattgagtccagctgtgtttggtggcccaggtactaatttcaagatgccaggacgttccagttcaaattcaggttcaactggtttcatctccttcagtggtgtagagtctgctctctcctccttgaaaaacttccaagcctgtatcaactctggtatggacacagcttctagtgttgctttggatcttgtggaaagtcagactgaagtgagtagtgaatatagtatggacaaggcaatggttgaatttgctacattggatcggcaactaaaccattatgtaaaggctgttcaatctacaataaatcatgtgaaagaagaacgtccagaaaaaataccagatttaaaattattggtagagaagaaatttttggctttacagagcaagaattctgatgcagactttcaaaataatgaaaaatttgtacagtttaaacaacagctgaaagaactaaagaagcaatgtaagtcaacatgctttgctttggttcggctttttgaaattagggaactgacttgatgaacagccccagttaactgattttataaagtttgcttatctgcttggcttgatcctcattctaagttgcgttttattgttgttgcaattctgtattttgtctaatttttggttcaaatcagcctgctcatttctgaaagccaacagtttccacaaagtgctcagaaaatttcccagcagctagttatgtgtattgtcccattgctg

SEQ ID NO: 160218 - DNA, 1224 bp, Homo sapiens
  Payload ID: 11335
  Gene Symbol: NSMCE4A
  Gene Name: NSE4 homolog A, SMC5-SMC6 complex component
  Uniprot ID: Q9NXX6
  ENST ID: ENST00000369017
  CDS Start-End: 30-980
gttccgaagttgcacggtgaattggcgctatgtctggggacagcagcggccgcgggccagagggccggggccggggccgcgacccgcatcgggatcgcacccgctcccgctcccgctcgcggtcccctttgtcgcccaggtcccgccgcggctctgcgcgggagcgcagagaggccccagagcgcccgagcctggaggacacagagccgtcggattccggggacgagatgatggacccggccagcttggaggcggaggccgaccaaggcctgtgccgccagatccgccatcagtaccgggcgctcatcaactccgtccaacaaaaccgtgaggacatactgaatgccggtgacaaattaacagaggtccttgaagaggctaacactctgtttaatgaagtgtcccgagcaagagaagcagtcctggatgcccactttcttgttttggcttcagatttgggcaaagagaaagcaaagcagctgcgctcagacctgagctcctttgacatgttaagatatgttgaaactctactcacacatatgggtgtaaatccgctagaagctgaagaactcatccgtgatgaagatagtcctgattttgaattcatagtctatgactcctggaagataacaggcagaacagcagaaaacacctttaataaaacccatacattccactttctgttgggttcaatatacggagagtgccctgtgccaaagccacgagttgatcgtccaagaaaagttcctgtgatacaagaggagagggcaatgcctgcccagttaagaagaatggaagaatctcatcaagaagcaacagagaaagaagtagaaagaatcttgggattgttgcagacatattttcgagaagatcgagacagtctcactctttcgcccagactggaatgcagtggcaccatctcaactcactgcaacctccacctcctggattcaagcaattctcctgcctcagcctcctgagtagctgggattacaggcgcacgcgccaccacatctggctaattttttttctgtatttttagtagagacattgtttcgccatgttggccaagctagtcttgaacccctgacctcaggtgatctgccagcatcggcctcccaaagtgctgggattacaggtgtgagtgccatgcccagctggatgattaagttctttatagcattttactcttgtataaattgctgaagtaaaaaatcttagtat

SEQ ID NO: 160219 - DNA, 1394 bp, Homo sapiens
  Payload ID: 11335
  Gene Symbol: NSMCE4A
  Gene Name: NSE4 homolog A, SMC5-SMC6 complex component
  Uniprot ID: Q9NXX6
  ENST ID: ENST00000369023
  CDS Start-End: 53-1210
agtttctggcgcgaacttccgccgttccgaagttgcacggtgaattggcgctatgtctggggacagcagcggccgcgggccagagggccggggccggggccgcgacccgcatcgggatcgcacccgctcccgctcccgctcgcggtcccctttgtcgcccaggtcccgccgcggctctgcgcgggagcgcagagaggccccagagcgcccgagcctggaggacacagagccgtcggattccggggacgagatgatggacccggccagcttggaggcggaggccgaccaaggcctgtgccgccagatccgccatcagtaccgggcgctcatcaactccgtccaacaaaaccgtgaggacatactgaatgccggtgacaaattaacagaggtccttgaagaggctaacactctgtttaatgaagtgtcccgagcaagagaagcagtcctggatgcccactttcttgttttggcttcagatttgggcaaagagaaagcaaagcagctgcgctcagacctgagctcctttgacatgttaagatatgttgaaactctactcacacatatgggtgtaaatccgctagaagctgaagaactcatccgtgatgaagatagtcctgattttgaattcatagtctatgactcctggaagataacaggcagaacagcagaaaacacctttaataaaacccatacattccactttctgttgggttcaatatacggagagtgccctgtgccaaagccacgagttgatcgtccaagaaaagttcctgtgatacaagaggagagggcaatgcctgcccagttaagaagaatggaagaatctcatcaagaagcaacagagaaagaagtagaaagaatcttgggattgttgcagacatattttcgagaagatcctgataccccaatgtccttctttgactttgtggttgatcctcattctttcccccgtacagtggaaaacatctttcatgtttccttcattatacgggatggttttgcaagaataagacttgaccaagaccgactgccagtaatagagcctgttagtattaatgaagaaaatgagggatttgaacataacacacaagttagaaatcaaggaattatagctttgagttaccgtgactgggaggagattgtgaagacctttgagatttcagagcctgtgattactccaagtcagaggcagcagaagccaagtgcttgatgctagctgaaggactcaaatggatagtgaagtccaaaacggaaagcggcatgtatcgtacatattgtatgattcaacatttttaaaggcagattgtttttagtaaaatgtagcttttgatagttaataaatttgtcatggttgtctttgattaaaggaaactcaccgccatattcacaaataa

SEQ ID NO: 160220 - DNA, 3568 bp, Homo sapiens
  Payload ID: 11336
  Gene Symbol: NSFL1C
  Gene Name: NSFL1 (p97) cofactor (p47)
  Uniprot ID: Q9UNZ2
  ENST ID: ENST00000216879
  CDS Start-End: 869-1981
aagttcctctttggagaggcaagagggcaaagaagctgaggacccagaagacaggattgtgcctaagaaagtggccttggagcagaggcccaaagaaagcggggagagcgccttgcccatcggtaagggaaaggtgctccaggcacagaagcagctaatgcaacggccctgaggcaaatgcaagataactggcaagttccaggaacagcaaggagggcaaggcgcctggagcagaggaagctagcggatcccttgatgagagggaggaactggcccatctctcatgggtcctgcaggcaggccatgagactgtcttttatgcggggcgagataacgaggcatggacgtgttgtgagcggaggcctagcctgttcaaggtctgaatttttacccctagaatgtaagaagcatgggagcagggactttgttttgctccctgccatatccacagccctagaaaaacgtcgggccattgatagctctcagtaaatgcttgacaagtaagtgaatgaacgaatgcacaattaatgaaatgagggctgcgtcaatgaataactgggaatctgactcctgcagggagccttcagcccacaggtgtatgtaagacccgccccgcctctcatccttcgggctcccacccccgccgttaggctgcggttcgcgccgcggtcgccagagggcgcggagcggcggggcttcccgcacggagggctttgcgtgaggcaccgcgtggggcggggctgcgggcgggctcccagctgctgggccctcatcggctgggcctcgtcgaccggcaagcggaacgcggcagcggggctgggcctgtgcggcggccgccggagcgctttggaaggcgcacggggcgaagatggcggcggagcgacaggaggcgctgagggagttcgtggcggtgacgggcgccgaggaggaccgggcccgcttctttctcgagtcggccggctgggacttgcagatcgcgctagcgagcttttatgaggacggaggggatgaagacattgtgaccatttcgcaggcaacccccagttcagtgtccagaggcacagcccccagtgataatagagtgacatccttcagagacctcattcatgaccaagatgaagatgaggaggaagaggaaggccagaggttttatgctgggggctcagagagaagtggacagcagattgttggccctcccaggaagaaaagtcccaacgagctggtggatgatctctttaaaggtgccaaagagcatggagctgtagctgtggagcgagtgaccaagagccctggagagaccagtaaaccgagaccatttgcaggaggtggctaccgccttggggcagcaccagaggaagagtctgcctatgtggcaggagaaaagaggcagcattccagccaagatgttcatgtagtattgaaactctggaagagtggattcagcctggataatggagaactcagaagctaccaagacccatccaatgcccagtttctggagtctatccgcagaggggaggtgccagcagagcttcggaggctagctcacggtggacaggtgaacttggatatggaggaccatcgggacgaggactttgtgaagcccaaaggagccttcaaagccttcactggcgagggtcagaaactgggcagcactgccccccaggtgttgagtaccagctctccagcccaacaggcagaaaatgaagccaaagccagctcttccatcttaatcgacgaatcagagcctaccacaaacatccaaattcggcttgcagacggcgggaggctggtgcagaaatttaaccacagccacaggatcagcgacatccgactcttcatcgtggatgcccggccagccatggctgccaccagctttatcctcatgactactttcccgaacaaagagctggctgatgagagccagaccctgaaggaagccaacctgctcaatgctgtcatcgtgcagcggttaacataaccgcccagccagctgcctggcctccctcctgtgtttcccatggccagtggccatgccccatggggatcgcccctcctgcccccttgtgcacacccagcagtccagtgcaacgtctcctccatagctctgggttcttagatcttggttggacgtttgttttctccttagttgcatttcctgggtttttgtgatgatcaatggactttaatgaaaaaaaaaataaaaacaaccaaaaaaattgaaggaatatcaccagcatgttgtacggaaactctcccactgaagcaggctttaattgctttaaaattatatttatcttggggcctgtgggaggaaacttccttccatcttctctgcataaaaacttgtggcacacaatgcttattcactagtgtgtcccacccgccagccccacagatgactggaggaaggaggggaaatgtgtagaaagaggcttcgccaccacttgttcccacgagaatatgtcacttgcccagataaaactgggcggcagccagagttccctgaagtgggaagtcagagctccatgcacacagtgtcttcagaaggtgaaaataaatatttccctgtgctccttttactcaacccctggggtatctaatcttgccaggtcttggccagttgagattctgttccacctgcctgcctggccctttcctccattaccatccagactgctcgcctcctggggattctcaggggctccattatggcttgatttactccacgtgcagaagtcttgagtggacctaggaggtaggtgggatattttttttcactaggatacagctcatgccaacccatcctaagtgagttcagaatcagggtatcttgccctataagataaacagtcaaaatgccaccgagctgttcactagtgatgtgtggcaaatcaaatcaactgttgaagaaggggtgagttttctgtgctacaagcacctgtcactgttggtacttgcaggaggcttctgctgggtatgttttggaagtgagtgtcactacttggctttgcttagcaggttctgcttcacacttgttctttgacctgctgacttgtgacttgcagaaacataggcagtagtcctagcctggtaaagaccctccaccacccctataagtttgattgctatgcaggtttgggagaggaggcctattgggctcttggatggaaccctttcccgtattaaacaaaccagagacagaatcagtgctgactcaggatctcctggtttggaatcgtaatgtgcctcaatcctctttccaagcaggcctcaccagtctctttctctttcctgcttcacccctgcaatgagccaagaaccaacactacatccacctagaactgcagaagggcttgtggtttcaaccaagacccatcctgagcaagggacttggcttggtgcttttgatcccaaagttcccacaccggcagtggcctgctggggcaatggcatctgtcacggtgttttctccagcaggtggagattatggaacctacatatgggtctggaaaaactgtacactgttgtcaccttgaccattaaaaaccagaatgaggacaatgga

SEQ ID NO: 160221 - DNA, 2611 bp, Homo sapiens
  Payload ID: 11336
  Gene Symbol: NSFL1C
  Gene Name: NSFL1 (p97) cofactor (p47)
  Uniprot ID: Q9UNZ2
  ENST ID: ENST00000353088
  CDS Start-End: 5-1024
gaagatggcggcggagcgacaggaggcgctgagggagttcgtggcggtgacgggcgccgaggaggaccgggcccgcttctttctcgagtcggccggctgggacttgcagatcgcgctagcgagcttttatgaggacggaggggatgaagacattgtgaccatttcgcaggcaacccccagttcagtgtccagaggcacagcccccagtgataatagagtgacatccttcagagacctcattcatgaccaagatgaagatgaggaggaagaggaaggccagaggttttatgctgggggctcagagagaagtggacagcagattgttggccctcccaggaagaaaagtcccaacgagctggtggatgatctctttaaaggtgccaaagagcatggagctgtagctgtggagcgagtgaccaagagccctggagagaccagtaaaccgagagttcatgtagtattgaaactctggaagagtggattcagcctggataatggagaactcagaagctaccaagacccatccaatgcccagtttctggagtctatccgcagaggggaggtgccagcagagcttcggaggctagctcacggtggacaggtgaacttggatatggaggaccatcgggacgaggactttgtgaagcccaaaggagccttcaaagccttcactggcgagggtcagaaactgggcagcactgccccccaggtgttgagtaccagctctccagcccaacaggcagaaaatgaagccaaagccagctcttccatcttaatcgacgaatcagagcctaccacaaacatccaaattcggcttgcagacggcgggaggctggtgcagaaatttaaccacagccacaggatcagcgacatccgactcttcatcgtggatgcccggccagccatggctgccaccagctttatcctcatgactactttcccgaacaaagagctggctgatgagagccagaccctgaaggaagccaacctgctcaatgctgtcatcgtgcagcggttaacataaccgcccagccagctgcctggcctccctcctgtgtttcccatggccagtggccatgccccatggggatcgcccctcctgcccccttgtgcacacccagcagtccagtgcaacgtctcctccatagctctgggttcttagatcttggttggacgtttgttttctccttagttgcatttcctgggtttttgtgatgatcaatggactttaatgaaaaaaaaaataaaaacaaccaaaaaaattgaaggaatatcaccagcatgttgtacggaaactctcccactgaagcaggctttaattgctttaaaattatatttatcttggggcctgtgggaggaaacttccttccatcttctctgcataaaaacttgtggcacacaatgcttattcactagtgtgtcccacccgccagccccacagatgactggaggaaggaggggaaatgtgtagaaagaggcttcgccaccacttgttcccacgagaatatgtcacttgcccagataaaactgggcggcagccagagttccctgaagtgggaagtcagagctccatgcacacagtgtcttcagaaggtgaaaataaatatttccctgtgctccttttactcaacccctggggtatctaatcttgccaggtcttggccagttgagattctgttccacctgcctgcctggccctttcctccattaccatccagactgctcgcctcctggggattctcaggggctccattatggcttgatttactccacgtgcagaagtcttgagtggacctaggaggtaggtgggatattttttttcactaggatacagctcatgccaacccatcctaagtgagttcagaatcagggtatcttgccctataagataaacagtcaaaatgccaccgagctgttcactagtgatgtgtggcaaatcaaatcaactgttgaagaaggggtgagttttctgtgctacaagcacctgtcactgttggtacttgcaggaggcttctgctgggtatgttttggaagtgagtgtcactacttggctttgcttagcaggttctgcttcacacttgttctttgacctgctgacttgtgacttgcagaaacataggcagtagtcctagcctggtaaagaccctccaccacccctataagtttgattgctatgcaggtttgggagaggaggcctattgggctcttggatggaaccctttcccgtattaaacaaaccagagacagaatcagtgctgactcaggatctcctggtttggaatcgtaatgtgcctcaatcctctttccaagcaggcctcaccagtctctttctctttcctgcttcacccctgcaatgagccaagaaccaacactacatccacctagaactgcagaagggcttgtggtttcaaccaagacccatcctgagcaagggacttggcttggtgcttttgatcccaaagttcccacaccggcagtggcctgctggggcaatggcatctgtcacggtgttttctccagcaggtggagattatggaacctacatatgggtctggaaaaactgtacactgttgtcaccttgaccattaaaaaccagaatgaggacaatgga

SEQ ID NO: 160222 - DNA, 2800 bp, Homo sapiens
  Payload ID: 11336
  Gene Symbol: NSFL1C
  Gene Name: NSFL1 (p97) cofactor (p47)
  Uniprot ID: Q9UNZ2
  ENST ID: ENST00000476071
  CDS Start-End: 95-1213
ggctgggcctcgtcgaccggcaagcggaacgcggcagcggggctgggcctgtgcggcggccgccggagcgctttggaaggcgcacggggcgaagatggcggcggagcgacaggaggcgctgagggagttcgtggcggtgacgggcgccgaggaggaccgggcccgcttctttctcgagtcggccggctgggacttgcagatcgcgctagcgagcttttatgaggacggaggggatgaagacattgtgaccatttcgcaggcaacccccagttcagtgtccagaggcacagcccccagtgataatagagtgacatccttcagagacctcattcatgaccaagatgaagatgaggaggaagaggaaggccagaggagcaggttttatgctgggggctcagagagaagtggacagcagattgttggccctcccaggaagaaaagtcccaacgagctggtggatgatctctttaaaggtgccaaagagcatggagctgtagctgtggagcgagtgaccaagagccctggagagaccagtaaaccgagaccatttgcaggaggtggctaccgccttggggcagcaccagaggaagagtctgcctatgtggcaggagaaaagaggcagcattccagccaagatgttcatgtagtattgaaactctggaagagtggattcagcctggataatggagaactcagaagctaccaagacccatccaatgcccagtttctggagtctatccgcagaggggaggtgccagcagagcttcggaggctagctcacggtggacaggtgaacttggatatggaggaccatcgggacgaggactttgtgaagcccaaaggagccttcaaagccttcactggcgagggtcagaaactgggcagcactgccccccaggtgttgagtaccagctctccagcccaacaggcagaaaatgaagccaaagccagctcttccatcttaatcgacgaatcagagcctaccacaaacatccaaattcggcttgcagacggcgggaggctggtgcagaaatttaaccacagccacaggatcagcgacatccgactcttcatcgtggatgcccggccagccatggctgccaccagctttatcctcatgactactttcccgaacaaagagctggctgatgagagccagaccctgaaggaagccaacctgctcaatgctgtcatcgtgcagcggttaacataaccgcccagccagctgcctggcctccctcctgtgtttcccatggccagtggccatgccccatggggatcgcccctcctgcccccttgtgcacacccagcagtccagtgcaacgtctcctccatagctctgggttcttagatcttggttggacgtttgttttctccttagttgcatttcctgggtttttgtgatgatcaatggactttaatgaaaaaaaaaataaaaacaaccaaaaaaattgaaggaatatcaccagcatgttgtacggaaactctcccactgaagcaggctttaattgctttaaaattatatttatcttggggcctgtgggaggaaacttccttccatcttctctgcataaaaacttgtggcacacaatgcttattcactagtgtgtcccacccgccagccccacagatgactggaggaaggaggggaaatgtgtagaaagaggcttcgccaccacttgttcccacgagaatatgtcacttgcccagataaaactgggcggcagccagagttccctgaagtgggaagtcagagctccatgcacacagtgtcttcagaaggtgaaaataaatatttccctgtgctccttttactcaacccctggggtatctaatcttgccaggtcttggccagttgagattctgttccacctgcctgcctggccctttcctccattaccatccagactgctcgcctcctggggattctcaggggctccattatggcttgatttactccacgtgcagaagtcttgagtggacctaggaggtaggtgggatattttttttcactaggatacagctcatgccaacccatcctaagtgagttcagaatcagggtatcttgccctataagataaacagtcaaaatgccaccgagctgttcactagtgatgtgtggcaaatcaaatcaactgttgaagaaggggtgagttttctgtgctacaagcacctgtcactgttggtacttgcaggaggcttctgctgggtatgttttggaagtgagtgtcactacttggctttgcttagcaggttctgcttcacacttgttctttgacctgctgacttgtgacttgcagaaacataggcagtagtcctagcctggtaaagaccctccaccacccctataagtttgattgctatgcaggtttgggagaggaggcctattgggctcttggatggaaccctttcccgtattaaacaaaccagagacagaatcagtgctgactcaggatctcctggtttggaatcgtaatgtgcctcaatcctctttccaagcaggcctcaccagtctctttctctttcctgcttcacccctgcaatgagccaagaaccaacactacatccacctagaactgcagaagggcttgtggtttcaaccaagacccatcctgagcaagggacttggcttggtgcttttgatcccaaagttcccacaccggcagtggcctgctggggcaatggcatctgtcacggtgttttctccagcaggtggagattatggaacctacatatgggtctggaaaaactgtacactgttgtcaccttgaccattaaaaaccagaatgaggacaatgga

SEQ ID NO: 160223 - DNA, 1446 bp, Homo sapiens
  Payload ID: 11336
  Gene Symbol: NSFL1C
  Gene Name: NSFL1 (p97) cofactor (p47)
  ENST ID: ENST00000381653
  CDS Start-End: 1-825
atggcggcggagcgacaggaggcgctgagggagttcgtggcggtgacgggcgccgaggaggaccgggcccgcttctttctcgagtcggccggctgggacttgcagatcgcgctagcgagcttttatgaggacggaggggatgaagacattgtgaccatttcgcaggcaacccccagttcagtgtccagaggcacagcccccagtgataatagagtgacatccttcagagacctcattcatgaccaagatgaagatgaggaggaagaggaaggccagaggttttatgctgggggctcagagagaagtggacagcagattgttggccctcccaggaagaaaagtcccaacgagctggtggatgatctctttaaaggtgccaaagagcatggagctgtagctgtggagcgagtgaccaagagccctggagagaccagtaaaccgagaccatttgcaggaggtggctaccgccttggggcagcaccagaggaagagtctgcctatgtggcaggagaaaagaggcagcattccagccaagatgttcatgtagtattgaaactctggaagagtggattcagcctggataatggagaactcagaagctaccaagacccatccaatgcccagtttctggagtctatccgcagaggggaggtgccagcagagcttcggaggctagctcacggtggacaggtgaacttggatatggaggaccatcgggacgaggactttgtgaagcccaaaggagccttcaaagccttcactggcgagggtcagaaactgggcaggctgtcctgctttcctcccttcaagcccttgttcagttgaagacaccaaggaggaaaaaggccgagtaacttgcccacattactcaggagcgagggagctagcaataacgtatgaaatatatgactcagggtttgaagtgaattctgctggacctgtaagttccataagggcacgattttccctgtctgggtcaatagatcagcagcaccaaacaatgccaggcgcattgcaaatgctcagtaacagtccaagaagggattcccttcttgctaggggccttgtttctgcttgtgttctgatgccatcctctctcctcagcactgccccccaggtgttgagtaccagctctccagcccaacaggcagaaaatgaagccaaagccagctcttccatcttaatcgacgaatcagagcctaccacaaacatccaaattcggcttgcagacggcgggaggctggtgcagaaatttaaccacagccacaggatcagcgacatccgactcttcatcgtggatgcccggccagccatggctgccaccagctttatcctcatgactactttcccgaacaaagagctggctgatgagagccagaccctgaaggaagccaacctgctcaatgctgtcatcgtgcagcggttaacataaccgcccagccagct

SEQ ID NO: 160224 - DNA, 863 bp, Homo sapiens
  Payload ID: 11336
  Gene Symbol: NSFL1C
  Gene Name: NSFL1 (p97) cofactor (p47)
  ENST ID: ENST00000555568
  CDS Start-End: 12-119
acggggcgaagatggcggcggagcgacaggaggcgctgagggagttcgtggcggtgacgggcgccgaggaggaccgggcccgcttctttctcgagtcggccggctgggacttgcagtgataatagagtgacatccttcagagacctcattcatgaccaagatgaagatgaggaggaagaggaaggccagaggttttatgctgggggctcagagagaagtggacagcagattgttggccctcccaggaagaaaagtcccaacgagctggtggatgatctctttaaaggtgccaaagagcatggagctgtagctgtggagcgagtgaccaagagccctggagagaccagtaaaccgagaccatttgcaggaggtggctaccgccttggggcagcaccagaggaagagtctgcctatgtggcaggagaaaagaggcagcattccagccaagatgttcatgtagtattgaaactctggaagagtggattcagcctggataatggagaactcagaagctaccaagacccatccaatgcccagtttctggagtctatccgcagaggggaggtgccagcagagcttcggaggctagctcacggtggacaggtgaacttggatatggaggaccatcgggacgaggactttgtgaagcccaaaggagccttcaaagccttcactggcgagggtcagaaactgggcagcactgccccccaggtgttgagtaccagctctccagcccaacaggcagaaaatgaagccaaagccagctcttccatcttaatcgacgaatcagagcctaccacaaacatccaaattcggcttgcagacggcgggaggctggtgcagaaatttaaccacagccacag

SEQ ID NO: 160225 - DNA, 2588 bp, Homo sapiens
  Payload ID: 11336
  Gene Symbol: NSFL1C
  Gene Name: NSFL1 (p97) cofactor (p47)
  ENST ID: ENST00000555944
  CDS Start-End: 82-189
cgaccggcaagcggaacgcggcagcggggctgggcctgtgcggcggccgccggagcgctttggaaggcgcacggggcgaagatggcggcggagcgacaggaggcgctgagggagttcgtggcggtgacgggcgccgaggaggaccgggcccgcttctttctcgagtcggccggctgggacttgcagtgataatagagtgacatccttcagagacctcattcatgaccaagatgaagatgaggaggaagaggaaggccagaggtgccaaagagcatggagctgtagctgtggagcgagtgaccaagagccctggagagaccagtaaaccgagaccatttgcaggaggtggctaccgccttggggcagcaccagaggaagagtctgcctatgtggcaggagaaaagaggcagcattccagccaagatgttcatgtagtattgaaactctggaagagtggattcagcctggataatggagaactcagaagctaccaagacccatccaatgcccagtttctggagtctatccgcagaggggaggtgccagcagagcttcggaggctagctcacggtggacaggtgaacttggatatggaggaccatcgggacgaggactttgtgaagcccaaaggagccttcaaagccttcactggcgagggtcagaaactgggcagcactgccccccaggtgttgagtaccagctctccagcccaacaggcagaaaatgaagccaaagccagctcttccatcttaatcgacgaatcagagcctaccacaaacatccaaattcggcttgcagacggcgggaggctggtgcagaaatttaaccacagccacaggatcagcgacatccgactcttcatcgtggatgcccggccagccatggctgccaccagctttatcctcatgactactttcccgaacaaagagctggctgatgagagccagaccctgaaggaagccaacctgctcaatgctgtcatcgtgcagcggttaacataaccgcccagccagctgcctggcctccctcctgtgtttcccatggccagtggccatgccccatggggatcgcccctcctgcccccttgtgcacacccagcagtccagtgcaacgtctcctccatagctctgggttcttagatcttggttggacgtttgttttctccttagttgcatttcctgggtttttgtgatgatcaatggactttaatgaaaaaaaaaataaaaacaaccaaaaaaattgaaggaatatcaccagcatgttgtacggaaactctcccactgaagcaggctttaattgctttaaaattatatttatcttggggcctgtgggaggaaacttccttccatcttctctgcataaaaacttgtggcacacaatgcttattcactagtgtgtcccacccgccagccccacagatgactggaggaaggaggggaaatgtgtagaaagaggcttcgccaccacttgttcccacgagaatatgtcacttgcccagataaaactgggcggcagccagagttccctgaagtgggaagtcagagctccatgcacacagtgtcttcagaaggtgaaaataaatatttccctgtgctccttttactcaacccctggggtatctaatcttgccaggtcttggccagttgagattctgttccacctgcctgcctggccctttcctccattaccatccagactgctcgcctcctggggattctcaggggctccattatggcttgatttactccacgtgcagaagtcttgagtggacctaggaggtaggtgggatattttttttcactaggatacagctcatgccaacccatcctaagtgagttcagaatcagggtatcttgccctataagataaacagtcaaaatgccaccgagctgttcactagtgatgtgtggcaaatcaaatcaactgttgaagaaggggtgagttttctgtgctacaagcacctgtcactgttggtacttgcaggaggcttctgctgggtatgttttggaagtgagtgtcactacttggctttgcttagcaggttctgcttcacacttgttctttgacctgctgacttgtgacttgcagaaacataggcagtagtcctagcctggtaaagaccctccaccacccctataagtttgattgctatgcaggtttgggagaggaggcctattgggctcttggatggaaccctttcccgtattaaacaaaccagagacagaatcagtgctgactcaggatctcctggtttggaatcgtaatgtgcctcaatcctctttccaagcaggcctcaccagtctctttctctttcctgcttcacccctgcaatgagccaagaaccaacactacatccacctagaactgcagaagggcttgtggtttcaaccaagacccatcctgagcaagggacttggcttggtgcttttgatcccaaagttcccacaccggcagtggcctgctggggcaatggcatctgtcacggtgttttctccagcaggtggagattatggaacctacatatgggtctggaaaaactgtacactgttgtcaccttgaccattaaaaaccagaatgaggacaatgga

SEQ ID NO: 160226 - DNA, 845 bp, Homo sapiens
  Payload ID: 11336
  Gene Symbol: NSFL1C
  Gene Name: NSFL1 (p97) cofactor (p47)
  ENST ID: ENST00000470376
  CDS Start-End: 6-221
cgaagatggcggcggagcgacaggaggcgctgagggagttcgtggcggtgacgggcgccgaggaggaccgggcccgcttctttctcgagtcggccggctgggacttgcagatcgcgctagcgagcttttatgaggacggaggggatgaagacattgtgaccatttcgcaggcaacccccagttcagtgtccagaggcacagcccccagagaaaagaggtaggaggaaagtgatcttgtaactgtttgcacgtgctaacctatgagatgttggtgatggcacatctgggtattactgcttgggacatgttgttaggtgataatagagtgacatccttcagagacctcattcatgaccaagatgaagatgaggaggaagaggaaggccagaggttttatgctgggggctcagagagaagtggacagcagattgttggccctcccaggaagaaaagtcccaacgagctggtggatgatctctttaaaggtgccaaagagcatggagctgtagctgtggagcgagtgaccaagagccctggagagaccagtaaaccgagaccatttgcaggaggtggctaccgccttggggcagcaccagaggaagagtctgcctatgtggcaggagaaaagaggcagcattccagccaagatgttcatgtagtattgaaactctggaagagtggattcagcctggataatggagaactcagaagctaccaagacccatccaatgcccagtttctggagtctatccgcagaggggaggtgccagcagagcttcggaggctagctcacggtggacaggtgaacttggatatggaggaccatcgggacgaggactttgtga

SEQ ID NO: 160227 - DNA, 694 bp, Homo sapiens
  Payload ID: 11336
  Gene Symbol: NSFL1C
  Gene Name: NSFL1 (p97) cofactor (p47)
  ENST ID: ENST00000489203
  CDS Start-End: 1-318
atggcggcggagcgacaggaggcgctgagggagttcgtggcggtgacgggcgccgaggaggaccgggcccgcttctttctcgagtcggccggctgggacttgcagatcgcgctagcgagcttttatgaggacggaggggatgaagacattgtgaccatttcgcaggcaacccccagttcagtgtccagaggcacagcccccagtgataatagagtgacatccttcagagacctcattcatgaccaagatgaagatgaggaggaagaggaaggccagaggggccacagtgtgtgtcacatgaatggcaaggtgaggtgaggcttgggggagctcctggtgctgtgtcacaccaccttacctgtgtgcattactctgtgcttgttcttttgcatacatctgctgatttgaacctcacggctctgacttaaggagcaggttttatgctgggggctcagagagaagtggacagcagattgttggccctcccaggaagaaaagtcccaacgagctggtggatgatctctttaaaggtgccaaagagcatggagctgtagctgtggagcgagtgaccaagagccctggagagaccagtaaaccgagaccatttgcaggaggtggctaccgccttggggcagcaccagaggaagagtctgcctatgtggcaggagaaaagaggcagcattccagccaagat

SEQ ID NO: 160228 - DNA, 722 bp, Homo sapiens
  Payload ID: 11337
  Gene Symbol: NSL1
  Gene Name: NSL1, MIS12 kinetochore complex component
  ENST ID: ENST00000366976
  CDS Start-End: 20-538
cccacagttccgacgaaaaatggcggggtctcctgagttggtggtccttgaccctccatgggacaaggagctcgcggctggcacagagagccaggccttggtctccgccactccccgagaagactttcgggtgcgctgcacctcgaagcgggctgtgaccgaaatgctacaactgtgcggccgcttcgtgcaaaagctcggggacgctctgccggaggagattcgggagcccgctctgcgagatgcgcagtggacttttgaatcagctgtgcaagagaatatcagcattaatgggcaagcatggcaggaagcttcagataattgttttatggattctgacatcaaagtacttgaagatcagtttgatgaaatcatagtagatatagccacaaaacgtaagcagtatcccagaaagatcctggaatgtgtcatcaaaaccataaaagcaaaacaagaaattctgaagcagtaccaccctgttgtacatccactggacctaaaatatgaccctgatccagtccttgcctgcattaattgaacaaggagagggattttcccaagttctcaggatgcagcctgttatccacctccagaggattcaccaagaagtcttttccagttgtcataggaaaccagatgctaaacctgagaactttataacacagatagaaaccacaccaacagagactgcttccaggaaaacctctgacatggtactgaaa

SEQ ID NO: 160229 - DNA, 2317 bp, Homo sapiens
  Payload ID: 11337
  Gene Symbol: NSL1
  Gene Name: NSL1, MIS12 kinetochore complex component
  Uniprot ID: Q96IY1
  ENST ID: ENST00000366977
  CDS Start-End: 20-865
cccacagttccgacgaaaaatggcggggtctcctgagttggtggtccttgaccctccatgggacaaggagctcgcggctggcacagagagccaggccttggtctccgccactccccgagaagactttcgggtgcgctgcacctcgaagcgggctgtgaccgaaatgctacaactgtgcggccgcttcgtgcaaaagctcggggacgctctgccggaggagattcgggagcccgctctgcgagatgcgcagtggacttttgaatcagctgtgcaagagaatatcagcattaatgggcaagcatggcaggaagcttcagataattgttttatggattctgacatcaaagtacttgaagatcagtttgatgaaatcatagtagatatagccacaaaacgtaagcagtatcccagaaagatcctggaatgtgtcatcaaaaccataaaagcaaaacaagaaattctgaagcagtaccaccctgttgtacatccactggacctaaaatatgaccctgatccagcccctcatatggaaaatttgaaatgcagaggggaaacagtagcaaaggagatcagtgaagccatgaagtccttgcctgcattaattgaacaaggagagggattttcccaagttctcaggatgcagcctgttatccacctccagaggattcaccaagaagtcttttccagttgtcataggaaaccagatgctaaacctgagaactttataacacagatagaaaccacaccaacagagactgcttccaggaaaacctctgacatggtactgaaaagaaagcaaactaaagactgcccccagagaaaatggtatccattgcggccaaagaaaattaatcttgatacatgagctctttctgtttattttgggagttgaaaataggcaccatcaacatttagattacagcctaattaatacctagataagacttcatttgaaataagaaataactcttttactagtgattcatttatacagatatagtatctctgtgcggggatatgatataatattgtatttccttactgttttatctattgtaaataaaaagcattttaaaaagtattgacacaaagcccatcagtgggcattaaaaatattaaaagtgcagacttttactgtccttaagtgccatcaactctcagctcccttgtagcttttgtgggatttaacaagtaacaaattctgttgtgtttccctggtatacatctttctaggaaaaaaaaaaaaaagagagagagctgtataatgatttttcgtttacatgctgaaaagtaattatcagttctgcacagcagcagatgcagggtttttttttaaagatgtagtttgatttatcaaattaatgtgctgatgataatactggctttgactttgttactccatgttcagctaatttaggtttgtgagattaactttaggattttttgttgtgtaagacaatgataactattatttgtgcaacattactctttgaaataaaaattggcatgtagccaatgtttcctgcccacactcacttttttctatagaccattaacataatttgacttggaactaatggtttctttttagggtttcttatttatttctttacaaatcattccagttcaaaatatatatcagattaatacactggcaaagtgtcattgtgttattgaactatttcacatttgaagatgtttatatatcaggtatataatcactgggagaagtctgagaaaacgatattggctttacttctaacatttaactatagtttcttatagctcttattgtgtgtcttacattatacagtgtaggcagggccatcaaacttaccaactgtttccccttttgatgactctgataccttcattcatttttcaaaggaatttactgatcatgaggttggaaaatctgtatttctcttgcttattatgtattaataatcataaatgtctagattcaccagaagtcaccagaaggtctgtctcagtgaagaaaacttataaagccactttgttgcattttgtgtttcagtgttacagtttgagatctgtatatttgtacacagctatgtgtttttcattgaaataatgtacaaagactgatcttgatgctgtgtatttttatgagttgtcttaggcattcctgagctcagcttcagttggatggtgggtcagcaccctgcgtttctgaacatactagacttcagtttaaaactgttttgaggctgtataatatgttgctgtttttacagtgctaatgtttttatagtattaaaattctgtatgatttgtttcacttcagaggtcccca

SEQ ID NO: 160230 - DNA, 1344 bp, Homo sapiens
  Payload ID: 11337
  Gene Symbol: NSL1
  Gene Name: NSL1, MIS12 kinetochore complex component
  ENST ID: ENST00000366978
  CDS Start-End: 128-355
ggacgctctgccggaggagattcgggagcccgctctgcgagatgcgcagtggacttttgaatcagctgtgcaagagaatatcagcattaatgggcaagcatggcaggaagcttcagataattgttttatggattctgacatcaaagtacttgaagatcagtttgatgaaatcatagtagatatagccacaaaacgtaagcagtatcccagaaagatcctggaatgtgtcatcaaaaccataaaagcaaaacaagaaattctgaagcagtaccaccctgttgtacatccactggacctaaaatatgaccctgatccaggagccaagcctggtggactagctctaggggcagtttaggagagaaggggatcggggaaccttcatcccttctgcctctggtgaactggcaagatgaagaggatgaagctgggtgacccagagcccgccctccctctctcggcagtcatctccaaggccggagtagactggactggagggcctctgagaggacacagccaggaagcacactctccctgtgctcttcacccaccatgaagagacaggacgggaaagtccgtgctgtgctggtgtccatcagagggagggacaccatccagcccctgggaccgggctcggctctgttgttgcacagaagtcatttggagatccccacgtgccacatggaggattgtgggaggaccccaccgaggtggctggcagcctctcatggacaccatggagagtgacccaatcactctgcatttgaggactgcagagtggctcagcggtctggacattgaagaggagccaacctcaggggtaacacagtgccgctgggagctgagatgagccaggtggtcggtgggggacacaagcctagaacaaattcaataaaccagccacagacgttatcatcagatgtgcccagagacaaggtggacaggggcatttgctgtggagaccagagggccagagagagtacagggacctggatagatggctccagcacctcttcttctccctacacccatatgccatcttgataaacagcagggaaatctgaaaaataccaagtcttcccatagggacagtgttacctcccaaaaactgtttgaataattggcttgaactggattttctgaactgaactaatgctattgttttgtgggtttttttcttcctactgagtagagtagttgtttatgggggacatctgatcctttcattttcttccagagagctaaccacctgttctgacaccatttattgaatagtacctcttttcccccactgatgtgagaggctgcatttttcatctaataaaatcgaatatatatttagatcta

SEQ ID NO: 160231 - DNA, 790 bp, Homo sapiens
  Payload ID: 11337
  Gene Symbol: NSL1
  Gene Name: NSL1, MIS12 kinetochore complex component
  Uniprot ID: Q96IY1
  ENST ID: ENST00000626725
  CDS Start-End: 14-655
gttccgacgaaaaatggcggggtctcctgagttggtggtccttgaccctccatgggacaaggagctcgcggctggcacagagagccaggccttggtctccgccactccccgagaagactttcgggtgcgctgcacctcgaagcgggctgtgaccgaaatgctacaactgtgcggccgcttcgtgcaaaagctcggggacgctctgccggaggagattcgggagcccgctctgcgagatgcgcagtggacttttgaatcagctgtgcaagagaatatcagcattaatgggcaagcatggcaggaagcttcagataattgttttatggattctgacatcaaagtacttgaagatcagtttgatgaaatcatagtagatatagccacaaaacgtaagcagtatcccagaaagatcctggaatgtgtcatcaaaaccataaaagcaaaacaagaaattctgaagcagtaccaccctgttgtacatccactggacctaaaatatgaccctgatccagttctcaacgggaatgctttcaacttttccccattcaacatgatgttggctgtggatttgtcatatatggtttttattacttcgagcccctcatatggaaaatttgaaatgcagaggggaaacagtagcaaaggagatcagtgaagccatgaagtccttgcctgcattaattgaacaaggagagggattttcccaagttctcaggatgcagcctgttatccacctccagaggattcaccaagaagtcttttccagttgtcataggaaaccagatgctaa

SEQ ID NO: 160232 - DNA, 2784 bp, Homo sapiens
  Payload ID: 11338
  Gene Symbol: SGSH
  Gene Name: N-sulfoglucosamine sulfohydrolase
  Uniprot ID: P51688
  ENST ID: ENST00000326317
  CDS Start-End: 88-1596
gaccggggtcggggcagggggcggggccgagcgggagaccagagagccggagccggatcccgatcccgagtccgagccgccgccgccatgagctgccccgtgcccgcctgctgcgcgctgctgctagtcctggggctctgccgggcgcgtccccggaacgcactgctgctcctcgcggatgacggaggctttgagagtggcgcgtacaacaacagcgccatcgccaccccgcacctggacgccttggcccgccgcagcctcctctttcgcaatgccttcacctcggtcagcagctgctctcccagccgcgccagcctcctcactggcctgccccagcatcagaatgggatgtacgggctgcaccaggacgtgcaccacttcaactccttcgacaaggtgcggagcctgccgctgctgctcagccaagctggtgtgcgcacaggcatcatcgggaagaagcacgtggggccggagaccgtgtacccgtttgactttgcgtacacggaggagaatggctccgtcctccaggtggggcggaacatcactagaattaagctgctcgtccggaaattcctgcagactcaggatgaccggcctttcttcctctacgtcgccttccacgacccccaccgctgtgggcactcccagccccagtacggaaccttctgtgagaagtttggcaacggagagagcggcatgggtcgtatcccagactggaccccccaggcctacgacccactggacgtgctggtgccttacttcgtccccaacaccccggcagcccgagccgacctggccgctcagtacaccaccgtcggccgcatggaccaaggagttggactggtgctccaggagctgcgtgacgccggtgtcctgaacgacacactggtgatcttcacgtccgacaacgggatccccttccccagcggcaggaccaacctgtactggccgggcactgctgaacccttactggtgtcatccccggagcacccaaaacgctggggccaagtcagcgaggcctacgtgagcctcctagacctcacgcccaccatcttggattggttctcgatcccgtaccccagctacgccatctttggctcgaagaccatccacctcactggccggtccctcctgccggcgctggaggccgagcccctctgggccaccgtctttggcagccagagccaccacgaggtcaccatgtcctaccccatgcgctccgtgcagcaccggcacttccgcctcgtgcacaacctcaacttcaagatgccctttcccatcgaccaggacttctacgtctcacccaccttccaggacctcctgaaccgcaccacagctggtcagcccacgggctggtacaaggacctccgtcattactactaccgggcgcgctgggagctctacgaccggagccgggacccccacgagacccagaacctggccaccgacccgcgctttgctcagcttctggagatgcttcgggaccagctggccaagtggcagtgggagacccacgacccctgggtgtgcgcccccgacggcgtcctggaggagaagctctctccccagtgccagcccctccacaatgagctgtgaccatcccaggaggcctgtgcacacatcccaggcatgtcccagacacatcccacacgtgtccgtgtggccggccagcctggggagtagtggcaacagcccttccgtccacactcccatccaaggagggttcttccttcctgtggggtcactcttgccattgcctggagggggaccagagcatgtgaccagagcatgtgcccagcccctccaccaccaggggcactgccgtcatggcaggggacacagttgtccttgtgtctgaaccatgtcccagcacgggaattctagacatacgtggtctgcggacagggcagcgcccccagcccatgacaagggagtcttgttttctggcttggtttggggacctgcaaatgggaggcctgaggccctcttcaggctttggcagccacagatacttctgaacccttcacagagagcaggcaggggcttcggtgccgcgtgggcagtacgcaggtcccaccgacactcacctgggagcacggcgcctggctcttaccagcgtctggcctagaggaagcctttgagcgacctttgggcaggtttctgcttcttctgttttgccccatggtcaagtccctgttccccaggcaggtttcagctgattggcagcaggctccctgagtgatgagcttgaacctgtggtgtttctgggcagaagcttatcttttttgagagtgtccgaagatgaaggcatggcgatgcccgtcctctggcttgggttaattcttcggtgacactggcattgctgggtggtgatgcccgtcctctggcttgggttaattcttcggtgacactggcgttgctgggtggcaatgcccatcctctgccttgggttaattcttcggtgacactggcgttgctgggtggcgatgcccgtcctctggcttgggttaattcttggatgacgtcggcgttgctgggagaatgtgccgttcctgccctgcctccacccacctcgggagcagaagcccggcctggacacccctcggcctggacacccctcgaaggagagggcgcttccttgagtaggtgggctccccttgcccttccctccctatcactccatactggggtgggctggaggaggccacaggccagctattgtaaaagctttttattttagtaaaatatacagaagttctttttctgaactcatttatgatgata

SEQ ID NO: 160233 - DNA, 1546 bp, Homo sapiens
  Payload ID: 11338
  Gene Symbol: SGSH
  Gene Name: N-sulfoglucosamine sulfohydrolase
  ENST ID: ENST00000570923
  CDS Start-End: 26-850
atcccgagtccgagccgccgccgccatgagctgccccgtgcccgcctgctgcgcgctgctgctagtcctggggctctgccgggcgcgtccccggaacgcactgctgctcctcgccgaccgtgcactctctgtctcccacctcacgcagcggatgacggaggctttgagagtggcgcgtacaacaacagcgccatcgccaccccgcacctggacgccttggcccgccgcagcctcctctttcgcaatgccttcacctcggtcagcagctgctctcccagccgcgccagcctcctcactggcctgccccagcatcagaatgggatgtacgggctgcaccaggacgtgcaccacttcaactccttcgacaaggtgcggagcctgccgctgctgctcagccaagctggtgtgcgcacaggcatcatcgggaagaagcacgtggggccggagaccgtgtacccgtttgactttgcgtacacggaggagaatggctccgtcctccaggtggggcggaacatcactagaattaagctgctcgtccggaaattcctgcagactcaggatgaccggcctttcttcctctacgtcgccttccacgacccccaccgctgtgggcactcccagccccagtacggaaccttctgtgagaagtttggcaacggagagagcggcatgggtcgtatcccagactggaccccccaggcctacgacccactggacgtgctggtgccttacttcgtccccaacaccccggcagcccgagccgacctggccgctcagtacaccaccgtcggccgcatggaccaaggagttggactggtgctccaggagctgcgtgacgccggtgtcctgaacgacacactggtgatcttcacgtccgacaacgggatccccttccccagcggcaggaccaacctgtactggccgggcactgctgaacccttactggtgtcatccccggagcacccaaaacgctggggccaagtcagcgaggcctacgtgagcctcctaggtatgcctttgtctgtctccgtcaggaaaggtgtgggagtggatctgggacggggccatgacctgtcagatgctgctccacacccattacctaatgtggctctcatatcatctgggtgaggaagggactgtcactcccactctacagaggaaaagaatgaggctcagagaggtgaagtaagctgctcaggattgcacagctggtaagcactaagctaggattctcgcctggatcctgctgctttcaaaaccattgccttttccccgcctacctccgatgagcttcagaatcacctgggatgcttgttaatatccaaattgcaaatcccagggtgtccgattcagtagatcttggcgggctcaagaatttgcatgtctgacaagttcccaggtgatgccgatactgtgggcctggggacccctctctgagcatccgtgcaccccatcctgccttcctgggggacccaaagcacctcatgaccctgctcattcctaaaaagacctaggacatctagtcccatgttatggatgtgcagac

SEQ ID NO: 160234 - DNA, 2612 bp, Homo sapiens
  Payload ID: 11338
  Gene Symbol: SGSH
  Gene Name: N-sulfoglucosamine sulfohydrolase
  ENST ID: ENST00000573150
  CDS Start-End: 48-731
agagagccggagccggatcccgatcccgagtccgagccgccgccgccatgagctgccccgtgcccgcctgctgcgcgctgctgctagtcctggggctctgccgggcgcgtccccggaacgcactgctgctcctcgcggatgacggaggctttgagagtggcgcgtacaacaacagcgccatcgccaccccgcacctggacgccttggcccgccgcagcctcctctttcgcaatgccttcacctcggtcagcagctgctctcccagccgcgccagcctcctcactggcctgccccaggcatcatcgggaagaagcacgtggggccggagaccgtgtacccgtttgactttgcgtacacggaggagaatggctccgtcctccaggtggggcggaacatcactagaattaagctgctcgtccggaaattcctgcagactcaggatgaccggcctttcttcctctacgtcgccttccacgacccccaccgctgtgggcactcccagccccagtacggaaccttctgtgagaagtttggcaacggagagagcggcatgggtcgtatcccagactggaccccccaggcctacgacccactggacgtgctggtgccttacttcgtccccaacaccccggcagcccgagccgacctggccgctcagtacaccaccgtcggccgcatggaccaaggagttggactggtgctccaggagctgcgtgacgccggtgtcctgaacgacacactggtgatcttcacgtccgacaacgggatccccttccccagcggcaggaccaacctgtactggccgggcactgctgaacccttactggtgtcatccccggagcacccaaaacgctggggccaagtcagcgaggcctacgtgagcctcctagacctcacgcccaccatcttggattggttctcgatcccgtaccccagctacgccatctttggctcgaagaccatccacctcactggccggtccctcctgccggcgctggaggccgagcccctctgggccaccgtctttggcagccagagccaccacgaggtcaccatgtcctaccccatgcgctccgtgcagcaccggcacttccgcctcgtgcacaacctcaacttcaagatgccctttcccatcgaccaggacttctacgtctcacccaccttccaggacctcctgaaccgcaccacagctggtcagcccacgggctggtacaaggacctccgtcattactactaccgggcgcgctgggagctctacgaccggagccgggacccccacgagacccagaacctggccaccgacccgcgctttgctcagcttctggagatgcttcgggaccagctggccaagtggcagtgggagacccacgacccctgggtgtgcgcccccgacggcgtcctggaggagaagctctctccccagtgccagcccctccacaatgagctgtgaccatcccaggaggcctgtgcacacatcccaggcatgtcccagacacatcccacacgtgtccgtgtggccggccagcctggggagtagtggcaacagcccttccgtccacactcccatccaaggagggttcttccttcctgtggggtcactcttgccattgcctggagggggaccagagcatgtgaccagagcatgtgcccagcccctccaccaccaggggcactgccgtcatggcaggggacacagttgtccttgtgtctgaaccatgtcccagcacgggaattctagacatacgtggtctgcggacagggcagcgcccccagcccatgacaagggagtcttgttttctggcttggtttggggacctgcaaatgggaggcctgaggccctcttcaggctttggcagccacagatacttctgaacccttcacagagagcaggcaggggcttcggtgccgcgtgggcagtacgcaggtcccaccgacactcacctgggagcacggcgcctggctcttaccagcgtctggcctagaggaagcctttgagcgacctttgggcaggtttctgcttcttctgttttgccccatggtcaagtccctgttccccaggcaggtttcagctgattggcagcaggctccctgagtgatgagcttgaacctgtggtgtttctgggcagaagcttatcttttttgagagtgtccgaagatgaaggcatggcgatgcccgtcctctggcttgggttaattcttcggtgacactggcattgctgggtggtgatgcccgtcctctggcttgggttaattcttcggtgacactggcgttgctgggtggcaatgcccatcctctgccttgggttaattcttcggtgacactggcgttgctgggtggcgatgcccgtcctctggcttgggttaattcttggatgacgtcggcgttgctgggagaatgtgccgttcctgccctgcctccacccacctcgggagcagaagcccggcctggacacccctcggcctggacacccctcgaaggagagggcgcttccttgagtaggtgggctccccttgcccttccctccctatcactccatactggggtgggctggaggaggccacaggccagctattgtaaaagctttttattttagtaaaatatacagaagttc

SEQ ID NO: 160235 - DNA, 587 bp, Homo sapiens
  Payload ID: 11338
  Gene Symbol: SGSH
  Gene Name: N-sulfoglucosamine sulfohydrolase
  ENST ID: ENST00000574505
  CDS Start-End: 1-320
gggcgcgtccccggaacgcactgctgctcctcgcggatgacggaggctttgagagtggcgcgtacaacaacagcgccatcgccaccccgcacctggacgccttggcccgccgcagcctcctctttcgcaatgccttcacctcggtcagcagctgctctcccagccgcgccagcctcctcactggcctgccccagcatcagaatgggatgtacgggctgcaccaggacgtgcaccacttcaactccttcgacaaggtgcggagcctgccgctgctgctcagccaagctggtgtgcgcacaggtggggcggaacatcactagaattaagctgctcgtccggaaattcctgcagactcaggatgaccggcctttcttcctctacgtcgccttccacgacccccaccgctgtgggcactcccagccccagtacggaaccttctgtgagaagtttggcaacggagagagcggcatgggtcgtatcccagactggaccccccaggcctacgacccactggacgtgctggtgccttacttcgtccccaacaccccggcagcccgagccgacctggccgctcagtacaccaccgt

SEQ ID NO: 160236 - DNA, 583 bp, Homo sapiens
  Payload ID: 11338
  Gene Symbol: SGSH
  Gene Name: N-sulfoglucosamine sulfohydrolase
  ENST ID: ENST00000570427
  CDS Start-End: 21-583
gagtccgagccgccgccgccatgagctgccccgtgcccgcctgctgcgcgctgctgctagtcctggggctctgccgggcgcgtccccggaacgcactgctgctcctcgcggatgacggaggctttgagagtggcgcgtacaacaacagcgccatcgccaccccgcacctggacgccttggcccgccgcagcctcctctttcgcaatgccttcacctcggtcagcagctgctctcccagccgcgccagcctcctcactggcctgccccagcatcagaatgggatgtacgggctgcaccaggacgtgcaccacttcaactccttcgacaaggtgcggagcctgccgctgctgctcagccaagctggtgtgcgcacaggcctctcttcccgcccaggcatcatcgggaagaagcacgtggggccggagaccgtgtacccgtttgactttgcgtacacggaggagaatggctccgtcctccaggtggggcggaacatcactagaattaagctgctcgtccggaaattcctgcagactcaggatgaccggcctttcttcctctacgtcgccttccacgacccccaccg

SEQ ID NO: 160237 - DNA, 818 bp, Homo sapiens
  Payload ID: 11338
  Gene Symbol: SGSH
  Gene Name: N-sulfoglucosamine sulfohydrolase
  ENST ID: ENST00000576856
  CDS Start-End: 1-204
gtgatcttcacgtccgacaacgggatccccttccccagcggcaggaccaacctgtactggccgggcactgctgaacccttactggtgtcatccccggagcacccaaaacgctggggccaagtcagcgaggcctacgtgagcctcctagaggaaaagaatgaggctcagagaggtgaagtaagctgctcaggattgcacagctgacctcacgcccaccatcttggattggttctcgatcccgtaccccagctacgccatctttggctcgaagaccatccacctcactggccggtccctcctgccggcgctggaggccgagcccctctgggccaccgtctttggcagccagagccaccacgaggtcaccatgtcctaccccatgcgctccgtgcagcaccggcacttccgcctcgtgcacaacctcaacttcaagatgccctttcccatcgaccaggacttctacgtctcacccaccttccaggacctcctgaaccgcaccacagctggtcagcccacgggctggtacaaggacctccgtcattactactaccgggcgcgctgggagctctacgaccggagccgggacccccacgagacccagaacctggccaccgacccgcgctttgctcagcttctggagatgcttcgggaccagctggccaagtggcagtgggagacccacgacccctgggtgtgcgcccccgacggcgtcctggaggagaagctctctccccagtgccagcccctccacaatgagctgtgaccatcccaggaggcctgtgcacacatcccaggcatgtcccagacacatcccacac

SEQ ID NO: 160238 - DNA, 546 bp, Homo sapiens
  Payload ID: 11338
  Gene Symbol: SGSH
  Gene Name: N-sulfoglucosamine sulfohydrolase
  ENST ID: ENST00000576707
  CDS Start-End: 216-546
agttgcttctgggaggacatcagaggcgcccggttaattcagcggatgacggaggctttgagagtggcgcgtacaacaacagcgccatcgccaccccgcacctggacgccttggcccgccgcagcctcctctttcgcaatgccttcacctcggtcagcagctgctctcccagccgcgccagcctcctcactggcctgccccagcatcagaatgggatgtacgggctgcaccaggacgtgcaccacttcaactccttcgacaaggtgcggagcctgccgctgctgctcagccaagctggtgtgcgcacaggcatcatcgggaagaagcacgtggggccggagaccgtgtacccgtttgactttgcgtacacggaggagaatggctccgtcctccaggtggggcggaacatcactagaattaagctgctcgtccggaaattcctgcagactcaggatgaccggcctttcttcctctacgtcgccttccacgacccccaccgctgtgggcactcccagccccagtacggaaccttctgtgagaagtttg

SEQ ID NO: 160239 - DNA, 578 bp, Homo sapiens
  Payload ID: 11338
  Gene Symbol: SGSH
  Gene Name: N-sulfoglucosamine sulfohydrolase
  ENST ID: ENST00000576941
  CDS Start-End: 21-347
gagtccgagccgccgccgccatgagctgccccgtgcccgcctgctgcgcgctgctgctagtcctggggctctgccgggcgcgtccccggaacgcactgctgctcctcgcggatgacggaggctttgagagtggcgcgtacaacaacagcgccatcgccaccccgcacctggacgccttggcccgccgcagcctcctctttcgcaatgccttcacctcggtcagcagctgctctcccagccgcgccagcctcctcactggcctgccccaggcctttcttcctctacgtcgccttccacgacccccaccgctgtgggcactcccagccccagtacggaaccttctgtgagaagtttggcaacggagagagcggcatgggtcgtatcccagactggaccccccaggcctacgacccactggacgtgctggtgccttacttcgtccccaacaccccggcagcccgagccgacctggccgctcagtacaccaccgtcggccgcatggaccaaggagttggactggtgctccaggagctgcgtgacgccggtgtcctgaacgacacactggtgatcttcacgtc

SEQ ID NO: 160240 - DNA, 581 bp, Homo sapiens
  Payload ID: 11338
  Gene Symbol: SGSH
  Gene Name: N-sulfoglucosamine sulfohydrolase
  ENST ID: ENST00000572257
  CDS Start-End: 1-581
gtttgactttgcgtacacggaggagaatggctccgtcctccaggtggggcggaacatcactagaattaagctgctcgtccggaaattcctgcagactcaggatgaccggcctttcttcctctacgtcgccttccacgacccccaccgctgtgggcactcccagccccagtacggaaccttctgtgagaagtttggcaacggagagagcggcatgggtcgtatcccagactggaccccccaggcctacgacccactggacgtgctggtgccttacttcgtccccaacaccccggcagcccgagccgacctggccgctcagtacaccaccgtcggccgcatggaccaaggagttggactggtgctccaggagctgcgtgacgccggtgtcctgaacgacacactggtgatcttcacgtccgacaacgggatccccttccccagcggcaggaccaacctgtactggccgggcactgctgaacccttactggtgtcatccccggagcacccaaaacgctggggccaagtcagcgaggcctacgtgagcctcctagtgactaggctacttttgcccactgtaaaag

SEQ ID NO: 160241 - DNA, 1695 bp, Homo sapiens
  Payload ID: 11339
  Gene Symbol: NT5C1B-RDH14
  Gene Name: NT5C1B-RDH14 readthrough
  ENST ID: ENST00000444297
  CDS Start-End: 97-1695
aaatgcaaagctagactgagcaagggaagtgacaggaaatggagctggggagacaaaaatgtggataacaacaaaagaatttcaacaggtaaaaaaatgagtcaaacatctctcaaacagaaaaagaatgagcctggaatgaggtcctcaaaagagagtctagaagcagaaaaaagaaaggaatctgacaaaacaggagttcgtctgagcaatcagggatcacaagaatcatcactgcggaagacagactctcgagggtaccttgtgcgcagtcaatggtctagaatatcccggagcccatccaccaaggctccatccatagatgagcctagaagcaggaacaccagtgctaaggtagagctccccagcagctccacgagctcccggactccatccacctccccaagcctgcatgactcctcaccgccgccgctgtccgggcagccctcgctccagccacccgcgtcgccccagctgccccggtcgctggactcgcggcctcccacgcccccagagcccgatcctggctcccggcgcagcaccaaaatgcaagagaatccggaggcctgggcccaaggcatcgtgcgggaaatccgccagacccgggactcgcagccgctggaatattcgcgcacgtcccccaccgagtggaagtcctccagccagcgcagggggatctaccccgcctccacccagctggaccgcaactctctgtccgagcagcagcagcagcagcgggaggacgaggacgactacgaggctgcctactgggcatccatgaggtcgttctacgagaagaacccgagctgctcgcgcccctggccgcccaaacccaagaacgccatcaccattgctctctcatcctgcgcgctcttcaacatggtggacggcaggaaaatctacgagcaagagggtctggaaaagtacatggagtatcagctcaccaatgagaacgtcatcctgaccccgggcccggcgttccgcttcgtcaaggcactacagtatgtcaatgctagactccgtgatctatatcctgatgaacaggacttatttgatattgtactgatgactaataaccatgcccaagtgggagtgcggcttataaacagcgtcaatcactacggcttactgattgaccgcttctgtctgaccgggggaaaagaccccattggctatttgaaggcatatcttaccaacttgtatattgctgcagattctgaaaaagtgcaagaggcaatacaagaaggtattgcctctgcgacaatgtttgatggagccaaagacatggcttactgtgacactcagctccgtgtagcctttgatggggatgctgtcctcttctctgatgagtctgaacattttaccaaggagcatgggctcgacaaattcttccagtatgatacattatgtgaaagtaagcctcttgctcaggaagagcctaggctggatgtcttgatcaataacgcagggatcttccagtgcccttacatgaagactgaagatgggtttgagatgcagttcggagtgaaccatctggggcactttctactcaccaatcttctccttggactcctcaaaagttcagctcccagcaggattgtggtagtttcttccaaactttataaatacggagacatcaattttgatgacttgaacagtgaacaaagctataataaaagcttttgttatagccgg

SEQ ID NO: 160242 - DNA, 2142 bp, Homo sapiens
  Payload ID: 11339
  Gene Symbol: NT5C1B-RDH14
  Gene Name: NT5C1B-RDH14 readthrough
  ENST ID: ENST00000532967
  CDS Start-End: 95-1903
atgcaaagctagactgagcaagggaagtgacaggaaatggagctggggagacaaaaatgtggataacaacaaaagaatttcaacaggtaaaaaaatgagtcaaacatctctcaaacagaaaaagaatgagcctggaatgaggtcctcaaaagagagtctagaagcagaaaaaagaaaggaatctgacaaaacaggagttcgtctgagcaatcagatgaggcgtgcagtcaatccgaatcactcgctgagatgttgccccttccagggtcactcgtcgtgtagacgctgcctttgtgcagctgagggaacagcccttggcccctgccacacaatacgtatttatattcacatgtgcctgttgtgggagcagggccagcagatcaccatgatgaggggatcacaagaatcatcactgcggaagacagactctcgagggtaccttgtgcgcagtcaatggtctagaatatcccggagcccatccaccaaggctccatccatagatgagcctagaagcaggaacaccagtgctaagctccccagcagctccacgagctcccggactccatccacctccccaagcctgcatgactcctcaccgccgccgctgtccgggcagccctcgctccagccacccgcgtcgccccagctgccccggtcgctggactcgcggcctcccacgcccccagagcccgatcctggctcccggcgcagcaccaaaatgcaagagaatccggaggcctgggcccaaggcatcgtgcgggaaatccgccagacccgggactcgcagccgctggaatattcgcgcacgtcccccaccgagtggaagtcctccagccagcgcagggggatctaccccgcctccacccagctggaccgcaactctctgtccgagcagcagcagcagcagcgggaggacgaggacgactacgaggctgcctactgggcatccatgaggtcgttctacgagaagaacccgagctgctcgcgcccctggccgcccaaacccaagaacgccatcaccattgctctctcatcctgcgcgctcttcaacatggtggacggcaggaaaatctacgagcaagagggtctggaaaagtacatggagtatcagctcaccaatgagaacgtcatcctgaccccgggcccggcgttccgcttcgtcaaggcactacagtatgtcaatgctagactccgtgatctatatcctgatgaacaggacttatttgatattgtactgatgactaataaccatgcccaagtgggagtgcggcttataaacagcgtcaatcactacggcttactgattgaccgcttctgtctgaccgggggaaaagaccccattggctatttgaaggcatatcttaccaacttgtatattgctgcagattctgaaaaagtgcaagaggcaatacaagaaggtattgcctctgcgacaatgtttgatggagccaaagacatggcttactgtgacactcagctccgtgtagcctttgatggggatgctgtcctcttctctgatgagtctgaacattttaccaaggagcatgggctcgacaaattcttccagtatgatacattatgtgaaagtaagcctcttgctcagggtcccctaaaaggctttctggaagatttaggcagactgcaaaagaagttctatgccaaaaatgaacggttactttgtcctatcaggacctacctggttacagctaggagtgcagccagttcaggcgcccgtgtgctgaagacccttcgacgctggggtctagagatagacgaagctcttttccttgctggagcccccaaaagtcccatcttggtgaagatccggccccacatcttctttgatgaccacatgttccacattgaaggggcacagaggaagagcctaggctggatgtcttgatcaataacgcagggatcttccagtgcccttacatgaagactgaagatgggtttgagatgcagttcggagtgaaccatctggggcactttctactcaccaatcttctccttggactcctcaaaagttcagctcccagcaggattgtggtagtttcttccaaactttataaatacggagacatcaattttgatgacttgaacagtgaacaaagctataataaaagcttttgttatagccgg

SEQ ID NO: 160243 - DNA, 1204 bp, Homo sapiens
  Payload ID: 11340
  Gene Symbol: NTAN1
  Gene Name: N-terminal asparagine amidase
  Uniprot ID: Q96AB6
  ENST ID: ENST00000287706
  CDS Start-End: 94-1026
gcgcggcccgaggggcgggggcggcgggcggcccggggctgcaaagcggggggccgccgcctccctgggcctgcctgggcggccgcctccgcgatgccgctgctcgtcgaggggcggcgagtgcggctgccgcagtcagccggggacctcgtccgagcccacccgcctttggaggaaagagccagacttctcagaggtcagtctgttcaacaagtgggaccccagggccttctgtatgttcagcaaagagagcttgcagtgacctccccaaaggatggctccatctccattctgggttctgatgatgccactacttgtcacattgtggtcctgaggcacacaggtaatggggccacctgcttgacacattgtgacggaaccgacaccaaagctgaggtccccttgatcatgaactccataaaatccttttctgaccacgctcaatgtggaaggctggaagtacaccttgttggaggcttcagtgacgacaggcagttgtcacaaaaactcactcatcaacttcttagtgaatttgacaggcaagaagatgacattcacttagtgacattatgtgtgacagaattaaatgaccgggaagaaaacgaaaaccactttccagtaatatatggcattgctgtcaacattaagactgcagagatttacagagcatcctttcaagatcggggtccggaggagcagcttcgtgctgcgcgaactttagcaggaggaccaatgattagcatttatgatgcagagacagaacaacttcgtataggaccgtactcctggacaccatttccacatgtggatttctggttgcaccaagatgacaagcaaatactagagaatctttccacttcgcctctggctgagccaccccactttgttgaacatattagatctaccttgatgtttttaaaaaaacacccatctccagctcacacactgttttctggaaataaagccctactctacaaaaaaaatgaagatggcttgtgggaaaagatctcttctccaggaagttaaaaaacatgaattaccaaagaaagcaccttcttggcctgacagaccattggtggggctggcacgaatccagatctggatcctacatctgttgggtcttaggcctccttccctcctcagtgtctttcaaatgactttcatcaaatgactttcaaaataaaaccttattttggcaaaggca

SEQ ID NO: 160244 - DNA, 439 bp, Homo sapiens
  Payload ID: 11340
  Gene Symbol: NTAN1
  Gene Name: N-terminal asparagine amidase
  ENST ID: ENST00000568738
  CDS Start-End: 1-57
cccttgatcatgaactccataaaatccttttctgaccacgctcaatgtggaaggtgaatttgacaggcaagaagatgacattcacttagtgacattatgtgtgacagaattaaatgaccgggaagaaaacgaaaaccactttccagtaatatatggcattgctgtcaacattaagactgcagagatttacagagcatcctttcaagatcggggtccggaggagcagcttcgtgctgcgcgaactttagcaggaggaccaatgattagcatttatgatgcagagacagaacaacttcgtataggaccgtactcctggacaccatttccacatgtggatttctggttgcaccaagatgacaagcaaatactagagaatctttccacttcgcctctggctgagccaccccactttgttgaacatattagatctaccttgatg

SEQ ID NO: 160245 - DNA, 738 bp, Homo sapiens
  Payload ID: 11340
  Gene Symbol: NTAN1
  Gene Name: N-terminal asparagine amidase
  ENST ID: ENST00000566419
  CDS Start-End: 69-738
gggcggcccggggctgcaaagcggggggccgccgcctccctgggcctgcctgggcggccgcctccgcgatgccgctgctcgtcgaggggcggcgagtgcggctgccgcagtcagccggggacctcgtccgagcccacccgcctttggaggaaagagccagacttctcagaggctccatctccattctgggttctgatgatgccactacttgtcacattgtggtcctgaggcacacaggtaatggggccacctgcttgacacattgtgacggaaccgacaccaaagctgaggtccccttgatcatgaactccataaaatccttttctgaccacgctcaatgtggaaggctggaagtacaccttgttggaggcttcagtgacgacaggcagttgtcacaaaaactcactcatcaacttcttagtgaatttgacaggcaagaagatgacattcacttagtgacattatgtgtgacagaattaaatgaccgggaagaaaacgaaaaccactttccagtaatatatggcattgctgtcaacattaagactgcagagatttacagagcatcctttcaagatcggggtccggaggagcagcttcgtgctgcgcgaactttagcaggaggaccaatgattagcatttatgatgcagagacagaacaacttcgtataggaccgtactcctggacaccatttccacatgtggatttctggttgcaccaagatgacaagcaaatactag

SEQ ID NO: 160246 - DNA, 667 bp, Homo sapiens
  Payload ID: 11340
  Gene Symbol: NTAN1
  Gene Name: N-terminal asparagine amidase
  ENST ID: ENST00000568320
  CDS Start-End: 230-667
aggggcgggggcggcgggcggcccggggctgcaaagcggggggccgccgcctccctgggcctgcctgggcggccgcctccgcgatgccgctgctcgtcgaggggcggcgagtgcggctgccgcagtcagccggggacctcgtccgagcccacccgcctttggaggtaatggggccacctgcttgacacattgtgacggaaccgacaccaaagctgaggtccccttgatcatgaactccataaaatccttttctgaccacgctcaatgtggaaggctggaagtacaccttgttggaggcttcagtgacgacaggcagttgtcacaaaaactcactcatcaacttcttagtgaatttgacaggcaagaagatgacattcacttagtgacattatgtgtgacagaattaaatgaccgggaagaaaacgaaaaccactttccagtaatatatggcattgctgtcaacattaagactgcagagatttacagagcatcctttcaagatcggggtccggaggagcagcttcgtgctgcgcgaactttagcaggaggaccaatgattagcatttatgatgcagagacagaacaacttcgtataggaccgtactcctggacaccatttccacatgtggatttctggttgcaccaagatgacaagcaaatactagag

SEQ ID NO: 160247 - DNA, 354 bp, Homo sapiens
  Payload ID: 11340
  Gene Symbol: NTAN1
  Gene Name: N-terminal asparagine amidase
  ENST ID: ENST00000563940
  CDS Start-End: 1-84
ctcgtccgagcccacccgcctttggaggctccatctccattctgggttctgatgatgccactacttgtcacattgtggtcctgaggcacacaggtaatggggccacctgcttgacacattgtgacggaaccgacaccaaagctgaggtccccttgatcatgaactccataaaatccttttctgaccacgctcaatgtggaaggtgagatctacgctgctctcataggctggaagtacaccttgttggaggcttcagtgacgacaggcagttgtcacaaaaactcactcatcaacttcttagtgaatttgacaggcaagaagatgacattcacttagtgacattatgtgtgacag

SEQ ID NO: 160248 - DNA, 1043 bp, Homo sapiens
  Payload ID: 11340
  Gene Symbol: NTAN1
  Gene Name: N-terminal asparagine amidase
  ENST ID: ENST00000565187
  CDS Start-End: 57-194
gctgcaaagcggggggccgccgcctccctgggcctgcctgggcggccgcctccgcgatgccgctgctcgtcgaggggcggcgagtgcggctgccgcagtcagccggggacctcgtccgagcccacccgcctttggaggctccatctccattctgggttctgatgatgccactacttgtcacattgtggtcctgaggcacacaggtaatggggccacctgcttgacacattgtgacggaaccgacaccaaagctgaggtccccttgatcatgaactccataaaatccttttctgaccacgctcaatgtggaaggctggaagtacaccttgttggaggcttcagtgacgacaggcagttgtcacaaaaactcactcatcaacttcttagtgaatttgacaggcaagaagatgacattcacttagtgacattatgtgtgacagaattaaatgaccgggaagaaaacgaaaaccactttccagtaatatatggcattgctgtcaacattaagactgcagagatttacagagcatcctttcaagatcggggtccggaggagcagcttcgtgctgcgcgaactttagcaggaggaccaatgattagcatttatgatgcagagacagaacaacttcgtataggaccgtactcctggacaccatttccacatgtggatttctggttgcaccaagatgacaagcaaatactagagaatctttccacttcgcctctggctgagccaccccactttgttgaacatattagatctaccttgatgtttttaaaaaaacacccatctccagctcacacactgttttctggaaataaagccctactctacaaaaaaaatgaagatggcttgtgggaaaagatctcttctccaggaagttaaaaaacatgaattaccaaagaaagcaccttcttggcctgacagaccattggtggggctggcacgaatccagatctggatcctacatctgttgggtcttaggcctccttccctcctcagtgtctttcaaatgactttcatcaaatgactttcaaaataa

SEQ ID NO: 160249 - DNA, 1043 bp, Homo sapiens; identical to SEQ ID NO: 160248
  Payload ID: 11340
  Gene Symbol: NTAN1
  Gene Name: N-terminal asparagine amidase
  ENST ID: ENST00000615632
  CDS Start-End: 57-194

SEQ ID NO: 160250 - DNA, 1049 bp, Homo sapiens
  Payload ID: 11340
  Gene Symbol: NTAN1
  Gene Name: N-terminal asparagine amidase
  ENST ID: ENST00000614882
  CDS Start-End: 255-872
aggacgaggcgggacgcgcggcccgaggggcgggggcggcgggcggcccggggctgcaaagcggggggccgccgcctccctgggcctgcctgggcggccgcctccgcgatgccgctgctcgtcgaggggcggcgagtgcggctgccgcagtcagccggggacctcgtccgagcccacccgcctttggaggtaatggggccacctgcttgacacattgtgacggaaccgacaccaaagctgaggtccccttgatcatgaactccataaaatccttttctgaccacgctcaatgtggaaggctggaagtacaccttgttggaggcttcagtgacgacaggcagttgtcacaaaaactcactcatcaacttcttagtgaatttgacaggcaagaagatgacattcacttagtgacattatgtgtgacagaattaaatgaccgggaagaaaacgaaaaccactttccagtaatatatggcattgctgtcaacattaagactgcagagatttacagagcatcctttcaagatcggggtccggaggagcagcttcgtgctgcgcgaactttagcaggaggaccaatgattagcatttatgatgcagagacagaacaacttcgtataggaccgtactcctggacaccatttccacatgtggatttctggttgcaccaagatgacaagcaaatactagagaatctttccacttcgcctctggctgagccaccccactttgttgaacatattagatctaccttgatgtttttaaaaaaacacccatctccagctcacacactgttttctggaaataaagccctactctacaaaaaaaatgaagatggcttgtgggaaaagatctcttctccaggaagttaaaaaacatgaattaccaaagaaagcaccttcttggcctgacagaccattggtggggctggcacgaatccagatctggatcctacatctgttgggtcttaggcctccttccctcctcagtgtctttcaaatgactttcatcaaatgactttcaaaataaaaccttattttggcaaaggc

SEQ ID NO: 160251 - DNA, 1049 bp, Homo sapiens; identical to SEQ ID NO: 160250
  Payload ID: 11340
  Gene Symbol: NTAN1
  Gene Name: N-terminal asparagine amidase
  ENST ID: ENST00000622833
  CDS Start-End: 255-872

SEQ ID NO: 160252 - DNA, 1204 bp, Homo sapiens; identical to SEQ ID NO: 160243
  Payload ID: 11340
  Gene Symbol: NTAN1
  Gene Name: N-terminal asparagine amidase
  Uniprot ID: Q96AB6
  ENST ID: ENST00000620176
  CDS Start-End: 94-1026

SEQ ID NO: 160253 - DNA, 1115 bp, Homo sapiens
  Payload ID: 11340
  Gene Symbol: NTAN1
  Gene Name: N-terminal asparagine amidase
  ENST ID: ENST00000624579
  CDS Start-End: 321-938
aggacgaggcgggacgcgcggcccgaggggcgggggcggcgggcggcccggggctgcaaagcggggggccgccgcctccctgggcctgcctgggcggccgcctccgcgatgccgctgctcgtcgaggggcggcgagtgcggctgccgcagtcagccggggacctcgtccgagcccacccgcctttggaggctccatctccattctgggttctgatgatgccactacttgtcacattgtggtcctgaggcacacaggtaatggggccacctgcttgacacattgtgacggaaccgacaccaaagctgaggtccccttgatcatgaactccataaaatccttttctgaccacgctcaatgtggaaggctggaagtacaccttgttggaggcttcagtgacgacaggcagttgtcacaaaaactcactcatcaacttcttagtgaatttgacaggcaagaagatgacattcacttagtgacattatgtgtgacagaattaaatgaccgggaagaaaacgaaaaccactttccagtaatatatggcattgctgtcaacattaagactgcagagatttacagagcatcctttcaagatcggggtccggaggagcagcttcgtgctgcgcgaactttagcaggaggaccaatgattagcatttatgatgcagagacagaacaacttcgtataggaccgtactcctggacaccatttccacatgtggatttctggttgcaccaagatgacaagcaaatactagagaatctttccacttcgcctctggctgagccaccccactttgttgaacatattagatctaccttgatgtttttaaaaaaacacccatctccagctcacacactgttttctggaaataaagccctactctacaaaaaaaatgaagatggcttgtgggaaaagatctcttctccaggaagttaaaaaacatgaattaccaaagaaagcaccttcttggcctgacagaccattggtggggctggcacgaatccagatctggatcctacatctgttgggtcttaggcctccttccctcctcagtgtctttcaaatgactttcatcaaatgactttcaaaataaaaccttattttggcaaaggc

SEQ ID NO: 160254 - DNA, 667 bp, Homo sapiens; identical to SEQ ID NO: 160246
  Payload ID: 11340
  Gene Symbol: NTAN1
  Gene Name: N-terminal asparagine amidase
  ENST ID: ENST00000631580
  CDS Start-End: 230-667

SEQ ID NO: 160255 - DNA, 738 bp, Homo sapiens; identical to SEQ ID NO: 160245
  Payload ID: 11340
  Gene Symbol: NTAN1
  Gene Name: N-terminal asparagine amidase
  ENST ID: ENST00000634013
  CDS Start-End: 69-738

SEQ ID NO: 160256 - DNA, 354 bp, Homo sapiens; identical to SEQ ID NO: 160247
  Payload ID: 11340
  Gene Symbol: NTAN1
  Gene Name: N-terminal asparagine amidase
  ENST ID: ENST00000633231
  CDS Start-End: 1-84

SEQ ID NO: 160257 - DNA, 439 bp, Homo sapiens; identical to SEQ ID NO: 160244
  Payload ID: 11340
  Gene Symbol: NTAN1
  Gene Name: N-terminal asparagine amidase
  ENST ID: ENST00000633749
  CDS Start-End: 1-57

SEQ ID NO: 160258 - DNA, 5289 bp, Homo sapiens
  Payload ID: 11341
  Gene Symbol: NECAB1
  Gene Name: N-terminal EF-hand calcium binding protein 1
  Uniprot ID: Q8N987
  ENST ID: ENST00000417640
  CDS Start-End: 338-1393
aggctatctccagccgtggccgatggccgtgccgggggcagagcccgctcccctccgcgcgttgctacgtgcggggatgacatggatccagacgccgtcaactacgggaaggaggaggcgagagttggagcgcgtgggagcgcagaggccggaggagggagggggggacaccgagcgcggagagcgcggagagcgcggagggaggcgcgcgcgggagcgaacaccctcccggatccagagcccggcggcggcgaagcagcagctgcggccgcgcccttgccagagccggtgcgtccgcctagccccgctccgcctgaggccgtcagggctcccgaggatggaagattcccaggagacatcgccgtcctccaacaactcctcggaggagctcagctctgctctgcacctgtccaagggcatgtcgatcttcctcgacatactgaggagagcagacaaaaatgatgatggaaaattatcctttgaagaattcaaagcatattttgcagatggtgttctcagtggagaagaattacacgagcttttccataccattgatacacataatactaataatcttgacacagaagagctatgtgaatatttttctcagcacttgggcgagtatgagaatgtactagcagcacttgaagacctgaatctttccatcctgaaggcaatgggcaaaacaaagaaagactaccaagaagcctccaatttggaacaattcgtaactagatttttattgaaggaaaccctgaatcagctgcagtctctccagaattccctggaatgtgccatggaaactactgaggagcaaacccgtcaagaaaggcaagggccagccaagccagaagtcctgtcgattcaatggcctggaaaacgatcaagccgccgagtccagagacacaacagcttctccccaaacagccctcagtttaatgtcagcggtccaggcttattagaagaagacaaccagtggatgacccagataaatagactccagaaattaattgatagactggaaaagaaggatctcaaactcgaaccaccagaagaagaaattattgaagggaatactaaatctcacatcatgcttgtgcagcggcagatgtctgtgatagaagaggacctggaagaattccagctcgctctgaaacactacgtggagagtgcttcctcccaaagtggatgcttgcgtatttctatacagaagctttcaaatgaatctcgctacatgatctatgagttctgggagaatagtagtgtatggaatagccaccttcagacaaattatagcaagacattccaaagaagtaatgtggatttcttggaaactccagaactcacatctacaatgctagttcctgcttcgtggtggatcctgaacaactagatgttcctagacattttctttatggttccaagtgcaaaacaggtgttcttatctaaaacgtcaattagaaaattatctgcggttgttaatctactgtatatttttgtttggtatatttactaagtgcactctttcaaaacttattctataactttatcaattcatgtgaattttagctcaattttcaaagttcactaatattctcaatatttaatgctaaatgctttgctacattgtaactcacctaaaaccttttagtgacaaaatcctaatatgtggaaaaaagcatatgcataaaggaataatattgtgaaaatgaatctgttatgataaagaaaaaataaagtggaaacttttagagtattacttcatagggcagattttgtaaactgtcgtatactgtaaagggttaaatcagcgttttgtgatttttaagtaactgtgagtgaagtttattcttcaacaatgtctactccatccccaacccaactcacagccctatgactactatctttgcattagttaaaaagttagtatataggcatcaaacaaccttggctgtaacctatagaatctctatccacgtatcaggttatagactggtttttcaaaagtgaacaatcctgtgataagttggagtaccatttagtaatacagcaacattgtgtcatttattagcatcataattctttgttatgtaagttaaatatatcaagaaagaagagactgtttggaaaaatgtggttcaagttttatgctatatagttttggtatgcgatacagacagctaacttttcttatgaaaaatacatatttgcatgtaaacaatgatttcaaaatacttgaaaaataaaattttaacccaaatgaataactaagaaatataaaacaagcacaaaatcttagggaagtcataaaatagtagtgaaagtattagacagaagacatctgttttcgaatttcaacactagaatgactaaaactatctacctatagaactatctgtagatagtatactatctacactctgctcaacaagctcagaaattaaatatttttaataataaaaatctgttctggttataaaccttgctaatgaaaatacaatacatataaaaatgtatagccatgttattttctagtataaattcctttgaaactataagtctttgaggaaaattataaggtaaaattttcctgtttttccccctttgaaaaactcaggaaaaaaggaagattgaactaataaaattttatttcttaaatataaatttgacctaaaatattttctcaaactaattcatgaaacagcaacttttaccaatacctttgtatactctcagttctcattcagtataaataaaattttaaaatcctttcatagttctattagaaataagtagtaaattttgatatattgtacatacacacgtgtgtgtgtgtgtgtgtgtgtgtgtgtgtgtgtgtgtgtgtatttgtgtgcctctggtcaactctaaggatgacagacactgtgtaacaacacctgggtcaactcttttaatttatatacaaagcaaagaacaacattaatggagatgcacaatgattattcaaacaagctatatatatgtacaaaggcaaacagacacataacagtctctgcagactgattgtatatagtaagaaaagatcaaaagactttaaaacctaaatgacttttgacatacaaactcttcttgagaatgtttgttgtaaatggtttcaaaaatacaaattatagccaatcaaaacattgctttggttggtgcatttaagtatccaactcaaaaagcatatcaaatattttgggtactaggcagtttccaaagtagcatggtagtattacttgttaaaagggttctgttttcattaacagtactaagtggaagggatctgcagattccaaactggaataagctctatcatattctgaaacaagaattagaatgacttgagaacgggcaaataacaaagcaaaccaatataattatatggtcattctgaccccagctcttatacaaattatacatgtatttttgtgtatgtttgtgagagttgtatgtatgtgaatgtgtgtgagtgtgtattcacatacacatatatactggaacctatagtagaaaaggaaactagtagggccaaaaaaaaaaagaaaaagaaaaagaaaaaagaaaaaaaaagaaaaaactgggacctaagtataaatatctcatcctaaagtaaacaataagtttatagttaacgaagatttttttctatttaaaaccccattttcctaaagaacaaagtagtaaaataaaaaaaaatttaaaaaattaaaaaataaaaaaaagaggtcactaaaagaccaagatgggaaacgtaacatggaatacaagcttgaatctgggaaacaagctcaaaaaacagtgaaaaaaaaagtactggtttaggagttcaaaattcagtgaaacaaactttttgccaatagacctagggatctaagaaatagaattagggagagtttacacttacttacctatatatcagcagatttttctggaagaaaccctttttttttttttttttaaacagtaacatccagagtgacaaattgcaggagatttaatgtataaaatttctaggaattaaaagcttaaacccaaaaattgttcatccatatataagaaattatcgaattaaaacttaatgtatgtcaattattttcaaatgtctaaattcctttggaaataaaaatatcagttttactttgaaattgctcaacttctgctattcatatggtctgattagtgacataagtagcagccgtttttcaacttcagtttcattcactaccattgtttccaaattatcaatctctgctagtaattatgaatttaagaccatattattatcaaaaacctagagaccaatcatatatctgaaaagaaatacccattaaaaattctgcctcctgtttattgagaactatgcattgaacattctgaatcattctaagcctctggagagactgtaatgatccattcatgagctggtatgaaatcagtgggaagcagaacaacagaaggaactttaaaagcaacaagcaattatgtaccatatatacactgtagcaaatattttatatttgagagtctttacagcttacatttccattccattattacaagtgatgaaaaacaaaaaattgcaagtagtatgcaaattataaatatacagtcttcccacttcactaaccaaattcctactttccagtgttacttcccaatttatgcaggaaacctcctgcaaagctgaaactgattagaaaattctttatattttaaaatagctctttctcatttttagagaagtcaaatagccaaccatcaaaattaagaataaattgaattgtcacagtccattacagttattgttgctagatccacctcatttgcagatgtccaaacttaaattcatctgttcttaaaatgctacttaaaactttggttgttttcctgtaatataaaagaaaaagttaatttatcaattgattgaatacagtttttactaattagtttatcaaaccaaatactgtgaacgtaccaggtgtttacagatttaaatgcatgttaccatagaaactattaaagtaactagaactgtcaaataacaaaacggctcatgtttttaaaatatatgtaactcattttaaaatatattaaattgtattccaaacctgttcttctgtttctgtggcacctaggtttaaaatatgtattaatgtgtaaatcacaagtaaaatgaattctaatgtacaagtttgttttaaaaagtgtatgtcaagcttttatttacacaataaaatgttattaaagatggaaagtctacaaatg

SEQ ID NO: 160259 - DNA, 2908 bp, Homo sapiens
  Payload ID: 11341
  Gene Symbol: NECAB1
  Gene Name: N-terminal EF-hand calcium binding protein 1
  Uniprot ID: Q8N987
  ENST ID: ENST00000521366
  CDS Start-End: 271-573
attgagaatcactgcttttaaagggaaacacgtcattgtaaagaacacgttgtttagcttctgggactagaggcaaggaaaatatcttgcctagattacagcctttatacagttttatacttggaatagtcatggccttccttggtcatatttttggatgacaatcatctgtttttgtgaggaggaatgggatgggcagtaggagtcagcttaaatcgggctccgtgacagccaacgcagtgaccctcgccccttccttggcagcacatcatgcttgtgcagcggcagatgtctgtgatagaagaggacctggaagaattccagctcgctctgaaacactacgtggagagtgcttcctcccaaagtggatgcttgcgtatttctatacagaagctttcaaatgaatctcgctacatgatctatgagttctgggagaatagtagtgtatggaatagccaccttcagacaaattatagcaagacattccaaagaagtaatgtggatttcttggaaactccagaactcacatctacaatgctagttcctgcttcgtggtggatcctgaacaactagatgttcctagacattttctttatggttccaagtgcaaaacaggtgttcttatctaaaacgtcaattagaaaattatctgcggttgttaatctactgtatatttttgtttggtatatttactaagtgcactctttcaaaacttattctataactttatcaattcatgtgaattttagctcaattttcaaagttcactaatattctcaatatttaatgctaaatgctttgctacattgtaactcacctaaaaccttttagtgacaaaatcctaatatgtggaaaaaagcatatgcataaaggaataatattgtgaaaatgaatctgttatgataaagaaaaaataaagtggaaacttttagagtattacttcatagggcagattttgtaaactgtcgtatactgtaaagggttaaatcagcgttttgtgatttttaagtaactgtgagtgaagtttattcttcaacaatgtctactccatccccaacccaactcacagccctatgactactatctttgcattagttaaaaagttagtatataggcatcaaacaaccttggctgtaacctatagaatctctatccacgtatcaggttatagactggtttttcaaaagtgaacaatcctgtgataagttggagtaccatttagtaatacagcaacattgtgtcatttattagcatcataattctttgttatgtaagttaaatatatcaagaaagaagagactgtttggaaaaatgtggttcaagttttatgctatatagttttggtatgcgatacagacagctaacttttcttatgaaaaatacatatttgcatgtaaacaatgatttcaaaatacttgaaaaataaaattttaacccaaatgaataactaagaaatataaaacaagcacaaaatcttagggaagtcataaaatagtagtgaaagtattagacagaagacatctgttttcgaatttcaacactagaatgactaaaactatctacctatagaactatctgtagatagtatactatctacactctgctcaacaagctcagaaattaaatatttttaataataaaaatctgttctggttataaaccttgctaatgaaaatacaatacatataaaaatgtatagccatgttattttctagtataaattcctttgaaactataagtctttgaggaaaattataaggtaaaattttcctgtttttccccctttgaaaaactcaggaaaaaaggaagattgaactaataaaattttatttcttaaatataaatttgacctaaaatattttctcaaactaattcatgaaacagcaacttttaccaatacctttgtatactctcagttctcattcagtataaataaaattttaaaatcctttcatagttctattagaaataagtagtaaattttgatatattgtacatacacacgtgtgtgtgtgtgtgtgtgtgtgtgtgtgtgtgtgtgtgtgtatttgtgtgcctctggtcaactctaaggatgacagacactgtgtaacaacacctgggtcaactcttttaatttatatacaaagcaaagaacaacattaatggagatgcacaatgattattcaaacaagctatatatatgtacaaaggcaaacagacacataacagtctctgcagactgattgtatatagtaagaaaagatcaaaagactttaaaacctaaatgacttttgacatacaaactcttcttgagaatgtttgttgtaaatggtttcaaaaatacaaattatagccaatcaaaacattgctttggttggtgcatttaagtatccaactcaaaaagcatatcaaatattttgggtactaggcagtttccaaagtagcatggtagtattacttgttaaaagggttctgttttcattaacagtactaagtggaagggatctgcagattccaaactggaataagctctatcatattctgaaacaagaattagaatgacttgagaacgggcaaataacaaagcaaaccaatataattatatggtcattctgaccccagctcttatacaaattatacatgtatttttgtgtatgtttgtgagagttgtatgtatgtgaatgtgtgtgagtgtgtattcacatacacatatatactggaacctatagtagaaaaggaaactagtagggccaaaaaaaaaaagaaaaagaaaaagaaaaaagaaaaaaaaagaaaaaactgggacctaagtataaatatctcatcctaaagtaaacaataagtttatagttaacgaagatttttttctatttaaaaccccattttcctaaagaacaaagtagtaaaataaaaaaaaatttaaaaa

SEQ ID NO: 160260 - DNA, 811 bp, Homo sapiens
  Payload ID: 11341
  Gene Symbol: NECAB1
  Gene Name: N-terminal EF-hand calcium binding protein 1
  Uniprot ID: Q8N987
  ENST ID: ENST00000522820
  CDS Start-End: 203-505
atttgaacagggcctgttgtaagtagttaatgtgtttgacaaccctgtaatatttgatatacctttggaaatgcatgagttactaatttttttgaaatctagttgtttgtaatgattgtcacttatgtctaatatcacaaaatattcaagaaattggagctgtgcaatgaacaataggacttctctttaaaaattgcacatcatgcttgtgcagcggcagatgtctgtgatagaagaggacctggaagaattccagctcgctctgaaacactacgtggagagtgcttcctcccaaagtggatgcttgcgtatttctatacagaagctttcaaatgaatctcgctacatgatctatgagttctgggagaatagtagtgtatggaatagccaccttcagacaaattatagcaagacattccaaagaagtaatgtggatttcttggaaactccagaactcacatctacaatgctagttcctgcttcgtggtggatcctgaacaactagatgttcctagacattttctttatggttccaagtgcaaaacaggtgttcttatctaaaacgtcaattagaaaattatctgcggttgttaatctactgtatatttttgtttggtatatttactaagtgcactctttcaaaacttattctataactttatcaattcatgtgaattttagctcaattttcaaagttcactaatattctcaatatttaatgctaaatgctttgctacattgtaactcacctaaaaccttttagtgacaaaatcctaatatgtggaaaaaagcatatgcataaaggaataat

SEQ ID NO: 160261 - DNA, 1608 bp, Homo sapiens
  Payload ID: 11342
  Gene Symbol: NECAB2
  Gene Name: N-terminal EF-hand calcium binding protein 2
  Uniprot ID: Q7Z6G3
  ENST ID: ENST00000305202
  CDS Start-End: 18-1178
gcggcgggcgcggcgcgatgtgcgagcgggcggcgcgcctgtgcagggccggcgcgcacaggctgctccgggagccgccgcagcagggccgggcgctgggcgggctgctgcgctgggtgggcgccaggatgggcgagccccgggagtcgctggcccccgccgcccccgcggaccccggcccagcctcgccgcgcgggggcaccgccgtcatcctggacattttccgccgtgcggacaaaaatgatgatgggaagctgtccttggaggaattccagctcttctttgcagatggcgtccttaatgagaaagaactggaggatctctttcacacgattgactctgacaacaccaaccatgtggacaccaaggagctgtgtgattactttgtggaccacatgggtgactatgaggatgtcctggcctccctggagaccttgaatcactctgtcctgaaggccatgggttataccaagaaggtatatgagggtgggagcaacgtggaccagtttgtgacccgcttcctcctgaaggagacggccaatcagatccagtcgctgctgagctcagtggagagtgcggtggaggccatcgaggaacagaccagccagctccgacagaaccacatcaaacccagccacagcgcggcacagacctggtgtggaagccccactcccgcctctgcccccaaccacaagctcatggctatggaacaaggcaagacccttccatctgccacggaggatgcaaaggaagagggtctggaagcccagatcagccgcttggcagagctgattgggaggctggagagcaaagcactgtggttcgacctgcagcagcgcctgtcagatgaagatggcaccaacatgcacctgcagctggtccggcaggagatggccgtgtgccccgagcaactgagcgagtttctggactctctgcgccagtatctgcgggggaccactggcgtgaggaactgcttccacatcactgccgtgaggctctcagatggcttcacctttgtcatctatgagttctgggagacagaggaggcgtggaagaggcacctgcagagccccctgtgtaaggcgttccggcacgtcaaggtggacacactgagccagcctgaggccctctccaggatcttggtgccagctgcttggtgcacggtgggacgggactgacagcctcccagaggcccgtggaggagcccaccagccccttcttcttgtgaaggaaatcccgtttttttctagacagacactttggtgcagaagcttcttttcaatccatcctccacaagaaggtgtttccctgttgttaagtgaaggaggccgcccctgcccccacctgagaaggcagagcagtgtctgtgctgccaggtcctggtgaagcccaaggttgaagggggcggcttcctggagccagcacccctgcctcctggtcctggcctctcccctacccctcacatggccacgcatgacccacactgaccacaccctgccctcttcggtgacattcttctacctagtaggagtcatgcccctgtagtgcccaacctagccaggtagccaccactgtgcccaggcgccaaataaaccctggttgggaaga

SEQ ID NO: 160262 - DNA, 549 bp, Homo sapiens
  Payload ID: 11342
  Gene Symbol: NECAB2
  Gene Name: N-terminal EF-hand calcium binding protein 2
  ENST ID: ENST00000566836
  CDS Start-End: 1-549
aacaccaaccatgtggacaccaaggagctgtgtgattactttgtggaccacatgggtgactatgaggatgtcctggcctccctggagaccttgaatcactctgtcctgaaggccatgggttataccaagaaggtatatgagggtgggagcaacgtggaccagtttgtgacccgcttcctcctgaaggagacggccaatcagatccagtcgctgctgagctcagtggagagtgcggtggaggccatcgaggaacagaccagccagctccgacagaaccacatcaaacccagccacagcgcggcacagacctggtgtggaagccccactcccgcctctgcccccaaccacaagctcatggctatggaacaaggcaagacccttccatctgccacggaggatgcaaaggaagagggtctggaagcccagatcagccgcttggcagagctgattgggaggctggagagcaaacacctgcagctggtccggcaggagatggccgtgtgccccgagcaactgagcgagtttctggactctctgcgccagtatctg

SEQ ID NO: 160263 - DNA, 617 bp, Homo sapiens
  Payload ID: 11342
  Gene Symbol: NECAB2
  Gene Name: N-terminal EF-hand calcium binding protein 2
  ENST ID: ENST00000564166
  CDS Start-End: 1-187
gagcgagtttctggactctctgcgccagtatctgcgggggaccactggcgtgaggaactgcttccagcacctgcagagccccctgtgtaaggcgttccggcacgtcaaggtggacacactgagccagcctgaggccctctccaggatcttggtgccagctgcttggtgcacggtgggacgggactgacagcctcccagaggcccgtggaggagcccaccagccccttcttcttgtgaaggaaatcccgtttttttctagacagacactttggtgcagaagcttcttttcaatccatcctccacaagaaggtgtttccctgttgttaagtgaaggaggccgcccctgcccccacctgagaaggcagagcagtgtctgtgctgccaggtcctggtgaagcccaaggttgaagggggcggcttcctggagccagcacccctgcctcctggtcctggcctctcccctacccctcacatggccacgcatgacccacactgaccacaccctgccctcttcggtgacattcttctacctagtaggagtcatgcccctgtagtgcccaacctagccaggtagccaccactgtgcccaggcgccaaataaaccctggttgggaaga

SEQ ID NO: 160264 - DNA, 2064 bp, Homo sapiens
  Payload ID: 11342
  Gene Symbol: NECAB2
  Gene Name: N-terminal EF-hand calcium binding protein 2
  ENST ID: ENST00000565691
  CDS Start-End: 723-1634
ggaaaggggagcagctctgtcccacggattcagatgtcactggaaaggcagaacgaggaggcacctggtcttgtaggttcaggccagccttggagctgccctccacccatccctgcctaatgcagccggaacttcgtctgcggctgcttttctgaactcttggcgtcctgtttctcctcctgcaccccaaaattaacgcagtcctgcccgtggctggcattgtcaccaggccttgcaaacacctctgtcggactttgcccaacctccctggaaacacaccaggggttttggaaggactgcagtggtaaaggttgtggcgctccctgggacactgattcggagtgtggttgtgtgcagctgagcgtttggcggtgggtgaagccacgtggactgatgactgtggacctacacctgcagggatggccgtgggcctgcgtgtgtgtgtcagcgtggctgggagcaggctggtggtactggcagccgcttccacgtgggtgaggggagggcctctgtctgcaacatccctcatcagttccccctggatcccagcccggggagggggagagggaaggggggctcagcttcccaggaccctaagctgctcctgggagaagagaaggatcccagtatccggtcagaggctgcaggaagcgcttgcctctccctggcccagggctgactccgcctctcttttctgcagattttccgccgtgcggacaaaaatgatgatgggaagctgtccttggaggaattccagctcttctttgcagatggcgtccttaatgagaaagaactggaggatctctttcacacgattgactctgacaacaccaaattactttgtggaccacatgggtgactatgaggatgtcctggcctccctggagaccttgaatcactctgtcctgaaggccatgggttataccaagaaggtatatgagggtgggagcaacgtggaccagtttgtgacccgcttcctcctgaaggagacggccaatcagatccagtcgctgctgagctcagtggagagtgcggtggaggccatcgaggaacagaccagccagctccgacagaaccacatcaaacccagccacagcgcggcacagacctggtgtggaagccccactcccgcctctgcccccaaccacaagctcatggctatggaacaaggcaagacccttccatctgccacggaggatgcaaaggaagagggtctggaagcccagatcagccgcttggcagagctgattgggaggctggagagcaaagcactgtggttcgacctgcagcagcgcctgtcagatgaagatggcaccaacatgcacctgcagctggtccggcaggagatggccgtgtgccccgagcaactgagcgagtttctggactctctgcgccagtatctgcgggggaccactggcgtgaggaactgcttccacatcactgccgtgaggctctcagatggcttcacctttgtcatctatgagttctgggagacagaggaggcgtggaagaggcacctgcagagccccctgtgtaaggcgttccggcacgtcaaggtggacacactgagccagcctgaggccctctccaggatcttggtgccagctgcttggtgcacggtgggacgggactgacagcctcccagaggcccgtggaggagcccaccagccccttcttcttgtgaaggaaatcccgtttttttctagacagacactttggtgcagaagcttcttttcaatccatcctccacaagaaggtgtttccctgttgttaagtgaaggaggccgcccctgcccccacctgagaaggcagagcagtgtctgtgctgccaggtcctggtgaagcccaaggttgaagggggcggcttcctggagccagcacccctgcctcctggtcctggcctctcccctacccctcacatggccacgcatgacccacactgaccacaccctgccctcttcggtgacattcttctacctagtaggagtcatgcccctgtagtgcccaacctagccaggtagccaccactgtgcccaggcgccaaataaaccctggttgggaaga

SEQ ID NO: 160265 - DNA, 1989 bp, Homo sapiens
  Payload ID: 11343
  Gene Symbol: NECAB3
  Gene Name: N-terminal EF-hand calcium binding protein 3
  Uniprot ID: Q96P71
  ENST ID: ENST00000246190
  CDS Start-End: 57-1247
ccgcggcgtccagggtcggcagcaaccgcagccgagcccgagcgggtggcggcgccatggcgtgcgcggggctgctcaccgtgtgcctgctccggccgcccgcgccccagccccagccccagaccccgcggcacccccagctcgcgcccgacccggggcccgccggacacacgctcttccaggacgttttccgcagagcagacaagaatgatgatgggaagctctcatttgaggaattccagaattactttgccgatggggttctcagcctgggggagctgcaggaactgttcagcggcattgatgggcatctcaccgacaatttagaaacagaaaaactgtgtgactacttctcagagcacctgggtgtctaccggccggtgctggctgcattggaatcgctgaaccgtgcagtgctcgctgccatggatgccaccaagctggagtacgagagggcctccaaagtggaccagtttgtgacgcgcttcctgctgcgggagacggtgagccagctgcaagcccttcagagctcgctggagggggcgtcagataccctggaggcccaggcccatggctggcggtcagatgcagagagcgtggaggcgcagagcaggctctgcggcagccggcgggcaggacgccgagccctgaggagtgtcagccggtcatccacctggtcccccggctcttctgacacagggcgcagctcagaggccgagatgcagtggcggctccaggtgaaccgcctccaggagctcatcgaccagctcgagtgcaaggtgagggccgtggggccagggccccacaagggaggaccctcctggtatccaccagagccaggcccatgctggaggcccggcccacactctgtgccctcacaggccccccggctggaacccctgcgtgaagaggacctggccaaggggcctgacttgcacatcctcatggcccagaggcaggtccaggtggcagaggaaggcctgcaggacttccaccgagccctgcgctgctatgtggacttcacaggggcccagagccattgtctgcatgtgtccgcccagaagatgctggacggtgcctccttcaccctgtatgagttctggcaggatgaggcctcctggagaaggcaccagcagtcgcctggcagcaaggccttccagcgcatcctcatcgaccacctgcgggccccggacaccctcaccactgtgttcttcccagcctcctggtggataatgaataacaactgagccagacctgcacacgccgagggccccgggaccctgcctgcctccctctggagccttctggactggccagcccagcgcaaagaccaggacttgtctcctcctggacttgggcctggtggaagggctctcagcccagggatcagggactgggctgcttgctttctatttattattgatttatttatccctgtattttattgtttgtcacttcagcctccaagctactttggcttctgcctggctcaggagacctggattctggtccctgctgtccctgcctggctgagcgacccagggcaggtcccgtccctgtctgggtgggcctcaggccatctggccgcctagcgagggtcctgctttcttcctgctgtcttgggaccaggcttctgctcctcctcagccagcggcagaagcagggctgatgctcagggaccccccaaccctcaaaccttgcctccgaggctgggcctgagctgggtgccccgtcgccctcccaggccactaggctctgactcttccagcacccatggatgtgccagaggcctctgggttggtttgcatgtcatttgcatatcgtttgcatgccctcatcccacccattctcagggcagtatgggaagccccaaggtgacctggccaagtagcaataatttgggtccagggtcacctattgcccccagaggcctctgaaccccaggctgggaccccagcacagaggcaataaaggcagtggtcccttcca

SEQ ID NO: 160266 - DNA, 1942 bp, Homo sapiens
  Payload ID: 11343
  Gene Symbol: NECAB3
  Gene Name: N-terminal EF-hand calcium binding protein 3
  Uniprot ID: Q96P71
  ENST ID: ENST00000375238
  CDS Start-End: 112-1200
gagcccgcgcgtcggcgccggcgccaaggggcggcctctagccacaccgagtccgccgcggcgtccagggtcggcagcaaccgcagccgagcccgagcgggtggcggcgccatggcgtgcgcggggctgctcaccgtgtgcctgctccggccgcccgcgccccagccccagccccagaccccgcggcacccccagctcgcgcccgacccggggcccgccggacacacgctcttccaggacgttttccgcagagcagacaagaatgatgatgggaagctctcatttgaggaattccagaattactttgccgatggggttctcagcctgggggagctgcaggaactgttcagcggcattgatgggcatctcaccgacaatttagaaacagaaaaactgtgtgactacttctcagagcacctgggtgtctaccggccggtgctggctgcattggaatcgctgaaccgtgcagtgctcgctgccatggatgccaccaagctggagtacgagagggcctccaaagtggaccagtttgtgacgcgcttcctgctgcgggagacggtgagccagctgcaagcccttcagagctcgctggagggggcgtcagataccctggaggcccaggcccatggctggcggtcagatgcagagagcgtggaggcgcagagcaggctctgcggcagccggcgggcaggacgccgagccctgaggagtgtcagccggtcatccacctggtcccccggctcttctgacacagggcgcagctcagaggccgagatgcagtggcggctccaggtgaaccgcctccaggagctcatcgaccagctcgagtgcaaggccccccggctggaacccctgcgtgaagaggacctggccaaggggcctgacttgcacatcctcatggcccagaggcaggtccaggtggcagaggaaggcctgcaggacttccaccgagccctgcgctgctatgtggacttcacaggggcccagagccattgtctgcatgtgtccgcccagaagatgctggacggtgcctccttcaccctgtatgagttctggcaggatgaggcctcctggagaaggcaccagcagtcgcctggcagcaaggccttccagcgcatcctcatcgaccacctgcgggccccggacaccctcaccactgtgttcttcccagcctcctggtggataatgaataacaactgagccagacctgcacacgccgagggccccgggaccctgcctgcctccctctggagccttctggactggccagcccagcgcaaagaccaggacttgtctcctcctggacttgggcctggtggaagggctctcagcccagggatcagggactgggctgcttgctttctatttattattgatttatttatccctgtattttattgtttgtcacttcagcctccaagctactttggcttctgcctggctcaggagacctggattctggtccctgctgtccctgcctggctgagcgacccagggcaggtcccgtccctgtctgggtgggcctcaggccatctggccgcctagcgagggtcctgctttcttcctgctgtcttgggaccaggcttctgctcctcctcagccagcggcagaagcagggctgatgctcagggaccccccaaccctcaaaccttgcctccgaggctgggcctgagctgggtgccccgtcgccctcccaggccactaggctctgactcttccagcacccatggatgtgccagaggcctctgggttggtttgcatgtcatttgcatatcgtttgcatgccctcatcccacccattctcagggcagtatgggaagccccaaggtgacctggccaagtagcaataatttgggtccagggtcacctattgcccccagaggcctctgaaccccaggctgggaccccagcacagaggcaataaaggcagtggtcccttcca

SEQ ID NO: 160267 - DNA, 925 bp, Homo sapiens
  Payload ID: 11343
  Gene Symbol: NECAB3
  Gene Name: N-terminal EF-hand calcium binding protein 3
  ENST ID: ENST00000439478
  CDS Start-End: 58-925
gccgcggcgtccagggtcggcagcaaccgcagccgagcccgagcgggtggcggcgccatggcgtgcgcggggctgctcaccgtgtgcctgctccggccgcccgcgccccagccccagccccagaccccgcggcacccccagctcgcgcccgacccggggcccgccggacacacgctcttccaggacgttttccgcagagcagacaagaatgatgatgggaagctctcatttgaggaattccagaattactttgccgatggggttctcagcctgggggagctgcaggaactgttcagcggcattgatgggcatctcaccgacaatttagaaacagaaaaactgtgtgactacttctcagagcacctgggtgtctaccggccggtgctggctgcattggaatcgctgaaccgtgcagtgctcgctgccatggatgccaccaagctggagtacgagagggcctccaaagtggaccagtttgtgacgcgcttcctgctgcgggagacggtgagccagctgcaagcccttcagagctcgctggagggggcgtcagataccctggaggcccaggcccatggctggcggtcagatgcagagagcgtggaggcgcagagcaggctctgcggcagccggcgggcaggacgccgagccctgaggagtgtcagccggtcatccacctggtcccccggctcttctgacacagggcgcagctcagaggccgagatgcagtggcggctccaggtgaaccgcctccaggagctcatcgaccagctcgagtgcaagcacatcctcatggcccagaggcaggtccaggtggcagaggaaggcctgcaggacttccaccgagccctgcgctgctatgtggacttcacaggggcccagagccattgtctgcatgtgtccgcccagaagatgctggacggtgcct

SEQ ID NO: 160268 - DNA, 1373 bp, Homo sapiens
  Payload ID: 11343
  Gene Symbol: NECAB3
  Gene Name: N-terminal EF-hand calcium binding protein 3
  ENST ID: ENST00000485399
  CDS Start-End: 38-616
cagcaaccgcagccgagcccgagcgggtggcggcgccatggcgtgcgcggggctgctcaccgtgtgcctgctccggccgcccgcgccccagccccagccccagaccccgcggcacccccagctcgcgcccgacccggggcccgccggacacacgctcttccaggacgttttccgcagagcagacaagaatgatgatgggaagctctcatttgaggaattccagaattactttgccgatggggttctcagcctgggggagctgcaggaactgttcagcggcattgatgggcatctcaccgacaatttagaaacagaaaaactgtgtgactacttctcagagcacctgggtgtctaccggccggtgctggctgcattggaatcgctgaaccgtgcagtgctcgctgccatggatgccaccaagctggagtacgagagggcctccaaagtggaccagtttgtgacgcgcttcctgctgcgggagacggtgagccagctgcaagcccttcagagctcgctggagggggcgtcagataccctggaggcccaggcccatggctggcggcttatcccgtcctggggccccagtcctcggccctgtgagcctcacttcctctaggtcagatgcagagagcgtggaggcgcagagcaggctctgcggcagccggcgggcaggacgccgagccctgaggagtgtcagccggtcatccacctggtcccccggctcttctgacacagggcgcagctcagaggccgagatgcagtggcggctccaggtgaaccgcctccaggagctcatcgaccagctcgagtgcaaggccccccggctggaacccctgcgtgaagaggacctggccaaggggcctgacttgcacatcctcatggcccagaggcaggtccaggtggcagaggaaggcctgcaggacttccaccgagccctgcgctgctatgtggacttcacaggggcccagagccattgtctgcatgtgtccgcccagaagatgctggacggtgcctccttcaccctgtatgagttctggcaggatgaggcctcctggagaaggcaccagcagtcgcctggcagcaaggccttccagcgcatcctcatcgaccacctgcgggccccggacaccctcaccactgtgttcttcccagcctcctggtggataatgaataacaactgagccagacctgcacacgccgagggccccgggaccctgcctgcctccctctggagccttctggactggccagcccagcgcaaagaccaggacttgtctcctcctggacttgggcctggtggaagggctctcagcccagggatcagggactgggctgcttgctttctatttattattgatttatttatccctgta

SEQ ID NO: 160269 - DNA, 900 bp, Homo sapiens
  Payload ID: 11343
  Gene Symbol: NECAB3
  Gene Name: N-terminal EF-hand calcium binding protein 3
  ENST ID: ENST00000606690
  CDS Start-End: 8-900
cggcgccatggcgtgcgcggggctgctcaccgtgtgcctgctccggccgcccgcgccccagccccagccccagaccccgcggcacccccagctcgcgcccgacccggggcccgccggacacacgctcttccaggacgttttccgcagagcagacaagaatgatgatgggaagctctcatttgaggaattccagaattactttgccgatggggttctcagcctgggggagctgcaggaactgttcagcggcattgatgggcatctcaccgacaatttagaaacagaaaaactgtgtgactacttctcagagcacctgggtgtctaccggccggtgctggctgcattggaatcgctgaaccgtgcagtgctcgctgccatggatgccaccaagctggagtacgagagggcctccaaagtggaccagtttgtgacgcgcttcctgctgcgggagacggtgagccagctgcaagcccttcagagctcgctggagggggcgtcagataccctggaggcccaggcccatggctggcggtcagatgcagagagcgtggaggcgcagagcaggctctgcggcagccggcgggcaggacgccgagccctgaggagtgtcagccggtcatccacctggtcccccggctcttctgacacagggcgcagctcagaggccgagatgcagtggcggctccaggtgaaccgcctccaggagctcatcgaccagctcgagtgcaagaggcaggtccaggtggcagaggaaggcctgcaggacttccaccgagccctgcgctgctatgtggacttcacaggggcccagagccattgtctgcatgtgtccgcccagaagatgctggacggtgcctccttcaccctgtatgagttctggcaggatgaggcctcctggag

SEQ ID NO: 160270 - DNA, 625 bp, Homo sapiens
  Payload ID: 11343
  Gene Symbol: NECAB3
  Gene Name: N-terminal EF-hand calcium binding protein 3
  ENST ID: ENST00000493590
  CDS Start-End: 15-230
cgggtggcggcgccatggcgtgcgcggggctgctcaccgtgtgcctgctccggccgcccgcgccccagccccagccccagaccccgcggcacccccagctcgcgcccgacccggggcccgccggacacacgctcttccaggacgttttccgcagagcagacaagaatgaattactttgccgatggggttctcagcctgggggagctgcaggaactgttcagcggcattgatgggcatctcaccgacaatttagaaacagaaaaactgtgtgactacttctcagagcacctgggtgtctaccggccggtgctggctgcattggaatcgctgaaccgtgcagtgctcgctgccatggatgccaccaagctggagtacgagagggcctccaaagtggaccagtttgtgacgcgcttcctgctgcgggagacggtgagccagctgcaagcccttcagagctcgctggagggggcgtcagataccctggaggcccaggcccatggctggcggtcagatgcagagagcgtggaggcgcagagcaggctctgcggcagccggcgggcaggacgccgagccctgaggagtgtcagccggtcatccacctggtcccccggctcttctgacacag

SEQ ID NO: 160271 - DNA, 732 bp, Homo sapiens
  Payload ID: 11343
  Gene Symbol: NECAB3
  Gene Name: N-terminal EF-hand calcium binding protein 3
  ENST ID: ENST00000480994
  CDS Start-End: 356-732
gagatggctaggactgatccttttagatcctaagaagcccccgggaggagcagaactttgagggcgaaggggccttgtggagtacgagagggcctccaaagtggaccagtttgtgacgcgcttcctgctgcgggagacggtgagccagctgcaagcccttcagagctcgctggagggggcgtcagataccctggaggcccaggcccatggctggcggtcagatgcagagagcgtggaggcgcagagcaggctctgcggcagccggcgggcaggacgccgagccctgaggagtgtcagccggtcatccacctggtcccccggctcttctgacacagggcgcagctcagaggccgagatgcagtggcggctccaggtgaaccgcctccaggagctcatcgaccagctcgagtgcaaggccccccggctggaacccctgcgtgaagaggacctggccaaggggcctgacttgcacatcctcatggcccagaggcaggtccaggtggcagaggaaggcctgcaggacttccaccgagccctgcgctgctatgtggacttcacaggggcccagagccattgtctgcatgtgtccgcccagaagatgctggacggtgcctccttcaccctgtatgagttctggcaggatgaggcctcctggagaaggcaccagcagtcgcctggcagcaaggccttccagcgcatcctcatcgaccacctgcgggccccggacaccct

SEQ ID NO: 160272 - DNA, 2142 bp, Homo sapiens
  Payload ID: 11343
  Gene Symbol: NECAB3
  Gene Name: N-terminal EF-hand calcium binding protein 3
  ENST ID: ENST00000488489
  CDS Start-End: 69-233
acaccgagtccgccgcggcgtccagggtcggcagcaaccgcagccgagcccgagcgggtggcggcgccatggcgtgcgcggggctgctcaccgtgtgcctgctccggccgcccgcgccccagccccagccccagaccccgcggcacccccagctcgcgcccgacccggggcccgccggacacacgctcttccaggacgttttccgcagagcagacaagaatgctctcatttgaggaattccagaattactttgccgatggggttctcagcctgggggagctgcaggaactgttcagcggcattgatgggcatctcaccgacaatttagaaacagaaaaactgtgtgactacttctcagagcacctgggtgtctaccggccggtgctggctgcattggaatcgctgaaccgtgcagtgctcgctgccatggatgccaccaagctggagtacgagagggcctccaaagtggaccagtttgtgacgcgcttcctgctgcgggagacggtgagccagctgcaagcccttcagagctcgctggagggggcgtcagataccctggaggcccaggcccatggctggcggtatgtaagggtgctgtcaacctgtggggctagtgcacaagcgcccattgtacccccattccaaatccccacagtcccagcatcctggagcctgcattttcgggcggggaagccatggcagggtagccatggcggggtgaaatgagactggctttggggctaggcctcggagtcccaggaggcttgtcttccccacccaggcttatcccgtcctggggccccagtcctcggccctgtgagcctcacttcctctaggtcagatgcagagagcgtggaggcgcagagcaggctctgcggcagccggcgggcaggacgccgagccctgaggagtgtcagccggtcatccacctggtcccccggctcttctgacacagggcgcagctcagaggccgagatgcagtggcggctccaggtgaaccgcctccaggagctcatcgaccagctcgagtgcaaggccccccggctggaacccctgcgtgaagaggacctggccaaggggcctgacttgcacatcctcatggcccagaggcaggtccaggtggcagaggaaggcctgcaggacttccaccgagccctgcgctgctatgtggacttcacaggggcccagagccattgtctgcatgtgtccgcccagaagatgctggacggtgcctccttcaccctgtatgagttctggcaggatgaggcctcctggagaaggcaccagcagtcgcctggcagcaaggccttccagcgcatcctcatcgaccacctgcgggccccggacaccctcaccactgtgttcttcccagcctcctggtggataatgaataacaactgagccagacctgcacacgccgagggccccgggaccctgcctgcctccctctggagccttctggactggccagcccagcgcaaagaccaggacttgtctcctcctggacttgggcctggtggaagggctctcagcccagggatcagggactgggctgcttgctttctatttattattgatttatttatccctgtattttattgtttgtcacttcagcctccaagctactttggcttctgcctggctcaggagacctggattctggtccctgctgtccctgcctggctgagcgacccagggcaggtcccgtccctgtctgggtgggcctcaggccatctggccgcctagcgagggtcctgctttcttcctgctgtcttgggaccaggcttctgctcctcctcagccagcggcagaagcagggctgatgctcagggaccccccaaccctcaaaccttgcctccgaggctgggcctgagctgggtgccccgtcgccctcccaggccactaggctctgactcttccagcacccatggatgtgccagaggcctctgggttggtttgcatgtcatttgcatatcgtttgcatgccctcatcccacccattctcagggcagtatgggaagccccaaggtgacctggccaagtagcaataatttgggtccagggtcacctattgcccccagaggcctctgaaccccaggctgggaccccagcacagaggcaataaaggcagtggtcccttcc

SEQ ID NO: 160273 - DNA, 969 bp, Homo sapiens
  Payload ID: 11343
  Gene Symbol: NECAB3
  Gene Name: N-terminal EF-hand calcium binding protein 3
  ENST ID: ENST00000607805
  CDS Start-End: 57-689
ccgcggcgtccagggtcggcagcaaccgcagccgagcccgagcgggtggcggcgccatggcgtgcgcggggctgctcaccgtgtgcctgctccggccgcccgcgccccagccccagccccagaccccgcggcacccccagctcgcgcccgacccggggcccgccggacacacgctcttccaggacgttttccgcagagcagacaagaatgatgatgggaagctctcatttgaggaattccagaattactttgccgatggggttctcagcctgggggagctgcaggaactgttcagcggcattgatgggcatctcaccgacaatttagaaacagaaaaactgtgtgactacttctcagagcacctgggtgtctaccggccggtgctggctgcattggaatcgctgaaccgtgcagtgctcgctgccatggatgccaccaagctggagtacgagagggcctccaaagtggaccagtttgtgacgcgcttcctgctgcgggagacggtgagccagctgcaagcccttcagagctcgctggagggggcgtcagataccctggaggcccaggcccatggctggcgatgcagagagcgtggaggcgcagagcaggctctgcggcagccggcgggcaggacgccgagccctgaggagtgtcagccggtcatccacctggtcccccggctcttctgacacagggcgcagctcagaggccgagatgcagtggcggctccaggtgaaccgcctccaggagctcatcgaccagctcgagtgcaaggccccccggctggaacccctgcgtgaagaggacctggccaaggggcctgacttgcacatcctcatggcccagaggcaggtccaggtggcagaggaaggcctgcaggacttccaccgagccctgcgctgctatgtggacttcacaggggcccagagccattgtctgcatgtgtccgcccagaagatgctggacggt

SEQ ID NO: 160274 - DNA, 438 bp, Homo sapiens
  Payload ID: 11343
  Gene Symbol: NECAB3
  Gene Name: N-terminal EF-hand calcium binding protein 3
  ENST ID: ENST00000473892
  CDS Start-End: 1-287
tccagaattactttgccgatggggttctcagcctgggggagctgcaggaactgttcagcggcattgatgggcatctcaccgacaatttagaaacagaaaaactgtgtgactacttctcagagcacctgggtgtctaccggccggtgctggctgcattggaatcgctgaaccgtgcagtgctcgctgccatggatgccaccaagctggtgagtggagtggctgatggtgggggatccactgtgaggcagtgggcatctgctgtgctgtgggatcctccacagtcttgactcagggttatagagctaggggcttgggttcaaatcctggctcccactttgtagctgtgccccttgacctctctgggcctgtttcctcatctgtaaaccatcataacaatagagctgcccttcatacatcactgtgaccagtgagaacgaa

SEQ ID NO: 160275 - DNA, 852 bp, Homo sapiens
  Payload ID: 11344
  Gene Symbol: NTMT1
  Gene Name: N-terminal Xaa-Pro-Lys N-methyltransferase 1
  Uniprot ID: Q9BV86
  ENST ID: ENST00000372480
  CDS Start-End: 153-824
cgcgtccccaagaggtctacgggccggacctgggcagggactacggagcagtccatgggtcggggtacaggaggaaagtcaaggcactcaaagcccaggagagtcgcggttgctgatcgtggtgcttgagtagagccgtggttggtgacagcatgacgagcgaggtgatagaagacgagaagcaattctattccaaggccaagacctactggaaacaaatcccacccacggtggacggcatgcttggggggtatggccacatctccagcatcgacatcaacagctcccggaagtttctgcagaggtttttgagggaaggcccgaacaagacaggaacgtcctgtgccctggactgtggagctggcattgggaggatcaccaagcggctgctcctgccgctgttcagagaggtggatatggtcgacataacggaggacttcctggttcaagccaagacctacctgggggaggagggcaagagggtgaggaactacttctgttgtgggctccaggacttcaccccggagccggactcttacgacgtgatctggatccagtgggtgataggccacctcaccgatcagcacctggccgagttcctgcggcgctgcaagggcagcctccgccccaacggcatcatcgtcatcaaagacaacatggcccaggagggcgtgattctggacgacgtggacagcagcgtgtgccgggaccttgacgtggtccgcaggatcatctgcagtgcaggcctcagcctcctggccgaggagaggcaggagaacctccccgatgagatctaccatgtctatagctttgccctgagatgagccggggctggcaggagaaactgaggaa

SEQ ID NO: 160276 - DNA, 741 bp, Homo sapiens
  Payload ID: 11344
  Gene Symbol: NTMT1
  Gene Name: N-terminal Xaa-Pro-Lys N-methyltransferase 1
  Uniprot ID: Q9BV86
  ENST ID: ENST00000372481
  CDS Start-End: 146-583
agctgcggttggcttgtggcgtctccgccgccgccgccctcccttcctcttccccatcttcttctctcggtcccgggagcccccgcccggagagagtcgcggttgctgatcgtggtgcttgagtagagccgtggttggtgacagcatgacgagcgaggtgatagaagacgagaagcaattctattccaaggccaagacctactggaaacaaatcccacccacggtggacggcatgcttggggggtatggccacatctccagcatcgacatcaacagctcccggaagtttctgcagaggtttttgagggaaggcccgaacaagacaggaacgtcctgtgccctggactgtggagctggcattgggaggatcaccaagcggctgctcctgccgctgttcagagaggtggatatggtcgacataacggaggacttcctggttcaagccaagacctacctgggggaggagggcaagagggccacctcaccgatcagcacctggccgagttcctgcggcgctgcaagggcagcctccgccccaacggcatcatcgtcatcaaagacaacatggcccaggagggcgtgattctggacgacgtggacagcagcgtgtgccgggaccttgacgtggtccgcaggatcatctgcagtgcaggcctcagcctcctggccgaggagaggcaggagaacctccccgatgagatctaccatgtctatagctttgccctgagatgagccggggct

SEQ ID NO: 160277 - DNA, 1315 bp, Homo sapiens
  Payload ID: 11344
  Gene Symbol: NTMT1
  Gene Name: N-terminal Xaa-Pro-Lys N-methyltransferase 1
  Uniprot ID: Q9BV86
  ENST ID: ENST00000372483
  CDS Start-End: 178-849
gcgagctgtcgcgtctggtcgtggtctggcggagctgcggttggcttgtggcgtctccgccgccgccgccctcccttcctcttccccatcttcttctctcggtcccgggagcccccgcccggagagagtcgcggttgctgatcgtggtgcttgagtagagccgtggttggtgacagcatgacgagcgaggtgatagaagacgagaagcaattctattccaaggccaagacctactggaaacaaatcccacccacggtggacggcatgcttggggggtatggccacatctccagcatcgacatcaacagctcccggaagtttctgcagaggtttttgagggaaggcccgaacaagacaggaacgtcctgtgccctggactgtggagctggcattgggaggatcaccaagcggctgctcctgccgctgttcagagaggtggatatggtcgacataacggaggacttcctggttcaagccaagacctacctgggggaggagggcaagagggtgaggaactacttctgttgtgggctccaggacttcaccccggagccggactcttacgacgtgatctggatccagtgggtgataggccacctcaccgatcagcacctggccgagttcctgcggcgctgcaagggcagcctccgccccaacggcatcatcgtcatcaaagacaacatggcccaggagggcgtgattctggacgacgtggacagcagcgtgtgccgggaccttgacgtggtccgcaggatcatctgcagtgcaggcctcagcctcctggccgaggagaggcaggagaacctccccgatgagatctaccatgtctatagctttgccctgagatgagccggggctggcaggagaaactgaggaaccacagtcctggtggggggagctggcagctgggcaagatccaggcgccacgctggcggttcgtgagtgtcgaggcaccactaaatatagctgtctgccgtccactcattatgcgggctcttcttcaaaaggcaaggtgggacccggcggggagggtgctgctgaaccagcggtgaggcaggagcccagaccctgctctcctgcgagatgggattgggtggaaggggctccagggctcctggtgctccccatgtgggaatagggtggccacatcagtaaccgattccctgggcctccagcccggccttccagccatgggcctggctgcctgaagaggaaggaaaccacccccaacttggttgctggggacttgaagacttcagtgtgatctttacctaggggagggacagagctgggctggtggagcccatgggtgctg

SEQ ID NO: 160278 - DNA, 1487 bp, Homo sapiens
  Payload ID: 11344
  Gene Symbol: NTMT1
  Gene Name: N-terminal Xaa-Pro-Lys N-methyltransferase 1
  Uniprot ID: Q9BV86
  ENST ID: ENST00000372486
  CDS Start-End: 350-1021
gctccgaggtgccccatgtgcggcaggaagaagcagcctccacaggactgcgctcagcgggagacggggcttccccgtgaagaggtgctgagtgcgaatgcccactccaacacctggtcactgtgtgatcttgagaaagagttgagcctctctgggccctggcttccccaacaaccaaaggctgtacagagagcggcttaggagagagctcctgtgtgcgccgccgagggctctgctggctcaggacatctgtaggaccagttccagctccagtgggcaccgccagcacgcccaggagagtcgcggttgctgatcgtggtgcttgagtagagccgtggttggtgacagcatgacgagcgaggtgatagaagacgagaagcaattctattccaaggccaagacctactggaaacaaatcccacccacggtggacggcatgcttggggggtatggccacatctccagcatcgacatcaacagctcccggaagtttctgcagaggtttttgagggaaggcccgaacaagacaggaacgtcctgtgccctggactgtggagctggcattgggaggatcaccaagcggctgctcctgccgctgttcagagaggtggatatggtcgacataacggaggacttcctggttcaagccaagacctacctgggggaggagggcaagagggtgaggaactacttctgttgtgggctccaggacttcaccccggagccggactcttacgacgtgatctggatccagtgggtgataggccacctcaccgatcagcacctggccgagttcctgcggcgctgcaagggcagcctccgccccaacggcatcatcgtcatcaaagacaacatggcccaggagggcgtgattctggacgacgtggacagcagcgtgtgccgggaccttgacgtggtccgcaggatcatctgcagtgcaggcctcagcctcctggccgaggagaggcaggagaacctccccgatgagatctaccatgtctatagctttgccctgagatgagccggggctggcaggagaaactgaggaaccacagtcctggtggggggagctggcagctgggcaagatccaggcgccacgctggcggttcgtgagtgtcgaggcaccactaaatatagctgtctgccgtccactcattatgcgggctcttcttcaaaaggcaaggtgggacccggcggggagggtgctgctgaaccagcggtgaggcaggagcccagaccctgctctcctgcgagatgggattgggtggaaggggctccagggctcctggtgctccccatgtgggaatagggtggccacatcagtaaccgattccctgggcctccagcccggccttccagccatgggcctggctgcctgaagaggaaggaaaccacccccaacttggttgctggggacttgaagacttcagtgtgatctttacctaggggagggacagagctgggctggtggagcccatgggtgctg

SEQ ID NO: 160279 - DNA, 1072 bp, Homo sapiens
  Payload ID: 11344
  Gene Symbol: NTMT1
  Gene Name: N-terminal Xaa-Pro-Lys N-methyltransferase 1
  ENST ID: ENST00000482347
  CDS Start-End: 199-606
ggcggagctgcggttggcttgtggcgtctccgccgccgccgccctcccttcctcttccccatcttcttctctcggtcccgggagcccccgcccggagaaggcccgaacaagacaggaacgtcctgtgccctggactgtggagctggcattgggaggatcaccaagcggctgctcctgccgctgttcagagaggtggatatggtcgacataacggaggacttcctggttcaagccaagacctacctgggggaggagggcaagagggtgaggaactacttctgttgtgggctccaggacttcaccccggagccggactcttacgacgtgatctggatccagtgggtgataggccacctcaccgatcagcacctggccgagttcctgcggcgctgcaagggcagcctccgccccaacggcatcatcgtcatcaaagacaacatggcccaggagggcgtgattctggacgacgtggacagcagcgtgtgccgggaccttgacgtggtccgcaggatcatctgcagtgcaggcctcagcctcctggccgaggagaggcaggagaacctccccgatgagatctaccatgtctatagctttgccctgagatgagccggggctggcaggagaaactgaggaaccacagtcctggtggggggagctggcagctgggcaagatccaggcgccacgctggcggttcgtgagtgtcgaggcaccactaaatatagctgtctgccgtccactcattatgcgggctcttcttcaaaaggcaaggtgggacccggcggggagggtgctgctgaaccagcggtgaggcaggagcccagaccctgctctcctgcgagatgggattgggtggaaggggctccagggctcctggtgctccccatgtgggaatagggtggccacatcagtaaccgattccctgggcctccagcccggccttccagccatgggcctggctgcctgaagaggaaggaaaccacccccaacttggttgctggggacttgaagacttcagtgtgatctttacctaggggagggacagagctgggctggtggagcccatgggtgctg

SEQ ID NO: 160280 - DNA, 576 bp, Homo sapiens
  Payload ID: 11344
  Gene Symbol: NTMT1
  Gene Name: N-terminal Xaa-Pro-Lys N-methyltransferase 1
  ENST ID: ENST00000481189
  CDS Start-End: 176-388
gagctgtcgcgtctggtcgtggtctggcggagctgcggttggcttgtggcgtctccgccgccgccgccctcccttcctcttccccatcttcttctctcggtcccgggagcccccgcccggagagagtcgcggttgctgatcgtggtgcttgagtagagccgtggttggtgacagcatgacgagcgaggtgatagaagacgagaagcaattctattccaaggccaagacctactggaaacaaatcccacccacggtggacggcatgcttggggggaaggcccgaacaagacaggaacgtcctgtgccctggactgtggagctggcattgggaggatcaccaagcggctgctcctgccgctgttcagagaggtggatatggtcgacataacggaggacttcctggttcaagccaagacctacctgggggaggagggcaagagggtgaggaactacttctgttgtgggctccaggacttcaccccggagccggactcttacgacgtgatctggatccagtgggtgataggccacctcaccgatcagcacctggccgagttcctgcggcgctgcaagggc

SEQ ID NO: 160281 - DNA, 1123 bp, Homo sapiens
  Payload ID: 11344
  Gene Symbol: NTMT1
  Gene Name: N-terminal Xaa-Pro-Lys N-methyltransferase 1
  ENST ID: ENST00000459968
  CDS Start-End: 151-480
ggcggagctgcggttggcttgtggcgtctccgccgccgccgccctcccttcctcttccccatcttcttctctcggtcccgggagcccccgcccggagagagtcgcggttgctgatcgtggtgcttgagtagagccgtggttggtgacagcatgacgagcgaggtgatagaagacgagaagcaattctattccaaggccaagacctactggaaacaaatcccacccacggtggacggcatgcttggggggtatggccacatctccagcatcgacatcaacagctcccggaagtttctgcagaggtttttgagggtaggcaggtctggcgtgctctccaggagaggctgtggctctggtggcactgccgagtccatgtggggtgccaccttttacacatgtaacactgcaggattgttggctatctcttggtacctaccccaaagccttgaggagctgggctgggtgggcacagtggggtaacttctagattgtggacttagcctcagggttaccagacaggagctggctgttaggcagaattgaggtgcctgaattgggcaaacctctcttcaactgttgggttttgccagggacgaaacccttgctctcctgccatgtccacgggtgtttggactgagggtgttggctattctggacgaagactcctagttatgtgccatggtttccaccctctgctccacccccagccttttctgtaccaggctgggacccccagtcctggagccccccaccttcttgtctcatggctggcactggaggctgctgttggccacctgctccatccagcgcctcccctccctccatgttccctctctgcacccttgttcacctgttgccccgcttccattctccccattcctctctgccgttgtttacctggagactcaggagagattagtgcacctgttcaagttatcacctttaagtggaaattagctttcatttagaaatgtgtggcccagggcaggggcagtggctcactcctgtcatcccagccccttgggatgccaaggtgagaggattgcttgagcccaggagtttgagaccagcctgggcaacagaccgaggccccgtctctacaaaaaatacaaaaaaaaaaaaa

SEQ ID NO: 160282 - DNA, 1501 bp, Homo sapiens
  Payload ID: 11344
  Gene Symbol: NTMT1
  Gene Name: N-terminal Xaa-Pro-Lys N-methyltransferase 1
  Uniprot ID: Q9BV86
  ENST ID: ENST00000613644
  CDS Start-End: 163-834
ggccctggctgcctgggcgccgattcccgggacgcgccggccgacagcaggggaggcggcagcagggaccgcagcagcccccgcttccgcacggcccgccgggtcgcggagagtcgcggttgctgatcgtggtgcttgagtagagccgtggttggtgacagcatgacgagcgaggtgatagaagacgagaagcaattctattccaaggccaagacctactggaaacaaatcccacccacggtggacggcatgcttggggggtatggccacatctccagcatcgacatcaacagctcccggaagtttctgcagaggtttttgagggaaggcccgaacaagacaggaacgtcctgtgccctggactgtggagctggcattgggaggatcaccaagcggctgctcctgccgctgttcagagaggtggatatggtcgacataacggaggacttcctggttcaagccaagacctacctgggggaggagggcaagagggtgaggaactacttctgttgtgggctccaggacttcaccccggagccggactcttacgacgtgatctggatccagtgggtgataggccacctcaccgatcagcacctggccgagttcctgcggcgctgcaagggcagcctccgccccaacggcatcatcgtcatcaaagacaacatggcccaggagggcgtgattctggacgacgtggacagcagcgtgtgccgggaccttgacgtggtccgcaggatcatctgcagtgcaggcctcagcctcctggccgaggagaggcaggagaacctccccgatgagatctaccatgtctatagctttgccctgagatgagccggggctggcaggagaaactgaggaaccacagtcctggtggggggagctggcagctgggcaagatccaggcgccacgctggcggttcgtgagtgtcgaggcaccactaaatatagctgtctgccgtccactcattatgcgggctcttcttcaaaaggcaaggtgggacccggcggggagggtgctgctgaaccagcggtgaggcaggagcccagaccctgctctcctgcgagatgggattgggtggaaggggctccagggctcctggtgctccccatgtgggaatagggtggccacatcagtaaccgattccctgggcctccagcccggccttccagccatgggcctggctgcctgaagaggaaggaaaccacccccaacttggttgctggggacttgaagacttcagtgtgatctttacctaggggagggacagagctgggctggtggagcccatgggtgctgcctgatggtgctgtggggtgggtgctcatgtgccaagtcctgcttggcagtggagacctggggcccttaaagtgttacaacagcctgcagcaagggaagttccccgtagcctcagtcttctctgggcttgaggctgctccttggcaggcatttaaagtaaaaaataaaatggggctgggcgcggtggctcacgcctgtaat

SEQ ID NO: 160283 - DNA, 1562 bp, Homo sapiens
  Payload ID: 11344
  Gene Symbol: NTMT1
  Gene Name: N-terminal Xaa-Pro-Lys N-methyltransferase 1
  Uniprot ID: Q9BV86
  ENST ID: ENST00000611055
  CDS Start-End: 224-895
ggacaaaggcagcgcgcgccgcgagctgtcgcgtctggtcgtggtctggcggagctgcggttggcttgtggcgtctccgccgccgccgccctcccttcctcttccccatcttcttctctcggtcccgggagcccccgcccggagtgagtagcgcgaggcggtgcgaagggagagtcgcggttgctgatcgtggtgcttgagtagagccgtggttggtgacagcatgacgagcgaggtgatagaagacgagaagcaattctattccaaggccaagacctactggaaacaaatcccacccacggtggacggcatgcttggggggtatggccacatctccagcatcgacatcaacagctcccggaagtttctgcagaggtttttgagggaaggcccgaacaagacaggaacgtcctgtgccctggactgtggagctggcattgggaggatcaccaagcggctgctcctgccgctgttcagagaggtggatatggtcgacataacggaggacttcctggttcaagccaagacctacctgggggaggagggcaagagggtgaggaactacttctgttgtgggctccaggacttcaccccggagccggactcttacgacgtgatctggatccagtgggtgataggccacctcaccgatcagcacctggccgagttcctgcggcgctgcaagggcagcctccgccccaacggcatcatcgtcatcaaagacaacatggcccaggagggcgtgattctggacgacgtggacagcagcgtgtgccgggaccttgacgtggtccgcaggatcatctgcagtgcaggcctcagcctcctggccgaggagaggcaggagaacctccccgatgagatctaccatgtctatagctttgccctgagatgagccggggctggcaggagaaactgaggaaccacagtcctggtggggggagctggcagctgggcaagatccaggcgccacgctggcggttcgtgagtgtcgaggcaccactaaatatagctgtctgccgtccactcattatgcgggctcttcttcaaaaggcaaggtgggacccggcggggagggtgctgctgaaccagcggtgaggcaggagcccagaccctgctctcctgcgagatgggattgggtggaaggggctccagggctcctggtgctccccatgtgggaatagggtggccacatcagtaaccgattccctgggcctccagcccggccttccagccatgggcctggctgcctgaagaggaaggaaaccacccccaacttggttgctggggacttgaagacttcagtgtgatctttacctaggggagggacagagctgggctggtggagcccatgggtgctgcctgatggtgctgtggggtgggtgctcatgtgccaagtcctgcttggcagtggagacctggggcccttaaagtgttacaacagcctgcagcaagggaagttccccgtagcctcagtcttctctgggcttgaggctgctccttggcaggcatttaaagtaaaaaataaaatggggctgggcgcggtggctcacgcctgtaat

SEQ ID NO: 160284 - DNA, 1346 bp, Homo sapiens
  Payload ID: 11344
  Gene Symbol: NTMT1
  Gene Name: N-terminal Xaa-Pro-Lys N-methyltransferase 1
  ENST ID: ENST00000617943
  CDS Start-End: 272-679
ggacaaaggcagcgcgcgccgcgagctgtcgcgtctggtcgtggtctggcggagctgcggttggcttgtggcgtctccgccgccgccgccctcccttcctcttccccatcttcttctctcggtcccgggagcccccgcccggagtgagtagcgcgaggcggtgcgaagggaaggcccgaacaagacaggaacgtcctgtgccctggactgtggagctggcattgggaggatcaccaagcggctgctcctgccgctgttcagagaggtggatatggtcgacataacggaggacttcctggttcaagccaagacctacctgggggaggagggcaagagggtgaggaactacttctgttgtgggctccaggacttcaccccggagccggactcttacgacgtgatctggatccagtgggtgataggccacctcaccgatcagcacctggccgagttcctgcggcgctgcaagggcagcctccgccccaacggcatcatcgtcatcaaagacaacatggcccaggagggcgtgattctggacgacgtggacagcagcgtgtgccgggaccttgacgtggtccgcaggatcatctgcagtgcaggcctcagcctcctggccgaggagaggcaggagaacctccccgatgagatctaccatgtctatagctttgccctgagatgagccggggctggcaggagaaactgaggaaccacagtcctggtggggggagctggcagctgggcaagatccaggcgccacgctggcggttcgtgagtgtcgaggcaccactaaatatagctgtctgccgtccactcattatgcgggctcttcttcaaaaggcaaggtgggacccggcggggagggtgctgctgaaccagcggtgaggcaggagcccagaccctgctctcctgcgagatgggattgggtggaaggggctccagggctcctggtgctccccatgtgggaatagggtggccacatcagtaaccgattccctgggcctccagcccggccttccagccatgggcctggctgcctgaagaggaaggaaaccacccccaacttggttgctggggacttgaagacttcagtgtgatctttacctaggggagggacagagctgggctggtggagcccatgggtgctgcctgatggtgctgtggggtgggtgctcatgtgccaagtcctgcttggcagtggagacctggggcccttaaagtgttacaacagcctgcagcaagggaagttccccgtagcctcagtcttctctgggcttgaggctgctccttggcaggcatttaaagtaaaaaataaaatggggctgggcgcggtggctcacgcctgtaat

SEQ ID NO: 160285 - DNA, 1067 bp, Homo sapiens
  Payload ID: 11345
  Gene Symbol: NTHL1
  Gene Name: nth-like DNA glycosylase 1
  Uniprot ID: P78549
  ENST ID: ENST00000219066
  CDS Start-End: 20-958
ggccgcatgggccgccgggatgtgtagtccgcaggagtccggcatgaccgccttgagcgcgaggatgctgacccggagccggagcctgggacccggggctgggccgcgggggtgtagggaggagcccgggcctctccggagaagagaggctgcagcagaagcgaggaaaagccacagccccgtgaagcgtccgcggaaagcacagagactgcgtgtggcctatgagggctcggacagtgagaaaggtgagggggctgagcccctcaaggtgccagtctgggagccccaggactggcagcaacagctggtcaacatccgtgccatgaggaacaaaaaggatgcacctgtggaccatctggggactgagcactgctatgactccagtgcccccccaaaggtacgcaggtaccaggtgctgctgtcactgatgctctccagccaaaccaaagaccaggtgacggcgggcgccatgcagcgactgcgggcgcggggcctgacggtggacagcatcctgcagacagatgatgccacgctgggcaagctcatctaccccgtcggtttctggaggagcaaggtgaaatacatcaagcagaccagcgccatcctgcagcagcactacggtggggacatcccagcctctgtggccgagctggtggcgctgccgggtgttgggcccaagatggcacacctggctatggctgtggcctggggcactgtgtcaggcattgcagtggacacgcatgtgcacagaatcgccaacaggctgaggtggaccaagaaggcaaccaagtccccagaggagacccgcgccgccctggaggagtggctgcctagggagctgtggcacgagatcaatggactcttggtgggcttcggccagcagacctgtctgcctgtgcaccctcgctgccacgcctgcctcaaccaagccctctgcccggccgcccagggtctctgatggccgcatggctctggccgaggtgccgctgtggccaccgtctgtgaagtggctttacgcttcaggaagccacgcctgttgaataaagctttggtgtgtttgcagatgg

SEQ ID NO: 160286 - DNA, 814 bp, Homo sapiens
  Payload ID: 11345
  Gene Symbol: NTHL1
  Gene Name: nth-like DNA glycosylase 1
  ENST ID: ENST00000566380
  CDS Start-End: 1-710
ggagcctgggacccggggctgggccgcgggggtgtagggaggagcccgggcctctccggagaagagaggctgcagcagaagcgaggaaaagccacagccccgtgaagcgtccgcggaaagcacagagactgcgtgtggcctatgagggctcggacagtgagaaaggtgagggggctgagcccctcaaggtgccagtctgggagccccaggactggcagcaacagctggtcaacatccgtgccatgaggaacaaaaaggatgcacctgtggaccatctggggactgagcactgctatgactccagtgcccccccaaagagcaaggtgaaatacatcaagcagaccagcgccatcctgcagcagcactacggtggggacatcccagcctctgtggccgagctggtggcgctgccgggtgttgggcccaagatggcacacctggctatggctgtggcctggggcactgtgtcaggcattgcagcagtggacacgcatgtgcacagaatcgccaacaggctgaggtggaccaagaaggcaaccaagtccccagaggagacccgcgccgccctggaggagtggctgcctagggagctgtggcacgagatcaatggactcttggtgggcttcggccagcagacctgtctgcctgtgcaccctcgctgccacgcctgcctcaaccaagccctctgcccggccgcccagggtctctgatggccgcatggctctggccgaggtgccgctgtggccaccgtctgtgaagtggctttacgcttcaggaagccacgcctgttgaataaagctttggtgtgtttgca

SEQ ID NO: 160287 - DNA, 1052 bp, Homo sapiens
  Payload ID: 11345
  Gene Symbol: NTHL1
  Gene Name: nth-like DNA glycosylase 1
  ENST ID: ENST00000561841
  CDS Start-End: 1-655
gcccgggcctctccggagaagagaggctgcagcagaagcgaggaaaagccacagccccgtgaagcgtccgcggaaagcacagagactgcgtgtggcctatgagggctcggacagtgagaaaggtgagggggctgagcccctcaaggtgccagtctgggagccccaggactggcagcaacagctggtcaacatccgtgccatgaggaacaaaaaggatgcacctgtggaccatctggggactgagcactgctatgactccagtgcccccccaaaggtacgcaggtaccaggtgctgctgtcactgatgctctccagccaaaccaaagaccaggtgacggcgggcgccatgcagcgactgcgggcgcggggcctgacggtggacagcatcctgcagacagatgatgccacgctgggcaagctcatctaccccgtcggtttctggaggagcaaggtgaaatacatcaagcagaccagcgccatcctgcagcagcactacggtggggacatcccagcctctgtggccgagctggtggcgctgccgggtgttgggcccaagatggcacacctggctatggctgtggcctggggcactgtgtcaggcattggtgtctgtgggcctgaccacctgcaaggagaccccagggctgcctcctaggggttccccgaaagagaaacgctctcagttaaaatgtcagagctggctgggtacaagggctcaagcctgtaatcccagcactttggaaggccgagcagtggacacgcatgtgcacagaatcgccaacaggctgaggtggaccaagaaggcaaccaagtccccagaggagacccgcgccgccctggaggagtggctgcctagggagctgtggcacgagatcaatggactcttggtgggcttcggccagcagacctgtctgcctgtgcaccctcgctgccacgcctgcctcaaccaagccctctgcccggccgcccagggtctctgatggccgcatggctctggccgaggtgccgctgtggccaccgtctgtgaagtggctttacgcttcaggaagcca

SEQ ID NO: 160288 - DNA, 837 bp, Homo sapiens
  Payload ID: 11345
  Gene Symbol: NTHL1
  Gene Name: nth-like DNA glycosylase 1
  ENST ID: ENST00000568513
  CDS Start-End: 1-301
ccggagccggagcctgggacccggggctgggccgcgggggtgtagggaggagcccgggcctctccggagaagagaggctgcagcagaagcgaggaaaagccacagccccgtgaagcgtccgcggaaagcacagagactgcgtgtggcctatgagggctcggacagtgagaaaggtacgcaggtaccaggtgctgctgtcactgatgctctccagccaaaccaaagaccaggtgacggcgggcgccatgcagcgactgcgggcgcggggcctgacggtggacagcatcctgcagacagatgatgccacgctgggcaagctcatctaccccgtcggtttctggaggagcaaggtgaaatacatcaagcagaccagcgccatcctgcagcagcactacggtggggacatcccagcctctgtggccgagctggtggcgctgccgggtgttgggcccaagatggcacacctggctatggctgtggcctggggcactgtgtcaggcattgcagtggacacgcatgtgcacagaatcgccaacaggctgaggtggaccaagaaggcaaccaagtccccagaggagacccgcgccgccctggaggagtggctgcctagggagctgtggcacgagatcaatggactcttggtgggcttcggccagcagacctgtctgcctgtgcaccctcgctgccacgcctgcctcaaccaagccctctgcccggccgcccagggtctctgatggccgcatggctctggccgaggtgccgctgtggccaccgtctgtgaagtggctttacgcttcaggaagccacgcctgttgaataaagctttggtgtgtttgc

SEQ ID NO: 160289 - DNA, 4687 bp, Homo sapiens
  Payload ID: 11346
  Gene Symbol: NKPD1
  Gene Name: NTPase, KAP family P-loop domain containing 1
  ENST ID: ENST00000317951
  CDS Start-End: 1-2499
atgcacaaacattacaaagtccacttcgccaaggatgcccagagccccaacgggcactacttctgggacccagagttggggcaccgaaaaggatgctgtcatcagtggcgccaggactcagcggccctccgagcccatgggccctgtcggccttccccccaatcacactggcagctggcctaccacagccaccaagtgggtggcagtggctggcgccggggcctcctgccctccgtcctgcagcagcagcggcagccccagtcccagccctcacctcccagccccctgcggcagcggctctgccccattcacgaagcccagaaggggctgcctgcaacctccactgtccccaaggaacctgccagcgcccctcaggcgcccaccttacccaccacggcaccagccatggccaggagtggcccagctctaccctccgcggctggcgtcctcctgaagcccagcgagcccactgatgcccggcccctgcccgccccagcggcctgtggctccttcactgcctacagctccgacatcctgacagaggatgacgtctactgcagctgcctggccaagacactctgccacgtgccggtccctgtgaccgtgggtttctatgcccctttcggctgccgcctgcacatgatgctggacaagatcacggcgctgatgcagcaggaggccgcgcagcgcgagagcgaggagctgcagcacgtgcagtggcggccgcgtgccgtgagcggctggggcgtcccgcagctactgtggtacctggtgttcctgcagcccatcatcaccgaggtgcacctgcggcgcaggaacgtgcagttccttttcatccgctttagcgcctggcagtacgcgggcaccgacaagctgtgggccggcctggtgaccacgttgtgcgagggcatccgccgccactatggcgcactgcccttcagcgtgtactcggtgctgggcaacaagccggccaccaggcaggactgctgccagagcgagtggcattgtcggcgccgcgtgtgcctggggctgctggcgctgctggcggcgctgggcctgggtgtggggctgctctacttgtcactgggcggccacgcgctgggccacggcagcccgagcggcagcctgctcaaggtgtttggcggcgcggccaccacactgtcgggctcggggctgctcatggccgtgtactcggtgggcaagcacctgttcgtaagccagcgcaagaagatcgagcggctggtgtcgcgtgaaaagttcggcagccagctgggtttcatgtgcgaggtgaagaaggaggtggagctgctcaccgacttcctgtgcttcctggagatctaccagcggcgcaggctgcgcgtggtgctggaggtcaccgggctggacacgtgctacccggagcgcgtggtgggcgtgctcaacgccatcaacacgctgctgtccgacagccacgcgcccttcatcttcatcctggtcgtggaccccagcatcctggccgcgtgcctagagagcgcgggcaacatgaagggcacggccgataacggctacctcttcctcaaccgcactgtcacgctgcccttctctgtgcccattatgggccgccgcaccaagctgcagttcctgcacgatgcggtgcagagccgcgacgacctgttgtaccgcgagatgacgcgcaagccgtggctgccgggggacgccgggggcgagagcgcgcagctgctggcggtgcaggcgcaggcggggacggagcgcgggcagggccgcatcgacgacgaggcggcgcggcgaatccaggaggcgctcttctgccttcacgacgagcgcgactgcctctacgagtacgtgcccgacaacgtggtgtccatgcggcgcatcgtcaacaccgtgcccatcaccgtgcgcctgctgcagcagcagcagcagcagggggactttgggggccccacgccgcgccaggcggtggcgtgggtggtgctcgccaaccagtggccgtgccgcctgagctgggcgctgcagtgcctggaggaccggcagcagaccgggggcgcgcccgagggccgcgcgcgcctctgggacgttttccgcgacaacagccgcgagctgcacaccatgaccaaggcgttgcagaacgtgctcgacctggacggcgaccccgagctcttcgagcgcttcctgggcgccgacttccccttcaccgtggccgaggcgcagagcctgctgcgctgcacggtcaacctggaccactccatccgccggcgcatgggtctcatccgagccgtcagcgcgctcaagccgcccagcccgcccaagtcccctacccgcgataccccccacgctgcccaccgggccaacagcgcctccagggcgcccccgtcgggccgtgcctcagggcaagccggcgaaggccaccacactggggacttggcccacaggggcaagctatggccggtggcctgtgcgctcttccgtccagggcaatccagcccaggtgggccttaaatggaggacttggcgggcagcaggaggcaagggttcctccatctgcccagatgggagaatagggggctggactggggccgcaacccagggtccgaatgagccctgtgaggcccacacccccaggtgaacctgagccagagccgtggacatagcttccaaggagtgcggccacaagccggtgccagcatgagagcaggcacagaaggaccagtgaggaagtcagggtatacatgcaataaatggaggtgttgagagcccggagttgctctccgcatcctgatctgaccagggaccaggcctgccccgtcctgccacagggcctgccccatcctgctaagcccacttactcctctgcaccatgctggcctcctcatctggcatctctgtggcaggagaggctgcgggggtggtgggtgaggctgcagagatgacaggtggatgggccaggttgactcaggcaacatggagcgcccaggcctcagggaatcccagtccttgtccccatgccctagcttgcccctctgtgagtagggcaggggctggcatttctgaggatgacctcggtgacctcagcaagctgctccacccctagggtggctccattctcaacgtaatgggttagacctcgctggcacctcagccagctggagtgggtggcactaacctcccccagacaaataactgtccacagggtacctgccttacgagtcactccagggccactggttagtcactgacactgaagccactgcatcagccccctgatgaggacagggaagttgggcagagatggggacatacagggcccaagccacagccagccaggaggggttacactagggctcccccactttccctctgggcagagccctgggctgggggtgggtgtcactcctctgggcagttcctgattcctcactggtcaaatgttcagccacacgctcaggccctggggtgcctggcccagttccaagtgtgtgccggcaggggccacaagggccaacactgaacataccctgggatgaggctgagggtgtggcttctgagccagggccctgaggctggtggaggggacagcccccgaggaacctgagagctctgcaaaggcacacaccctcaggccatgggactgggtcactgacctcacagttctttagttccaaggctgggcatagcatccaggtctggctgcagcaccggagttctctggccacagcaattgtcacaggtgcatgcaggtcagtgggagccctctatgatcttccctggggctgggcaagcagaggtgctgtttcccattcctggactgactaagctggtaggatacgcctggacctcctgggagctgtttcccagcagtcagggagagctggcctcagagggagaaggatggggcctcgtgacaccgttaagtctgtttctgtagatgtgtggttggggtcaatatatccctgtagcctcccttaagccagtttcagttgggtttgtttcttaccacctggaatccaagctgaaaataaattttcactcctgttaccaggagtggggtgctgtgagagatgctaacgtgtagacttggctggaggtgagggcaggactgaagccccccatgcctcagtaagaagctgcatcagcctggccaacatggtgaagccctgtctctaataaaaatacaaaaagattagctgggcatggtggtgcatgcctgtaatcccagctactcaggaggctgaggtgggaggatcacttgaacccgggaggtggtggctggagccaagatggtgccactgcactccagcctgggcgacagagcaagactccgactgattaaaaaaaaaagccgcagcctctgttacgtggtacaagctgtggccaaactgttggtcactgtatcttcacgtggagctgctatgagaacttgcacctgtgtaaagccacgggaccgttgtcacgaacaaaaaaggagcacggctgacctgtgcgcctttcccagcaatgagtcagggagcaggtttcccttctccactcccttcccccatctgcccacttgatccgggatccttgaggccctggggagcaacagagccctaagagcttcaaaggggcctgggtccaggaataacttggtgaagagctgcctgccactctgaacatccacatgtgacaataaacatctcctgtgttagga

SEQ ID NO: 160290 - DNA, 2080 bp, Homo sapiens
  Payload ID: 11346
  Gene Symbol: NKPD1
  Gene Name: NTPase, KAP family P-loop domain containing 1
  Uniprot ID: Q17RQ9
  ENST ID: ENST00000438936
  CDS Start-End: 213-2045
agcccagcgagcccactgatgcccggcccctgcccgccccagcggcctgtggctccttcactgcctacagctccgacatcctgacagaggatgacgtctactgcagctgcctggccaagacactctgccacgtgccggtccctgtgaccgtgggtttctatgcccctttcggctgccgcctgcacatgatgctggacaagatcacggcgctgatgcagcaggaggccgcgcagcgcgagagcgaggagctgcagcacgtgcagtggcggccgcgtgccgtgagcggctggggcgtcccgcagctactgtggtacctggtgttcctgcagcccatcatcaccgaggtgcacctgcggcgcaggaacgtgcagttccttttcatccgctttagcgcctggcagtacgcgggcaccgacaagctgtgggccggcctggtgaccacgttgtgcgagggcatccgccgccactatggcgcactgcccttcagcgtgtactcggtgctgggcaacaagccggccaccaggcaggactgctgccagagcgagtggcattgtcggcgccgcgtgtgcctggggctgctggcgctgctggcggcgctgggcctgggtgtggggctgctctacttgtcactgggcggccacgcgctgggccacggcagcccgagcggcagcctgctcaaggtgtttggcggcgcggccaccacactgtcgggctcggggctgctcatggccgtgtactcggtgggcaagcacctgttcgtaagccagcgcaagaagatcgagcggctggtgtcgcgtgaaaagttcggcagccagctgggtttcatgtgcgaggtgaagaaggaggtggagctgctcaccgacttcctgtgcttcctggagatctaccagcggcgcaggctgcgcgtggtgctggaggtcaccgggctggacacgtgctacccggagcgcgtggtgggcgtgctcaacgccatcaacacgctgctgtccgacagccacgcgcccttcatcttcatcctggtcgtggaccccagcatcctggccgcgtgcctagagagcgcgggcaacatgaagggcacggccgataacggctacctcttcctcaaccgcactgtcacgctgcccttctctgtgcccattatgggccgccgcaccaagctgcagttcctgcacgatgcggtgcagagccgcgacgacctgttgtaccgcgagatgacgcgcaagccgtggctgccgggggacgccgggggcgagagcgcgcagctgctggcggtgcaggcgcaggcggggacggagcgcgggcagggccgcatcgacgacgaggcggcgcggcgaatccaggaggcgctcttctgccttcacgacgagcgcgactgcctctacgagtacgtgcccgacaacgtggtgtccatgcggcgcatcgtcaacaccgtgcccatcaccgtgcgcctgctgcagcagcagcagcagcagggggactttgggggccccacgccgcgccaggcggtggcgtgggtggtgctcgccaaccagtggccgtgccgcctgagctgggcgctgcagtgcctggaggaccggcagcagaccgggggcgcgcccgagggccgcgcgcgcctctgggacgttttccgcgacaacagccgcgagctgcacaccatgaccaaggcgttgcagaacgtgctcgacctggacggcgaccccgagctcttcgagcgcttcctgggcgccgacttccccttcaccgtggccgaggcgcagagcctgctgcgctgcacggtcaacctggaccactccatccgccggcgcatgggtctcatccgagccgtcagcgcgctcaagccgcccagcccgcccaagtcccctacccgcgataccccccacgctgcccaccgggccaacagcgcctccagggcgcccccgtcgggccgtgcctcagggcaagccggcgaaggccaccacactggggacttggcccacaggggcaagctatggccggtggcctgtgcgctcttccgtccagggcaatccagcccaggtgggccttaaatggaggacttggcgggcagcaggaggcaagggtt

SEQ ID NO: 160291 - DNA, 1950 bp, Homo sapiens
  Payload ID: 11346
  Gene Symbol: NKPD1
  Gene Name: NTPase, KAP family P-loop domain containing 1
  Uniprot ID: Q17RQ9
  ENST ID: ENST00000589776
  CDS Start-End: 83-1915
tccgccctgcccgtactaggccccgcccaccccggcgggtctgcggctcacgcggctcccgggctcccttcccgcagcgctgatgcagcaggaggccgcgcagcgcgagagcgaggagctgcagcacgtgcagtggcggccgcgtgccgtgagcggctggggcgtcccgcagctactgtggtacctggtgttcctgcagcccatcatcaccgaggtgcacctgcggcgcaggaacgtgcagttccttttcatccgctttagcgcctggcagtacgcgggcaccgacaagctgtgggccggcctggtgaccacgttgtgcgagggcatccgccgccactatggcgcactgcccttcagcgtgtactcggtgctgggcaacaagccggccaccaggcaggactgctgccagagcgagtggcattgtcggcgccgcgtgtgcctggggctgctggcgctgctggcggcgctgggcctgggtgtggggctgctctacttgtcactgggcggccacgcgctgggccacggcagcccgagcggcagcctgctcaaggtgtttggcggcgcggccaccacactgtcgggctcggggctgctcatggccgtgtactcggtgggcaagcacctgttcgtaagccagcgcaagaagatcgagcggctggtgtcgcgtgaaaagttcggcagccagctgggtttcatgtgcgaggtgaagaaggaggtggagctgctcaccgacttcctgtgcttcctggagatctaccagcggcgcaggctgcgcgtggtgctggaggtcaccgggctggacacgtgctacccggagcgcgtggtgggcgtgctcaacgccatcaacacgctgctgtccgacagccacgcgcccttcatcttcatcctggtcgtggaccccagcatcctggccgcgtgcctagagagcgcgggcaacatgaagggcacggccgataacggctacctcttcctcaaccgcactgtcacgctgcccttctctgtgcccattatgggccgccgcaccaagctgcagttcctgcacgatgcggtgcagagccgcgacgacctgttgtaccgcgagatgacgcgcaagccgtggctgccgggggacgccgggggcgagagcgcgcagctgctggcggtgcaggcgcaggcggggacggagcgcgggcagggccgcatcgacgacgaggcggcgcggcgaatccaggaggcgctcttctgccttcacgacgagcgcgactgcctctacgagtacgtgcccgacaacgtggtgtccatgcggcgcatcgtcaacaccgtgcccatcaccgtgcgcctgctgcagcagcagcagcagcagggggactttgggggccccacgccgcgccaggcggtggcgtgggtggtgctcgccaaccagtggccgtgccgcctgagctgggcgctgcagtgcctggaggaccggcagcagaccgggggcgcgcccgagggccgcgcgcgcctctgggacgttttccgcgacaacagccgcgagctgcacaccatgaccaaggcgttgcagaacgtgctcgacctggacggcgaccccgagctcttcgagcgcttcctgggcgccgacttccccttcaccgtggccgaggcgcagagcctgctgcgctgcacggtcaacctggaccactccatccgccggcgcatgggtctcatccgagccgtcagcgcgctcaagccgcccagcccgcccaagtcccctacccgcgataccccccacgctgcccaccgggccaacagcgcctccagggcgcccccgtcgggccgtgcctcagggcaagccggcgaaggccaccacactggggacttggcccacaggggcaagctatggccggtggcctgtgcgctcttccgtccagggcaatccagcccaggtgggccttaaatggaggacttggcgggcagcaggaggcaagggtt

SEQ ID NO: 160292 - DNA, 6828 bp, Homo sapiens
  Payload ID: 11347
  Gene Symbol: NUAK1
  Gene Name: NUAK family, SNF1-like kinase, 1
  Uniprot ID: O60285
  ENST ID: ENST00000261402
  CDS Start-End: 1381-3366
aatctcccaaggcctaaggaggcaagaggcctgcaaatcgcctcctgctcagcaaacgggttgctcagcaggcccggggtcctggtccaccccaggtccctggtttgcccacctccgatggcggccttcgctggcagggtgggcgcctctggggagccagctccgtcccggcgcctttagagccccatctcttccacgtccctggccttcctccccttccaggcggctgtccccgccggggtccagatggtgtcggagggccggcggttcgacggcgggcccggggttcagcctcccggcctccctccgtccctgactctcctttcttcggagagggcgcgggggccggggccaaagcgccgctcttggggttctcctggactcggagttgccccaggcgggcgcagctctgccccgcggggtgccagcctcgggcgggcaaggtccgtgagtcaccgcctgtaaccgaacaccaggcctccctgccccctcccccagctccggccgccaggctgcggcgacacctacaagaaaatgaaggggcgcccaggcccgcggcggccccggccgtatcgcgagcaggtcccggcggcccccggctcgcggcgctctttcttccccggccccggggctcggccagccgcaaccgccgccccggcgccagcaggaatccaggccgagcgaccggccccggagcccgaggcggcggagggcccgcggtagctgcgactggcgagcccgagagcgcccggggagggggcgcccggcttggaatttcccggtcccttccggcccagcgaggacaaagcactcctggccgccgccgccgccgccgccgtggcctacgccgcgccgcacaaagggcgagtcgcgacacgctcccatccccctcccagctcacggcggccccggccccgggtggctgcagggaggtgggggaagccctggctgcaccgcccctcgctccccctcccctggggccgcgcgagcgccgcccccgccccgtctgcgcgtcctcccggggaggggttggggggcgcggcgccccacataacactccccctcctgcgctgcgagccaccctctcccctccctcctgcaaacaccaccgcctcccctgccaccgccgccacctcgcccgacgctccacagctcgccgcggccggggggcggtgcgcggaccgtgcgcgccgcgggcgccagatgtgcagtccccgccgccgccagtgaccgagccgcagtccgagcggtatcgggccgcctccctgatgctgcgggggcgaccttgagcgtacagcggcttccctcggtggggaccccgacatcccagcgctgtgcccggtcttgccctctgtagcccggctcgccccgcgcttggacatggaaggggccgccgcgcctgtggcgggggaccgccccgacttggggctgggggcgccgggctctccccgagaggcggtggcgggggcgactgcagccctggagcccaggaagccgcacggggtgaagcggcatcaccacaagcacaacttgaagcaccgctacgagctgcaggagaccctgggcaaaggcacctacggcaaagtcaagcgggccaccgagaggttttctggccgagtggttgctataaaatccattcgtaaggacaaaattaaggatgaacaagacatggttcacatcagacgagagattgagatcatgtcatctctcaaccatcctcatatcatcagtatttatgaagtgtttgagaacaaagataagattgtgatcatcatggaatatgccagcaaaggggagctgtacgattacatcagtgagcggcgacgcctcagtgagagggagacccggcacttcttccggcagatcgtctctgctgtgcactattgtcacaagaacggtgtggtccaccgggacttgaagctggaaaatatactgctcgatgacaactgcaatattaagattgctgactttgggctttccaacctgtaccagaaggataagttcttacaaacgttttgtgggagtccactctatgcatctcctgagattgtcaatgggagaccttaccgagggccagaggtggacagctgggccctgggtgtgttgctttacactcttgtttatggaacaatgcccttcgatggtttcgatcacaaaaacctcattcggcaaatcagcagcggagagtaccgggagccaacacagccctcagatgctcgaggactcatacggtggatgctgatggtgaaccccgatcgccgggccactattgaggacattgccaaccactggtgggtgaactggggctataagagcagcgtgtgtgactgtgatgccctccatgactctgagtccccactcctggctcggatcattgactggcaccaccgttccacagggctgcaggctgacaccgaagccaaaatgaagggcctggccaaacccacgacctctgaggtcatgctagagcggcagcggtcgctgaagaaatccaagaaagagaatgactttgctcagtctggtcaggatgcagtgcctgaaagcccatccaagttgagttctaagaggcccaaggggatcctgaagaagcgaagcaacagcgagcatcgctctcacagcactggcttcattgaaggtgtagttggtcctgccttaccctctactttcaagatggagcaggacttgtgcaggactggcgtgctcctcccaagctcaccagaggcagaggtgccgggaaaactcagccccaagcagtcggccacgatgcccaagaaaggcatcttgaaaaagacccagcagagagaatcaggttactactcttccccagagcgcagtgagtcttcggagctgttggacagtaatgatgtgatgggcagcagcatcccctcccccagccccccggacccagccagggtaacctcccacagcctctcctgccggaggaagggcatcttgaaacacagcagcaaatactcagcgggcaccatggacccagccctggtcagccctgaaatgcccacactggaatccctgtcagagcctggtgtccctgccgagggcctctcccggagctacagccgcccttccagtgtcatcagcgatgacagcgtgctgtccagcgactcttttgacttgctggatttgcaggagaatcgccctgcccgccagcgcatccgcagctgcgtctctgcagaaaacttcctccagatccaggactttgaggggctccagaaccggccccggccccagtacctgaagcggtaccggaaccggctggcagacagcagcttctccctcctcacagacatggatgatgtgactcaggtctacaagcaagcgctggagatctgcagcaagctcaactagcattccagggcgcccaggggcgggcgggggtacgagggaggaaggggagcaagacttgggctcacaggctggttacctctttgctggctgtgacaacagactgaaaaaggattggcactgtctcacttggccaagtttgcagccttgagccaacacctaaaagggagaggtgggctcttctgccagttctgtcaattgtcagtcagaatttgggccctgtttggcatttgctttatggcacctcctagaggaccagctgtccaggggaggtggtattgaccggcactcagtgggtggagaggaagcatatgtggaaggagcatttccttagaagtcatccagatgcttctggaggaggggcaggagacacttgggctgtttgccttgggtgagcccaaagaacttgccccttttctccttgtattagcaagctaggtctggctgcgtggagctggcaagtagatttcagcaacttgagcttgagttgacgatcaattaatagtggctgccagttgtgctggcgtaagtggcccacatcatggggaaggagtgctgtgattgactagtaatggctaccacgggaaagggaaggggaagcagtagcactaatgctatgtagttgtcatctttgatctggctaggccctgggaatcgggtttagtcatcctgtgggatctatgttaactctttcatgccactggtgaggcatttgttaatttgctactcaactttgaggaaagacagggccttggtcagagagagaatgctctgaactctgctaaggacatagagtcagcccatggtgatttagctccttgctgttcacctcctctttcctgatgtctgccttgctctacagcacaacctcttgagggtggacagggagaaagatgatggtgtcagaggtcaaaactattatatatgacagggcacaagatggtctgtgatctttgcacagatgaatggaagttgatgcacaccaacaagaggcaacttgtcactttctttctcaatattaactggaatgctgcctcttgggttctcacctgcatggatgctttgagttggacgtgatactgtccatattctccagaggattacctggctgaaccattggctctgttcaccagtgacagatggtttccccatccactgagtgtagcatcctcagaggtaggcaagtttgcttctagggagttagcatgtagatgggatattgggatgaggaaaggaaaatcaggtagatggtgctttttttcccccaaatctaagtattctatgtcatggttttaaactttgccatgaactcctgggctttgggggaagagaaagttccattcatttaaatgaataaggtgttgaaagagtgcagggggttgggaggaagcatgtaagagagggaacatttccttagatgttacccagatggttctgggggagacagaaaagaggtgcggcaggactcttatcttaaaaagtaaacaaaacaaaacaaaacaaaacaaaaaactagatatgtaatttctaaacacccagatcacaatgacaagatgccactccaaccatgggacaccttcatgatactaggtttgtacttcctggtctctgggatgacttcagattctgctggccaaggcaaattgaactcagttcaagatggccaccactggtagacgtgtagatagaaaagaggactggtcttgggaacatctttggaaaaaccaacaaacaatagttctagggagatgagaaaaaaattcaccttacagtgctaagaaagtgcattagaatggaattgccctttccttaaggagacagtttgggctctccccttgccaccggctctggtgttttggcttatgcgttccttcaggttgagctgagcagtgtgttatgggaagctgctcaatttcctttcattcaattccacctccttcctgaactctaatagaggttaaaagggaaaaaaaaaattctgtagatagcaaattgtgtgtgtgggggggggtgggggtgtgggtgcatggaggacaacctgcaactctgagctccctacttcctgcctcatttcatgcagtcttttctgaacagcctatgctgctgccctgctggccccttgtgcacggcagctggccgtgtccgtagctgtcagtatgacttagatctagctcctacctactggttgatgtgttttttccttttgccaagtgattgagtctgtttagtagtttccatcattctagtctttaagtaaaaatgacactattgaggaaagtcagtctactcccttcttcctccccccaaacacgtgttctcttttgtcaggaaactcagccagtggactgtggcagagaaagtcctccactcagaggcagagactgagttaagtcataggtggccttaggcatctgcattgtttgcaggggttaagttttccttccagtgagggctggagggatgaattagctggtacctgaagccccgcttagctctgacactctgccaacatcctctgattctaggtgtggtgttgactgtcctttcaaggaaaaacttgcaatagagggaaaagccattaaagcagctccctgcttcatcattaagtcctgtcatccctaccagccaatcccagtcaaagaagttatgctttattcacttctgtggaattacaagtgagagacacttttaggacctgatggacaaagcaggagattcactgtcagctttcctggtcctctccttacttctgtgggccttgcaccgtcttagtttacacatctgccaaaggggtagaattacacttctttttacaggtaaatgtcaaggcacaatcagttttcaggaagtgcttcaagaccccaggtgaaatgaaaatgctaagtaccctctgaatggccatgcctgttaccaggtgctgcttcttcagatgatggggagcacttttcagggtgaaattcaggcgagttttgcccaggcctgctgtcttgagtacaaatgtgaatgatcgactgactgcttgttgccaaactggaaatgttctgtagggatttactggcatggtatcattcctagaagaaaaaaagagagaaacttgactgcacattaaaaaaaaaaaaaaatccacattgtgacttttatttaatttctattttttttggtaataaaaagttgacttttttatttgaatttgtcttttttatttattggtctgaaaggcatttcaaaggtattataataatatattggtgtaatttaattggtgcaacatgctttatggctcctgtcaaaattggttttcactcatttgattggtttgagcccagaacagcctacaggggaaaaacaagctggataaccacccaaagtgtttgtattttcgttggaaactgatttttgtttcattttggtttttgtttctgtttttatttttaaattaaataaattgcaatgaactgaaccaga

SEQ ID NO: 160293 - DNA, 547 bp, Homo sapiens
  Payload ID: 11347
  Gene Symbol: NUAK1
  Gene Name: NUAK family, SNF1-like kinase, 1
  ENST ID: ENST00000553094
  CDS Start-End: 194-547
aatctgtcagacatttccctttgctcaccctcctccttcctctttctctcttgttctcatcccagccgctcccattcaattccctctttgtcttctcatttcagaacggtgtggtccaccgggacttgaagctggaaaatatactgctcgatgacaactgcaatattaagatgctcgaggactcatacggtggatgctgatggtgaaccccgatcgccgggccactattgaggacattgccaaccactggtgggtgaactggggctataagagcagcgtgtgtgactgtgatgccctccatgactctgagtccccactcctggctcggatcattgactggcaccaccgttccacagggctgcaggctgacaccgaagccaaaatgaagggcctggccaaacccacgacctctgaggtcatgctagagcggcagcggtcgctgaagaaatccaagaaagagaatgactttgctcagtctggtcaggatgcagtgcctgaaagcccatccaagttgagttctaagaggcccaaggggatcctgaagaag

SEQ ID NO: 160294 - DNA, 560 bp, Homo sapiens
  Payload ID: 11347
  Gene Symbol: NUAK1
  Gene Name: NUAK family, SNF1-like kinase, 1
  ENST ID: ENST00000548902
  CDS Start-End: 104-560
gcattctctgtagcataagtgagcttgttggctaaacggggtgtttgtgtattgctgttttccctctgcagtgtttgagaacaaagataagattgtgatcatcatggaatatgccagcaaaggggagctgtacgattacatcagtgagcggcgacgcctcagtgagagggagacccggcacttcttccggcagatcgtctctgctgtgcactattgtcacaagaacggtgtggtccaccgggacttgaagctggaaaatatactgctcgatgacaactgcaatattaagattgctgactttgggctttccaacctgtaccagaaggataagttcttacaaacgttttgtgggagtccactctatgcatctcctgagattgtcaatgggagaccttaccgagggccagaggtggacagctgggccctgggtgtgttgctttacactcttgtttatggaacaatgcccttcgatggtttcgatcacaaaaacctcattcggcaaatcagcagcggagagtaccgggagccaacacagccctcagatgctcgaggactcatac

SEQ ID NO: 160295 - DNA, 569 bp, Homo sapiens
  Payload ID: 11347
  Gene Symbol: NUAK1
  Gene Name: NUAK family, SNF1-like kinase, 1
  ENST ID: ENST00000549704
  CDS Start-End: 347-569
tctttaatctgtcagacatttccctttgctcaccctcctccttcctctttctctcttgttctcatcccagccgctcccattcaattccctctttgtcttctcatttcagaacggtgtggtccaccgggacttgaagctggaaaatatactgctcgatgacaactgcaatattaagattgctgactttgggctttccaacctgtaccagaaggataagttcttacaaacgttttgtgggagtccactctatgcatctcctgagattgtcaatgggagaccttaccgagggccagaggtggacagctgggccctgggtgtgttgctttacactcttgtttatggaacaatgcccttcgatggtttcgatcacaaaaacctcattcggcaaatcagcagcggagagtaccgggagccaacacagccctcagatgctcgaggactcatacggtggatgctgatggtgaaccccgatcgccgggccactattgaggacattgccaaccactggtgggtgaactggggctataagagcagcgtgtgtgactgtgatgccctccatgactctgagt

SEQ ID NO: 160296 - DNA, 3441 bp, Homo sapiens
  Payload ID: 11348
  Gene Symbol: NUAK2
  Gene Name: NUAK family, SNF1-like kinase, 2
  Uniprot ID: Q9H093
  ENST ID: ENST00000367157
  CDS Start-End: 32-2050
ctcgggctcagggcgtttataacaacttggaatgctgtgctttactgcgcgctctggtactgctgtggctccccgtcctggtgcgggacctgtgccccgcgcttcagccctccccgcacagcctactgattcccctgccgcccttgctcacctcctgctcgccatggagtcgctggttttcgcgcggcgctccggccccactccctcggccgcagagctagcccggccgctggcggaagggctgatcaagtcgcccaagcccctaatgaagaagcaggcggtgaagcggcaccaccacaagcacaacctgcggcaccgctacgagttcctggagaccctgggcaaaggcacctacgggaaggtgaagaaggcgcgggagagctcggggcgcctggtggccatcaagtcaatccggaaggacaaaatcaaagatgagcaagatctgatgcacatacggagggagattgagatcatgtcatcactcaaccaccctcacatcattgccatccatgaagtgtttgagaacagcagcaagatcgtgatcgtcatggagtatgccagccggggcgacctttatgactacatcagcgagcggcagcagctcagtgagcgcgaagctaggcatttcttccggcagatcgtctctgccgtgcactattgccatcagaacagagttgtccaccgagatctcaagctggagaacatcctcttggatgccaatgggaatatcaagattgctgacttcggtctctccaacctctaccatcaaggcaagttcctgcagacattctgtgggagccccctctatgcctcgccagagattgtcaatgggaagccctacacaggcccagaggtggacagctggtccctgggtgttctcctctacatcctggtgcatggcaccatgccctttgatgggcatgaccataagatcctagtgaaacagatcagcaacggggcctaccgggagccacctaaaccctctgatgcctgtggcctgatccggtggctgttgatggtgaaccccacccgccgggccaccctggaggatgtggccagtcactggtgggtcaactggggctacgccacccgagtgggagagcaggaggctccgcatgagggtgggcaccctggcagtgactctgcccgcgcctccatggctgactggctccggcgttcctcccgccccctcctggagaatggggccaaggtgtgcagcttcttcaagcagcatgcacctggtgggggaagcaccacccctggcctggagcgccagcattcgctcaagaagtcccgcaaggagaatgacatggcccagtctctccacagtgacacggctgatgacactgcccatcgccctggcaagagcaacctcaagctgccaaagggcattctcaagaagaaggtgtcagcctctgcagaaggggtacaggaggaccctccggagctcagcccaatccctgcgagcccagggcaggctgcccccctgctccccaagaagggcattctcaagaagccccgacagcgcgagtctggctactactcctctcccgagcccagtgaatctggggagctcttggacgcaggcgacgtgtttgtgagtggggatcccaaggagcagaagcctccgcaagcttcagggctgctcctccatcgcaaaggcatcctcaaactcaatggcaagttctcccagacagccttggagctcgcggcccccaccaccttcggctccctggatgaactcgccccacctcgccccctggcccgggccagccgaccctcaggggctgtgagcgaggacagcatcctgtcctctgagtcctttgaccagctggacttgcctgaacggctcccagagcccccactgcggggctgtgtgtctgtggacaacctcacggggcttgaggagcccccctcagagggccctggaagctgcctgaggcgctggcggcaggatcctttgggggacagctgcttttccctgacagactgccaggaggtgacagcgacctaccgacaggcactgagggtctgctcaaagctcacctgagtggagtaggcattgccccagcccggtcaggctctcagatgcagctggttgcaccccgaggggagatgccttctcccccacctcccaggacctgcatcccagctcagaaggctgagagggtttgcagtggagccctgagcagggctggatatgggaagtaggcaaatgaaatgcgccaagggttcagtgtctgtcttcagccctgctgaacgaagaggatactaaagagaggggaacgggaatgcccgcgacagagtccacattgcctgtttcttgtgtacatgggggggccacagagacctggaaagagaactctcccagggcccatctcctgcatcccatgaatactctgtacacatggtgccttctaaggacagctccttccctactcattccctgcccaagtggggccagacctctttacacacacattcccgttcctaccaaccaccagaactggatggtggcacccctaatgtgcatgaggcatcctgggaatggtctggagtaacgcttcgttatttttatttttatttttatttatttatttatttttttgagacggagtttcgctcttggtgcccaggctagagtgcaatggcgcgatctcagctcacctcaacctccgcctcccgggttcaagcgattctcctgcctcagcctccctagtagctgggattacaggcgcccgccaccatgcccggctaattttgtatttttagtagagacagggtttctccatgttggtcaggctggtctcaaactcccgacctcaggtgatccacccacctcggcctcccaaagtgctgggattacaggcgtgagccaccgcgccccacctaacccttccttatttagcctaggagtaagagaacacaatctctgtttcttcaatggttctcttcccttttccatcctccaaacctggcctgagcctcctgaagttgctgctgtgaatctgaaagacttgaaaagcctccgcctgctgtgtggacttcatctcaaggggcccagcctcctctggactccaccttggacctcagtgactcagaacttctgcctctaagctgctctaaagtccagactatggatgtgttctctaggccttcaggactctagaatgtccatatttatttttatgttcttggctttgtgttttaggaaaagtgaatcttgctgttttcaataatgtgaatgctatgttctgggaaaatccactatgacatctaagttttgtgtacagagagatatttttgcaactatttccacctcctcccacaaccccccacactccactccacactcttgagtctctttacctaatggtctctacctaatggacctccgtggccaaaaagtaccattaaaaccagaaaggtgattggaagcag

SEQ ID NO: 160297 - DNA, 3399 bp, Homo sapiens
  Payload ID: 11349
  Gene Symbol: NAIF1
  Gene Name: nuclear apoptosis inducing factor 1
  Uniprot ID: Q69YI7
  ENST ID: ENST00000373078
  CDS Start-End: 221-1204
cattacgctgctggctggcagcggccgggccggtcggggctgggccctacgcactttgcgtagcgaggggggttaccaaaggcctagtgcttggcctcgagcaagcctggcctatcccctgtagggggtgggtgaggggcgaggctgaggaagaagagaaggggaattggggcgcttgaggggattataatttctttaaaaagaggggaggggagaggccatggccgtcccagccaagaaaaggaagatgaacttctcagagcgggaggtggagatcatcgtggaggagctggagctgaagaagcacctgctggtgaaccacttcaacgccggggtacccctggccgccaagagtgcggcctggcacggcatcctgagaagggtcaacgccgtggccacctgccgcagagagctgcctgaggtcaagaagaagtggtctgacctcaagaccgaggtccgtcgcaaggttgcccaggtccgggccgccgtggagggtggtgaggcgccggggcccactgaggaggacggagctggggggcctgggacaggcggtggcagtggtggcggtggcccagctgtagccccagtgctgctgacccccatgcaacaacgtatctgcaacctgctgggcgaggccaccatcatcagcctgcccagcaccacagagatccaccctgtggccctcggaccctcggccaccgcagccgcagccacggtcaccctgacacagatccccacagagaccacctatcacacgctggaggagggcgtggtggagtactgcacggctgaggcgcccccacctctgccaccagagacccctgtggacatgatggcccagcatgcagacacgtcggtcaagccgcaagcgctcaagagccgcattgctctcaactccgccaagctgatacaggagcagcgggtcaccaacctgcatgtgaaggagatcgcacagcacctggaacagcagaacgacctactgcagatgatccgccgctcccaggaagtgcaggcctgtgcccaggagcgccaggcccaggccatggagggcacacaggctgccctgagcgtcctcatccaggtcctccggcctatgatcaaagatttccgccgctacctgcagagcaacacagctaacccggcccccgcctctgaccctgggcaggtggcccagaatgggcagccagacagcatcatccagtgagggcaggggtcaggccagccttctgccatgatgggatgaaaactccatggacttgtaagtgggtcctgtgattggccttggccttagaccggccacgtgcacagctccctctttaataaacgcttaggggttgcactgtttttgagaagaggaatttgttgggctcctgggacccaaactcatactccccctacttgagctgccttgctaagatccagaagattggttagcagggggtcacgtgtgcatgtgatgggacatgtgttgtcatgaccccgggcttgtgacatgacccagccttggtcttggacaactgtaaggaacaacacaacgggctgtcactgggggccgtcacccagcctgggtctctactgagctgcccaaccccaggtgccatcctttcgagtagggtaatgtcactgatgctggcagttgagcaataatatcttcctcctttgggaggtagtgtgactgaggaggaaaccccacccttttctcctcactgtgcctcagttctcaggggactccaatgactgttgtgctctcccccgaccccaccccaggcacagcgcaggcccttgttaggtagtgtgctgggacgcctccgtaatacatgcagtgtgcagccagtctggctcaggaatgctgtgtatggtggggacggtttggccactctctggttttcaacagcatctctgggcagccctttggtggtttgtccctagagcttttgactcaggtcaagctttggatgctgtaaatttttgagaaagccaactagtgtggaagcttgctgccccactgcagtgggtctgagtgacctgttggctttgtgcggaggcttgcatccagccagttgtatttattctgtgtgtgaacccctcctaggaaggcctccaggaaggctgccctgtggccacacccatcctcctttcctctctgctgactccacatttccaaaattcagtgcaaaaaaagccctgctgagcatcacatgctggactcttcccctgccacaccgctcagtgccttctgttctcttgagactccctctgagtagctgagtgaatccaaagccataattgaccctgaacgtaggaggaggaaaaggcgaagctgacctaagaagtgggaccctggccgggcgaggtggctcaagtctgtaatcccagcgctttgggaggccgaggcgggtggatcacgaggtcaagagatcaagaccatcctggccaacatgatgaaaccccgtctctactaaaaacacaaaaattagctgggcgtggtggcacacgcctgtagtcccagctacccgggaggctgaggcaggagaatcgcttgaacccaggaggcggagattgcagtgagccgagattgcaccgctgcactccagcctggcgacagagcgagactctgtctcaaaaaaaaaacaaagaaaaaaccaaaaaaacaaatgggaccctttggattctatgctcagggaagagcaggcagagccttggagtgctgaaggaggtgctgttccctgttccatctttacactttctcttctgagatgtctgtaaggattttacccagatgccatttgtctgtttcattttcagactcaccatcaattaccaaggcccttgcatctccccagatcgtttcccaagtttggcgatttgctgtcggtgcctcagccacatatgaccaatggttacaactcagggctccagacctcagctaaaaagagaagacgctgccctcctgggcacgaacgtttagaatgctcaactcctctattgtgaccacaggaaggtggccctgaagatgcaccgaagacagctgggaggtgactgctgtactgtcagcctctctgtggaggcattcgtgcagtgccagctaaaagggaggtgaagggggatatcggacccagcgagggagttgctggtagaaggaaagctcttctcagtgtggctggattaagagcagcctagcagcttgggcacctccactctgtgcggtctgatggccccagcaaggtcgctgcagggacttcctgaggacttggtttggtttttttctggggttggaaatctgagccaatattgtgtctgttccatttgggtatgaagaggaagtctggatcacttaaactgactagttatttccgggtcataattttaaattaaagacatatcacttttttatacaca

SEQ ID NO: 160298 - DNA, 1907 bp, Homo sapiens
  Payload ID: 11350
  Gene Symbol: NAF1
  Gene Name: nuclear assembly factor 1 ribonucleoprotein
  Uniprot ID: Q96HR8
  ENST ID: ENST00000274054
  CDS Start-End: 195-1679
cggaaagcgttgctgcgtaaatggcgggggcgtgtcttttggctcctccgcgtgtagttacctgagaaacgcgggaagttgggcccaggcagtgttgctgcggttgcctaagttgtttttctatttctggagagagccgtgagcttgtccaggggccccaatcctgaggccgacccggtttctggcgcggtgcgatggaggtagtggaggccgccgccgctcagctggaaactctgaaattcaatggcaccgactttggagttggggaaggtccggcggctccgtctccgggctctgcccctgtgccagggacacagccgccgctacagtcgtttgaggggtccccggacgctgggcagaccgtggaggttaagcctgccggggagcagcctctgcagcccgttctgaacgccgtcgcggccgggaccccggcgccgcagccacagccaccggctgaatcgccggcctgcggagactgcgtcacctccccaggagccgcagagcctgcgcgggcgccggactccttggagacctcggactcggattcggactcggacagtgaaacagattcagatagttcaagttcatcgtcttcctcttcatcttcctcatcgtcgtcttcttcctcttgtatatcacttcctccagtgctgtcagatggagatgatgatttacaaattgagaaggaaaataagaattttcctcttaaaacaaaagatgaattacttcttaatgaactgccttctgttgaagaactcactattattctgcctgaagatattgagttaaagcctcttgggatggtttcaagtattattgaacaactagtaataattgaatctatgactaacctacctccagttaatgaggagactgtaatttttaaaagtgatcgacaagcagcaggaaagatattcgagatatttggacctgttgcacatccattttatgtgttacggtttaattcttcagatcacattgagagtaaaggtattaaaataaaggagactatgtattttgctccatcaatgaaagatttcactcaatatatattcacagaaaaactaaaacaggataagggatcagatgcatcatggaagaatgatcaggaaccaccaccagaggccttagattttagtgatgatgaaaaagagaaggaagccaaacagaggaaaaaatctcagattcaaggccggaaaaaactcaaatctgaatttaatgagcctggtgaagattttactgaagtacatcagaattggaatgctcatagctctgcttcagagcatgcaaaaggatatcgtaacagagaattcacacgaggattttccagggccagataccctcgatcttgccatggcaggcctccacctcagcatttctataactcagaacatatggtatctcaggagacttcaggatttccttctcagagacaaaataatcccattatgccacaatacccctttcctcttccagtgtttgacatgcataattttcccctccgccctccacccccaccaccacccccacctgtaaacatgggttgggctacaccaaacatggctgctcatccattacttaacttaccatactccctacccccaccccctccccctccaccactgcctcctccaccctcttctggagatagtaattctcattttggaccttactattaggtgactatgcatttccagagaaatgtggacttttcatattatgtggtaaggatttttttttttcaagagtgattatggagctagatttttaaaaacactgtaaaatactaaatgattccttctgttgtaagttgatatatatttgtaacctttgtgaaattgtattcatatgaaaatgtcagctcaaattcttgggagaacattaaattatgtaatatttaattaaaa

SEQ ID NO: 160299 - DNA, 1604 bp, Homo sapiens
  Payload ID: 11350
  Gene Symbol: NAF1
  Gene Name: nuclear assembly factor 1 ribonucleoprotein
  Uniprot ID: Q96HR8
  ENST ID: ENST00000422287
  CDS Start-End: 164-1333
gtgtcttttggctcctccgcgtgtagttacctgagaaacgcgggaagttgggcccaggcagtgttgctgcggttgcctaagttgtttttctatttctggagagagccgtgagcttgtccaggggccccaatcctgaggccgacccggtttctggcgcggtgcgatggaggtagtggaggccgccgccgctcagctggaaactctgaaattcaatggcaccgactttggagttggggaaggtccggcggctccgtctccgggctctgcccctgtgccagggacacagccgccgctacagtcgtttgaggggtccccggacgctgggcagaccgtggaggttaagcctgccggggagcagcctctgcagcccgttctgaacgccgtcgcggccgggaccccggcgccgcagccacagccaccggctgaatcgccggcctgcggagactgcgtcacctccccaggagccgcagagcctgcgcgggcgccggactccttggagacctcggactcggattcggactcggacagtgaaacagattcagatagttcaagttcatcgtcttcctcttcatcttcctcatcgtcgtcttcttcctcttgtatatcacttcctccagtgctgtcagatggagatgatgatttacaaattgagaaggaaaataagaattttcctcttaaaacaaaagatgaattacttcttaatgaactgccttctgttgaagaactcactattattctgcctgaagatattgagttaaagcctcttgggatggtttcaagtattattgaacaactagtaataattgaatctatgactaacctacctccagttaatgaggagactgtaatttttaaaagtgatcgacaagcagcaggaaagatattcgagatatttggacctgttgcacatccattttatgtgttacggtttaattcttcagatcacattgagagtaaaggtattaaaataaaggagactatgtattttgctccatcaatgaaagatttcactcaatatatattcacagaaaaactaaaacaggataagggatcagatgcatcatggaagaatgatcaggaaccaccaccagaggccttagattttagtgatgatgaaaaagagaaggaagccaaacagaggaaaaaatctcagattcaaggccggaaaaaactcaaatctgaatttaatgagcctggtacaggtatatctcacagatattgtggcctcggatccagaccattgcagtcaagtgagtcacacaaactttttggtttccaaatgcatataaaagttacgtttacatgctactttagtttattaagtatgcaatagcattgtgtctaaaaaaaccaatgtgcatatctcaattggagaatactttactgttcaaaaaataataatgaccctttgagcctgcagtgagttacagtcttttagctgttggaaggtctggactcaagtgctgttggccgctgactaatcagggtagttgttgctaaaagtggcagtttctcctaatagatagcagtgaagtgtgctacattaattggctcttcctttcaccaaagatttctgtgtagcatgtgatgctacttgatagcat

SEQ ID NO: 160300 - DNA, 385 bp, Homo sapiens
  Payload ID: 11350
  Gene Symbol: NAF1
  Gene Name: nuclear assembly factor 1 ribonucleoprotein
  ENST ID: ENST00000509434
  CDS Start-End: 54-182
ggtttaattcttcagatcacattgagagtaaaggtattaaaataaaggagactatgtattttgctccatcaatgaaagatttcactcaatatatattcacagaaaaactaaaacaggataagggatcagatgcatcatggaagaatgatcaggaaccaccaccagagaccatggttgactgaaggtaactgaaaccacgaaaagtgacagcacagatgaggggagagtactgtatcctcaaatgatggtatggctggtgatggtaacagcaagtctaccagcctagtcaagcattcttatccatagaagagttgccatgggaacctcatggcaacccacagatttcaagtactgtatgttctgcctaaataaataatgaaaagct

SEQ ID NO: 160301 - DNA, 3207 bp, Homo sapiens
  Payload ID: 11351
  Gene Symbol: NASP
  Gene Name: nuclear autoantigenic sperm protein (histone-binding)
  Uniprot ID: P49321
  ENST ID: ENST00000350030
  CDS Start-End: 88-2454
gtccctgagtgagtctctggcgtcccaaattgcctgtttttctcgcaggctctattccgttcgctggttcgccacctcaggggaacgatggccatggagtccacagccactgccgccgtcgccgcggagctggtttctgccgacaaaattgaagatgttcctgctccttctacatctgcagataaagtggagagtctggatgtggatagtgaagctaagaaactattgggtttaggacagaaacatctggtgatgggggatattccagcagctgtcaatgcattccaggaagcagctagtcttttaggtaagaagtatggagagacagctaatgagtgtggagaagccttctttttctatgggaaatcacttctggagttggcaagaatggagaatggtgtgttgggaaacgccttggaaggtgtgcatgtggaagaggaagaaggagaaaaaacagaagatgaatctctggtagaaaataatgataacatagatgaggaagcaagggaagagttgagagaacaggtttatgacgccatgggagaaaaagaagaagccaaaaaaacagaagacaagtctttggcaaagcctgaaactgataaagaacaggacagtgaaatggagaagggtggaagagaagatatggatataagtaaatctgcagaggagccacaggaaaaagttgacttgactctagattggttaactgaaacctctgaagaggcaaaaggaggagcagcaccagaaggaccgaatgaagctgaggtcacttctgggaagccagaacaggaagtaccagatgctgaggaagaaaaatcagtttctggaactgatgtccaagaagagtgcagagaaaaaggaggtcaggagaagcagggagaggtaattgtgagcatagaggagaagccaaaagaagtttcagaagagcagcctgtggtgactctagaaaagcagggcactgcagtggaggtagaagcagagtctttagacccgacagtcaagccagtggatgtgggtggggacgagccagaggagaaggtagttacctctgaaaacgaggcaggaaaggcggttcttgaacaactggtaggtcaagaagtaccacctgctgaagagtcaccagaggtgacaacagaggctgcagaggcctcagctgtagaggctggatcagaagtctctgaaaagcctgggcaggaggctccagttctccctaaggatggtgcagtcaatggaccgtcagttgtaggagatcagactcctattgaaccacagacttctatagaaagactgacagaaacaaaagatggctcaggactagaggagaaggtcagggcaaagctggttcctagtcaggaggagactaagctgtctgtagaagagtctgaggcagctggagatggggttgataccaaggtagcccagggagctactgagaaatcacctgaagacaaagttcagatagctgctaatgaagagacacaagagagagaagaacagatgaaagagggtgaagaaactgaaggctcagaagaggatgataaagaaaatgataagaccgaagaaatgccaaatgattcagtccttgaaaacaagtctcttcaagaaaatgaggaggaggagattgggaacctagagcttgcctgggatatgctggatttagcaaagatcatttttaaaaggcaagaaacaaaagaagcacagctttatgctgcccaggcacatcttaaactcggagaagttagtgttgaatctgaaaactatgtgcaagctgtggaggagttccagtcctgccttaacctgcaggaacagtacctggaagcccacgaccgtctccttgcagagacccactaccagctgggcttggcttatgggtacaactctcagtatgatgaggcagtggcacagttcagcaaatctattgaagtcattgagaacagaatggctgtactaaacgagcaggtgaaggaggctgaaggatcgtctgctgaatacaagaaagaaattgaggaactaaaggaactgctacccgaaattagagagaagatagaagatgcaaaggagtctcagcgtagtgggaatgtagctgaactggctctgaaagctactctggtggagagttctacttcaggtttcactcctggtggaggaggctcttcagtctccatgattgccagtagaaagccaacagacggtgcttcctcatcaaattgtgtgactgatatttcccaccttgtcagaaagaagaggaaaccagaggaagagagtccccggaaagatgatgcaaagaaagccaaacaagagccggaggtgaacggaggcagtggggatgctgtccccagtggaaatgaagtttcggaaaacatggaggaggaggctgagaatcaggctgaaagccgggcagcagtggaggggacagtggaggctggagctacagttgaaagcactgcatgttaagagggggcacagccctcctcccaagggaaagtgtttttgtatataatgtattttttcacttttggaggattctttttgtataacttcaataaagattgtaagcaaaggttgaggctttgatggtttttttcttaattattggctgaatctgccttggagcactgctggttttatatattagccaaaggttttgttctggccttctgtactgatctgtgttcctgatcctaattcctatctgtctaacgtggaggtgatcaagtgtggctgtaggcctttgttttccaatggtgctatattctgttttcaaacacttcactgaacccagctgtcttgcaaactttcagtggtgctgtccctggatgggggctacaaaaacaagaattggtgaagatcttgctcttcagtgctgaaaatggatgatggactttggctgtgagccaggcctaggatggttcttgtcctatatccacctagtcttcacctggggctataattctgtcctggaaaaagaactctgaaaacctgggtcaggggaatgattcctaaggaaaacggtctgcatttgagctctggtttgaaagtagccaaggggactgatggtggacactccagatgtggttggaagcatatgtggggaggctggctggttgagttttgttattttctgtatagaaaggttgagatatatcaacacttggaattgttacccatctgcagaattgacttctcaaataaagatgctaaaaatct

SEQ ID NO: 160302 - DNA, 1538 bp, Homo sapiens
  Payload ID: 11351
  Gene Symbol: NASP
  Gene Name: nuclear autoantigenic sperm protein (histone-binding)
  Uniprot ID: P49321
  ENST ID: ENST00000351223
  CDS Start-End: 83-1432
tgagtgagtctctggcgtcccaaattgcctgtttttctcgcaggctctattccgttcgctggttcgccacctcaggggaacgatggccatggagtccacagccactgccgccgtcgccgcggagctggtttctgccgacaaaattgaagatgttcctgctccttctacatctgcagataaagtggagagtctggatgtggatagtgaagctaagaaactattgggtttaggacagaaacatctggtgatgggggatattccagcagctgtcaatgcattccaggaagcagctagtcttttaggtaagaagtatggagagacagctaatgagtgtggagaagccttctttttctatgggaaatcacttctggagttggcaagaatggagaatggtgtgttgggaaacgccttggaaggtgtgcatgtggaagaggaagaaggagaaaaaacagaagatgaatctctggtagaaaataatgataacatagatgaaactgaaggctcagaagaggatgataaagaaaatgataagaccgaagaaatgccaaatgattcagtccttgaaaacaagtctcttcaagaaaatgaggaggaggagattgggaacctagagcttgcctgggatatgctggatttagcaaagatcatttttaaaaggcaagaaacaaaagaagcacagctttatgctgcccaggcacatcttaaactcggagaagttagtgttgaatctgaaaactatgtgcaagctgtggaggagttccagtcctgccttaacctgcaggaacagtacctggaagcccacgaccgtctccttgcagagacccactaccagctgggcttggcttatgggtacaactctcagtatgatgaggcagtggcacagttcagcaaatctattgaagtcattgagaacagaatggctgtactaaacgagcaggtgaaggaggctgaaggatcgtctgctgaatacaagaaagaaattgaggaactaaaggaactgctacccgaaattagagagaagatagaagatgcaaaggagtctcagcgtagtgggaatgtagctgaactggctctgaaagctactctggtggagagttctacttcaggtttcactcctggtggaggaggctcttcagtctccatgattgccagtagaaagccaacagacggtgcttcctcatcaaattgtgtgactgatatttcccaccttgtcagaaagaagaggaaaccagaggaagagagtccccggaaagatgatgcaaagaaagccaaacaagagccggaggtgaacggaggcagtggggatgctgtccccagtggaaatgaagtttcggaaaacatggaggaggaggctgagaatcaggctgaaagccgggcagcagtggaggggacagtggaggctggagctacagttgaaagcactgcatgttaagagggggcacagccctcctcccaagggaaagtgtttttgtatataatgtattttttcacttttggaggattctttttgtataacttcaataaagattgtaagcaaa

SEQ ID NO: 160303 - DNA, 1458 bp, Homo sapiens
  Payload ID: 11351
  Gene Symbol: NASP
  Gene Name: nuclear autoantigenic sperm protein (histone-binding)
  ENST ID: ENST00000372052
  CDS Start-End: 85-1353
cctgagtgagtctctggcgtcccaaattgcctgtttttctcgcaggctctattccgttcgctggttcgccacctcaggggaacgatggccatggagtccacagccactgccgccgtcgccgcggagctggtttctgccgacaaaattgaagatgttcctgctccttctacatctgcagataaagtggagagtctggatgtggatagtgaagctaagaaactattgggtttaggacagaaacatctggtgatgggggatattccagcagctgtcaatgcattccaggaagcagctagtcttttaatggagaatggtgtgttgggaaacgccttggaaggtgtgcatgtggaagaggaagaaggagaaaaaacagaagatgaatctctggtagaaaataatgataacatagatgaaactgaaggctcagaagaggatgataaagaaaatgataagaccgaagaaatgccaaatgattcagtccttgaaaacaagtctcttcaagaaaatgaggaggaggagattgggaacctagagcttgcctgggatatgctggatttagcaaagatcatttttaaaaggcaagaaacaaaagaagcacagctttatgctgcccaggcacatcttaaactcggagaagttagtgttgaatctgaaaactatgtgcaagctgtggaggagttccagtcctgccttaacctgcaggaacagtacctggaagcccacgaccgtctccttgcagagacccactaccagctgggcttggcttatgggtacaactctcagtatgatgaggcagtggcacagttcagcaaatctattgaagtcattgagaacagaatggctgtactaaacgagcaggtgaaggaggctgaaggatcgtctgctgaatacaagaaagaaattgaggaactaaaggaactgctacccgaaattagagagaagatagaagatgcaaaggagtctcagcgtagtgggaatgtagctgaactggctctgaaagctactctggtggagagttctacttcaggtttcactcctggtggaggaggctcttcagtctccatgattgccagtagaaagccaacagacggtgcttcctcatcaaattgtgtgactgatatttcccaccttgtcagaaagaagaggaaaccagaggaagagagtccccggaaagatgatgcaaagaaagccaaacaagagccggaggtgaacggaggcagtggggatgctgtccccagtggaaatgaagtttcggaaaacatggaggaggaggctgagaatcaggctgaaagccgggcagcagtggaggggacagtggaggctggagctacagttgaaagcactgcatgttaagagggggcacagccctcctcccaagggaaagtgtttttgtatataatgtattttttcacttttggaggattctttttgtataacttcaataaagattgtaagcaa

SEQ ID NO: 160304 - DNA, 999 bp, Homo sapiens
  Payload ID: 11351
  Gene Symbol: NASP
  Gene Name: nuclear autoantigenic sperm protein (histone-binding)
  ENST ID: ENST00000437362
  CDS Start-End: 159-275
atgggcggggcgaagggtcctcgtatataaaagggccccggccgcgcggggtctctaatctgccattttctgtccctgagtgagtctctggcgtcccaaattgcctgtttttctcgcaggctctattccgttcgctggttcgccacctcaggggaacgatggccatggagtccacagccactgccgccgtcgccgcggagctggtttctgccgacaaaattgaagatgttcctgctccttctacatctgcagataaagtggagagcaaccattaatctgctttctgtcactgaagatgggttgcattttgtagaatattatctaaatagaatcatacatctggatgtggatagtgaagctaagaaactattgggtttaggacagaaacatctggtgatgggggatattccagcagctgtcaatgcattccaggaagcagctagtcttttaggtaagaagtatggagagacagctaatgagtgtggagaagccttctttttctatgggaaatcacttctggagttggcaagaatggagaatggtgtgttgggaaacgccttggaaggtgtgcatgtggaagaggaagaaggagaaaaaacagaagatgaatctctggtagaaaataatgataacatagatgaaactgaaggctcagaagaggatgataaagaaaatgataagaccgaagaaatgccaaatgattcagtccttgaaaacaagtctcttcaagaaaatgaggaggaggagattgggaacctagagcttgcctgggatatgctggatttagcaaagatcatttttaaaaggcaagaaacaaaagaagcacagctttatgctgcccaggcacatcttaaactcggagaagttagtgttgaatctgaaaactatgtgcaagctgtggaggagttccagtcctgccttaacctgcaggaacagtacctggaagcccacgaccgtctccttgcagagacccactaccagctgggcttggcttatggg

SEQ ID NO: 160305 - DNA, 874 bp, Homo sapiens
  Payload ID: 11351
  Gene Symbol: NASP
  Gene Name: nuclear autoantigenic sperm protein (histone-binding)
  ENST ID: ENST00000437901
  CDS Start-End: 107-874
agtcgggctagggagggaaacaatcccgcggagccatatggagagggcaggaggtgtctagatagtggctctattccgttcgctggttcgccacctcaggggaacgatggccatggagtccacagccactgccgccgtcgccgcggagctggtttctgccgacaaaattgaagatgttcctgctccttctacatctgcagataaagtggagagtctggatgtggatagtgaagctaagaaactattgggtttaggacagaaacatctggtgatgggggatattccagcagctgtcaatgcattccaggaagcagctagtcttttaggtaagaagtatggagagacagctaatgagtgtggagaagccttctttttctatgggaaatcacttctggagttggcaagaatggagaatggtgtgttgggaaacgccttggaaggtgtgcatgtggaagaggaagaaggagaaaaaacagaagatgaatctctggtagaaaataatgataacatagatgaaactgaaggctcagaagaggatgataaagaaaatgataagaccgaagaaatgccaaatgattcagtccttgaaaacaagtctcttcaagaaaatgaggaggaggagattgggaacctagagcttgcctgggatatgctggatttagcaaagatcatttttaaaaggcaagaaacaaaagaagcacagctttatgctgcccaggcacatcttaaactcggagaagttagtgttgaatctgaaaactatgtgcaagctgtggaggagttccagtcctgccttaacctgcaggaacagtacctggaagcccacgaccgtctccttgcagagacccactaccagctgggcttggcttatggg

SEQ ID NO: 160306 - DNA, 2080 bp, Homo sapiens
  Payload ID: 11351
  Gene Symbol: NASP
  Gene Name: nuclear autoantigenic sperm protein (histone-binding)
  ENST ID: ENST00000453748
  CDS Start-End: 103-219
aatctgccattttctgtccctgagtgagtctctggcgtcccaaattgcctgtttttctcgcaggctctattccgttcgctggttcgccacctcaggggaacgatggccatggagtccacagccactgccgccgtcgccgcggagctggtttctgccgacaaaattgaagatgttcctgctccttctacatctgcagataaagtggagagcaaccattaatctgctttctgtcactgaagatgggttgcattttgtagaatattatctaaatagaatcatacatctggatgtggatagtgaagctaagaaactattgggtttaggacagaaacatctggtgatgggggatattccagcagctgtcaatgcattccaggaagcagctagtcttttaggtaagaagtatggagagacagctaatgagtgtggagaagccttctttttctatgggaaatcacttctggagttggcaagaatggagaatggtgtgttgggaaacgccttggaaggtgtgcatgtggaagaggaagaaggagaaaaaacagaagatgaatctctggtagaaaataatgataacatagatgaggaagcaagggaagagttgagagaacaggtttatgacgccatgggagaaaaagaagaagccaaaaaaacagaagacaagtctttggcaaagcctgaaactgataaagaacaggacagtgaaatggagaagggtggaagagaagatatggatataagtaaatctgcagaggagccacaggaaaaagttgacttgactctagattggttaactgaaacctctgaagaggcaaaaggaggagcagcaccagaaggaccgaatgaagctgaggtcacttctgggaagccagaacaggaagtaccagatgctgaggaagaaaaatcagtttctggaactgatgtccaagaagagtgcagagaaaaaggaggtcaggagaagcagggagaggtaattgtgagcatagaggagaagccaaaagaagtttcagaagagcagcctgtggtgactctagaaaagcagggcactgcagtggaggtagaagcagagtctttagacccgacagtcaagccagtggatgtgggtggggacgagccagaggagaaggtagttacctctgaaaacgaggcaggaaaggcggttcttgaacaactggtaggtcaagaagtaccacctgctgaagagtcaccagaggtgacaacagaggctgcagaggcctcagctgtagaggctggatcagaagtctctgaaaagcctgggcaggaggctccagttctccctaaggatggtgcagtcaatggaccgtcagttgtaggagatcagactcctattgaaccacagacttctatagaaagactgacagaaacaaaagatggctcaggactagaggagaaggtcagggcaaagctggttcctagtcaggaggagactaagctgtctgtagaagagtctgaggcagctggagatggggttgataccaaggtagcccagggagctactgagaaatcacctgaagacaaagttcagatagctgctaatgaagagacacaagagagagaagaacagatgaaagagggtgaagaaactgaaggctcagaagaggatgataaagaaaatgataagaccgaagaaatgccaaatgattcagtccttgaaaacaagtctcttcaagaaaatgaggaggaggagattgggaacctagagcttgcctgggatatgctggatttagcaaagatcatttttaaaaggcaagaaacaaaagaagcacagctttatgctgcccaggcacatcttaaactcggagaagttagtgttgaatctgaaaactatgtgcaagctgtggaggagttccagtcctgccttaacctgcaggaacagtacctggaagcccacgaccgtctccttgcagagacccactaccagctgggcttggcttatgggtacaactctcagtatgatgaggcagtggcacagttcagcaaatctattgaagtcattgagaacagaatggctgtactaaacgagcaggtgaaggaggctgaaggatcgtctgctgaatac

SEQ ID NO: 160307 - DNA, 894 bp, Homo sapiens
  Payload ID: 11351
  Gene Symbol: NASP
  Gene Name: nuclear autoantigenic sperm protein (histone-binding)
  ENST ID: ENST00000528238
  CDS Start-End: 90-894
ctgtccctgagtgagtctctggcgtcccaaattgcctgtttttctcgcaggctctattccgttcgctggttcgccacctcaggggaacgatggccatggagtccacagccactgccgccgtcgccgcggagctggtttctgccgacaaaattgaagatgttcctgctccttctacatctgcagataaagtggagagaatggagaatggtgtgttgggaaacgccttggaaggtgtgcatgtggaagaggaagaaggagaaaaaacagaagatgaatctctggtagaaaataatgataacatagatgaaactgaaggctcagaagaggatgataaagaaaatgataagaccgaagaaatgccaaatgattcagtccttgaaaacaagtctcttcaagaaaatgaggaggaggagattgggaacctagagcttgcctgggatatgctggatttagcaaagatcatttttaaaaggcaagaaacaaaagaagcacagctttatgctgcccaggcacatcttaaactcggagaagttagtgttgaatctgaaaactatgtgcaagctgtggaggagttccagtcctgccttaacctgcaggaacagtacctggaagcccacgaccgtctccttgcagagacccactaccagctgggcttggcttatgggtacaactctcagtatgatgaggcagtggcacagttcagcaaatctattgaagtcattgagaacagaatggctgtactaaacgagcaggtgaaggaggctgaaggatcgtctgctgaatacaagaaagaaattgaggaactaaaggaactgctacccgaaattagagagaagatagaagatgcaaaggagtctcagcgtagtgggaatgtagctgaactggctctgaaag

SEQ ID NO: 160308 - DNA, 632 bp, Homo sapiens
  Payload ID: 11351
  Gene Symbol: NASP
  Gene Name: nuclear autoantigenic sperm protein (histone-binding)
  ENST ID: ENST00000534450
  CDS Start-End: 1-526
gcaggaacagtacctggaagcccacgaccgtctccttgcagagacccactaccagctgggcttggcttatgggtacaactctcagtatgatgaggcagtggcacagttcagcaaatctattgaagtcattgagaacagaatggctgtactaaacgagcaggtgaaggaggctgaaggatcgtctgctgaatacaagaaagaaattgaggaactaaaggaactgctacccgaaattagagagaagatagaagatgcaaaggagtctcagcgtagtgggaatgtagctgaactggctctgaaagctactctggtggagagttctacttcaggtttcactcctggtggaggaggctcttcagtctccatgattgccagtagaaagccaacagacggtgcttcctcatcaaattgtgtgactgatatttcccaccttgtcagaaagaaggctgagaatcaggctgaaagccgggcagcagtggaggggacagtggaggctggagctacagttgaaagcactgcatgttaagagggggcacagccctcctcccaagggaaagtgtttttgtatataatgtattttttcacttttggaggattctttttgtataacttcaataaagattgtaagcaaa

SEQ ID NO: 160309 - DNA, 535 bp, Homo sapiens
  Payload ID: 11351
  Gene Symbol: NASP
  Gene Name: nuclear autoantigenic sperm protein (histone-binding)
  ENST ID: ENST00000528084
  CDS Start-End: 106-276
tctaatctgccattttctgtccctgagtgagtctctggcgtcccaaattgcctgtttttctcgcaggctctattccgttcgctggttcgccacctcaggggaacgatggccatggagtccacagccactgccgccgtcgccgcggagctggtttctgccgacaaaattgaagatgttcctgctccttctacatctgcagataaagtggagagagatgaggtttcgtcacgttgcccaggctggggctcaagccatcttctcacctcagccacctgaagtgctgggattacagtctggatgtggatagtgaagctaagaaactattgggtttaggacagaaacatctggtgatgggggatattccagcagctgtcaatgcattccaggaagcagctagtcttttaggtaagaagtatggagagacagctaatgagtgtggagaagccttctttttctatgggaaatcacttctggagttggcaagaatggagaatggtgtgttgggaaacgccttggaaggtgtgcatgtggaaga

SEQ ID NO: 160310 - DNA, 531 bp, Homo sapiens
  Payload ID: 11351
  Gene Symbol: NASP
  Gene Name: nuclear autoantigenic sperm protein (histone-binding)
  ENST ID: ENST00000530840
  CDS Start-End: 103-270
aatctgccattttctgtccctgagtgagtctctggcgtcccaaattgcctgtttttctcgcaggctctattccgttcgctggttcgccacctcaggggaacgatggccatggagtccacagccactgccgccgtcgccgcggagctggtttctgccgacaaaatgagcggccgggcgcggtggctcacacctgtaatccagcactttgggaggccgaggtgggcagatcacgaggtcaggagatcgagaccatcctggctaacacggtgaaaccccatctctactaaaaatacaaaaaaaaaatgtagtcccagctacttgagaagctgacgcaggagaatggcgtgaacccgggaggcggagcttgcagtgagccgagatcgagatcgcgccactgcactccagcctgggcaacagtgcgagactccgtctcaaaaacaaaagaatgagcagtagcagaattgaagatgttcctgctccttctacatctgcagataaagtggagagtctggatgtggatagtgaagctaa

SEQ ID NO: 160311 - DNA, 778 bp, Homo sapiens
  Payload ID: 11351
  Gene Symbol: NASP
  Gene Name: nuclear autoantigenic sperm protein (histone-binding)
  ENST ID: ENST00000529333
  CDS Start-End: 103-219
aatctgccattttctgtccctgagtgagtctctggcgtcccaaattgcctgtttttctcgcaggctctattccgttcgctggttcgccacctcaggggaacgatggccatggagtccacagccactgccgccgtcgccgcggagctggtttctgccgacaaaattgaagatgttcctgctccttctacatctgcagataaagtggagagcaaccattaatctgctttctgtcactgaagatgggttgcattttgtagaatattatctaaatagaatcatacatctggatgtggatagtgaagctaagaaactattgggtttaggacagaaacatctggtgatgggggatattccagcagctgtcaatgcattccaggaagcagctagtcttttatgtttattctctttgtagaggtaagaagtatggagagacagctaatgagtgtggagaagccttctttttctatgggaaatcacttctggagttggcaagaatggagaatggtgtgttgggaaacgccttggaaggtgtgcatgtggaagaggaagaaggagaaaaaacagaagatgaatctctggtagaaaataatgataacatagatgaggaagcaagggaagagttgagagaacaggtttatgacgccatgggagaaaaagaagaagccaaaaaaacagaagacaagtctttggcaaagcctgaaactgataaagaacaggacagtgaaatggagaagggtggaagagaagatatggatataagtaaatctgcagaggagcc

SEQ ID NO: 160312 - DNA, 554 bp, Homo sapiens
  Payload ID: 11351
  Gene Symbol: NASP
  Gene Name: nuclear autoantigenic sperm protein (histone-binding)
  ENST ID: ENST00000531532
  CDS Start-End: 103-273
aatctgccattttctgtccctgagtgagtctctggcgtcccaaattgcctgtttttctcgcaggctctattccgttcgctggttcgccacctcaggggaacgatggccatggagtccacagccactgccgccgtcgccgcggagctggtttctgccgacaaaattgaagatgttcctgctccttctacatctgcagataaagtggagagagatgaggtttcgtcacgttgcccaggctggggctcaagccatcttctcacctcagccacctgaagtgctgggattacagcaaccattaatctgctttctgtcactgaagatgggttgcattttgtagaatattatctaaatagaatcatacatctggatgtggatagtgaagctaagaaactattgggtttaggacagaaacatctggtgatgggggatattccagcagctgtcaatgcattccaggaagcagctagtcttttaggtaagaagtatggagagacagctaatgagtgtggagaagccttctttttctatgggaaatcacttctggagttggcaag

SEQ ID NO: 160313 - DNA, 743 bp, Homo sapiens
  Payload ID: 11351
  Gene Symbol: NASP
  Gene Name: nuclear autoantigenic sperm protein (histone-binding)
  ENST ID: ENST00000527359
  CDS Start-End: 106-219
tctaatctgccattttctgtccctgagtgagtctctggcgtcccaaattgcctgtttttctcgcaggctctattccgttcgctggttcgccacctcaggggaacgatggccatggagtccacagccactgccgccgtcgccgcggagctggtttctgccgacaaaattgaagatgttcctgctccttctacatctgcagataaagtggagagaaactgaaggctcagaagaggatgataaagaaaatgataagaccgaagaaatgccaaatgattcagtccttgaaaacaagtctcttcaagaaaatgaggaggaggagattgggaacctagagcttgcctgggatatgctggatttagcaaagatcatttttaaaaggcaagaaacaaaagaagcacagctttatgctgcccaggcacatcttaaactcggagaagttagtgttgaatctgaaaactatgtgcaagctgtggaggagttccagtcctgccttaacctgcaggaacagtacctggaagcccacgaccgtctccttgcagagacccactaccagctgggcttggcttatgggtacaactctcagtatgatgaggcagtggcacagttcagcaaatctattgaagtcattgagaacagaatggctgtactaaacgagcaggtgaaggaggctgaaggatcgtctgctgaatacaagaaagaaattgaggaactaaaggaactgctacccgaaattagagagaaga

SEQ ID NO: 160314 - DNA, 1036 bp, Homo sapiens
  Payload ID: 11351
  Gene Symbol: NASP
  Gene Name: nuclear autoantigenic sperm protein (histone-binding)
  ENST ID: ENST00000470768
  CDS Start-End: 87-1036
tccctgagtgagtctctggcgtcccaaattgcctgtttttctcgcaggctctattccgttcgctggttcgccacctcaggggaacgatggccatggagtccacagccactgccgccgtcgccgcggagctggtttctgccgacaaaattgaagatgttcctgctccttctacatctgcagataaagtggagagaggtaagaagtatggagagacagctaatgagtgtggagaagccttctttttctatgggaaatcacttctggagttggcaagaatggagaatggtgtgttgggaaacgccttggaaggtgtgcatgtggaagaggaagaaggagaaaaaacagaagatgaatctctggtagaaaataatgataacatagatgaggaagcaagggaagagttgagagaacaggtttatgacgccatgggagaaaaagaagaagccaaaaaaacagaagacaagtctttggcaaagcctgaaactgataaagaacaggacagtgaaatggagaagggtggaagagaagatatggatataagtaaatctgcagaggagccacaggaaaaagttgacttgactctagattggttaactgaaacctctgaagaggcaaaaggaggagcagcaccagaaggaccgaatgaagctgaggtcacttctgggaagccagaacaggaagtaccagatgctgaggaagaaaaatcagtttctggaactgatgtccaagaagagtgcagagaaaaaggaggtcaggagaagcagggagaggtaattgtgagcatagaggagaagccaaaagaagtttcagaagagcagcctgtggtgactctagaaaagcagggcactgcagtggaggtagaagcagagtctttagacccgacagtcaagccagtggatgtgggtggggacgagccagaggagaaggtagttacctctgaaaacgaggcaggaaaggcggttcttgaacaactggtaggtcaagaagtaccacctgctgaagagtcaccagaggtgacaacagaggctgcagaggc

SEQ ID NO: 160315 - DNA, 565 bp, Homo sapiens
  Payload ID: 11351
  Gene Symbol: NASP
  Gene Name: nuclear autoantigenic sperm protein (histone-binding)
  ENST ID: ENST00000525515
  CDS Start-End: 103-565
aatctgccattttctgtccctgagtgagtctctggcgtcccaaattgcctgtttttctcgcaggctctattccgttcgctggttcgccacctcaggggaacgatggccatggagtccacagccactgccgccgtcgccgcggagctggtttctgccgacaatctggatgtggatagtgaagctaagaaactattgggtttaggacagaaacatctggtgatgggggatattccagcagctgtcaatgcattccaggaagcagctagtcttttaggtaagaagtatggagagacagctaatgagtgtggagaagccttctttttctatgggaaatcacttctggagttggcaagaatggagaatggtgtgttgggaaacgccttggaaggtgtgcatgtggaagaggaagaaggagaaaaaacagaagatgaatctctggtagaaaataatgataacatagatgaaactgaaggctcagaagaggatgataaagaaaatgataagaccgaagaaatgccaaatgattcagtccttgaaaacaagtctcttcaagaaaatgaggagg

SEQ ID NO: 160316 - DNA, 938 bp, Homo sapiens
  Payload ID: 11351
  Gene Symbol: NASP
  Gene Name: nuclear autoantigenic sperm protein (histone-binding)
  ENST ID: ENST00000531612
  CDS Start-End: 1-866
aaactgaaggctcagaagaggatgataaagaaaatgataagaccgaagaaatgccaaatgattcagtccttgaaaacaagtctcttcaagaaaatgaggaggaggagattgggaacctagagcttgcctgggatatgctggatttagcaaagatcatttttaaaaggcaagaaacaaaagaagcacagctttatgctgcccaggcacatcttaaactcggagaagttagtgttgaatctgaaaactatgtgcaagctgtggaggagttccagtcctgccttaacctgcaggaacagtacctggaagcccacgaccgtctccttgcagagacccactaccagctgggcttggcttatgggtacaactctcagtatgatgaggcagtggcacagttcagcaaatctattgaagtcattgagaacagaatggctgtactaaacgagcaggtgaaggaggctgaaggatcgtctgctgaatacaagaaagaaattgaggaactaaaggaactgctacccgaaattagagagaagatagaagatgcaaaggagtctcagcgtagtgggaatgtagctgaactggctctgaaagctactctggtggagagttctacttcaggtttcactcctggtggaggaggctcttcagtctccatgaagaggaaaccagaggaagagagtccccggaaagatgatgcaaagaaagccaaacaagagccggaggtgaacggaggcagtggggatgctgtccccagtggaaatgaagtttcggaaaacatggaggaggaggctgagaatcaggctgaaagccgggcagcagtggaggggacagtggaggctggagctacagttgaaagcactgcatgttaagagggggcacagccctcctcccaagggaaagtgtttttgtatataatgtattttttcacttttggaggattc

SEQ ID NO: 160317 - DNA, 532 bp, Homo sapiens
  Payload ID: 11351
  Gene Symbol: NASP
  Gene Name: nuclear autoantigenic sperm protein (histone-binding)
  ENST ID: ENST00000527470
  CDS Start-End: 103-532
aatctgccattttctgtccctgagtgagtctctggcgtcccaaattgcctgtttttctcgcaggctctattccgttcgctggttcgccacctcaggggaacgatggccatggagtccacagccactgccgccgtcgccgcggagctggtttctgccgacaaaattgaagatgttcctgctccttctacatctgcagataaagtggagagaatggagaatggtgtgttgggaaacgccttggaaggtgtgcatgtggaagaggaagaaggagaaaaaacagaagatgaatctctggtagaaaataatgataacatagatgaggaagcaagggaagagttgagagaacaggtttatgacgccatgggagaaaaagaagaagccaaaaaaacagaagacaagtctttggcaaagcctgaaactgataaagaacaggacagtgaaatggagaagggtggaagagaagatatggatataagtaaatctgcagaggagccacaggaaaaagttgacttgactctagattggttaactg

SEQ ID NO: 160318 - DNA, 3097 bp, Homo sapiens
  Payload ID: 11351
  Gene Symbol: NASP
  Gene Name: nuclear autoantigenic sperm protein (histone-binding)
  Uniprot ID: P49321
  ENST ID: ENST00000537798
  CDS Start-End: 160-2334
gatgggcggggcgaagggtcctcgtatataaaagggccccggccgcgcggggtctctaatctgccattttctgtccctgagtgagtctctggcgtcccaaattgcctgtttttctcgcaggctctattccgttcgctggttcgccacctcaggggaacgatggccatggagtccacagccactgccgccgtcgccgcggagctggtttctgccgacaaaattgaagatgttcctgctccttctacatctgcagataaagtggagagaatggagaatggtgtgttgggaaacgccttggaaggtgtgcatgtggaagaggaagaaggagaaaaaacagaagatgaatctctggtagaaaataatgataacatagatgaggaagcaagggaagagttgagagaacaggtttatgacgccatgggagaaaaagaagaagccaaaaaaacagaagacaagtctttggcaaagcctgaaactgataaagaacaggacagtgaaatggagaagggtggaagagaagatatggatataagtaaatctgcagaggagccacaggaaaaagttgacttgactctagattggttaactgaaacctctgaagaggcaaaaggaggagcagcaccagaaggaccgaatgaagctgaggtcacttctgggaagccagaacaggaagtaccagatgctgaggaagaaaaatcagtttctggaactgatgtccaagaagagtgcagagaaaaaggaggtcaggagaagcagggagaggtaattgtgagcatagaggagaagccaaaagaagtttcagaagagcagcctgtggtgactctagaaaagcagggcactgcagtggaggtagaagcagagtctttagacccgacagtcaagccagtggatgtgggtggggacgagccagaggagaaggtagttacctctgaaaacgaggcaggaaaggcggttcttgaacaactggtaggtcaagaagtaccacctgctgaagagtcaccagaggtgacaacagaggctgcagaggcctcagctgtagaggctggatcagaagtctctgaaaagcctgggcaggaggctccagttctccctaaggatggtgcagtcaatggaccgtcagttgtaggagatcagactcctattgaaccacagacttctatagaaagactgacagaaacaaaagatggctcaggactagaggagaaggtcagggcaaagctggttcctagtcaggaggagactaagctgtctgtagaagagtctgaggcagctggagatggggttgataccaaggtagcccagggagctactgagaaatcacctgaagacaaagttcagatagctgctaatgaagagacacaagagagagaagaacagatgaaagagggtgaagaaactgaaggctcagaagaggatgataaagaaaatgataagaccgaagaaatgccaaatgattcagtccttgaaaacaagtctcttcaagaaaatgaggaggaggagattgggaacctagagcttgcctgggatatgctggatttagcaaagatcatttttaaaaggcaagaaacaaaagaagcacagctttatgctgcccaggcacatcttaaactcggagaagttagtgttgaatctgaaaactatgtgcaagctgtggaggagttccagtcctgccttaacctgcaggaacagtacctggaagcccacgaccgtctccttgcagagacccactaccagctgggcttggcttatgggtacaactctcagtatgatgaggcagtggcacagttcagcaaatctattgaagtcattgagaacagaatggctgtactaaacgagcaggtgaaggaggctgaaggatcgtctgctgaatacaagaaagaaattgaggaactaaaggaactgctacccgaaattagagagaagatagaagatgcaaaggagtctcagcgtagtgggaatgtagctgaactggctctgaaagctactctggtggagagttctacttcaggtttcactcctggtggaggaggctcttcagtctccatgattgccagtagaaagccaacagacggtgcttcctcatcaaattgtgtgactgatatttcccaccttgtcagaaagaagaggaaaccagaggaagagagtccccggaaagatgatgcaaagaaagccaaacaagagccggaggtgaacggaggcagtggggatgctgtccccagtggaaatgaagtttcggaaaacatggaggaggaggctgagaatcaggctgaaagccgggcagcagtggaggggacagtggaggctggagctacagttgaaagcactgcatgttaagagggggcacagccctcctcccaagggaaagtgtttttgtatataatgtattttttcacttttggaggattctttttgtataacttcaataaagattgtaagcaaaggttgaggctttgatggtttttttcttaattattggctgaatctgccttggagcactgctggttttatatattagccaaaggttttgttctggccttctgtactgatctgtgttcctgatcctaattcctatctgtctaacgtggaggtgatcaagtgtggctgtaggcctttgttttccaatggtgctatattctgttttcaaacacttcactgaacccagctgtcttgcaaactttcagtggtgctgtccctggatgggggctacaaaaacaagaattggtgaagatcttgctcttcagtgctgaaaatggatgatggactttggctgtgagccaggcctaggatggttcttgtcctatatccacctagtcttcacctggggctataattctgtcctggaaaaagaactctgaaaacctgggtcaggggaatgattcctaaggaaaacggtctgcatttgagctctggtttgaaagtagccaaggggactgatggtggacactccagatgtggttggaagcatatgtggggaggctggctggttgagttttgttattttctgtatagaaaggttgagatatatcaacacttggaattgttacccatctgcagaattgacttctcaaataaagatgctaaaaatctccttgtctgg

SEQ ID NO: 160319 - DNA, 253 bp, Homo sapiens
  Payload ID: 11351
  Gene Symbol: NASP
  Gene Name: nuclear autoantigenic sperm protein (histone-binding)
  ENST ID: ENST00000629893
  CDS Start-End: 83-253
tgagtgagtctctggcgtcccaaattgcctgtttttctcgcaggctctattccgttcgctggttcgccacctcaggggaacgatggccatggagtccacagccactgccgccgtcgccgcggagctggtttctgccgacaaaattgaagatgttcctgctccttctacatctgcagataaagtggagagagatgaggtttcgtcacgttgcccaggctggggctcaagccatcttctcacctcagccacctga

SEQ ID NO: 160320 - DNA, 728 bp, Homo sapiens
  Payload ID: 11352
  Gene Symbol: NCBP1
  Gene Name: nuclear cap binding protein subunit 1, 80kDa
  ENST ID: ENST00000375130
  CDS Start-End: 1-466
attgtttgtttgggaaattttgcactctacaattcgtaagatgaacaaacatgtcctgaagatccagaaagagctggaagaagctaaagagaaacttgctaggcaacacaaacggcgaagtgatgatgacgacagaagcagtgacaggaaagacggggttcttgaggaacaaatagaacgacttcaggaaaaagtggaatctgctcagagtgaacaaaagaatcttttcctcgttatatttcagcggtttatcatgatcttgaccgagcacctagtacgatgcgaaactgatgggaccagtgtattaacaccatggtataagaactgtatagagaggctgcagcagatcttcctacaggtatgtggggaacttcgattaggtaataacactattctcagccacaaagatttttcattaaaaaaaatccttgtcaaatttgttaggaggttatatagtacctgttagaccctttagttcatgtccatttgctgctaccattgctcatcagaatatttaggcttaaactgattctgtaccacttagattcctaattgccacccccccaacaaccccccgccccaccttttttttgagatggcatctcactctgttgcccaggctggagttcagtgacacgatctcagctcactgcaacctccacctcctaggtttaagcaattcttctgcctcagcctcccatattgctgggattacaggcacccgtcac

SEQ ID NO: 160321 - DNA, 5178 bp, Homo sapiens
  Payload ID: 11352
  Gene Symbol: NCBP1
  Gene Name: nuclear cap binding protein subunit 1, 80kDa
  Uniprot ID: Q09161
  ENST ID: ENST00000375147
  CDS Start-End: 257-2629
ggcggaggcagcccgagggggcggttgcatgtgtgccagacgttcgtagcccactgagcttcctcacgccggctgtcgcagcgcctagccccacccggcggcctctcctgcgcttccggggccgtggcgagctagtgcgcctgcgtgccggcccatccgcgcgccttgcagctgtccttgcgtcggccagcggccagacagttcctgcagcgcttaccgcctggcctctcggttccgcggcgcaccggagggcagcatgtcgcggcggcggcacagcgacgagaacgacggtgggcagcctcacaaaaggagaaagacctctgatgcaaatgaaactgaagatcatttggaatctttaatatgtaaagtaggagaaaagagtgcctgctctttggagagcaacctagaaggcttggctggtgttttggaagctgatcttcctaactacaagagcaagatcttaaggcttctttgtacagttgcacgcctattacctgagaagctgacaatttatacaacattagttggactactgaatgccaggaattacaattttggtggagaatttgtagaagccatgattcgtcaacttaaagaatcattgaaagcaaacaattataatgaagccgtgtatttggtccgttttttatctgatcttgtgaattgtcatgtgattgccgccccatcaatggttgctatgtttgaaaattttgtaagcgtaactcaggaagaagatgtacctcaggtgcgacgagattggtatgtgtatgcatttctgtcatctttgccctgggttggaaaggagttgtacgaaaagaaagatgcagagatggaccgcatctttgccaacactgaaagctatcttaaaagacgccaaaagactcatgtacccatgttacaggtatggactgctgataaaccacatccacaagaagagtatttagattgcctgtgggcccagattcagaaattgaaaaaggatcgctggcaggaacggcacatcctaagaccttatcttgcctttgacagcatcctgtgtgaagcactgcagcacaatctgcctccttttacaccacctcctcacactgaagattcagtgtacccaatgccaagggtcatcttcagaatgtttgattacacagatgatcccgagggtcctgtcatgccagggagtcattcagtggaaagatttgtaatagaagagaatcttcactgcatcattaagtcccactggaaggaaaggaagacttgtgctgcacagttagtgagctatccagggaagaacaagatccccttgaactaccacatagttgaggtgatctttgcagagctgtttcaacttccagcaccccctcacattgatgtgatgtacacaacactcctcattgaactgtgcaaacttcaacctggctctctaccccaagttcttgcacaggcaactgaaatgctatacatgcgtttggacacaatgaacactacctgtgtagacaggtttattaattggttttctcatcatctaagtaacttccagttccgttggagctgggaagattggtcagattgtcttagtcaagatcctgaaagtcccaaaccgaagtttgtaagagaagttctagaaaaatgtatgaggttgtcttaccatcagcgtatattagatattgttcctcctaccttctcagctctgtgtcctgcaaacccaacctgcatttacaagtatggagatgaaagtagcaattctcttcctggacattctgttgccctctgtttagctgttgcctttaaaagtaaggcaaccaatgatgaaatcttcagcattctgaaagatgtaccaaatcctaaccaggatgatgacgacgatgaaggattcagttttaacccattgaaaatagaagtctttgtacagactctgctacacttggcagccaaatcattcagccactccttcagtgctcttgcaaagtttcatgaagtcttcaaaaccctagctgaaagtgatgaaggaaagttacatgtgctaagagttatgtttgaggtctggaggaaccatccacagatgattgctgtactagtggataagatgattcgtacacaaatagttgattgtgctgccgtagcaaattggatcttctcttcagaactatctcgtgactttaccagattgtttgtttgggaaattttgcactctacaattcgtaagatgaacaaacatgtcctgaagatccagaaagagctggaagaagctaaagagaaacttgctaggcaacacaaacggcgaagtgatgatgacgacagaagcagtgacaggaaagacggggttcttgaggaacaaatagaacgacttcaggaaaaagtggaatctgctcagagtgaacaaaagaatcttttcctcgttatatttcagcggtttatcatgatcttgaccgagcacctagtacgatgcgaaactgatgggaccagtgtattaacaccatggtataagaactgtatagagaggctgcagcagatcttcctacagcatcaccaaataatccagcagtacatggtgaccctggagaaccttctcttcactgctgaattagaccctcatatcttggccgtgttccagcagttctgtgccctgcaggcctaagggtcattttttcctcatgtcaaggttttttttgatatcttaaaataatttgtcttattttttgatggtttgaatgcttgctttcttgtagtatcctttcacttcttaaaggaaacaaaggggaagaggacagtgaatgaacatggcattacttttaattgccctgaaaagcaaatacttcctaacggcagtaatgtgactatgaccatgatatattatatatgtgacagatacaaattctctgtgatcagtttgttattttttttctccttaaggcacaaaataattggtttgaggtatgtgaaacactagaggtcaaccttacatagtatatagaactgatgggtttacccagctacccagtagcataacttttcacagctcggggatgaattaacatggctgaaataaaactaaaagtatggtttttaaactttggcatttcatgatttatcatctcactctactctaaaactggtggtttcttactgaaggtgttctccatttgaaattttatcttcaaagtatttttaagtagtatctttaagacatgacttgttagtaataaaagtgttactagttggaagagtagctctcaaatttgtcttaatgtaaatcacctgggaatctttcaagttattttgaaatttaaaccaccgtctgggggtggaacgcagacatcctcagtaatccttaaagtttccccaggtgattccaggtttggtcaccattatcttagagcatctactcacttcctctagccttggggttatttgtccaaggtcttgtagtgagttacagaatactaaagtggatgtagaagtggtcagattgactgaaactataccctgaattagatgtgagtttagattttgtttatatggaacctgatccaaaaaactacgaagtcctgagcttgtttcctgtatagtactgatgctgaaataagatgacagcagtttgtaaaataatacacaaatatgaggaattgtctgacattccaaatttcgaggatttttagacttttttcattaaaccttagaaaaaaattaccagtaatcctacaactactggtagtgttgttgtgcatttgcacaaaataggtataattttttcttattacatcccaagtttatgatgcattaagcgttttgcatattttgatatatttttgctttggtttaccatacattttagtggctacagaatgtagtctgcttaataaatgggaattcctagaatgtttaaataccatactatttaagacaaaatacaaaatatccagaaaaatccaggttgcgtggctggttagtaaaggactaaaacccaggttcttggctaaatgttttcgtttatactgtttatctttcccattgcttaagcacagcacaaactatgtaattatatataattacagttgacccttgaacaacatgggtttgaactgtgtgagtctccttacacacaggttttcttccacccctgagatggcaagaccagccccttgtcttcctcagcctgctcaacgtgaagatgatgaggatgaagacctttatgatgatccacttctacttattaaatagtaaatatatttttttcttatgattttattttcttttctctagcttcataagaatatagcatatgggctgggcgcagtggctcacgcctgtaatcccagcactttgggaggctgaggcgggcggatcacaaggtcaggagattgagaccatcctggctaacacagtgaaaccctgtctctactaaaaacacaaaaacttagccaggcgtggtggtacatggctgtagtcccagctacttgggaggctgagacaggagaatcgcttgaacctgggaggtggaggtttcagtgagccaagattgtgccactgcactccagcctgggtgatggagcgaggctctgtctcaaaaaagaaaaaaaatatatagcatataacatacaaaatgagtttatcaactgtttgttattggtaagtcagcagtgggctattggtggttaagttttgggggagtcaaaagttacatgcaaattttttactgtgcggggtgtcagcatccctaaccccatgttgttcaagggtcaactgtagtttaaaatgactcctgtctcaaaaaaccaaaggataacctttaagggattggtaactttgactcaaaactgctttgtaatcttttcacaatgtactgaaaagtgtggctagttatgtttgatccacattctagagaaatttgtaggttttaatttcttttctcttggtcctctcttcatgtataatggttgcttttaacagctgttcgctgatgtggtcctgctctgtcccagtctagcagctttagtgtatggaaaaattgaactaggaattgagttttgaagaaataaaggtgtaagagcaaacattcaacagttgctgtccccagtaatgaagttcatacagacaaaagatggcatgtcactgtacatcataccttgcaataaatattctgttaaattgtgctggtgcaatttaacatgcttttgtcaaagtaaa

SEQ ID NO: 160322 - DNA, 892 bp, Homo sapiens
  Payload ID: 11352
  Gene Symbol: NCBP1
  Gene Name: nuclear cap binding protein subunit 1, 80kDa
  ENST ID: ENST00000478100
  CDS Start-End: 215-463
ttcgtagcccactgagcttcctcacgccggctgtcgcagcgcctagccccacccggcggcctctcctgcgcttccggggccgtggcgagctagtgcgcctgcgtgccggcccatccgcgcgccttgcagctgtccttgcgtcggccagcggccagacagttcctgcagcgcttaccgcctggcctctcggttccgcggcgcaccggagggcagcatgtcgcggcggcggcacagcgacgagaacgacggtgggcagcctcacaaaaggagaaagacctctgatgcaaatgaaactgaagatcatttggaatctttaatatgtaaagtaggagaaaagagtgcctgctctttggagagcaacctagaaggcttggctggtgttttggaagctgatcttcctaactacaagagcaagatcttaaggcttctttgtacagtgtccgttttttatctgatcttgtgaattgtcatgtgattgccgccccatcaatggttgctatgtttgaaaattttgtaagcgtaactcaggaagaagatgtacctcagaagacgccaaaagactcatgtacccatgttacaggtatggactgctgataaaccacatccacaagaagagtatttagattgcctgtgggcccagattcagaaattgaaaaaggatcgctggcaggaacggcacatcctaagaccttatcttgcctttgacagcatcctgtgtgaagcactgcagcacaatctgcctccttttacaccacctcctcacactgaagattcagtgtacccaatgccaagggtcatcttcagaatgtttgattacacagatgatcccgagggtcctgtcatgccagggagtcattcagtggaaagatttgtaatagaagagaatcttcac

SEQ ID NO: 160323 - DNA, 249 bp, Homo sapiens
  Payload ID: 11352
  Gene Symbol: NCBP1
  Gene Name: nuclear cap binding protein subunit 1, 80kDa
  ENST ID: ENST00000629069
  CDS Start-End: 1-249
atgtcgcggcggcggcacagcgacgagaacgacggtgggcagcctcacaaaaggagaaagacctctgatgcaaatgaaactgaagatcatttggaatctttaatatgtaaagtaggagaaaagagtgcctgctctttggagagcaacctagaaggcttggctggtgttttggaagctgatcttcctaactacaagagcaagatcttaaggcttctttgtacagtgtccgttttttatctgatcttgtga

SEQ ID NO: 160324 - DNA, 2169 bp, Homo sapiens
  Payload ID: 11353
  Gene Symbol: NCBP2
  Gene Name: nuclear cap binding protein subunit 2, 20kDa
  Uniprot ID: P52298
  ENST ID: ENST00000321256
  CDS Start-End: 95-565
aatgagatgctcgcctccgcgcgtttccgcttccgccatcgcggacgcagcctcgtgccgggagtcgccgcattgtggtccgcttctctgcactatgtcgggtggcctcctgaaggcgctgcgcagcgactcctacgtggagctgagccagtaccgggaccagcacttccggggtgacaatgaagaacaagaaaaattactgaagaaaagctgtacgttatatgttggaaatctttctttttacacaactgaagaacaaatctatgaactcttcagcaaaagtggtgacataaagaaaatcattatgggtctggataaaatgaagaaaacagcatgtggattctgttttgtggaatattactcacgcgcagatgcggaaaacgccatgcggtacataaatgggacgcgtctggatgaccgaatcattcgcacagactgggacgcaggctttaaggagggcaggcaatacggccgtgggcgatctgggggccaggttcgggatgagtatcggcaggactacgatgctgggagaggaggctatggaaaactggcacagaaccagtgagtggtgagagctctgtcagtgacaaacactcctttggcctgttgaatttgctgaagaacatcacctaaagtctgcacacgagcccatttttaccaagatttgatcagtgtctttactgagctggaagcctctgaaagttattaaaggacagaatccaaaagaatgcctttaattcttgtctgagaatcttggccatgtgtcagattatcagaacaattttgttaccaggtcagaaattgtgttctttgacaacagattggatctgtaatgttgattagtctttagccataaccactacacttttagaaagacagaaaaatgtaagaatttgtttttaccataatgagtcttaagtaggttcatgatctacattggggcctgggattatttttttaattttaagtttgcatgagatagcctaataaatggaggtggggccaggcatggtggctcacacgtgtaatcccaacactttgggaggctgaggaggaaggatagcttgaggccaggagtttgagactagactgggcaacatagcaagaccccgtctctacaaagcacaacgaaaaacaacaaatggagttgtgctatgttgtattgctttgcacaaaattaggaacaggtgtttgacaattgaatttgttttctgtgaattctaacctctaaaggcatgcttagaggtcaaggaccttcctgtgtagttggtgcaaaagcaatctccacaggacagcactgcttccatgcttcatacatcaggaaatgaggccagaacttgagtatttactaacacgtttttcaaaagatgtcagtgttatacctaaagctaaaaaaaagcaagggtttgtcatagagggaacctctaaataatttcaggggtaggggagatgttgtcaataggaaatgggataaaatatcaagagacaatgaaaacactgccttgacatgaggaccagcaagtttattcttttcattttcagtgatgttgggaatggactgggttttaaaagggagcttgaagagggaatgtttgacagtcacagaaggttcctgcagcagatgcctcttttagccatttctcatttttttcctcaaattttacctactgaggctcaagccttcacagtgagctgatggtctctacagggaggggagtctagggaatttatttggtatttgtaaggcaagaggtgatttctctctaatatatctgagttattgctcatttaaaactgttaagtccagtataattttccctgatatgaaaaaatgtgcatttttttcacttagcaacaaagtaccttctaatttccaatagtccgtgaaagttggggctgaagtacctaagtgtgaatgtctctcccgttaaactgagtgtagaaatctgaatttttaaaagagctgtaactagttgtaagtgcttaggaagaaactttgcaaacatttaatgaggatacactgttcatttttaaaattccttcacactgtaatttaatgtgttttatattcttttgtagtaaaacaacataactcagatttctacaggagacagtggttttattcggattgtcttctgtaataggtttcaataaagctggatgaactta

SEQ ID NO: 160325 - DNA, 564 bp, Homo sapiens
  Payload ID: 11353
  Gene Symbol: NCBP2
  Gene Name: nuclear cap binding protein subunit 2, 20kDa
  ENST ID: ENST00000411704
  CDS Start-End: 316-564
agcacttccgggtgagggaggccgggccgcgagacgggaaggccctgggcaagaacgctgagaaacgagggagagggaagacagtttctgcgctctgcgagctcataatcccctgtagtgaggattcagaaaagggaaaaatccccttgtgactgggaaaggaaggggcgcatatagcagaggggtgacaatgaagaacaagaaaaattactgaagaaaagctgtacgttatatgttggaaatctttctttttacacaactgaagaacaaatctatgaactcttcagcaaaagtggtgacataaagaaaatcattatgggtctggataaaatgaagaaaacagcatgtggattctgttttgtggaatattactcacgcgcagatgcggaaaacgccatgcggtacataaatgggacgcgtctggatgaccgaatcattcgcacagactgggacgcaggctttaaggagggcaggcaatacggccgtgggcgatctgggggccaggttcgggatgagtatcggcaggactacgatgctgggagaggaggctatggaaaactggca

SEQ ID NO: 160326 - DNA, 676 bp, Homo sapiens
  Payload ID: 11353
  Gene Symbol: NCBP2
  Gene Name: nuclear cap binding protein subunit 2, 20kDa
  ENST ID: ENST00000422610
  CDS Start-End: 331-591
actccgccctcggggaagcttcggagtggggaggtggacccgccaagctcggcactttgagggtgttcggatgtaaagatcggagaattgctggatttcagaagagggaaatttttagtccggactatatcacagtatattttgtggaaaaaggggaggcagcagatattcaaagtagacttttcagtatcagcggagggtgacaatgaagaacaagaaaaattactgaagaaaagctgtacgttatatgttggaaatctttctttttacacaactgaagaacaaatctatgaactcttcagcaaaagtggtgacataaagaaaatcattatgggtctggataaaatgaagaaaacagcatgtggattctgttttgtggaatattactcacgcgcagatgcggaaaacgccatgcggtacataaatgggacgcgtctggatgaccgaatcattcgcacagactgggacgcaggctttaaggagggcaggcaatacggccgtgggcgatctgggggccaggttcgggatgagtatcggcaggactacgatgctgggagaggaggctatggaaaactggcacagaaccagtgagtggtgagagctctgtcagtgacaaacactcctttggcctgttgaatttgctgaagaacatcacctaaagtctgcacacgagccc

SEQ ID NO: 160327 - DNA, 1946 bp, Homo sapiens
  Payload ID: 11353
  Gene Symbol: NCBP2
  Gene Name: nuclear cap binding protein subunit 2, 20kDa
  Uniprot ID: P52298
  ENST ID: ENST00000427641
  CDS Start-End: 58-369
atcgcggacgcagcctcgtgccgggagtcgccgcattgtggtccgcttctctgcactatgtcgggtggcctcctgaaggcgctgcgcagcgactcctacgtggagctgagccagtaccgggaccagcacttccggggtgacaatgaagaacaagaaaaattactgaagaaaagctatgcggaaaacgccatgcggtacataaatgggacgcgtctggatgaccgaatcattcgcacagactgggacgcaggctttaaggagggcaggcaatacggccgtgggcgatctgggggccaggttcgggatgagtatcggcaggactacgatgctgggagaggaggctatggaaaactggcacagaaccagtgagtggtgagagctctgtcagtgacaaacactcctttggcctgttgaatttgctgaagaacatcacctaaagtctgcacacgagcccatttttaccaagatttgatcagtgtctttactgagctggaagcctctgaaagttattaaaggacagaatccaaaagaatgcctttaattcttgtctgagaatcttggccatgtgtcagattatcagaacaattttgttaccaggtcagaaattgtgttctttgacaacagattggatctgtaatgttgattagtctttagccataaccactacacttttagaaagacagaaaaatgtaagaatttgtttttaccataatgagtcttaagtaggttcatgatctacattggggcctgggattatttttttaattttaagtttgcatgagatagcctaataaatggaggtggggccaggcatggtggctcacacgtgtaatcccaacactttgggaggctgaggaggaaggatagcttgaggccaggagtttgagactagactgggcaacatagcaagaccccgtctctacaaagcacaacgaaaaacaacaaatggagttgtgctatgttgtattgctttgcacaaaattaggaacaggtgtttgacaattgaatttgttttctgtgaattctaacctctaaaggcatgcttagaggtcaaggaccttcctgtgtagttggtgcaaaagcaatctccacaggacagcactgcttccatgcttcatacatcaggaaatgaggccagaacttgagtatttactaacacgtttttcaaaagatgtcagtgttatacctaaagctaaaaaaaagcaagggtttgtcatagagggaacctctaaataatttcaggggtaggggagatgttgtcaataggaaatgggataaaatatcaagagacaatgaaaacactgccttgacatgaggaccagcaagtttattcttttcattttcagtgatgttgggaatggactgggttttaaaagggagcttgaagagggaatgtttgacagtcacagaaggttcctgcagcagatgcctcttttagccatttctcatttttttcctcaaattttacctactgaggctcaagccttcacagtgagctgatggtctctacagggaggggagtctagggaatttatttggtatttgtaaggcaagaggtgatttctctctaatatatctgagttattgctcatttaaaactgttaagtccagtataattttccctgatatgaaaaaatgtgcatttttttcacttagcaacaaagtaccttctaatttccaatagtccgtgaaagttggggctgaagtacctaagtgtgaatgtctctcccgttaaactgagtgtagaaatctgaatttttaaaagagctgtaactagttgtaagtgcttaggaagaaactttgcaaacatttaatgaggatacactgttcatttttaaaattccttcacactgtaatttaatgtgttttatattcttttgtagtaaaacaacataactcagatttctacaggagacagtggttttattcggattgtcttctgtaat

SEQ ID NO: 160328 - DNA, 548 bp, Homo sapiens
  Payload ID: 11353
  Gene Symbol: NCBP2
  Gene Name: nuclear cap binding protein subunit 2, 20kDa
  ENST ID: ENST00000455953
  CDS Start-End: 503-548
ggcactttgagggtgttcggatgtaaagatcggagaattgctggatttcagaagagggaaatttttagtccggactatatcacagtatattttgtggaaaaaggggaggcagcagatattcaaagtagacttttcagtatcagcggaggtagggatggaatacggttgggggttggcggggcgggactcattaacccaattatttagtaaacgtttatcgagtgctgtcgccaaatccttgtgctaaaccctagagggagagggaagacagtttctgcgctctgcgagctcataatcccctgtagtgaggattcagaaaagggaaaaatccccttgtgactgggaaaggaaggggcgcatatagcagaggggtgacaatgaagaacaagaaaaattactgaagaaaagctgtacgttatatgttggaaatctttctttttacacaactgaagaacaaatctatgaactcttcagcaaaagtggtgacataaagaaaatcattatgggtctggataaaatgaagaaaacagcatgtggattctgttttg

SEQ ID NO: 160329 - DNA, 1133 bp, Homo sapiens
  Payload ID: 11353
  Gene Symbol: NCBP2
  Gene Name: nuclear cap binding protein subunit 2, 20kDa
  Uniprot ID: P52298
  ENST ID: ENST00000452404
  CDS Start-End: 483-899
gaccagcacttccgggtgagggaggccgggccgcgagacgggaaggccctgggcaagaacgctgagaaacggtttgctcttgtctcattgtgtcgcctcccattcagctgaaatccgcaaacgccaagtggggccccggtgcctgctggcgaggcagggaatgggtgctggaagggcgcttggatatcactgaagccacttgctctggaagacggggaactggaggctcgcttatcccattcgctcgcagccgctccctgtaccccagccagtgccgagaggtttgagcggtggtggtggtggcggctcccgtttccacggttgtgcctccgcagacgactacgtagcaagggggaggggtgcccttctctctcccagagtaggcagaggcgccttcctgatgcagatgcggggctttttgctttgttttttaaatcggcgaagcagtgcccttcggcgattcgggccccttctctgggaggatggtgttacggaagctgtacgcgggtgacaatgaagaacaagaaaaattactgaagaaaagctgtacgttatatgttggaaatctttctttttacacaactgaagaacaaatctatgaactcttcagcaaaagtggtgacataaagaaaatcattatgggtctggataaaatgaagaaaacagcatgtggattctgttttgtggaatattactcacgcgcagatgcggaaaacgccatgcggtacataaatgggacgcgtctggatgaccgaatcattcgcacagactgggacgcaggctttaaggagggcaggcaatacggccgtgggcgatctgggggccaggttcgggatgagtatcggcaggactacgatgctgggagaggaggctatggaaaactggcacagaaccagtgagtggtgagagctctgtcagtgacaaacactcctttggcctgttgaatttgctgaagaacatcacctaaagtctgcacacgagcccatttttaccaagatttgatcagtgtctttactgagctggaagcctctgaaagttattaaaggacagaatccaaaagaatgcctttaattcttgtctgagaatcttggccatgtgtcagattatcagaacaattttgttaccaggtcaga

SEQ ID NO: 160330 - DNA, 2216 bp, Homo sapiens
  Payload ID: 11353
  Gene Symbol: NCBP2
  Gene Name: nuclear cap binding protein subunit 2, 20kDa
  ENST ID: ENST00000447325
  CDS Start-End: 351-611
gagaaacggtttgctcttgtctcattgtgtcgcctcccattcagctgaaatccgcaaacgccaagtggggccccggtgcctgctggcgaggcagggaatgggtgctggaagggcgcttggatatcactgaagccacttgctctggaagacggggaactggaggctcgcttatcccattcgctcgcagccgctccctgtaccccagccagtgccgagagggtgacaatgaagaacaagaaaaattactgaagaaaagctgtacgttatatgttggaaatctttctttttacacaactgaagaacaaatctatgaactcttcagcaaaagtggtgacataaagaaaatcattatgggtctggataaaatgaagaaaacagcatgtggattctgttttgtggaatattactcacgcgcagatgcggaaaacgccatgcggtacataaatgggacgcgtctggatgaccgaatcattcgcacagactgggacgcaggctttaaggagggcaggcaatacggccgtgggcgatctgggggccaggttcgggatgagtatcggcaggactacgatgctgggagaggaggctatggaaaactggcacagaaccagtgagtggtgagagctctgtcagtgacaaacactcctttggcctgttgaatttgctgaagaacatcacctaaagtctgcacacgagcccatttttaccaagatttgatcagtgtctttactgagctggaagcctctgaaagttattaaaggacagaatccaaaagaatgcctttaattcttgtctgagaatcttggccatgtgtcagattatcagaacaattttgttaccaggtcagaaattgtgttctttgacaacagattggatctgtaatgttgattagtctttagccataaccactacacttttagaaagacagaaaaatgtaagaatttgtttttaccataatgagtcttaagtaggttcatgatctacattggggcctgggattatttttttaattttaagtttgcatgagatagcctaataaatggaggtggggccaggcatggtggctcacacgtgtaatcccaacactttgggaggctgaggaggaaggatagcttgaggccaggagtttgagactagactgggcaacatagcaagaccccgtctctacaaagcacaacgaaaaacaacaaatggagttgtgctatgttgtattgctttgcacaaaattaggaacaggtgtttgacaattgaatttgttttctgtgaattctaacctctaaaggcatgcttagaggtcaaggaccttcctgtgtagttggtgcaaaagcaatctccacaggacagcactgcttccatgcttcatacatcaggaaatgaggccagaacttgagtatttactaacacgtttttcaaaagatgtcagtgttatacctaaagctaaaaaaaagcaagggtttgtcatagagggaacctctaaataatttcaggggtaggggagatgttgtcaataggaaatgggataaaatatcaagagacaatgaaaacactgccttgacatgaggaccagcaagtttattcttttcattttcagtgatgttgggaatggactgggttttaaaagggagcttgaagagggaatgtttgacagtcacagaaggttcctgcagcagatgcctcttttagccatttctcatttttttcctcaaattttacctactgaggctcaagccttcacagtgagctgatggtctctacagggaggggagtctagggaatttatttggtatttgtaaggcaagaggtgatttctctctaatatatctgagttattgctcatttaaaactgttaagtccagtataattttccctgatatgaaaaaatgtgcatttttttcacttagcaacaaagtaccttctaatttccaatagtccgtgaaagttggggctgaagtacctaagtgtgaatgtctctcccgttaaactgagtgtagaaatctgaatttttaaaagagctgtaactagttgtaagtgcttaggaagaaactttgcaaacatttaatgaggatacactgttcatttttaaaattccttcacactgtaatttaatgtgttttatattcttttgtagtaaaacaacataactcagatttctacaggagacagtggttttattcggattgtcttctgtaataggtttcaataaagctggatgaacttat

SEQ ID NO: 160331 - DNA, 2220 bp, Homo sapiens
  Payload ID: 11353
  Gene Symbol: NCBP2
  Gene Name: nuclear cap binding protein subunit 2, 20kDa
  ENST ID: ENST00000428425
  CDS Start-End: 92-256
gagatgctcgcctccgcgcgtttccgcttccgccatcgcggacgcagcctcgtgccgggagtcgccgcattgtggtccgcttctctgcactatgtcgggtggcctcctgaaggcgctgcgcagcgactcctacgtggagctgagccagtaccgggaccagcacttccgggtgagggaggccgggccgcgagacgggaaggccctgggcaagaacgctgagaaacgggtgacaatgaagaacaagaaaaattactgaagaaaagctgtacgttatatgttggaaatctttctttttacacaactgaagaacaaatctatgaactcttcagcaaaagtggtgacataaagaaaatcattatgggtctggataaaatgaagaaaacagcatgtggattctgttttgtggaatattactcacgcgcagatgcggaaaacgccatgcggtacataaatgggacgcgtctggatgaccgaatcattcgcacagactgggacgcaggctttaaggagggcaggcaatacggccgtgggcgatctgggggccaggttcgggatgagtatcggcaggactacgatgctgggagaggaggctatggaaaactggcacagaaccagtgagtggtgagagctctgtcagtgacaaacactcctttggcctgttgaatttgctgaagaacatcacctaaagtctgcacacgagcccatttttaccaagatttgatcagtgtctttactgagctggaagcctctgaaagttattaaaggacagaatccaaaagaatgcctttaattcttgtctgagaatcttggccatgtgtcagattatcagaacaattttgttaccaggtcagaaattgtgttctttgacaacagattggatctgtaatgttgattagtctttagccataaccactacacttttagaaagacagaaaaatgtaagaatttgtttttaccataatgagtcttaagtaggttcatgatctacattggggcctgggattatttttttaattttaagtttgcatgagatagcctaataaatggaggtggggccaggcatggtggctcacacgtgtaatcccaacactttgggaggctgaggaggaaggatagcttgaggccaggagtttgagactagactgggcaacatagcaagaccccgtctctacaaagcacaacgaaaaacaacaaatggagttgtgctatgttgtattgctttgcacaaaattaggaacaggtgtttgacaattgaatttgttttctgtgaattctaacctctaaaggcatgcttagaggtcaaggaccttcctgtgtagttggtgcaaaagcaatctccacaggacagcactgcttccatgcttcatacatcaggaaatgaggccagaacttgagtatttactaacacgtttttcaaaagatgtcagtgttatacctaaagctaaaaaaaagcaagggtttgtcatagagggaacctctaaataatttcaggggtaggggagatgttgtcaataggaaatgggataaaatatcaagagacaatgaaaacactgccttgacatgaggaccagcaagtttattcttttcattttcagtgatgttgggaatggactgggttttaaaagggagcttgaagagggaatgtttgacagtcacagaaggttcctgcagcagatgcctcttttagccatttctcatttttttcctcaaattttacctactgaggctcaagccttcacagtgagctgatggtctctacagggaggggagtctagggaatttatttggtatttgtaaggcaagaggtgatttctctctaatatatctgagttattgctcatttaaaactgttaagtccagtataattttccctgatatgaaaaaatgtgcatttttttcacttagcaacaaagtaccttctaatttccaatagtccgtgaaagttggggctgaagtacctaagtgtgaatgtctctcccgttaaactgagtgtagaaatctgaatttttaaaagagctgtaactagttgtaagtgcttaggaagaaactttgcaaacatttaatgaggatacactgttcatttttaaaattccttcacactgtaatttaatgtgttttatattcttttgtagtaaaacaacataactcagatttctacaggagacagtggttttattcggattgtcttctgtaataggtttcaataaagctggatgaact

SEQ ID NO: 160332 - DNA, 660 bp, Homo sapiens
  Payload ID: 11354
  Gene Symbol: NCBP2L
  Gene Name: nuclear cap binding protein subunit 2-like
  Uniprot ID: A6PVI3
  ENST ID: ENST00000509000
  CDS Start-End: 199-660
aggccctgtgggtcctatatgtgccctgcaacttggggaaaatggaggtggggttgtggtctctatgctgtagcagccggaaagccaaaaacaagccgtacttctcgctcttgacaggatcccaaggttttcagtggtggtgtcactgctgccaagctggaccgaaaacggccatcggcatgctgcccaaccagcaccatgtccaaagacctgaaaattctatgtaaagaccctgctttggagctgagctgctaccgggaccatcagttcagtggccgtaaatttcagcaggaaaaattactgaaggaaagctccacattgaatatggggaatctttccttttatacaaccgaagagaaaatacatgaactctttagtagatctgatatcaggaatatctttatgggcctggataaaataaagaaaacagcatgtggtttttgctttgtagaatgccataacagagctgatgctgaaaatgccatgcggtttctaactgggacctgcctagatgaatggattatctgcactgattgggatgtcggttttagagagggtcaacagtatggtcgcggtaaatctgggggtcaggtaagggatgagtttcgtgaagattttcattctggtagaggaggctttggaagacagactcagatctag

SEQ ID NO: 160333 - DNA, 12770 bp, Homo sapiens
  Payload ID: 11355
  Gene Symbol: NCBP3
  Gene Name: nuclear cap binding subunit 3
  Uniprot ID: Q53F19
  ENST ID: ENST00000389005
  CDS Start-End: 29-1891
ctctcagtggtgcggccggcaggcagcgatggcggccgtacggggcctgcgggtgtcggtgaaggcggaggccccggcggggccggccctggggctcccgtcccctgaggcggagtccggtgttgaccgtggcgagccggagcccatggaggtggaggagggcgagctggaaatcgtgcctgtgcggcgctcgctcaaggaactgatcccggacacgagcagaagatatgaaaacaaggctggcagcttcatcactggaattgatgtcacctccaaggaagcaattgaaaagaaagagcagcgagccaagcgcttccattttcgatcggaagtaaatcttgcccaaagaaatgtagccttggaccgagacatgatgaagaaagcaatccccaaggtgagactggagacaatctatatttgcggagtagatgagatgagcacccaagatgtcttttcctattttaaagaatatcctccagctcacatcgaatggttggatgatacctcctgtaatgtagtttggctggatgaaatgacagccacacgagcacttatcaatatgagctccctgcctgcacaggataagatcagaagcagggatgccagtgaggacaagtcagctgagaaaaggaaaaaagacaagcaggaagacagttcagatgatgatgaagctgaagaaggagaggttgaagatgagaactcaagtgatgtagagttggatacgttgtctcaggtagaagaggagtctttgttaagaaacgatcttcgtccagctaacaaacttgctaaaggaaataggttattcatgagatttgctacaaaagatgacaaaaaggaacttggagcagccagaagaagtcagtattacatgaaatatgggaatccaaattatggaggcatgaaaggaattcttagcaattcatggaagcgaagatatcattcccgtcgtattcagcgggacgtgatcaagaagagagccctgattggggatgacgttggcttgacgtcgtataaacatcgacattctgggctagtgaatgttcccgaggaacccattgaagaggaggaagaggaggaggaggaggaagaggaagaggaagaagaagaccaggacatggatgcagatgacagagtggtggtagagtaccacgaggagctcccggctctcaagcagccccgggagcggagcgcgtctagacgatccagtgccagcagctcagactcagatgaaatggactatgatctagaactgaaaatgatttccacgccttcaccaaagaaaagcatgaaaatgactatgtatgctgacgaagtggaatctcagttgaaaaatattaggaactccatgagggcagatagtgtatcttcaagcaatatcaaaaaccgaattggtaacaaattaccacctgagaaatttgcagatgtccgacatctattagatgagaaacgtcagcactcccgtccacggccaccagtcagcagtactaaatcagatatacgccagcggttaggaaaaagaccacattctccggaaaaggcttttagtagtaaccccgtcgttcggagagagccctcttctgatgtgcatagtaggctaggtgttcccaggcaggatagtaaaggcctctacgccgatactcgggagaagaaatcaggtaatttatggactcgcctaggatctgcacccaagaccaaagaaaagaatacgaagaaagtggatcacagggcgcctggcgctgaggaagacgactctgagctgcaaagggcatggggggctctgattaaggagaaagagcagtctcgccaaaagaagagccggttagataacttaccatctctccagattgaagttagtcgggaaagcagctctggttcagaggcagagtcctgatgcccctggggcctatggcagctgccctaaagcctgacattcttgcacagggtggggcgcgcagtaggaacctcccccgcaggagctggcgccctctcgctcctgctcacacagtcaccctccgctcttgctacttcggcaagacatcttaagaatgtgacacattttcaagggcatctctatctttcgctgcagagttgtagttctgggccctcgattcctttcccaccaccccacaggctttaccctttgagaaaaaggcagccctccagattttgtagacatttttcttaatatttttaacattgtgtcttttaaaagaaatgttttacacagttcatccaaagagcagagaactgaacttctcactattgccttggccctgacagctgttaccagcacccttttcccaagaaaagtcaattcccaggtgcttattggacatccttcgagggggaagaggagggaagcggccagctcacccttccgggaccctagtgtggggcgaatctcacggacctgacctcagaggtgcaccagtgccgcccaggtagataagagctgcagcattgactgtgcttccgttcttccctcggggattgctcatggcatgggcctcttacgtgctgtcagcttgatgtgaagatcaagttcagtgctgtgggatttttaggaacaaaaaactgtgacgtctggatttggggttgatttttgtgctggggtgggattatgggtcaatgttgaagaatttttaagtctgtattatgtttaaaacatgaatgatttgaaagtttaaatttttaatttttatatgtggaaattcttcctgttggctaaaggggaagctcaagtggtgtcgtcttttgtgctgttaaatatatattctattctttggaagaaggcagagagaggagtcttattatttttaaatgctcctagttgtatagtctgtctgttgtacatagagttcagcttgttttttggctccagtaggaaaaaaaatccatccatctgagatggggtcctgttgtttattatcactctagaagttatacattgatatttattctttctgtccccacgttgtggcacctgaagacatcttcaaaattggcagaaaagataatagttataaaaattttagttcatttatttttaaactcctttcagattattttaccattaggaggaggtagattgtttcgtcttcctgtctgatttttgttttgtagtatttaattttgtattcctctgcagttttaagaaacagtgtttttcttcggtttgctggaacatgggcgttagagatggtaataaaccgtggtcctttttgcgatgtcacgactcttcacctgcctgggctgttgtgcacacagtgcagcctggatcctgtcgatctttacttgtggcggagctaatggtcacattgatagttgattacactgtggcacgaattaatgcagaacactgttattaataaaggaagtaaagggctgcaagatttgagagctgcaacaaaaactgtattgtcccatattttgttgattaaccttgctttttctccctccctttagagagattagaggatataaccatgatatatttcagcttcttattaggattctaggaaagagatggttctggtttctctgccagttgagacttaagacatctgagatttctcagcttttctttccctgtgaagcatacagctgagagccaggttcttaggaagggtcagggtttggggagttggtagagtgaggagtgcgggggcctgagaatcggacacctggatgccaacccctggctctgctccatggacctgggcctcagttttcccgtctagcagttgagtgggctgttaccagaattcctggctttgttggtgcatctcagtggcggtttactcttcccaagctgtgacggcagtgggctcgccagcatgaatttctactgcaggtggaggaggcgccagggagacaactgagggcgcgcatgaggtgtagacaggggcttattcccatcccagcacagtctctgcttctactgacggggcaaagatgtcttgtggtcagcgtcccagctggcatgcctctgcagggtttagaatatgctccttcacagactttccttttggttttacaccagcagctcaggtccatttgttccacggcctttcagcactcagcagtctcctgctacagatcagcgaagccattctggaaggaggtggtgtgcagtcaaaactgggtctttgatgtaaccaagagaaatacacactcgagtaaccttacagttttcacagacacacagagagaacccagaaaggcagctttaaagatttttacttctcggagttactggccttattagtttctctaaccctcctgcccactctcagtcactcagatcttgcaacatcttgagtgtgtcctgaatgatgaggccttttctttggagtttaagagtaagaatggatagtcaggacaggcccgtggcaggcagctgggcgtgattttaccctggacactccccacacatgtgggcacagggctgcacactttgtgtgttcctcttagtcttatgtgtaggagattttacatacatgtttgctgcttgatgataattgcagatacctcatttgtttcccactctcctctctggagagttaccaggtacccaggataatttgtggcgtcctcaggatgtagtctcctcctctggcccccttgtagtctgatcctgtgaacccctctccgttcttcagccactgccctttccagctgcatttgtacagcagcctcttcactggtctctgccctgtctccattctgcacactgcagcgggatgaacctttgttgttgttaccagcttaatttagatgtaatttgcatacagttcagccatttaaagtgtacacttgagtggcttttagtatatttacagttatgcaccagcaccgtaatcaattttaaaacactttgatcacccaaagaaaccctgagtccattagcaattctccctattccctcttccctcttagcctctggccaccactgatcttccttctctctctgtggatttgcctgttctggatagttcatataaatgggatcatatactatgtgtctatttgtgactggcttcttaacatatttctgaggttcatccatgtcatagcttctatcagtatttcattttttaaaattgccaaataatagtccattttatgggtatgccaccttttttttaatccacattggttaatgggcatttgagttgtttctactttagggctatatatatatatttctatttctattatttatttttgagacacagtttcgctcttgttgtgcaggctggagtgcaatggcacgatctcggcccactgcaacctccacctccggggttcaagcgattctcctgcctcagcctccagagtagctgggattacaggcatgtgccaccacgctggctaattttttgtatttttagtagagacagggtttcaccatgttggtcaggctggtctcgaactcctgacctcaggtgatctgcccacctcttcctcccaaagttctgggattacaggtgtgagccactgcacctggccctactttttggctattatgaatagtgttgctacgaacattcccgaacaagtttttgcagggacaggtattttcatgactcttgggtatatacctaggagtggaattgctgagtcataattatctttaaccttttcaggaaccaccaggtggtttttccaagcagctgtatcattttccattccaccagcagtgtgcgagggttccagtttctccacatctccaccaacactcattattttctggtgtgaagtggtatctcattgtagttttttgtttttattttttctttttaaaatacattttgtacagatggggtttcgttatgttgcccaggccgtctagcactcctggcctcaagtgatcctcctgccttgacctcccaaagtgccgagattacaggcatgagccaccacgcctggctctcattgtggttttgatttgtatttccctaatgactaatgatgtcgggcaccttttcacatgcttcaggatgaactttcttaaatatatatctgattctgttattcctctgcttgaacgttttccaaagcttcactattgccccgagaataaattccacactcctgatcgcatgagcccagtaattcaaggctgtggtgagctatgatcaagccactgcactccagcctgggcagcagagcaagacctgtctcaaaaaatacatacatacataaattccaccctttttgatagcatgttatgaggctcaccaaggtctatcctctggcagtatccctggcctgttctccccatctcccctgccctctgctcaccagttccctaaatgtatcttgatctcactagccctacagactgtgcacagagctgtttctacctccagtgacatgcttccgcccaggcttctccccctcccgcctcaatcttcccctcaccaacttaaggtcttaggggcccttctaggaggcagtccccaacttccagagccagggtataggctacttctatgtgtcccatggtactgccacagaagagtctcagctctctccaggattcagttctaaggtcagtgcctaagataaaaatggagtgtaattaaaattcctcttagaaatctaaggaaggtgccctattgaagaccaacatcttgaggtcccatgtagtcatttcttgcccatgtgggaacacattactgtttggttgagtaccaggtgaagtgattggcctgcagttagggctgtgttgtgcaaaaatcacttgttttggggtgttagaaccacatttaggcgagaagatcacttttggggagcttgggaactgaggcaggccgcaggtgcagcagaggcatgagcttgcccgggcccgccctcttgtctatgctcatggagtgaaggaggggccagcggaatggcccaaacaactgatttgtttttctttttttaaatctttttcagacaaataccattgtgtttaagcgaaatgtgtgtataatgccaaatcactgtaccccacaaccctgcacacctctacactggactgtaatttcttgttcctagtttgtcttgctagactgtaagctccgtgagagcagggaccgtgtctgcttgttgagtgggctttcccctgtgcctgccagcatgcctggcatctagcaggtcttctgtaaagatgggatgagtttgtaaaccctccagcctcaggagtggctccatcctctgaggctctggggccctctggcaggctagtcatttttctgccatgtacgtacaatgctttattttcatgttgtattttcctttctagccagtaagcaagctcctaatgagcaagtttctttgtggtgttatctctgtatcctttcatcaggccagcccagagtaagtagtgcttcgaaagtgtttggtaaatgaatgaattatggtaacccagcccagttctggcatcactgtctgcaggttagtctaattccagatgaaagccccagattcgaaaaagggaagattattcagaagtgcatatggttgtataagaaaaaaaaatctcattaaatagacctgagtaaacttcaaattttgatgatctggccatgtcggagctgaagcttaccagctctctaaagcatttgctagggaatcatgcagatggtccaaaatattttttagaaaagcattcatctgtcccgggatagaagtagaggaagctggtaggcaggcgctagaccctaaagaaggactgctgagccagttcttaagcctgtggtcctgtcggtgaggaaagtgagagcagtccagagcaggtgaaaagagcagagctcattcctccagtggctcttttgcctaaagcagcattcctcaaacttctcactcgaagcattaagttacggtgagatgctaacacacgctttagacttaagtcaaaatttactgtgaagccacagcaaaccatggcttcacagatgaattagttgctacacaaataagttcgatacataagtacagtaattgcttttaaaccttataataagcagtaaattagaagttaaaccatgtttttcttttacgaactgaaagaagagaatgcttttgatactgagaatcgcacactgtgtccaggaagattgttcttgcataaccagacccacaataaatatctacaacttttcttacatgtttataaaataaatcttagaagaaaaatattgtagcttttttttttttttttttttcaatgaagctctatgaacatttcacagaactttgttcctgggagtagttagggaaatgctgcttcaaaaagccaattttaagtagttgtgaggcatccgagtggaatttggctgcactatccataaaacttgagagtataggcggtatttcacctaccaaggtcagtaccctgcctcaggattcttactgttcatttgagcaattccggggccctctctggatgaccaggttcgtaaatagttgagactttgtgttatctcaaattgtcaccatcacctctgggccaatataggttagtgaggtcgagaggcccacaccattgacagaagagaattctcaggccgggcttggtggctcacgcctgtaatcccagcactttgggaggccgaggcgggtggatcacctgaggtcaggagttcaagagcagcctggccaacatgttggaaccccgtctctactagaaatacaaaaattagctgggcgtggtggtgggtacctgtagtcccagctacttgggaggctgagacaggagaattacttgaacccgggaggcagaggttgcagtgaggtgagatcgcgccactgcgctccagcctgggcgacagagcgagactccgtctcaaaaaaaaaagaaaggattctcaccttcctgtcccttcctaggagttttgtggtagtgttcgatcctgtgatgtggccatcttctcctcagggcctgtgagaggcaggcagcatctttagctgaggtagaatgcctgttggggaaagtcaaataggatggtggctggggccggggctctggggactccttctgccccacatactcaattggaaagactgagcaagtcccctcacctccctgggcctcagcttccctgtctgtcaaatggagggctcaactggggtgagctccagtttccttctagtgctaacgcgtgttcaaggatccttgctctcctttccggggagcatcaggggtgtgggctagatagcaggaaagaagtaggggtttgtaaacaagagatccaagcccctggacccttggtcccagcacccagtgcagccctcgccctcccagccccttccttagaaaggacaagaaaatccactccttgttctctccctgtcccatcacccccgcagtcccccacagatctgaggccggaggatgccaacatggtgagcaccctcttgctgtcttattcacgtaggcttttcttggtgcctgcacatggctcttgtaaggccaccaatcttgctggattatgacctcatctaaccttaattacttcctaaaagccatatgtccaagaagagccacattgggggttagggcttcaacatatgaatttggaggacatttacagttcagtccacagcacctggtcatgtggagatcccagtctgcatttgtgggatgaaatctctgcttttttaaagtttacacaccacctagctgggcacgtggctcacacctgtagtctcagcactttgggaggccgaggcggggatcacctgatgtcaggagttcgagaccagcctggccaacatggtgaaaccccgtctctactaaaaatacaaaaattagccgggtgtggtggcgggcacctgtagtcccagctactcgggaggctgaggcaggagaatcgcttgaacccaggaggcagaggttgcagtaagctgagattgtgccactgcactccagtctggatgaaagagcaagactccatctcaaaaacaaaaataaaaaaagtctacacaccaaaagagctgaaggcaggagagtttgtggtggttcagagtcctgattctggaggaaacaggcctgtttggagtcccagctctgctccttactagctatgtggcctctcagaggcagcatccttatctgagaaatcgggttgaccttgtaggtggctgagaggctcagatgagggctcgcatgtgaggccttggcactgagcagggcactcctaccgagtgttcaaaggtcgtgagtaccactgctctgcagccctgggctctggtctcagcaatgccgtcactctttctggcttcctaagagtcagaaggcaagtgggagaatagaaccatttcctgtgtctgaaggctgtgcctcagtgcttttgactcactctgaagacagcaggcagccctttctgttttttttggagatgaagtcttgctcttgtcgcccaggctggagtgcaatggcgcagtctcggctcactgcaccctccgcctcccaggttcaagcaattctcccaccatagcctcccgaagctggggctacaggcacacgctgccacgcctggctaattttttgtgtttttagtaaagacagggtttcaccatgttgcccaggctggtctcaaactcctgaactcaggcgatccgcctacctcggcttcccaaagtgctgggattacaggtgtcagctaccacgcccgacccacaggcagccctttcacctcacgccgagcacgtctcctccatccatgaacattttgcaacttttttttaaagagacaggttcatactatgttgtctagattggactcaaactcctgggctcaagctttcccaagtagcttgaacctcttaagtaactgtgactacaagtgcacctggccactttttctgagacggagtctcgctctgtcacccaagtggagtgcagtggcatgatctccgcccactgcgagctccgcctcctgggttcacgccattctcctgcctcaccctcctgagtagctgggactacaggcacccgccaccacgcctggctaattttttttgtatttttagtagagaccgggtttcaccgtgttagccaggatggtctcgatctcctgactttgtgatccgcccgcctcggcctcccaaagtgctgggattacaggcgtgagccaccgcgcctggcccacctgcccattttttaaaaactttattcttcctggtatcaaggggagaaagaaaaaaattttttaaaatatttaaaactttattttgaaataatttcaaaatcacagcagtttgaagggtacaacaaagaacattttgccacattttctctttcattcgttccctcctcttctccctcacccctgtttcttcctatcctctctgaaccatgaaccatttgaggattatttgtatacatcatgctcgtttatccgtaagatgttttagtgaacatttcccaagaacagggacagcctctcacatgcccatggtacagttctcaaattcaggaaatgtgtaatattctctgatcagcccaggagttgctaatttgtagttcctgtttcaaatttgccaactgtcccaataatgattttgaaagccgttgtttttctggtccaggatccaatccaggatcaagcgctgcctttagttgtcctctctgcagcctcctttcgtttggagcaggtcctcagcctttctgtctttcatgacattgatgtttgtgaagagtacagtccagtttctgttgtagaacgtccttgaagttggtcccggaatatttgtttaaagtgagttgggaaaccacattcacatgtcttttggttatgtgtgtatttgtcaaacagccagccttgtgctgcgtgctgtgatggggagcattactcaacagagcctggccctgaccttggggatgtagtttgggtttgtggggaaagcagctaccgccaggtgggctttacggacccctgtgtgtctcatgactagaggcactgacgcttggataaatacatactggatggatgcaggatgagtccgcattctagaagtgtgcagaggtacagaagtggccctgctccctgtccagcacccagtcatcagctttccctggcttcccgaggcaccctgacgttcacactccaaacacaaagtcttctctcaggaatctcgagtgagctgcagtctgggttctagccctgccctagcagggatctgctcagtgactgggctgctctcttcctgctttaggccaatgcgggggagaggagaccactgtgactctccccagtgcccttggagcgcagaatgaagtgaggggaggaggagggtcacgagccctggagcgctgggaagacaggctgtaggccgcaggccccgatcctgcctgggacgaggttcaacagaagtaggatggtttcatcatgacctggcaggaaaaccaccagacctggaattttgcttttacaactgtttaacttctgtttcatacaggatggaaaccggtgaattgtaatctcacataaccgagcaagatctagtagtcataagcactttgtcagagcaaagcagacaaggcaaagtgttggaaatgtcatcggatcttcacagaaccttagccaagcagcctttcaatgcgagaaacaaaataacatggatttttatctagtaatgaagtcaacaccattgtccaccctgggttaacacattcacatctcaaagcgaatggggctgcagacactcgtgttagagagccttggaatgtcctgcctttttacgtttaattaaaattaaataaaatatacaaaatt

SEQ ID NO: 160334 - DNA, 249 bp, Homo sapiens
  Payload ID: 11355
  Gene Symbol: NCBP3
  Gene Name: nuclear cap binding subunit 3
  ENST ID: ENST00000576523
  CDS Start-End: 1-243
cccaagaccaaagaaaagaatacgaagaaagtggatcacagggcgcctggcgctgaggaagacgactctgagctgcaaagggcatggggggctctgattaaggagaaagagcagtctcgccaaaagaagagccgctgttaccagcacccttttcccaagaaaagtcaattcccaggtgcttattggacatccttcgagggggaagaggagggaagcggccagctcacccttccgggaccctagtgtggg

SEQ ID NO: 160335 - DNA, 2701 bp, Homo sapiens
  Payload ID: 11355
  Gene Symbol: NCBP3
  Gene Name: nuclear cap binding subunit 3
  ENST ID: ENST00000574911
  CDS Start-End: 1-109
gtctttgttaagaaacgatcttcgtccagctaacaaacttgctaaaggaaataggttattcatgagatttgctacaaaagccccaggtctaggatccatccaggactgagtgtatgacaaaaaggaacttggagcagccagaagaagtcagtattacatgaaatatgggaatccaaattatggaggcatgaaaggaattcttagcaattcatggaagcgaagatatcattcccgtcgtattcagcgggacgtgatcaagaagagagccctgattggggatgacgttggcttgacgtcgtataaacatcgacattctgggctagtgaatgttcccgaggaacccattgaagaggaggaagaggaggaggaggaggaagaggaagaggaagaagaagaccaggacatggatgcagatgacagagtggtggtagagtaccacgaggagctcccggctctcaagcagccccgggagcggagcgcgtctagacgatccagtgccagcagctcagactcagatgaaatggactatgatctagaactgaaaatgatttccacgccttcaccaaagaaaagcatgaaaatgactatgtatgctgacgaagtggaatctcagttgaaaaatattaggaactccatgagggcagatagtgtatcttcaagcaatatcaaaaaccgaattggtaacaaattaccacctgagaaatttgcagatgtccgacatctattagatgagaaacgtcagcactcccgtccacggccaccagtcagcagtactaaatcagatatacgccagcggttaggaaaaagaccacattctccggaaaaggcttttagtagtaaccccgtcgttcggagagagccctcttctgatgtgcatagtaggctaggtgttcccaggcaggatagtaaaggcctctacgccgatactcgggagaagaaatcaggtaatttatggactcgcctaggatctgcacccaagaccaaagaaaagaatacgaagaaagtggatcacagggcgcctggcgctgaggaagacgactctgagctgcaaagggcatggggggctctgattaaggagaaagagcagtctcgccaaaagaagagccggttagataacttaccatctctccagattgaagttagtcgggaaagcagctctggttcagaggcagagtcctgatgcccctggggcctatggcagctgccctaaagcctgacattcttgcacagggtggggcgcgcagtaggaacctcccccgcaggagctggcgccctctcgctcctgctcacacagtcaccctccgctcttgctacttcggcaagacatcttaagaatgtgacacattttcaagggcatctctatctttcgctgcagagttgtagttctgggccctcgattcctttcccaccaccccacaggctttaccctttgagaaaaaggcagccctccagattttgtagacatttttcttaatatttttaacattgtgtcttttaaaagaaatgttttacacagttcatccaaagagcagagaactgaacttctcactattgccttggccctgacagctgttaccagcacccttttcccaagaaaagtcaattcccaggtgcttattggacatccttcgagggggaagaggagggaagcggccagctcacccttccgggaccctagtgtggggcgaatctcacggacctgacctcagaggtgcaccagtgccgcccaggtagataagagctgcagcattgactgtgcttccgttcttccctcggggattgctcatggcatgggcctcttacgtgctgtcagcttgatgtgaagatcaagttcagtgctgtgggatttttaggaacaaaaaactgtgacgtctggatttggggttgatttttgtgctggggtgggattatgggtcaatgttgaagaatttttaagtctgtattatgtttaaaacatgaatgatttgaaagtttaaatttttaatttttatatgtggaaattcttcctgttggctaaaggggaagctcaagtggtgtcgtcttttgtgctgttaaatatatattctattctttggaagaaggcagagagaggagtcttattatttttaaatgctcctagttgtatagtctgtctgttgtacatagagttcagcttgttttttggctccagtaggaaaaaaaatccatccatctgagatggggtcctgttgtttattatcactctagaagttatacattgatatttattctttctgtccccacgttgtggcacctgaagacatcttcaaaattggcagaaaagataatagttataaaaattttagttcatttatttttaaactcctttcagattattttaccattaggaggaggtagattgtttcgtcttcctgtctgatttttgttttgtagtatttaattttgtattcctctgcagttttaagaaacagtgtttttcttcggtttgctggaacatgggcgttagagatggtaataaaccgtggtcctttttgcgatgtcacgactcttcacctgcctgggctgttgtgcacacagtgcagcctggatcctgtcgatctttacttgtggcggagctaatggtcacattgatagttgattacactgtggcacgaattaatgcagaacactgttattaataaaggaagtaaagggctgcaagatttgagagctgcaacaaaaa

SEQ ID NO: 160336 - DNA, 6496 bp, Homo sapiens
  Payload ID: 11356
  Gene Symbol: NUCKS1
  Gene Name: nuclear casein kinase and cyclin-dependent kinase substrate 1
  Uniprot ID: Q9H1E3
  ENST ID: ENST00000367142
  CDS Start-End: 304-1035
gtctccaatgagcaggcgtgttggggaggagcgcacaaaccctagtgggtttggttgcacggcggctttggcgcattttcggctggtttgattcatccattttgaagagacgggggagcggggggctcgtctgttccaggagccctgaaccaaagagcagcggagtttgagaagccagcagctcggggttcggcagcagcggtcccatcggctgaagttcggggggggtggggcgccgagcgcgcggggtggggggggtcctggtctttggcttctcgactcggtcctgtttcgacagcgaacatgtcgcggcctgtcagaaataggaaggttgttgattactcacagtttcaggaatctgatgatgcagatgaagattatggaagagattcgggccctcccactaagaaaattcgatcatctccccgagaagctaaaaataagaggcgatctggaaagaattcacaggaagatagtgaggactcagaagacaaagatgtgaagaccaagaaggatgattctcactcagcagaggatagtgaagatgaaaaagaagatcataaaaatgtgcgccaacaacggcaggcggcatctaaagcagcttctaaacagagagagatgctcatggaagatgtgggcagtgaggaagaacaagaagaggaggatgaggcaccattccaggagaaagattccggcagcgatgaagatttcctaatggaagatgatgacgatagtgactatggcagttcgaaaaagaaaaacaaaaagatggttaagaagtccaaacctgaaagaaaagaaaagaaaatgcccaaacccagactaaaggctacagtgacgccaagtccagtgaaaggcaaagggaaagtgggtcgccccacagcttcaaaggcatcaaaggaaaagactccttctcccaaagaagaagatgaggaaccggaaagcccgccagaaaagaaaacatctacaagccccccacccgagaaatctggggatgaagggtctgaagatgaagccccttctggggaggattaaaagtgatgatggtctggggagagattttattaaaaaaaaaaagaaaaaaaaagaaaaaagagggaggaaaaaaaagaacctacttaagatagaacatggttttggctatggcttgactcatgggctttcagtgcttttttccatttgttgaaagtaacatttctctctctctctctttttttttttttttttttaaagcaaaccattgtatgtgtaagtgtttaagttacctttttgtctattggtctctttgccagccctcccctttcccaatgaaagccatgtcaaattaatcactggattgactgcttcatctttttatttttaatgaaaggtgtaccacggttgtaaagcaataagatttgagatgaacactattgaaacttcgctttttgctaaaaaatagcaagttgaatagtaatcaaaaaacatagaaagattttagttcaaaatgattgctcctttctctacctggacttttaaaaaatcaattgtcatctaatatgagtttatttgtctatagacacaagtatcaatgtctaaaaaaaatcatgactttaaacttccaccgatgaggcaggtaggagataaagatgaattctgaactgttactaaaagtactcattttttaccttgtagggagggtgggcaatggggttacctgaccttatttgagggtatgggctttcttttttatttcatcacttgttatctcaaagagactcggagccagtgatccttttatcctgctacagtctttagggagctaaaaaaaaaaaaaaagcaggggctgccaaaactcttgatttcatatttccttctctaaatatatatgtatcctgttttttggataaaattttaccaagaatccaaaaaaaaaaaaaccctagaatttaatcaacaagatcagtctacaggtcacagtggatttcttttcaaactgacaatgtttaggttttaagcaaataaagttccagttaatgtgaaactcagtcacaaagagttgagatttttcctttatgaaatagaattgacattcttttatgctataaatgtgcattcaggtcccattaaccatgctctgcttttatttggggatagaacattttctttttcatatcccgatcttcccatttcttcatagaaatgtgataagaagtacatccctgtgatcctgctgcttcgtagagcaccactgcacaccctaccccgagtgccaaccacctctgctataggacactattttcctggccctattcttcacttacttcccatcctgtccttgactaggaatatgttaaatgctgctcccatacaattcagttagctcttgtctttttatttggtccaacccctgctttactgctcatgctgcttaaagcaggagggactagagaaacaaggcattttaggaggcctgtgtgcagttgaaaaccgacttttacacgccttataaaagcagtcaggagatagatccgtaggtttgatccttcacatctaataccaggcgctaatgggaacaaggtttaaagggtcctggtatgctaataaattgaaaaattagtgaaatttaaacttctgcctttttttcctgccttttaatctagatttgcttcctcaatatcctactttgtggtttactaggaacatgcttactctgatctttttttaaaaaacacacagtggcagagtcatttcactattgcactgtgtgttaaagaatgaataaggagttttcagttacatggccaaaaatacaggacttgaacataaatagcagttggatcattctctttcatgacggttaaattcagaggtgtgaactttgtaatgagggtgttaaagattaatctatttgcctaaatgggtttgttcaggtatccatttttaacaaagaagtttgtgttcatatagtaaaagacctatcagtgtttccaccatgcacttctattttttaggagtttataattttaagtcttacattcctagtaacatttgggcttttcttaggttatgtttcgtgaagatttggggggagggctcttttaaaacttcagcctcagttgtttaacagtctctttaatatattaatctgcactaacatctctgtgatatatgcacatattttagaggtaatcatgtcttctagattacttgtgtgcatttgattgggcttcttgtttagggtcccttttaaaattaattcattagattgaaaaatgtattctatatttctgatagactggacagaaggatctgtgtccccaagtgagacaggctctgaataacctttgttttctccactttttattgatgatttaaaacactctagtcttcccctcaaatcatgcatgcaaataggaggacagtggtggtgactcaactggatacaggtgctcaatagtcaggcttgatagtgatgtcaggacgcattacaagctgtaagccgatactgactggccattggcaccatccttgactaaccttcctctttttctctagtgtgcctatggtgaaatggcaatagcattcactgtcgtattttgcagtgctcaggaagtgggacgttaactttgaaggtgcttgtttgtattagctctgctaggtttacctctacaacgtagatttcagcagctatgctgactgacactacattctagttcttaagattttttttccagatccccccttccccagctagacatacgtagcatactttcatcttattcagtctttctgtaacctgctgctgcttttagtcctcctcacctcagatcggaatcaatggagtgggcccagaggatacattttaattccagtaatggtaggtagatttgtcctgctttctaaaacatctcctcatttcatatttccactccatattgattccataagggaaaattaatgggtgtttcctcctttagggaggtaatgcaaagagtgtggacatcttctaatcttgaggaacagtagttgatttcccttgaaggagcttacatattgactgttttcacaataacctgtttgccccagttcaatcctcattttaatacttaatttggtactggctcaaatagcattttcttacagataacaaatcaagagtgaaatttgaggttatactccagtaaagtttttaacacttgtgaatatggtcagctagactaaacttgactcttttttttaatggcttttttatctgtgaacattcagataagtggattttcaagtactggttggggatgggaatcgtgcttttctttaaacttcagtttacgagatgctttgagagcgttaggcaaaagcagaaataaatatcaggagcaacggggaaagctttataaaagatcatggtggccactgttgcagctttgaagaatgagtgctggcttgaacagttctttgcctgcatcattggtagctgcactgaaaggaaaaaactttcaccttaagaatttgaaaaggaagaaacctgggctctggtcttcatggcatttagactgagatgcttaaacagaacagaagtaatacgcatttcctgccataggatagggaaaatgtaacaagctggttgctcttgaggttagaaaattgtctgtttctctgtggatgaagctggatttacttgaaaatggagagttggcttattgtttgaatattgggacatcaagctatctatagccaagtttcagtcgcaaccagttttccctttgtctggggtaaattcgatacaaaatgattctttttgaatcctgaatccataaattacacttttttttttcaaattcacaaaattcacagtggtgctgactgtgtaataaccactattgggaaacatcccgtaaacctgcctgttgccatgccaatggagtgactgaactggtgacatctgtttgagcatgctttgtgtggctggtagaatgccaccgttgtgcatacactttgtacatcaggggtgaagggagggttttctagattattgggggagggtaaaattgggatttttttgttgttccttttttgatggggtgtgggggtatagtactcagcttatgccctaaaataacatgtataaaaacccctgaagtattgtgtgggtgtgtacgtgtgagtgtgtgtttgtatacatctggcaattaaagctttgtcttctggaacttagtgaattcttttctctttttcctccagaagtatttgttacaagatttgtaaataagagctctacttagtttgtttaccatgaacatgttgcagcaaaccttatgcatctaattcctacaaggttaaagaaaggcttttagacttgccaggttaagcaacagccaagttctcagtaattgtttgccttgatttatcttttagacttcattttgccagctctaaaactcccagtcttccttgattttagtccttaatcttttatgttctgagcaggaagggtaaaagacaggaacctgcttcactgtattaactagtccatgggctgagaccggggcatctcttttcttcatactgcaatgttgctagatacatgatcagacaccagagggttgggcattcttgcaataccttaacagtgctgaaatctgcagcatggtactaaggaagttaaagtttgaatgtaaccactttatttaaaaggtttttttctttaatttaaatgaaatggggttgaagtgaacatgattttgttgaccatgttcgtgaattacagatgcaacatgcattggtagaatcgtgtgatggtcttttgtgatacttaatttttacatatcccagtctctgtatgtatctgcatagacaaagaaaaaacaaactcctgctttgcttttattgaagggtttccaggactgcgtgtctgctcctgagctctgttttaagtatgtgtatcctttgcttgtattttgtattaaaaaaataagaaaaagaagcctttattgttgagcatgttggcattgtcccctttatttttttctctttttgggacatatgaagcaagttattctttttctgtatctttttttcttttgtaaactttttttttgttttgtttaaaaatggctttataaaagggcttttataacccagatgtgtgctctgtgtacttcttgtaataccttaaagcaaacacactaacttacacagctttgttaatcagctcccagttcagcctgactttgtgggaacttatttccctaataaattatttagaaactttaacagtgaccatccctgttgttggtaaaagataaacatgtcttggttcaaaagttaatacctcaggatggaatcaagaagcagtagacttaccagtttgattaattaagggagcactggactgggtgcgtaaggattcttaattagcattttttctcatgtttacatccaaggttatgaagtgttgtggaaagcaaagtttaacaatcatatataataaaagataatgtttatactcacagaa

SEQ ID NO: 160337 - DNA, 5590 bp, Homo sapiens
  Payload ID: 11357
  Gene Symbol: NEMP1
  Gene Name: nuclear envelope integral membrane protein 1
  Uniprot ID: O14524
  ENST ID: ENST00000300128
  CDS Start-End: 25-1359
aggaggaggtggcttgaggcaaccatggcgggaggaatgaaagtggcggtctcgccggcagttggtcccgggccctggggctcgggagtcgggggcggtgggacagtgcggctactcttgatcctctccggctgcttggtctacggcacagctgaaactgatgtaaatgtggtcatgcttcaggaatcccaagtttgtgaaaagcgtgccagccaacaattctgttacacaaatgtgcttatcccaaaatggcatgatatatggacacggatacagatccgagtaaatagttccagattggttcgagtcacccaggtggagaatgaggagaaactgaaggagctagagcagtttagtatctggaactttttttcctcctttttaaaagagaaattgaatgacacctatgttaacgtgggtctatacagcacaaaaacctgcctcaaagttgagattatagagaaggacaccaagtacagtgtcattgtgatccggagatttgatcccaaactctttcttgttttccttcttggacttatgctatttttttgtggagacttgctgagcagaagtcaaattttctactactctactgggatgactgtgggaattgtggcctctctgctaatcatcatttttatactatctaagtttatgcctaagaaaagtcccatttacgtcatcctggtgggaggctggtctttttctctgtacctcattcaactagtttttaaaaatttacaagagatctggaggtgttactggcagtatcttttaagttatgtcctcacagttggattcatgagttttgcagtatgttacaagtatgggcccttggagaatgaacgaagtatcaacctgctgacctggaccttgcagctgatgggcctgtgtttcatgtattctggcatccagataccacatattgcccttgccattatcatcattgctctttgtactaagaacctggaacaccctattcagtggctgtacatcacctgcagaaaggtgtgtaagggagcagaaaagcctgttccccctcgtctcctgacagaagaagaatatcggatacaaggagaggtagaaacccgaaaggctttagaggagctccgagaattttgtaacagtccagactgctctgcttggaagactgtttctcgaatccagtctccaaaaagatttgctgactttgtggaaggctcttcccacctcacgccaaatgaagtttctgtccatgagcaggagtatggattagggagcattattgcccaggatgaaatctatgaggaagcatcctctgaggaggaggactcatattctcggtgtcctgctatcacacagaacaactttctaacctaggtagtggtcagttatctttacgtggactggcttggtgccttggtccatgttgcatgtgttgtgcaattgctttcaaccctttgaaacagagtgagatagatagggtagaaattctcctactgaaataagaggcctaaaaaggcctccctttggaaatgggaggtctctatgggatccctgaggaaggagagtggataaagtagtgaatgctgggtagttcacttcccattggttaagctaacagcccacttttatgtttccagagaaattggatggccacagctagcatggcattctagctccttcttgaaagttgattcaatcatggcatttctgtcactggctggctctccaaagtaagaactgttgttaagtgcaggaatgcttttagactataggctgcaacttccagagagaaatccacaaatctgagcctccttcactccagcttttatttcagtgactttagaataattattgatttaactgttttgggaggaaaatagatttttattgttttgttttttaaatgaatgtcttttaaaaaacataacaaactcatgttccagaaccagcaagtgctccagagtgacacaccccctaggcccctacatatttattaatatggattatccattaaagccccaggagctgttgttttaagctttgatttagttctcatacatatgatagaaagtcctatttgcctttaggaacatgcctgtaggctcttctgcaggtgagatgtactgggctttttattatattcaactttcaattccatcttaaaaaacatttgtattcttctcttcccattcttccttaccctgcctttgccctttcaggaagggtcagttcccttacctgtgaactatgtatgttcagagtagcattattcctgctagctaggagaagtcatcttgtttaggggatttggatgctttttatacgttctccattttcctgtcattgggtcatgttatctttgagttgctatgaaatcaggaaactgtctccttttcctttcccttcctttgtctacatgctctgtccattcctttcagccttttctcaccacccatactcccccaaatctgggtaatttttaagccttgaaactatgtagtttcttgatacacaatttgtagttatgcagcagccacaatttgcattgccaggaaataggctccaggttatcttcatgcctctgggtgctcattcagctgtcaagtttccatgaacttacacttatttatgattgcgtttctgacctgagatgtatgctgcctgttattgcagtagcattagtttcagattcttttgccattgcaaagtaccccttataaaccagcaatgtcatctgtgaggaagcaaattctcaagtgtctgtcatttacttggttctttttctttgtggtcttcacccttataccctggaaaagtctgtaattaccttagccaggaagatagatggtcatggcaagcgcacagcaccagacttactggctcaccaagatgatggaaaaaggcagatgattttttaaaaagccgtaatgactcctttagaccagccatttagcgtggtaattttgaaaggcctagctccattgcagacttccaaagggtcagctctgagactgccctccaggtgggcagttgattatttccaccagtgttttccagagccttaaactgtcctaagtgacaactacctcagttggcaggaaagagacatatagtagaaagtgaaaaatgagcagtatttgggcagatgctatgggttacagttgaagggtaaaaggaactttacattgggaaacctttatacccttgtgaattatgtacatggtaaaatgttctctctctacaaagaactattaaaacttctgaaatatactattttttaccttatttatagaaattgagacctagcatatttaagcataagtttattttaaaaaataattcaactcgtgcaagtggtctcaggattctctggagattttggtgcctcccctacttagggaggtgatagcttgcctataagggtgacttttcctgatcatgtctttatttcaatgagaaagcactgtgaaattgtgaaagattctcctctttctctgtttaataaacccccatgaaatatagtttccatctctagaccagttttttttccaccgtgtttagacttgaggtgaataaaatcaaactgttttttactccctatctggtagttggagacctgagctgtaggcagtggagatggcaattggttctgcagcctgagagttgctctcacacagtgaaggacggtgctgctctggtgtgctgtgtgtccttgccctgcctgcctgtggctctgcccagatgcttcagatcctctgtgttccggagattgcttgacttcaaccttctttaggagctgctcttgtctccctcttggccacttagtttgctggctcagtcactacttgaagaccccatttaatttttctctggcagttatagctcttgtgatttcagtacagtctcatctctcagaccaatctcatcaagaaggattgaagggataactatgaggtaagctggacattggagccgtgtttgctgccacgtcagcgtcttgctgggtgaatgtcaagccataaatgggctccagggctctggatctcatcagcattggaaatctattgcctctcatcagtctgaccaaattatgtagagcattaatgtagagactcccattaatgggaatacaagaggcagctggcataaaacatttctttcactttcctttcccactcagattgcttcaagagaccaacagaacacagggatcaaaaacaaggaaaatttagcaacttcattaccttctaataagtaattcctgttagccactgcatcccaccaaaactagtttatttttcccctcaaattcatgatttttacgtctgttacaaagggaattttgctgatagctctttgggtcccactgttccattttatgctaatagattccattctagggcccagccgtctcttgactgatggtgttccctttaacccttggcatgtataatagaattttggtgaatgaaagaacccaaataggccagatagtccccccaggccctgatatccataaaaggcttgggaatgcattatgtaattgtccttagtctttttgttgttttagaaaaaaaaaacaagatgggctcagatggatgcctacgtaaaaatggttcctagctgtgtactcataacttttctttgaattgagtagtgaaaggaaggaggaggaaaggaaattaaatgtccttctagtattctctggactcaagtctgacatatgagataataacctatattgaaatgccaagaattgtatctgaaacaagagaacagtttgacacatttatcatgccttcatattacatattaactgaaaccaattaataaacatatgaaatatccattgcacaaggcaaaggcacctaaaccttttgtttctttttctacatagcagaaattgattttttttttatttttttaggggaacctatataattatgacccagtgatgtcttttggtgacttaagcttatgaattcaggttacaattgagttgattctagatggttactaccttgaaaaggatgttggtgccttatgtgacacgagccagagcctgctgggaataaacaaagcagattcatgccaacaccaactcgtagctttagtggcagatgggagtggtcacagactcccaaaatgtggggctttggatttccacaccatcccacgtgtgtgtcatcttcctctttcacactcttgatgataatttgaaaatggtgaaatcacctctgaatttgcctatagcatgagcacattcttatgacaacataacaaatagttcataatgtgaatattagaaactgttacagcctgcagttaccataattttccatgtttgtggaattgatattgaaatagcagggctaaggaattactggcaagttttagcctgtgggtaataccttagggttatttaaatatttgtaattttatttaaatgttcatgaatgtttgaaaggaacaaaattatcagggatggctctttgccatgggtcttattttcaccctcttttctgtaagaaaaaagaacaatgtcttaatgtatttttaaagtttttggtatagtttctaattccaattttaataaaagttttat

SEQ ID NO: 160338 - DNA, 5370 bp, Homo sapiens
  Payload ID: 11357
  Gene Symbol: NEMP1
  Gene Name: nuclear envelope integral membrane protein 1
  Uniprot ID: O14524
  ENST ID: ENST00000379391
  CDS Start-End: 19-1134
aggtggcttgaggcaaccatggcgggaggaatgaaagtggcggtctcgccggcagttggtcccgggccctggggctcgggagtcgggggcggtgggacagtgcggctactcttgatcctctccggctgcttggtctacggcacagctgaaactgatgtaaatgtggtcatgcttcaggaatcccaagtttgtgaaaagcgtgccagccaacaattctgttacacaaatgtgcttatcccaaaatggcatgatatatggacacggatacagatccgagtaaatagttccagattggttcgagtcacccaggtggagaatgaggagaaactgaaggagctagagcaaagtcaaattttctactactctactgggatgactgtgggaattgtggcctctctgctaatcatcatttttatactatctaagtttatgcctaagaaaagtcccatttacgtcatcctggtgggaggctggtctttttctctgtacctcattcaactagtttttaaaaatttacaagagatctggaggtgttactggcagtatcttttaagttatgtcctcacagttggattcatgagttttgcagtatgttacaagtatgggcccttggagaatgaacgaagtatcaacctgctgacctggaccttgcagctgatgggcctgtgtttcatgtattctggcatccagataccacatattgcccttgccattatcatcattgctctttgtactaagaacctggaacaccctattcagtggctgtacatcacctgcagaaaggtgtgtaagggagcagaaaagcctgttccccctcgtctcctgacagaagaagaatatcggatacaaggagaggtagaaacccgaaaggctttagaggagctccgagaattttgtaacagtccagactgctctgcttggaagactgtttctcgaatccagtctccaaaaagatttgctgactttgtggaaggctcttcccacctcacgccaaatgaagtttctgtccatgagcaggagtatggattagggagcattattgcccaggatgaaatctatgaggaagcatcctctgaggaggaggactcatattctcggtgtcctgctatcacacagaacaactttctaacctaggtagtggtcagttatctttacgtggactggcttggtgccttggtccatgttgcatgtgttgtgcaattgctttcaaccctttgaaacagagtgagatagatagggtagaaattctcctactgaaataagaggcctaaaaaggcctccctttggaaatgggaggtctctatgggatccctgaggaaggagagtggataaagtagtgaatgctgggtagttcacttcccattggttaagctaacagcccacttttatgtttccagagaaattggatggccacagctagcatggcattctagctccttcttgaaagttgattcaatcatggcatttctgtcactggctggctctccaaagtaagaactgttgttaagtgcaggaatgcttttagactataggctgcaacttccagagagaaatccacaaatctgagcctccttcactccagcttttatttcagtgactttagaataattattgatttaactgttttgggaggaaaatagatttttattgttttgttttttaaatgaatgtcttttaaaaaacataacaaactcatgttccagaaccagcaagtgctccagagtgacacaccccctaggcccctacatatttattaatatggattatccattaaagccccaggagctgttgttttaagctttgatttagttctcatacatatgatagaaagtcctatttgcctttaggaacatgcctgtaggctcttctgcaggtgagatgtactgggctttttattatattcaactttcaattccatcttaaaaaacatttgtattcttctcttcccattcttccttaccctgcctttgccctttcaggaagggtcagttcccttacctgtgaactatgtatgttcagagtagcattattcctgctagctaggagaagtcatcttgtttaggggatttggatgctttttatacgttctccattttcctgtcattgggtcatgttatctttgagttgctatgaaatcaggaaactgtctccttttcctttcccttcctttgtctacatgctctgtccattcctttcagccttttctcaccacccatactcccccaaatctgggtaatttttaagccttgaaactatgtagtttcttgatacacaatttgtagttatgcagcagccacaatttgcattgccaggaaataggctccaggttatcttcatgcctctgggtgctcattcagctgtcaagtttccatgaacttacacttatttatgattgcgtttctgacctgagatgtatgctgcctgttattgcagtagcattagtttcagattcttttgccattgcaaagtaccccttataaaccagcaatgtcatctgtgaggaagcaaattctcaagtgtctgtcatttacttggttctttttctttgtggtcttcacccttataccctggaaaagtctgtaattaccttagccaggaagatagatggtcatggcaagcgcacagcaccagacttactggctcaccaagatgatggaaaaaggcagatgattttttaaaaagccgtaatgactcctttagaccagccatttagcgtggtaattttgaaaggcctagctccattgcagacttccaaagggtcagctctgagactgccctccaggtgggcagttgattatttccaccagtgttttccagagccttaaactgtcctaagtgacaactacctcagttggcaggaaagagacatatagtagaaagtgaaaaatgagcagtatttgggcagatgctatgggttacagttgaagggtaaaaggaactttacattgggaaacctttatacccttgtgaattatgtacatggtaaaatgttctctctctacaaagaactattaaaacttctgaaatatactattttttaccttatttatagaaattgagacctagcatatttaagcataagtttattttaaaaaataattcaactcgtgcaagtggtctcaggattctctggagattttggtgcctcccctacttagggaggtgatagcttgcctataagggtgacttttcctgatcatgtctttatttcaatgagaaagcactgtgaaattgtgaaagattctcctctttctctgtttaataaacccccatgaaatatagtttccatctctagaccagttttttttccaccgtgtttagacttgaggtgaataaaatcaaactgttttttactccctatctggtagttggagacctgagctgtaggcagtggagatggcaattggttctgcagcctgagagttgctctcacacagtgaaggacggtgctgctctggtgtgctgtgtgtccttgccctgcctgcctgtggctctgcccagatgcttcagatcctctgtgttccggagattgcttgacttcaaccttctttaggagctgctcttgtctccctcttggccacttagtttgctggctcagtcactacttgaagaccccatttaatttttctctggcagttatagctcttgtgatttcagtacagtctcatctctcagaccaatctcatcaagaaggattgaagggataactatgaggtaagctggacattggagccgtgtttgctgccacgtcagcgtcttgctgggtgaatgtcaagccataaatgggctccagggctctggatctcatcagcattggaaatctattgcctctcatcagtctgaccaaattatgtagagcattaatgtagagactcccattaatgggaatacaagaggcagctggcataaaacatttctttcactttcctttcccactcagattgcttcaagagaccaacagaacacagggatcaaaaacaaggaaaatttagcaacttcattaccttctaataagtaattcctgttagccactgcatcccaccaaaactagtttatttttcccctcaaattcatgatttttacgtctgttacaaagggaattttgctgatagctctttgggtcccactgttccattttatgctaatagattccattctagggcccagccgtctcttgactgatggtgttccctttaacccttggcatgtataatagaattttggtgaatgaaagaacccaaataggccagatagtccccccaggccctgatatccataaaaggcttgggaatgcattatgtaattgtccttagtctttttgttgttttagaaaaaaaaaacaagatgggctcagatggatgcctacgtaaaaatggttcctagctgtgtactcataacttttctttgaattgagtagtgaaaggaaggaggaggaaaggaaattaaatgtccttctagtattctctggactcaagtctgacatatgagataataacctatattgaaatgccaagaattgtatctgaaacaagagaacagtttgacacatttatcatgccttcatattacatattaactgaaaccaattaataaacatatgaaatatccattgcacaaggcaaaggcacctaaaccttttgtttctttttctacatagcagaaattgattttttttttatttttttaggggaacctatataattatgacccagtgatgtcttttggtgacttaagcttatgaattcaggttacaattgagttgattctagatggttactaccttgaaaaggatgttggtgccttatgtgacacgagccagagcctgctgggaataaacaaagcagattcatgccaacaccaactcgtagctttagtggcagatgggagtggtcacagactcccaaaatgtggggctttggatttccacaccatcccacgtgtgtgtcatcttcctctttcacactcttgatgataatttgaaaatggtgaaatcacctctgaatttgcctatagcatgagcacattcttatgacaacataacaaatagttcataatgtgaatattagaaactgttacagcctgcagttaccataattttccatgtttgtggaattgatattgaaatagcagggctaaggaattactggcaagttttagcctgtgggtaataccttagggttatttaaatatttgtaattttatttaaatgttcatgaatgtttgaaaggaacaaaattatcagggatggctctttgccatgggtcttattttcaccctcttttctgtaagaaaaaagaacaatgtcttaatgtatttttaaagtttttggtatagtttctaattccaattttaataaaagttttatagata

SEQ ID NO: 160339 - DNA, 1381 bp, Homo sapiens
  Payload ID: 11357
  Gene Symbol: NEMP1
  Gene Name: nuclear envelope integral membrane protein 1
  ENST ID: ENST00000554340
  CDS Start-End: 19-351
aggtggcttgaggcaaccatggcgggaggaatgaaagtggcggtctcgccggcagttggtcccgggccctggggctcgggagtcgggggcggtgggacagtgcggctactcttgatcctctccggctgcttggtctacggcacagctgaaactgatgtaaatgtggtcatgcttcaggaatcccaagtttgtgaaaagcgtgccagccaacaattctgttacacaaatgtgcttatcccaaaatggcatgatatatggacacggatacagatccgagtaaatagttccagattggttcgagtcacccaggtggagaatgaggagaaactgaaggagctagagcagatttgatcccaaactctttcttgttttccttcttggacttatgctatttttttgtggagacttgctgagcagaagtcaaattttctactactctactgggatgactgtgggaattgtggcctctctgctaatcatcatttttatactatctaagtttatgcctaaggttatgtcctcacagttggattcatgagttttgcagtatgttacaagtatgggcccttggagaatgaacgaagtatcaacctgctgacctggaccttgcagctgatgggcctgtgtttcatgtattctggcatccagataccacatattgcccttgccattatcatcattgctctttgtactaagaacctggaacaccctattcagtggctgtacatcacctgcagaaaggtgtgtaagggagcagaaaagcctgttccccctcgtctcctgacagaagaagaatatcggatacaaggagaggtagaaacccgaaaggctttagaggagctccgagaattttgtaacagtccagactgctctgcttggaagactgtttctcgaatccagtctccaaaaagatttgctgactttgtggaaggctcttcccacctcacgccaaatgaagtttctgtccatgagcaggagtatggattagggagcattattgcccaggatgaaatctatgaggaagcatcctctgaggaggaggactcatattctcggtgtcctgctatcacacagaacaactttctaacctaggtagtggtcagttatctttacgtggactggcttggtgccttggtccatgttgcatgtgttgtgcaattgctttcaaccctttgaaacagagtgagatagatagggtagaaattctcctactgaaataagaggcctaaaaaggcctccctttggaaatgggaggtctctatgggatccctgaggaaggagagtggataaagtagtgaatgctgggtagttcacttcccattggttaagctaacagcccacttttatgtttccagagaaattggatggccacagctagcat

SEQ ID NO: 160340 - DNA, 549 bp, Homo sapiens
  Payload ID: 11358
  Gene Symbol: NEMP2
  Gene Name: nuclear envelope integral membrane protein 2
  ENST ID: ENST00000343105
  CDS Start-End: 24-281
gcacggagctgacccctaacgaaatggggccgcgccaagggcggtggtggctgctgctctggctgccgcccctggccacactgcccgtgcgcggggaggcggcggcggcagcgttatcagttcgtaggtgtaaagctttgaaggaaaaagatttaattagaacgtctgagtcagactgttactgctacaatcaaaattcccaagtggagtggaaatacatatggtcaactatgcagggagactgtgtgcttctctgtggagcctgtcaagaagatatttaactatatgatacatgtgaatcgaaacatcatggatttcaaactcttccttgtgtttgtggcaggagtttttcttttcttttatgcaaggaccctgagtcaaagccctactttctattactcctcgggaactgtgctaggtgttctaatgacattagtctttgtcttgctgttggtgaaaagattcattccgaagtttatattgtatgccagttgatggaagatctgaagtggctgtggtatgaaaacaggatatatgtattaggtaggt

SEQ ID NO: 160341 - DNA, 6168 bp, Homo sapiens
  Payload ID: 11358
  Gene Symbol: NEMP2
  Gene Name: nuclear envelope integral membrane protein 2
  Uniprot ID: A6NFY4
  ENST ID: ENST00000409150
  CDS Start-End: 68-1321
acttccgctcctcgcagcggagccggtcccctagggctcgggtcgcacggagctgacccctaacgaaatggggccgcgccaagggcggtggtggctgctgctctggctgccgcccctggccacactgcccgtgcgcggggaggcggcggcggcagcgttatcagttcgtaggtgtaaagctttgaaggaaaaagatttaattagaacgtctgagtcagactgttactgctacaatcaaaattcccaagtggagtggaaatacatatggtcaactatgcaggtgaaaattaccagtccaggcctgttcagaattgtatatatcgcagaaagacataattgccaatatccagaaaacattctatcttttatcaaatgtgtgattcataacttttggataccaaaggaatctaacgaaataaccataatcatcaatccatacagggagactgtgtgcttctctgtggagcctgtcaagaagatatttaactatatgatacatgtgaatcgaaacatcatggatttcaaactcttccttgtgtttgtggcaggagtttttcttttcttttatgcaaggaccctgagtcaaagccctactttctattactcctcgggaactgtgctaggtgttctaatgacattagtctttgtcttgctgttggtgaaaagattcattccgaagtatagcaccttttgggctctaatggttggttgttggtttgcctcagtttatattgtatgccagttgatggaagatctgaagtggctgtggtatgaaaacaggatatatgtattaggctatgtcttgatagttggatttttcagctttgttgtttgttacaagcatgggccccttgcagacgacaggagcagaagtcttctgatgtggatgctgcgactcctctccctggttctggtctatgctggtgtggccgtgcctcagtttgcctatgcagccataatcctcctcatgtcctcctggagtctgcactacccactgagagcatgcagttatatgaggtggaaaatggagcagtggtttacatcaaaagagctggtggtgaaatatcttacggaagacgagtacagggagcaagctgatgctgaaacgaacagtgctctggaggagctacgccgggcctgccgaaaacccgactttccctcatggctggtcgtctccagactccacactcctagcaaatttgcagactttgttcttggaggaagccacttgtcacctgaagaaatcagtctgcatgaagagcagtatggccttgggggtgccttcttggaagagcagctctttaacccgagtactgcctgacatgcgaccttcaagttgacttcattctggacaaggaagtgggcaaagggcagggattctattaaagttaggcagaactgttctagtgaacggtggcaaaaacatttgctgtggagaaaaacaagtcagtctggaaagggaaaccaacccattttgaagataacttagcattcttggtgacttctgctacttattgtactgtaggtggataccaaaattctgtgacagccactaccacttaccttgaatgaaggctttcattaggaacaggggaatggcgttgttcttaaggggctagtaagcatgaacaggtgctttgtcgacaccagggcactaaatctggtcttaatcccctgaacctgtgtcagaagactctgcaatactcttcctatagttcgtcagtataagtccttaaagagacctgagacatgctggaccagtgttttccaaagtacagctcacaggctactaccaagtgttggtcaataaaggtattctgaggtcaactaagattgatataaagttaaactaatgtatttcagtatctctcagaggcattcataatgctcgtgtgcactgtgaatctcccaaaggggagaaattgtgtgctgcagtttcttgcttaatttgaccacagaactctttttcatgagattaatattccttggaacacgtttggaaaatgctaatggtggtggaactgagctcatgagaggttaaataacttgtgcaagaccacactgagatgcagcactggtagaaatccagccctgatgtatcctttgactcaggtagacaagatcttcaggtgcaagcttaggagccatctccctacagccatgggcctcacaatgttggtggctttactttttatttttcaataatggccaacttgctatttaactgtgataaagggaaatgtttctgaagacattttaaagttttttatacatacgtaagatttttatatacatacgtaaggattagatactatgattactttttttgtattttgaaattgaaggcacttaagctcttgtgatattttgaattgactgatccatttaaaaaattgtttagctataggtgtttgtaacaatttcttataaaatgattttttttcttgattcatgatattaaactccagattgaaatgaggggctatgagctttgaccctgaggaaagaaggccaaaacatagatctgaggaaagatttgaacatggcaagacaatctcagggttaagatgttgctaagttgattctgagaatcaaaatcaggctttttttcctgtgatgggatcataaaaataatctttttatcaggacaaaggttatgggcgaaggatagacagaattttggcactgctgctttcctgagccaaattaagtagtttttctaaatcatgaaaaaagagcatgactatccatctggaacttcctagattgattttcaaatgatagttcctctttgaagtatttacaggtctgtttttgccagacatcttttcatactgggaacttttttttttgtaatatccactaaagttaatctgcctttatatagacttggatttttaaaaaaccaaaggatatattttccattcagatttatggtaactattttatgagtaaatagaagtttgaatatttttcttatggtttaatctgtttttttaaattatatttattggtgatataaatgtatcagatgtatcagtgcctgtgctcaccaagttcgtctcctaagaagcagtttgtgtgctacaacgtatgcgtatgagtaaataacacatgaacaatctgctggggctgccaggtacatcccagccaggacagccgctgggccagggggaagaggtactgctgagggaaggaagcagctcttcatgggcagctagccaggtgtaaccatcacagtaaaaacagccaaagagagaagaacaacagcagtccttgaggatattgttttccatgtttatttttagaggaaatcataggtttgtcagtttctgctttgtgactactgtgagaagctaaacaattagaagcattacttgtgatatttttagtgtatttatgttgttttcatttgatttgggggtgtattatagtactgatcacaattctaatccccatcaagcaatgtacagataactcttccaagaaatgtttccctcctttctttcctcccttcccttctctttctccctcacctcctgtctcctctcctcctccctttttaaaggcctttgaacagtttaaacgaccactcaataaaatggctctgcccttcacaggtggttggaagttggctttgtgcctcacacaccataggtgtataattatggagcctaacagatccctttgttattttactgcttatgcttggtgcctacaaaagcttactgttgttagcaagttgaactctttgacaccagatgtgtgggtgagatatagtgtaggtggctatgcttaaacaatcgtatcattcaagtgttatttttaaaaggttttaaaacacattttacatatcacaaaaaatgctttgtgaattagttgtatggtttgccagtaatacctagggctgaattacaggggaatgtccatctgacatgaaggacaatatttcaatttatgactttttaaaaaaatctggaaatttcatatatttagattttaagagggtttggaatagatgatggattacataaaaatatctaaatatgtggaggaattaagatcctgaaatgatgtcaactaaagaaatgctctcttacattatgctatgtgtgattgtttcccagagtgagagatgtacaattttataaattagcttttcttgtccaactgaaagcaagatagacaacataatggatgtggaagtttgaagacacctgcaggaagacagagaggtacttttaggtgacaacaggagcaagctgccttctgagagagcctgctgggtggcatgacattgaagagtgaactatttgggtgtgactgttagccttattgacttagaaccctgctttttgttattgcaccataagacctgtctcttgttagtcaattcatatagttggtacaggtagtgattcacaaccaaaaatataactagcataaggataaaaacacttgacttgatatgaccagcagattctctctcagaagacagatttacaaggggtcaaattataataaggtggctacttggtgaactgaaacaaaacaaagggagcttgttatataattcacatggttaatgtcatgaggccaaagagtttgatgcagatgccaccccccaccccagtggggctagccttgttaatgggatgagataccaggtctgttgacaaagaccacgccttcctttatgcaggtcctgccaactttttcctctctgtgactgctgtttttctaatcttcattattgacaaacatcccaccccctctgatgggcatatttttactcagatgtgttaaaatctttagtctttctctggcctaggagttggattatcttttaaaggtaactgtattttttttgttatgatccctgaatgtgaaaccttaataggtcaccagagatttgaaatgaatactatacttatctaatataaatcttggaagatacagttagtgggtagcttctctattatttaaataatttgaggcatctgtttttttagatttggtcgtttttccaaaaaagaaagactgattgaaaagagaaagggaaagaataccaacattgactagagatccatcaggcactatatgaggcaccttcgatacctcttaatttgcacctcatgaccactctgtgatatgttttggtattttcattttacagatgaggaaagacccagagaaggtaggagaaagttgctgaaggacacatatagctaaagtggtagaatcagaattcaagcccccatatgtctgcttccagggctcatattctacttcctttatttattaccatctttttaagaaagtgaaggaaatgaccccatggataaggcattcaagaggtgactacatctgctgatgttatacacataccagtcatttgtgccccgcagcaatggacactgtagtctgcggctcttgtcagtgcttctcagactgtctggggtgatggaccagtttccctctagttcatcactagtaatacttttgtaagatacactaaattattagaaaaatgaaataatctttgaaagaaaagacatacagaatataagcacgatgatcatgtcatgacaatgtcaacttgccatacatattttgaaatgtctaatttctatgttgtcacataccagcagtagtttgacagcaccagtcattgagcacactttgagtagcactggtctacatgttatttttctaagatgccagtgatcttttcaggaaacaaaaaaaatccgaccttttttcaaatgtaagtttacaatttaaaagaatagcatcctacactgactattggagagagtatggtatataatttgttaaatgattataaaattgtttacttttgttgacacctttaagaagaaaaagaaaaatgaaaattatgaaacttataacctctctcagcagacttttgcactttatggaattgtcaccatcatcacttttttccatcctcttcaacttaagttttgcttaattttgtctcttaactaactcatatccccaaccacttaatgtttacaatgcatgttggaattgaatgccttactgtacagcttactagatataggtaaatatgtatagtatggcactgtagattgggagaatggaatatgattatagatttaaatggcaataaaataatagaac

SEQ ID NO: 160342 - DNA, 643 bp, Homo sapiens
  Payload ID: 11358
  Gene Symbol: NEMP2
  Gene Name: nuclear envelope integral membrane protein 2
  ENST ID: ENST00000444545
  CDS Start-End: 1-108
gactgttactgctacaatcaaaattcccaagtggagtggaaatacatatggtcaactatgcagggagactgtgtgcttctctgtggagcctgtcaagaagatatttaactatatgatacatgtgaatcgaaacatcatggatttcaaactcttccttgtgtttgtggcaggagtttttcttttcttttatgcaaggaccctgagtcaaagccctactttctattactcctcgggaactgtgctaggtgttctaatgacattagtctttgtcttgctgttggtgaaaagattcattccgaagtatagcaccttttgggctctaatggttggttgttggtttgcctcagtttatattgtatgccagttgatggaagatctgaagtggctgtggtatgaaaacaggatatatgtattaggctatgtcttgatagttggatttttcagctttgttgtttgttacaagcatgggccccttgcagacgacaggagcagaagtcttctgatgtggatgctgcgactcctctccctggttctggtctatgctggtgtggccgtgcctcagtttgcctatgcagccataatcctcctcatgtcctcctggagtctgcactacccactgagagcatgcagttatatgaggtgg

SEQ ID NO: 160343 - DNA, 1119 bp, Homo sapiens
  Payload ID: 11358
  Gene Symbol: NEMP2
  Gene Name: nuclear envelope integral membrane protein 2
  Uniprot ID: A6NFY4
  ENST ID: ENST00000414176
  CDS Start-End: 449-865
attttgtaattttagaattagaagcaaccgcgcgatccagtcgcccaattccctcgttttacagaagcaaccgaaactcagagaggttttgatttgcccagggtcacacagcttgtcactggcacagctgaccctagtctccagactttcagcacacggccttttgtacagtacatcaatgcgtgttgaaatccttgttatttcactatctcgcattcctttggtctcaagactagagaaggtaacagcttcagcttcagaatcggagcgaaaattcttctgcccctgactgttgtgaccttgagcgagtaaacataacggtcccacgtgagcggcagttcgtaggtgtaaagctttgaaggaaaaagatttaattagaacgtctgagtcagactgttactgctacaatcaaaattcccaagtggagtggaaatacatatggtcaactatgcaggtgaaaattaccagtccaggcctgttcagaattgtatatatcgcagaaagacataattgccaatatccagaaaacattctatcttttatcaaatgtgtgattcataacttttggataccaaaggaatctaacgaaataaccataatcatcaatccatacagggagactgtgtgcttctctgtggagcctgtcaagaagatatttaactatatgatacatgtgaatcgaaacatcatggatttcaaactcttccttgtgtttgtggcaggagtttttcttttcttttatgcaaggaccctgagtcaaagccctactttctattactcctcgggaactgtgctaggtgttctaatgacattagtctttgtcttgctgttggtgaaaagattcattccgaaggctatgtcttgatagttggatttttcagctttgttgtttgttacaagcatgggccccttgcagacgacaggagcagaagtcttctgatgtggatgctgcgactcctctccctggttctggtctatgctggtgtggccgtgcctcagtttgcctatgcagccataatcctcctcatgtcctcctggagtctgcactacccactgagagcatgcagttatatgaggtggaaaatggagcagtggtttacatcaaaagagctggtggtg

SEQ ID NO: 160344 - DNA, 432 bp, Homo sapiens
  Payload ID: 11358
  Gene Symbol: NEMP2
  Gene Name: nuclear envelope integral membrane protein 2
  ENST ID: ENST00000421038
  CDS Start-End: 360-432
agttggacattttgtaattttagaattagaagcaaccgcgcgatccagtcgcccaattccctcgttttacagaagcaaccgaaactcagagaggttttgatttgcccagggtcacacagcttgtcactggcacagctgaccctagtctccagactttcagcacacggccttttgtacagtacatcaatgcgtgttgaaatccttgttatttcactatctcgcattcctttggtctcaagactagagaagttcgtaggtgtaaagctttgaaggaaaaagatttaattagaacgtctgagtcagactgttactgctacaatcaaaattcccaagtggagtggaaatacatatggtcaactatgcaggtgaaaattaccagtccaggcctgttcagaattgtatatatcgcagaaagacataattgccaatatc

SEQ ID NO: 160345 - DNA, 6234 bp, Homo sapiens
  Payload ID: 11359
  Gene Symbol: NEMF
  Gene Name: nuclear export mediator factor
  Uniprot ID: O60524
  ENST ID: ENST00000298310
  CDS Start-End: 451-3681
atttcaaaatcttatgtcaaagtaagcgcgcagaaaggggtccttgctcttctacactgagccctacggcccccctgtggggaaatactcctgataatcatctcgaaaattgtttcgaccagcaggggtcactatgaaggctgacttgagcccaagacacaatggggcacggtaaccagactggtccgtaagggttccaggaaggaatgcagtttcaagagaacagtttgaatctttattcgaatttgaattttggtacaatgaagagagtcagctgcaacttgacaatcgaaatcttcagaaaagcgacacaaatacgttcgcctcgaggaatattgggtcttctgcgcggccgtagagctccgccaagtgcgcctgcgcggaggagaagtggcgtcgagtccggccgggcagtagaggaacttgcggtagtgaccctcgggcctcgccatgaagagccgctttagcaccattgacctccgcgccgtactcgcggagctgaatgctagcttgctaggaatgagagtaaacaatgtttatgatgtggataataagacataccttattcgtcttcaaaaaccggactttaaagctacacttttacttgaatctggcatacgaattcatacaacagaatttgagtggcctaagaatatgatgccgtctagttttgccatgaagtgccgaaaacatttgaagagtcggagattagtcagtgcaaaacagcttggtgtggatagaattgtagattttcaatttggaagtgatgaagctgcttaccatttaatcattgagctctatgatagggggaacattgttcttacagattatgagtacgtaattttaaatattctaaggtttcgaactgatgaggcagatgatgttaaatttgctgttcgtgaacgctatccacttgatcatgctagagctgctgaacctttgcttactttggaaaggttgactgaaatagtagccagcgcacctaagggtgaactactgaagagggtgcttaacccattacttccctatggaccagctctcattgaacactgtcttttagaaaatggattctcgggtaatgtcaaagtggatgaaaaacttgaaactaaagatattgaaaaagtacttgtttctctgcagaaagcagaagactatatgaaaacaacatccaacttcagtgggaagggatatatcattcagaaaagagaaataaaaccaagcttggaagcagataaaccagttgaagacatactgacgtatgaggaatttcatcctttcttgttttctcaacattcacaatgtccatatatagaatttgaatcatttgacaaggcggtggatgaattttattccaagatagaaggccagaaaattgacttaaaagctttacaacaggaaaagcaagcattgaagaaattagataatgttcgaaaggatcacgaaaacagattggaagctcttcagcaggctcaggaaatagacaaactgaaaggagagctcatagaaatgaacctacaaatagttgacagagccattcaggtagttcgaagtgctttagctaaccagatagattggacagaaattgggttaattgtgaaagaagcccaggctcaaggagaccctgttgcaagtgcaatcaaagaattaaaactacaaacaaaccatgttacaatgctgctaagaaatccatacttgttatcagaggaggaagatgatgatgttgatggtgacgtcaatgttgagaaaaatgaaactgaaccaccaaaaggaaaaaagaaaaaacaaaagaataaacagctgcagaagcctcagaaaaataagcccttacttgtagatgttgatctcagcttgtcagcatatgccaatgccaaaaagtattatgatcacaagagatatgctgctaagaaaacacaaaagactgttgaagctgctgagaaggcattcaagtcagcagaaaagaaaacaaagcaaacattaaaagaagttcagactgttacctctattcaaaaagcaagaaaagtatattggtttgagaaatttctgtggttcattagctcagagaactatctaattataggtggacgagatcagcaacagaatgaaataattgtgaaaagatacttgacaccaggagacatttatgtacatgctgatcttcatggagctactagctgtgtaattaagaatccaacaggagaacccatccccccacggaccttgactgaagctggcacaatggcactttgctacagtgctgcttgggatgcacgagttatcactagtgcttggtgggtgtaccatcatcaggtatctaaaacagcaccaactggagaatatttgacaacaggaagcttcatgataagaggaaaaaagaattttcttcctccctcatatctaatgatggggtttagcttcctttttaaggtagatgagtcttgtgtttggagacatcagggtgaacgaaaagtcagagtacaggatgaagacatggagacactggcaagttgtacaagtgaactcatatcagaagaaatggaacaattagatggaggtgacacgagcagtgatgaggataaagaagaacatgaaactcctgtggaagtagaactcatgactcaggttgaccaagaggatatcactcttcagagtggcagagatgaactaaatgaggagctcattcaggaagaaagctctgaagacgaaggagaatatgaagaggttagaaaagatcaggattctgttggtgaaatgaaggatgaaggggaagagacattaaattatcctgatactaccattgacttgtctcaccttcaaccccaaaggtccatccagaaattggcttcaaaagaggaatcttctaattctagtgacagtaaatcacagagccggagacatttgtcagccaaggaaagaagggaaatgaaaaagaaaaaacttccaagtgactcaggagatttagaagcgttagagggaaaggataaagaaaaagaaagtactgtacacattgaaactcatcagaacacaagcaaaaatgttgcggctgtgcagccaatgaaacgaggacaaaagagtaaaatgaaaaaaatgaaagaaaaatacaaagaccaggatgaagaagaccgtgaacttatcatgaagttgctggggtctgcaggttcaaacaaagaagaaaaagggaagaaggggaagaaaggaaaaacaaaggacgaacctgtgaagaaacagccccagaaacctagaggtggacagagggtctctgacaacattaagaaagaaactccgttccttgaggttataactcatgagttacaagactttgctgtagatgatccacatgatgacaaggaagagcaagatctggatcaacagggaaatgaggaaaacctatttgattctttgacaggccagccacatcctgaagatgtactactgtttgccattccaatatgtgccccttacaccaccatgacaaactacaaatataaagtgaaacttactcctggagtgcagaaaaagggaaaagctgcaaaaacagccttgaatagtttcatgcattccaaagaagcaacagcaagagaaaaagacttattccgcagcgtaaaggacacagatttatcaagaaacattcctggcaaagtgaaagtgtctgcacccaatcttctgaacgtaaaaaggaaatagctgaaatgaaattctaaaatatttgagaagagccaattttatagccttttggaagttcaaagatgaaagcaccatgtatcaggatttccgcattataaaaatgaactaaacattgccttgctatattcaccaaaaggacttacttcttgttttttcccagttttatatagaggaaacactgtctatgataggatttccaaaagtatttgtggacagttaaatgctaattaatatacatctgtagttattctacattttcttgaaatttgggaggttaataccaagtattcatttcatgatgtaaagaaactgaacagtgaagtggcttgattgcttaaactattgacttggtaagtctactgtatataacatctaatatatatattacaggccaaatgaactaaacattgccttgctatattcaccaaaaggacttaattcttgtttttttcccagttttatatagaggaaacactatgataggatttcctaaagtatttgtggacagttaaatgctaattatatacatctgtagttattctacattttcttgaaatttgggaggttaataccaagtattcatttcatgatgtaaagaaactgaacagtgaagtggcttgattgcttaaactattgacttggtaagtctactgtatataacatctaatatatatatattataggccagctacaaggggtttaaatatttaggattgtgtcttgaaaactaagtattggagtggattttcttctgctttcattgatacttgtcagaaaaaaatattagaccaaaatgtaaaatataagtaataattctcatgactcagcttaatcatttctattcatttgtagaccttcaggtttgatcttaattttttccttgtaatctgattcagttctgtaccattttaatttccacctttagtaattaattaccaatatagcacgttagagtatcttaacctataataccagaagcgcattttaggcttaccactaaagactctaacccacttttcctctgtctcttaacagaatggaaaatgatgtcatcattatttccattccttcatgagctataaaacctattaattaaaaaaaaactttttaattgactggacagcacctgcctgtattcagcatgaccacttgctccagcccctacactgaagcattaaggtcaaagtactgaacagttgttggtccctccacactttgtttttccagcttcgtcataatgtgaatattaatgtttaaaaaaaaaaacctttattatattgtatttacaacactaggttacataactatagactactcttgccattaaaaaaaaaaaaatctataatgttttcaaaaaatgacttcagcattttgatgatggtaagactataatgtttctacagatacatatcctgaagttactgaaaagaaaatgtagcaaccattcttcagggtaaaaagcccaaccattactttactttaatagaggacagctactggtgttaaatacatttattgtaaactttagacacaaaaataggttctctaggccattcacatgcacattaaaaccaacaggtgcaaactacaacaatgcatataattatacaaatgatgccactctgtgatgtttacaggattgctgtccatgcaaggtgatcataggcattatttatgaagccttaagatccagaagtgttgttactaccaaacctctgattaacactgtgaagtaagtgttttggaaggcagttccatgagttggctaacatttctttaaagcaaatgactgcttctaagcttagcctgaaagtggacaaggaaagagaaaagtaatttcactttactgtttggaagtacattcacttgaaaaactacataaaacatccctctttctttcttcaaagattttcataggaactggttatagcaatgaagttttattgcccttaaataatccataaacctagtttttcgagagtgctaagtcttaggaaacacaattttaaataatctaagtgccaagtacaaagttacttaccgtacaagagattttggttgaactgaaaatattagtatttcattactgtgtgcctgaaaaataaataggaagaacacatttaaaagcaaatgctttgcaagtaagtttcagtaataatgtgaaggtagtatacttacagctctgtgatggacaagcaagttgttggcacatccaccaaaaacaattacttctccttcatcgctggcacaagctgtgtgccataacctgcatttaaaacaaaaacgagtttgaagccacccagaacaccagttggccattttatactacagaatagagctatgaaataaagactagcgatcttaaggtagttcagaccaaaacatcatggcgagaagtaaaatcttaagggaaagtagcaaaagcagatcaatcaatatctattttatctggatattattttctctctctggtcgttctcatttatgcaatgaggagtttgaactgaacgatctgttctctaggtctttgttagcaataaaaatcgtatggga

SEQ ID NO: 160346 - DNA, 570 bp, Homo sapiens
  Payload ID: 11359
  Gene Symbol: NEMF
  Gene Name: nuclear export mediator factor
  ENST ID: ENST00000554626
  CDS Start-End: 36-570
agaggaacttgcggtagtgaccctcgggcctcgccatgaagagccgctttagcaccattgacctccgcgccgtactcgcggagctgaatgctagcttgctaggaatgagagtaaacaatgtttatgatgtggataataagacataccttattcgtcttcaaaaaccggactttaaagctacacttttacttgaatctggcatacgaattcatacaacagaatttgagtggcctaagaatatgatgccgtctagttttgccatgaaggggaacattgttcttacagattatgagtacgtaattttaaatattctaaggtttcgaactgatgaggcagatgatgttaaatttgctgttcgtgaacgctatccacttgatcatgctagagctgctgaacctttgcttactttggaaaggttgactgaaatagtagccagcgcacctaagggtgaactactgaagagggtgcttaacccattacttccctatggaccagctctcattgaacactgtcttttagaaaatggattctcgggtaatgtcaaagtggatgaaaaacttgaaactaaag

SEQ ID NO: 160347 - DNA, 590 bp, Homo sapiens
  Payload ID: 11359
  Gene Symbol: NEMF
  Gene Name: nuclear export mediator factor
  ENST ID: ENST00000556672
  CDS Start-End: 69-434
gaggagaagtggcgtcgagtccggccgggcagtagaggaacttgcggtagtgaccctcgggcctcgccatgaagagccgctttagcaccattgacctccgcgccgtactcgcggagctgaatgctagcttgctaggaatgagagtaaacaatgtttatgatgtggataataagacataccttattcgtcttcaaaaaccggactttaaagctacacttttacttgaatctggcatacgaattcatacaacagaatttgagtggcctaagaatatgatgccgtctagttttgccatgaagtgccgaaaacatttgaagagtcggagattagtcagtgcaaaacagcttggtgtggatagaattgtagattttcaatttggaagtgatgaagctgcttaccatttaatcattgagctctatgatagggtaagttaaatttgtgggatatggtgaaggaaaatttcttattaatcattttgtaatagtgctatataacatgagtgggggaacattttttttctgtgtcaaaggttgttactaccctaggaaatgggtgccacacaaataaaataaaattttccagtaataacc

SEQ ID NO: 160348 - DNA, 3029 bp, Homo sapiens
  Payload ID: 11359
  Gene Symbol: NEMF
  Gene Name: nuclear export mediator factor
  ENST ID: ENST00000555970
  CDS Start-End: 34-3029
aggaacttgcggtagtgaccctcgggcctcgccatgaagagccgctttagcaccattgacctccgcgccgtactcgcggagctgaatgctagcttgctaggaatgagagtaaacaatgtttatgatgtggataataagacataccttattcgtcttcaaaaaccggactttaaagctacacttttacttgaatctggcatacgaattcatacaacagaatttgagtggcctaagaatatgatgccgtctagttttgccatgaaggggaacattgttcttacagattatgagtacgtaattttaaatattctaaggtttcgaactgatgaggcagatgatgttaaatttgctgttcgtgaacgctatccacttgatcatgctagagctgctgaacctttgcttactttggaaaggttgactgaaatagtagccagcgcacctaagggtgaactactgaagagggtgcttaacccattacttccctatggaccagctctcattgaacactgtcttttagaaaatggattctcgggtaatgtcaaagtggatgaaaaacttgaaactaaagatattgaaaaagtacttgtttctctgcagaaagcagaagactatatgaaaacaacatccaacttcagtgggaagggatatatcattcagaaaagagaaataaaaccaagcttggaagcagataaaccagttgaagacatactgacgtatgaggaatttcatcctttcttgttttctcaacattcacaatgtccatatatagaatttgaatcatttgacaaggcggtggatgaattttattccaagatagaaggccagaaaattgacttaaaagctttacaacaggaaaagcaagcattgaagaaattagataatgttcgaaaggatcacgaaaacagattggaagctcttcagcaggctcaggaaatagacaaactgaaaggagagctcatagaaatgaacctacaaatagttgacagagccattcaggtagttcgaagtgctttagctaaccagatagattggacagaaattgggttaattgtgaaagaagcccaggctcaaggagaccctgttgcaagtgcaatcaaagaattaaaactacaaacaaaccatgttacaatgctgctaagaaatccatacttgttatcagaggaggaagatgatgatgttgatggtgacgtcaatgttgagaaaaatgaaactgaaccaccaaaaggaaaaaagaaaaaacaaaagaataaacagctgcagaagcctcagaaaaataagcccttacttgtagatgttgatctcagcttgtcagcatatgccaatgccaaaaagtattatgatcacaagagatatgctgctaagaaaacacaaaagactgttgaagctgctgagaaggcattcaagtcagcagaaaagaaaacaaagcaaacattaaaagaagttcagactgttacctctattcaaaaagcaagaaaagtatattggtttgagaaatttctgtggttcattagctcagagaactatctaattataggtggacgagatcagcaacagaatgaaataattgtgaaaagatacttgacaccaggagacatttatgtacatgctgatcttcatggagctactagctgtgtaattaagaatccaacaggagaacccatccccccacggaccttgactgaagctggcacaatggcactttgctacagtgctgcttgggatgcacgagttatcactagtgcttggtgggtgtaccatcatcaggtatctaaaacagcaccaactggagaatatttgacaacaggaagcttcatgataagaggaaaaaagaattttcttcctccctcatatctaatgatggggtttagcttcctttttaaggtagatgagtcttgtgtttggagacatcagggtgaacgaaaagtcagagtacaggatgaagacatggagacactggcaagttgtacaagtgaactcatatcagaagaaatggaacaattagatggaggtgacacgagcagtgatgaggataaagaagaacatgaaactcctgtggaagtagaactcatgactcaggttgaccaagaggatatcactcttcagagtggcagagatgaactaaatgaggagctcattcaggaagaaagctctgaagacgaaggagaatatgaagaggttagaaaagatcaggattctgttggtgaaatgaaggatgaaggggaagagacattaaattatcctgatactaccattgacttgtctcaccttcaaccccaaaggtccatccagaaattggcttcaaaagaggaatcttctaattctagtgacagtaaatcacagagccggagacatttgtcagccaaggaaagaagggaaatgaaaaagaaaaaacttccaagtgactcaggagatttagaagcgttagagggaaaggataaagaaaaagaaagtactgtacacattgaaactcatcagaacacaagcaaaaatgttgcggctgtgcagccaatgaaacgaggacaaaagagtaaaatgaaaaaaatgaaagaaaaatacaaagaccaggatgaagaagaccgtgaacttatcatgaagttgctggggtctgcaggttcaaacaaagaagaaaaagggaagaaggggaagaaaggaaaaacaaaggacgaacctgtgaagaaacagccccagaaacctagaggtggacagagggtctctgacaacattaagaaagaaactccgttccttgaggttataactcatgagttacaagactttgctgtagatgatccacatgatgacaaggaagagcaagatctggatcaacagggaaatgaggaaaacctatttgattctttgacaggccagccacatcctgaagatgtactactgtttgccattccaatatgtgccccttacaccaccatgacaaactacaaatataaagtgaaacttactcctggagtgcagaaaaagggaaaagctgcaaaaacagccttgaatagtttcatgcattccaaagaagcaacagc

SEQ ID NO: 160349 - DNA, 1348 bp, Homo sapiens
  Payload ID: 11360
  Gene Symbol: NFIA
  Gene Name: nuclear factor I/A
  ENST ID: ENST00000371184
  CDS Start-End: 39-1181
cacccagacgcacacgcataccccagcgcccggcagttatgtattctccgctctgtctcacccaggatgaatttcatcctttcatcgaagcacttctgccccacgtccgagcctttgcctacacatggttcaacctgcaggcccgaaaacgaaaatacttcaaaaaacatgaaaagcgtatgtcaaaagaagaagagagagccgtgaaggatgaattgctaagtgaaaaaccagaggtcaagcagaagtgggcatctcgacttctggcaaagttgcggaaagatatccgacccgaatatcgagaggattttgttcttacagttacagggaaaaaacctccatgttgtgttctttccaacccagaccagaaaggcaagatgcgaagaattgactgcctccgccaggcagataaagtctggaggttggaccttgttatggtgattttgtttaaaggtattccgctggaaagtactgatggcgagcgccttgtaaagtccccacaatgctctaatccagggctctgtgtccaaccccatcacataggggtttctgttaaggaactcgatttatatttggcatactttgtgcatgcagcaggaatgccatctccaaccacactgaagaagtcggagaagtctggtttcagcagcccctccccttcacagacctcctccctgggaacggcgttcacacagcatcaccgacctgtcattacaggacccagagcaagtccgcatgcaacaccatcgactcttcatttcccgacatcacccattatccagcagcctgggccttacttctcacacccagccatccgctatcaccctcaggagacgctgaaagaatttgtccaacttgtctgccctgatgctggtcagcaggctggacaggtggggttcctcaatcccaatgggagcagccaaggcaaggtgcacaacccattccttcccaccccaatgttgccaccgccaccgccaccaccgatggccaggcctgtgcctctgccggtgccagacacaaagcctccaaccacgtcaacagaaggaggtgcagcctcccccacgtcaccaacctactcgacacccagcacctcccccgcaaaccgattcgtcagtgttggaccacgggatccaagctttgtaaatatccctcaacagacacagtcctggtacctgggataaaagttgcagcgtcccaccatccaccagacagaccacctgaccccttctcaactctgtaacatggacgcaacctcaacccagcgcagttacaacttcactatcagcggaaggggagaaaaaccgattcaaatcaacttgtacatggaaacagcaagcattatggtcaa

SEQ ID NO: 160350 - DNA, 1714 bp, Homo sapiens
  Payload ID: 11360
  Gene Symbol: NFIA
  Gene Name: nuclear factor I/A
  ENST ID: ENST00000371185
  CDS Start-End: 45-1508
accgcacacccagacgcacacgcataccccagcgcccggcagttatgtattctccgctctgtctcacccaggatgaatttcatcctttcatcgaagcacttctgccccacgtccgagcctttgcctacacatggttcaacctgcaggcccgaaaacgaaaatacttcaaaaaacatgaaaagcgtatgtcaaaagaagaagagagagccgtgaaggatgaattgctaagtgaaaaaccagaggtcaagcagaagtgggcatctcgacttctggcaaagttgcggaaagatatccgacccgaatatcgagaggattttgttcttacagttacagggaaaaaacctccatgttgtgttctttccaacccagaccagaaaggcaagatgcgaagaattgactgcctccgccaggcagataaagtctggaggttggaccttgttatggtgattttgtttaaaggtattccgctggaaagtactgatggcgagcgccttgtaaagtccccacaatgctctaatccagggctctgtgtccaaccccatcacataggggtttctgttaaggaactcgatttatatttggcatactttgtgcatgcagcaggacatttgggcttccaggacagttttgtcacatcaggtgtttttagtgtcactgagctagtaagagtgtcacagacaccaatagctgcaggaactggcccaaatttttctctctcagatttggaaagttcttcatactacagcatgagtccaggagcaatgaggaggtctttacccagcacatcctctacgagctccacaaagcgcctcaagtctgtggaggatgaaatggacagtcctggtgaggagccattttatacaggccaagggcgctccccaggaagtggcagtcagtcaagtggatggcatgaagtggagccaggaatgccatctccaaccacactgaagaagtcggagaagtctggtttcagcagcccctccccttcacagacctcctccctgggaacggcgttcacacagcatcaccgacctgtcattacaggacccagagcaagtccgcatgcaacaccatcgactcttcatttcccgacatcacccattatccagcagcctgggccttacttctcacacccagccatccgctatcaccctcaggagacgctgaaagaatttgtccaacttgtctgccctgatgctggtcagcaggctggacaggtggggttcctcaatcccaatgggagcagccaaggcaaggtgcacaacccattccttcccaccccaatgttgccaccgccaccgccaccaccgatggccaggcctgtgcctctgccggtgccagacacaaagcctccaaccacgtcaacagaaggaggtgcagcctcccccacgtcaccaacctactcgacacccagcacctcccccgcaaaccgattcgtcagtgttggaccacgggatccaagctttgtaaatatccctcaacagacacagtcctggtacctgggataaaagttgcagcgtcccaccatccaccagacagaccacctgaccccttctcaactctgtaacatggacgcaacctcaacccagcgcagttacaacttcactatcagcggaaggggagaaaaaccgattcaaatcaacttgtacatggaaacagcaagcattatggtcaaacagcaaaggccataaccttttgggattttttttttttt

SEQ ID NO: 160351 - DNA, 2683 bp, Homo sapiens
  Payload ID: 11360
  Gene Symbol: NFIA
  Gene Name: nuclear factor I/A
  Uniprot ID: Q12857
  ENST ID: ENST00000371187
  CDS Start-End: 172-1668
gacttggaaatgtgaacgcaagaagcaggcttgatttttttttctccccccttctctctctctctctctctctctcttcctctctccctctttctcctctctcacccacactcacgcacacctccaaaccgcacacccagacgcacacgcataccccagcgcccggcagttatgtattctccgctctgtctcacccaggatgaatttcatcctttcatcgaagcacttctgccccacgtccgagcctttgcctacacatggttcaacctgcaggcccgaaaacgaaaatacttcaaaaaacatgaaaagcgtatgtcaaaagaagaagagagagccgtgaaggatgaattgctaagtgaaaaaccagaggtcaagcagaagtgggcatctcgacttctggcaaagttgcggaaagatatccgacccgaatatcgagaggattttgttcttacagttacagggaaaaaacctccatgttgtgttctttccaacccagaccagaaaggcaagatgcgaagaattgactgcctccgccaggcagataaagtctggaggttggaccttgttatggtgattttgtttaaaggtattccgctggaaagtactgatggcgagcgccttgtaaagtccccacaatgctctaatccagggctctgtgtccaaccccatcacataggggtttctgttaaggaactcgatttatatttggcatactttgtgcatgcagcagattcaagtcaatctgaaagtcccagccagccaagtgacgctgacattaaggaccagccagaaaatggacatttgggcttccaggacagttttgtcacatcaggtgtttttagtgtcactgagctagtaagagtgtcacagacaccaatagctgcaggaactggcccaaatttttctctctcagatttggaaagttcttcatactacagcatgagtccaggagcaatgaggaggtctttacccagcacatcctctacgagctccacaaagcgcctcaagtctgtggaggatgaaatggacagtcctggtgaggagccattttatacaggccaagggcgctccccaggaagtggcagtcagtcaagtggatggcatgaagtggagccaggaatgccatctccaaccacactgaagaagtcggagaagtctggtttcagcagcccctccccttcacagacctcctccctgggaacggcgttcacacagcatcaccgacctgtcattacaggacccagagcaagtccgcatgcaacaccatcgactcttcatttcccgacatcacccattatccagcagcctgggccttacttctcacacccagccatccgctatcaccctcaggagacgctgaaagaatttgtccaacttgtctgccctgatgctggtcagcaggctggacaggtggggttcctcaatcccaatgggagcagccaaggcaaggtgcacaacccattccttcccaccccaatgttgccaccgccaccgccaccaccgatggccaggcctgtgcctctgccggtgccagacacaaagcctccaaccacgtcaacagaaggaggtgcagcctcccccacgtcaccaatcctggtacctgggataaaagttgcagcgtcccaccatccaccagacagaccacctgaccccttctcaactctgtaacatggacgcaacctcaacccagcgcagttacaacttcactatcagcggaaggggagaaaaaccgattcaaatcaacttgtacatggaaacagcaagcattatggtcaaacagcaaaggccataaccttttgggatttttttttttttaaaatactttagggactgttgtaatttctcatatggtgctggaaatggttgggctttgtaacatttgaagtgtttccatggtagcgtgagcattaggtgacgtggctagcggaggactacccttgctcactgacttcctgttgtaacacactttccttacggagcctggctgtttcacagtatttcatgaatttacccacacaggtgtgatcctccttgagcattgaggaggcacatggagaactaaatcttttgtagtagctgagatctgcaatatataacgggacagtcaaagggcaatgtttttctgtaacatattggaaaaagaaaatgcagttatattccttttttatttgttcctttagtttgttttggttcagcagtcagcagttaagtatataacatggcccgcaaggacaatgaatccactcacattgcagaacaattccgaaaatggcaaactactactactactgttcagttttttaaaagttttgaaatgctgcacttacatttaaaaaaacaacaacaacattttttcaacaatttcaacaatgacacaaaaattcacatggaaatggggaagatggtctgttttgacagaaactgacaggaatcaatcaaaacaatcgaattttgaattgagtaaagtgcaatttcattggatagctaaatatctttgtaagatagagattgttgaaaattctatttttgtttttctagtcctttcaccccaggactctaaattattggggtaaaaaacagccttgcaagaaaaaggggagctatttttgctttttatgttttttattgttaaacttgtatccctttaaaaactgaaggaaattaaaaaaaaaaaacaaaaaaa

SEQ ID NO: 160352 - DNA, 1989 bp, Homo sapiens
  Payload ID: 11360
  Gene Symbol: NFIA
  Gene Name: nuclear factor I/A
  Uniprot ID: Q12857
  ENST ID: ENST00000371189
  CDS Start-End: 83-1747
acaatgctttgagccttaccgcatttcagtgggggaaaaaaagttacctaggaggtctgatttttcaaagaaatttgcatacatgcaaatgtgccgcccggcctcctcctcggttctctacgtgcccacgcggtggcccggggggtgcggggcaacctggcaaagttgcccaagtcctccaccgagacgcacacgcataccccagcgcccggcagttatgtattctccgctctgtctcacccaggatgaatttcatcctttcatcgaagcacttctgccccacgtccgagcctttgcctacacatggttcaacctgcaggcccgaaaacgaaaatacttcaaaaaacatgaaaagcgtatgtcaaaagaagaagagagagccgtgaaggatgaattgctaagtgaaaaaccagaggtcaagcagaagtgggcatctcgacttctggcaaagttgcggaaagatatccgacccgaatatcgagaggattttgttcttacagttacagggaaaaaacctccatgttgtgttctttccaacccagaccagaaaggcaagatgcgaagaattgactgcctccgccaggcagataaagtctggaggttggaccttgttatggtgattttgtttaaaggtattccgctggaaagtactgatggcgagcgccttgtaaagtccccacaatgctctaatccagggctctgtgtccaaccccatcacataggggtttctgttaaggaactcgatttatatttggcatactttgtgcatgcagcagattcaagtcaatctgaaagtcccagccagccaagtgacgctgacattaaggaccagccagaaaatggacatttgggcttccaggacagttttgtcacatcaggtgtttttagtgtcactgagctagtaagagtgtcacagacaccaatagctgcaggaactggcccaaatttttctctctcagatttggaaagttcttcatactacagcatgagtccaggagcaatgaggaggtctttacccagcacatcctctacgagctccacaaagcgcctcaagtctgtggaggatgaaatggacagtcctggtgaggagccattttatacaggccaagggcgctccccaggaagtggcagtcagtcaagtggatggcatgaagtggagccaggaatgccatctccaaccacactgaagaagtcggagaagtctggtttcagcagcccctccccttcacagacctcctccctgggaacggcgttcacacagcatcaccgacctgtcattacaggacccagagcaagtccgcatgcaacaccatcgactcttcatttcccgacatcacccattatccagcagcctgggccttacttctcacacccagccatccgctatcaccctcaggagacgctgaaagaatttgtccaacttgtctgccctgatgctggtcagcaggctggacaggtggggttcctcaatcccaatgggagcagccaaggcaaggtgcacaacccattccttcccaccccaatgttgccaccgccaccgccaccaccgatggccaggcctgtgcctctgccggtgccagacacaaagcctccaaccacgtcaacagaaggaggtgcagcctcccccacgtcaccaacctactcgacacccagcacctcccccgcaaaccgattcgtcagtgttggaccacgggatccaagctttgtaaatatccctcaacagacacagtcctggtacctgggataaaagttgcagcgtcccaccatccaccagacagaccacctgaccccttctcaactctgtaacatggacgcaacctcaacccagcgcagttacaacttcactatcagcggaaggggagaaaaaccgattcaaatcaacttgtacatggaaacagcaagcattatggtcaaacagcaaaggccataaccttttgggatttttttttttttaaaatactttagggactgttgtaatttctcatatgg

SEQ ID NO: 160353 - DNA, 1916 bp, Homo sapiens
  Payload ID: 11360
  Gene Symbol: NFIA
  Gene Name: nuclear factor I/A
  ENST ID: ENST00000371191
  CDS Start-End: 113-1711
ttttttttttacccatgattccatatggtatggaccggactacatgttgccccacatgccactgcaaatgttttctcaattaggtgtcttatctcccgtgagttagcatcagatgaagcttgctgacagcgtaatggcagggaaagcttccgacggctccatcaaatggcagctctgctacgacatctcggccagaacttggtggatggatgaatttcatcctttcatcgaagcacttctgccccacgtccgagcctttgcctacacatggttcaacctgcaggcccgaaaacgaaaatacttcaaaaaacatgaaaagcgtatgtcaaaagaagaagagagagccgtgaaggatgaattgctaagtgaaaaaccagaggtcaagcagaagtgggcatctcgacttctggcaaagttgcggaaagatatccgacccgaatatcgagaggattttgttcttacagttacagggaaaaaacctccatgttgtgttctttccaacccagaccagaaaggcaagatgcgaagaattgactgcctccgccaggcagataaagtctggaggttggaccttgttatggtgattttgtttaaaggtattccgctggaaagtactgatggcgagcgccttgtaaagtccccacaatgctctaatccagggctctgtgtccaaccccatcacataggggtttctgttaaggaactcgatttatatttggcatactttgtgcatgcagcagattcaagtcaatctgaaagtcccagccagccaagtgacgctgacattaaggaccagccagaaaatggacatttgggcttccaggacagttttgtcacatcaggtgtttttagtgtcactgagctagtaagagtgtcacagacaccaatagctgcaggaactggcccaaatttttctctctcagatttggaaagttcttcatactacagcatgagtccaggagcaatgaggaggtctttacccagcacatcctctacgagctccacaaagcgcctcaagtctgtggaggatgaaatggacagtcctggtgaggagccattttatacaggccaagggcgctccccaggaagtggcagtcagtcaagtggatggcatgaagtggagccaggaatgccatctccaaccacactgaagaagtcggagaagtctggtttcagcagcccctccccttcacagacctcctccctgggaacggcgttcacacagcatcaccgacctgtcattacaggacccagagcaagtccgcatgcaacaccatcgactcttcatttcccgacatcacccattatccagcagcctgggccttacttctcacacccagccatccgctatcaccctcaggagacgctgaaagaatttgtccaacttgtctgccctgatgctggtcagcaggctggacaggtggggttcctcaatcccaatgggagcagccaaggcaaggtgcacaacccattccttcccaccccaatgttgccaccgccaccgccaccaccgatggccaggcctgtgcctctgccggtgccagacacaaagcctccaaccacgtcaacagaaggaggtgcagcctcccccacgtcaccaacctactcgacacccagcacctcccccgcaaaccgattcgtcagtgttggaccacgggatccaagctttgtaaatatccctcaacagacacagtcctggtacctgggataaaagttgcagcgtcccaccatccaccagacagaccacctgaccccttctcaactctgtaacatggacgcaacctcaacccagcgcagttacaacttcactatcagcggaaggggagaaaaaccgattcaaatcaacttgtacatggaaacagcaagcattatggtcaaacagcaaaggccataaccttttgggatttttttttttt

SEQ ID NO: 160354 - DNA, 9487 bp, Homo sapiens
  Payload ID: 11360
  Gene Symbol: NFIA
  Gene Name: nuclear factor I/A
  Uniprot ID: Q12857
  ENST ID: ENST00000403491
  CDS Start-End: 485-2014
ggccgcggaggctcgggacccggctggccgcgcggcgccgcagccgccccctcccccacaccccctcccccccgcggcggcggcgcgagcgggcggcggctgtgcggtgcggtgcagagcggaggcggaggcgggcgcgcgggcagctcgcgggcacccggccgggccggcgcgggagcgggaaagggtgcgctatgcctttaacacccgcgtacagtaggcatgtatagtggagtgtagggaaactctaggcggggttaaagttcagctcatggagcggcaatagcgctggctggctggctgcagttgagccgacttggaaatgtgaacgcaagaagcaggcttgatttttttttctccccccttctctctctctctctctctctctcttcctctctccctctttctcctctctcacccacactcacgcacacctccaaaccgcacacccagacgcacacgcataccccagcgcccggcagttatgtattctccgctctgtctcacccaggatgaatttcatcctttcatcgaagcacttctgccccacgtccgagcctttgcctacacatggttcaacctgcaggcccgaaaacgaaaatacttcaaaaaacatgaaaagcgtatgtcaaaagaagaagagagagccgtgaaggatgaattgctaagtgaaaaaccagaggtcaagcagaagtgggcatctcgacttctggcaaagttgcggaaagatatccgacccgaatatcgagaggattttgttcttacagttacagggaaaaaacctccatgttgtgttctttccaacccagaccagaaaggcaagatgcgaagaattgactgcctccgccaggcagataaagtctggaggttggaccttgttatggtgattttgtttaaaggtattccgctggaaagtactgatggcgagcgccttgtaaagtccccacaatgctctaatccagggctctgtgtccaaccccatcacataggggtttctgttaaggaactcgatttatatttggcatactttgtgcatgcagcagattcaagtcaatctgaaagtcccagccagccaagtgacgctgacattaaggaccagccagaaaatggacatttgggcttccaggacagttttgtcacatcaggtgtttttagtgtcactgagctagtaagagtgtcacagacaccaatagctgcaggaactggcccaaatttttctctctcagatttggaaagttcttcatactacagcatgagtccaggagcaatgaggaggtctttacccagcacatcctctacgagctccacaaagcgcctcaagtctgtggaggatgaaatggacagtcctggtgaggagccattttatacaggccaagggcgctccccaggaagtggcagtcagtcaagtggatggcatgaagtggagccaggaatgccatctccaaccacactgaagaagtcggagaagtctggtttcagcagcccctccccttcacagacctcctccctgggaacggcgttcacacagcatcaccgacctgtcattacaggacccagagcaagtccgcatgcaacaccatcgactcttcatttcccgacatcacccattatccagcagcctgggccttacttctcacacccagccatccgctatcaccctcaggagacgctgaaagaatttgtccaacttgtctgccctgatgctggtcagcaggctggacaggtggggttcctcaatcccaatgggagcagccaaggcaaggtgcacaacccattccttcccaccccaatgttgccaccgccaccgccaccaccgatggccaggcctgtgcctctgccggtgccagacacaaagcctccaaccacgtcaacagaaggaggtgcagcctcccccacgtcaccaacctactcgacacccagcacctcccccgcaaaccgattcgtcagtgttggaccacgggatccaagctttgtaaatatccctcaacagacacagtcctggtacctgggataaaagttgcagcgtcccaccatccaccagacagaccacctgaccccttctcaactctgtaacatggacgcaacctcaacccagcgcagttacaacttcactatcagcggaaggggagaaaaaccgattcaaatcaacttgtacatggaaacagcaagcattatggtcaaacagcaaaggccataaccttttgggatttttttttttttaaaatactttagggactgttgtaatttctcatatggtgctggaaatggttgggctttgtaacatttgaagtgtttccatggtagcgtgagcattaggtgacgtggctagcggaggactacccttgctcactgacttcctgttgtaacacactttccttacggagcctggctgtttcacagtatttcatgaatttacccacacaggtgtgatcctccttgagcattgaggaggcacatggagaactaaatcttttgtagtagctgagatctgcaatatataacgggacagtcaaagggcaatgtttttctgtaacatattggaaaaagaaaatgcagttatattccttttttatttgttcctttagtttgttttggttcagcagtcagcagttaagtatataacatggcccgcaaggacaatgaatccactcacattgcagaacaattccgaaaatggcaaactactactactactgttcagttttttaaaagttttgaaatgctgcacttacatttaaaaaaacaacaacaacattttttcaacaatttcaacaatgacacaaaaattcacatggaaatggggaagatggtctgttttgacagaaactgacaggaatcaatcaaaacaatcgaattttgaattgagtaaagtgcaatttcattggatagctaaatatctttgtaagatagagattgttgaaaattctatttttgtttttctagtcctttcaccccaggactctaaattattggggtaaaaaacagccttgcaagaaaaaggggagctatttttgctttttatgttttttattgttaaacttgtatccctttaaaaactgaaggaaattaaaaaaaaaaaacaaaaaaacaaatctaatggtgcttttaccacaatatgttaactacattaaatgctaattaattattttctgttatcaaagcacatgactaaaatgaaatcatggtatctgttaattttataagctagaagtcactataatggattacgccaattctaaaaaattttacacctatctggcatcataggatttatcagttatcagacacctcattgtaccagagattgtccagaagttttaaagacctttgcatccctgaactgggctatgggaaataataatagtaataataataataataataatgatgaaaccaatactgacacaaatgctggtgcccattcagatcaagggtacttgttagggaaaaaaaaaaaagtttgcacccccaaacgtcctgtatcttatgaaaaaaaaaacaaaaaacaaaaacaaaaaaaaaacacaaaaaaccacagaaacaaaaacaaaaaaaagtgcaagtgatttttctaccagacagcgaagcacccctttgcttcccatgcgacttcaagaaggtttcctatactatacatatatatacgttctggttggcaagccctgctgatcagagaaagtctctgcatgttctagtgttagtaactaatttttatatagttaatgtaggataaagtagagtgcattaagacacaatattgtaatccctactctaggcacttgcctttaaactatgtttttcagcccttcagaagggttctactactgtcctatacaatcaagtaactgaaattcttgggaagacactttgctcctcatctttctccccgaaacaatgttgttttgttttgttttttttccttaatttgcacgaaaacaaaaattccatatcaatgtgccttgccctggatagcgattatttgtggaattgttgcacatgctcctctattgaaaggggtttttccctagtcaagcatttggagacactttttgtaaatgtgacttttatgtcagccatcgtcagtttcaacatctagaactaaatagaaagctagttgttccgcagataggagtagtctttattgtcctgtacggtcggtggcagtgctattctgagatctgtagatgcttagaatatcagtattttggatgttgctgcattttacaatttatttggagtcttcctttattttcccccagatatatgaaaatatgcaatacctgcttatatcatgtagaaaagcttagcaattattaatttttcttttatttttttttatttgaccaaagtcggtgctgcacttgacgcagtgtgttttaggtgtttgtctttgtacttttttgtgatttttgaatgcacgtgcgcaggaagggctcctcttagagaagcagtcaaactgtgaagcactaagctgaccctgcttcaagcaattttgtttttacaactgttcctttcacaagcaagccttaaaaaaaaaaaagacaacttcctttttcttcagctcccacaccccatttttcttagcagactgcagtcaatccacattcaataaaaagtatataatgcccatttttatatgcacgtttttaaacttccaagttctgaaaattgtttactggttatctctatttaaggaaaaaaaaataaaataaaacattttggattttcatatgtgtctgataagtggttgaatagtcgtttggcgctgttgtatggtgtgattgtcagtgtatggtgtcacttcctatagccagccagcatactttgccttcccctatagcacttagctgggcattactttattatgacatatgtgcactaaaaaatgaaaaaaaggaaaaaaagaaaaaaaaaaagaaaaaatagcagctttcagtgcttcacagtgaagggaaaaaagcctagacaaacattttgtcagaaccttgcaataagccaaggtattaccagtaaattggttgtatatacaataaaattgcacccttttttaaacaaaacaaactaagcaatagtttgggcagttttagttgtttttagtgagcatgttgtagtcatgactgcaaagagagagaataaactgcccgctcagaagatatgtaatttgtattgttgtatagttttattgattacactgatttattctaccctattttataatgcaggacttttgtaatgttgtttaaatgaggaaaaatttctgtcaaattagcctagtaaaatttctgatcgttcattataaaggcagcgttcatagaattgcttttctttctttttaccccccctttgggaactggatttaagtttaaaactttcctgtttcctttttttttttttttttgtaagtatttaaatacaattatttttttctctcaatggtatagcatattcctatgcttgagaagtataggtctactgaaaaaccattgtaaatggacgttacaggtatgctgtatttttgaaggtattttgttgtattaagtttgatgaagctaaaattagggaactctgaacagatttgcaggaaaaaatgttttaaaggctttaaaacattagggaggcagtctagggtgataacgaacaggggttaagtattaaatacacgaagttacatttttgttcatgtttcattgtccagaaagcagcaggaaactattcagttgtgatcaagcaggaaaaaagaaacaccaacagttgccagtgtttttgctttttagcttaaaagcatagtgaagatgcttgaggaagactttgctacctggggtgtgtagacagacagactgagagctatcagcatttgaaggcccagcccttgactctgagacacatttgaattttttctttcccatcaaatggcattaacaagattgggcaaagatgagtccctcaaatttctgtgttttttgtttgtttgtttgtttgttttttctttgggaactgaagtcagaggcacgaacactaactcttagcatttttctgtagactttttcttctggcccttgtccctgccagcaaaacgccccttttctgatcattcgtgcgcagagggcctcccagtaatgccacgctctccatgctagagagccttctctttcctctgaggtttgaactgatgttctgtgtcttcacaccctggcatgacagttacgtgtggtcagcccgctccccaggcccgtccctgccgccgccaggtgtgggctctaggcaggccgacaaggttacacctcccagagcttgtgatcttcattttctgacagtcaaagtgtgaaggaacccagacttccccgagccacggtgttcagtcagcccacaggaatatgcaagacccatctccaaaagtttgtctttgattttttccaagcccttagccccataagctttgaatcctgtagttacagtggcataaaggactgacaaaacctggataaggaaaaaccttttttttctatgaattttttttgttttttaggggaaagggattctaagaatgtcatttaatgtactttgcatcatgtctctagaaatatctttgtccatagtggtggtggagtctctctctctctctctctttttgtttgcttctgttttctttcttgtcttcattctttcttttcttttttatttctggtagcaggcctccatagaacaaatctaaaacacaaccaccatagtaatgtaaggagagcttcagtggcacctcaaaacccacccttcgagatctgtccaaagacagtctcagaaagctgcactgcccaccggctcagctttcattcaaaaaggcttccaaggccaattctgtcttgaagtcaatgcatgtatttactgtttgacagtaaacccgctctgccttctccacgtccaaggctgtgcattcgtctaattagcgtcgtgtatgttttccttttattttttccaataaaaaagcagtgggatgaaaattgctttgatatatagcaggtaacattgaagctattccatagcacttaactgtagtgaatactgtgtcaccaattttgaaatcaatttaatgtttaatgcaaatccattacatggtgctattataggctgacaaaatgatttacacaaatgtgacaacttgggctcaattcactctgctttccaacagtgtaaatgcatagcagtgtttatctgcatgagaactatgcactaatctatctgaagaaaaaaactatatcaactttggtatctactttccgtttacttcaatccttgcctttttggtcattgttataatgccagctttaggacagaaagaattataagaaaaccagcataatacctgatatattaaaatgtagtgcctgtgaaatctgtattatattgctcttctgaagtaagatttttctacaccggtagccttcgctgtctgtcagtcaggaccttctggtataggtgatgtaaaataaccgtacaatattaatgcatgcgattccataatgcttagtgaactgtatgaatattactcaaagttatgttagtctttttttccgacttggttcttgtcagctaggtttaaaggtatttcactgagaacgcaaattctgtcttttcttgatttcggctgttttcagtattttggaggtatacatttacttaaattcagtattactcgtgttttgtttttgtttttgttttttgttttctttttcctaggggacaagcatgggtgtttgatttcagaaatcagtacctggcgagatttttgtctcaaaacgactatttgaatttcaagaactgtgctgcgaagacactctgagaacatttgcaagtcaggggcattttccttgacccttgactgatgctatgcggagactgatacattttcttaatggacaatgttcaagccaggtacccatgcttgatctgtcttcacaccagacctcctcatattaaaaggaaaaataagaaaaaaaatgtaagaaatcacatggctatttagtttcatgcacagttgcaatattttcttcaaaaataaaactctgtacaaactttgggcccgattcataagaaaaagaagtttgctattaacacgggatttttttaatatactttttttggtctaaatttgaaattacttgcttcccaaattaaataaatttcatctcatttttttccctaaaccagcacccatctgccttttattccccaaagagttacctttcccagattagggggatggtatgtggggagcagatagcggaaatgcttagaaagataagggggaccacccacagctggtcgtgagaacagggagacagtgtgtgggggtgggacctcatctgtgtgcctggtatcctgagttttacatgtagatgcattcgcctatttgattcagaaaaataaactttcccaaaatgtgtctgaaccacaagagcatacagtggaagtgctacctctaatctaaccagagcaccttcatggtggaagacacccaccaggtcatacaatgtgaacttttgtatctctgcagtggtttcaaggacaaatagtgtccaatgtattgggccatttttcctgctgtttttatactcaacttctcaaaatgaaaaaagcttttatttttcctttgacttatttgtgttgttcttattttttaaatttttattttttgataatagtctgtaagttagcctttttgggttttttttttttttttttggcttttttttttgtttgtttttttttcttttgacattgcaaccgaaggtcataaggccgctagctccgctgggacagaggcttgagagaactaacggctcggtgccttctccctggtctcagaccatcgtctctgcactgcgaaggcatttggtagcctcgccactgagatactaactagacctagactaggagctttatcaggttctaggaggtcctttaggaagactctcaaaggcaaatccctgatcccccgccccacccttagccctgccctctcaccagagcaaaattcactggggacttttcccaccacacatggaaatctgtccactcggaatacctctgttttccatttcaaattgtagggggaggggatggaacacttccagtgatggtaagagatctgttatgaaacgaaacaccccccgtgttaataacttggtctgaaatctgtttttatgagccgggccccctgtgcctctagtatacttgtattgactctcatagttacccttttagttttactgtgttctgtgaaaatttgtaattggttgagaatcactgtgggcgtccattcttattcaactaaatctccacaggttttttgagctggtgtggattagtttaactcttgtattcaaccattagtgctaccaccttctcacattacaatacaattactggaagcaagtactgcatttcctatgcaacaaaaaaggaaaaataaaaaattgctaatgctatggaa

SEQ ID NO: 160355 - DNA, 2123 bp, Homo sapiens
  Payload ID: 11360
  Gene Symbol: NFIA
  Gene Name: nuclear factor I/A
  Uniprot ID: Q12857
  ENST ID: ENST00000407417
  CDS Start-End: 353-1858
gtacaatccaaagcacgcaaggcaaaaccagagcgaatctgagaaccagccagcccgggttggatcgctttcaaaagagagagtgagagcgagcgagcgagcgagcgagagcgagacagtgagagagggagagagcgcgccttgcaattgcaaaagccttctgatttggagttaaaaaaaaaattctccaagaagcctgcaattggccaacagctttttaaaaaatctcttccgggttttcaacggttccaagtttatttagatattttttaaatgcaaaaaaaaggggacaacaaatgaagcaattcgtctgagcattttaaagtttctcacgtactctttttacattgcaatggatgaatttcatcctttcatcgaagcacttctgccccacgtccgagcctttgcctacacatggttcaacctgcaggcccgaaaacgaaaatacttcaaaaaacatgaaaagcgtatgtcaaaagaagaagagagagccgtgaaggatgaattgctaagtgaaaaaccagaggtcaagcagaagtgggcatctcgacttctggcaaagttgcggaaagatatccgacccgaatatcgagaggattttgttcttacagttacagggaaaaaacctccatgttgtgttctttccaacccagaccagaaaggcaagatgcgaagaattgactgcctccgccaggcagataaagtctggaggttggaccttgttatggtgattttgtttaaaggtattccgctggaaagtactgatggcgagcgccttgtaaagtccccacaatgctctaatccagggctctgtgtccaaccccatcacataggggtttctgttaaggaactcgatttatatttggcatactttgtgcatgcagcagattcaagtcaatctgaaagtcccagccagccaagtgacgctgacattaaggaccagccagaaaatggacatttgggcttccaggacagttttgtcacatcaggtgtttttagtgtcactgagctagtaagagtgtcacagacaccaatagctgcaggaactggcccaaatttttctctctcagatttggaaagttcttcatactacagcatgagtccaggagcaatgaggaggtctttacccagcacatcctctacgagctccacaaagcgcctcaagtctgtggaggatgaaatggacagtcctggtgaggagccattttatacaggccaagggcgctccccaggaagtggcagtcagtcaagtggatggcatgaagtggagccaggaatgccatctccaaccacactgaagaagtcggagaagtctggtttcagcagcccctccccttcacagacctcctccctgggaacggcgttcacacagcatcaccgacctgtcattacaggacccagagcaagtccgcatgcaacaccatcgactcttcatttcccgacatcacccattatccagcagcctgggccttacttctcacacccagccatccgctatcaccctcaggagacgctgaaagaatttgtccaacttgtctgccctgatgctggtcagcaggctggacaggtggggttcctcaatcccaatgggagcagccaaggcaaggtgcacaacccattccttcccaccccaatgttgccaccgccaccgccaccaccgatggccaggcctgtgcctctgccggtgccagacacaaagcctccaaccacgtcaacagaaggaggtgcagcctcccccacgtcaccaacctactcgacacccagcacctcccccgcaaaccgattcgtcagtgttggaccacgggatccaagctttgtaaatatccctcaacagacacagtcctggtacctgggataaaagttgcagcgtcccaccatccaccagacagaccacctgaccccttctcaactctgtaacatggacgcaacctcaacccagcgcagttacaacttcactatcagcggaaggggagaaaaaccgattcaaatcaacttgtacatggaaacagcaagcattatggtcaaacagcaaaggccataaccttttgggatttttttttttttaaaatactttagggactgttgtaatttctcatatggtgctggaaatggttgggctttgt

SEQ ID NO: 160356 - DNA, 1674 bp, Homo sapiens
  Payload ID: 11360
  Gene Symbol: NFIA
  Gene Name: nuclear factor I/A
  ENST ID: ENST00000485903
  CDS Start-End: 70-1470
cacccacactcacgcacacctccaaaccgcacacccagacgcacacgcataccccagcgcccggcagttatgtattctccgctctgtctcacccaggatgaatttcatcctttcatcgaagcacttctgccccacgtccgagcctttgcctacacatggttcaacctgcaggcccgaaaacgaaaatacttcaaaaaacatgaaaagcgtatgtcaaaagaagaagagagagccgtgaaggatgaattgctaagtgaaaaaccagaggtcaagcagaagtgggcatctcgacttctggcaaagttgcggaaagatatccgacccgaatatcgagaggattttgttcttacagttacagggaaaaaacctccatgttgtgttctttccaacccagaccagaaaggcaagatgcgaagaattgactgcctccgccaggcagataaagtctggaggttggaccttgttatggtgattttgtttaaaggtattccgctggaaagtactgatggcgagcgccttgtaaagtccccacaatgctctaatccagggctctgtgtccaaccccatcacataggggtttctgttaaggaactcgatttatatttggcatactttgtgcatgcagcagattcaagtcaatctgaaagtcccagccagccaagtgacgctgacattaaggaccagccagaaaatggacatttgggcttccaggacagttttgtcacatcaggtgtttttagtgtcactgagctagtaagagtgtcacagacaccaatagctgcaggaactggcccaaatttttctctctcagatttggaaagttcttcatactacagcatgagtccaggagcaatgaggaggtctttacccagcacatcctctacgagctccacaaagcgcctcaagtctgtggaggatgaaatggacagtcctggtgaggagccattttatacaggccaagggcgctccccaggaagtggcagtcagtcaagtggatggcatgaagtggagccagcaagtccgcatgcaacaccatcgactcttcatttcccgacatcacccattatccagcagcctgggccttacttctcacacccagccatccgctatcaccctcaggagacgctgaaagaatttgtccaacttgtctgccctgatgctggtcagcaggctggacaggtggggttcctcaatcccaatgggagcagccaaggcaaggtgcacaacccattccttcccaccccaatgttgccaccgccaccgccaccaccgatggccaggcctgtgcctctgccggtgccagacacaaagcctccaaccacgtcaacagaaggaggtgcagcctcccccacgtcaccaacctactcgacacccagcacctcccccgcaaaccgattcgtcagtgttggaccacgggatccaagctttgtaaatatccctcaacagacacagtcctggtacctgggataaaagttgcagcgtcccaccatccaccagacagaccacctgaccccttctcaactctgtaacatggacgcaacctcaacccagcgcagttacaacttcactatcagcggaaggggagaaaaaccgattcaaatcaacttgtacatggaaacagcaagcattatggtcaaacagcaaaggccataaccttttgggattttttttttt

SEQ ID NO: 160357 - DNA, 603 bp, Homo sapiens
  Payload ID: 11360
  Gene Symbol: NFIA
  Gene Name: nuclear factor I/A
  ENST ID: ENST00000496712
  CDS Start-End: 1-286
gaaaaaacctccatgttgtgttctttccaacccagaccagaaaggcaagatgcgaagaattgactgcctccgccaggcagataaagtctggaggttggaccttgttatggtgattttgtttaaaggtattccgctggaaagtactgatggcgagcgccttgtaaagtccccacaatgctctaatccagggctctgtgtccaaccccatcacataggggtttctgttaaggaactcgatttatatttggcatactttgtgcatgcagcaggaggagttggaagatgaggagtaacacaacactttagatatacatgttaaaaacttataacaaatcatagatcatactaaaggattaccgaagtttagaacatggctgagggtatagatgtcagattttcttacacaatagtgggtcttttgtttcagagttcactcttggcaagcaactccctaccactgcgttaatttcctgtcgatctttcattcagcaacagacctagagatggggagcagacactgccccccccacccaggctttttaagactgtgctttgtgtagattaaaaagacgaaggaaaaaagaataaactttttccaaacaa

SEQ ID NO: 160358 - DNA, 730 bp, Homo sapiens
  Payload ID: 11360
  Gene Symbol: NFIA
  Gene Name: nuclear factor I/A
  ENST ID: ENST00000476646
  CDS Start-End: 172-730
atctgatccaggacaactcgcccaggagcccggcgggtttcagctgccaccacgaaagatgaatttcatcctttcatcgaagcacttctgccccacgtccgagcctttgcctacacatggttcaacctgcaggcccgaaaacgaaaatacttcaaaaaacatgaaaagcgtatgtcaaaagaagaagagagagccgtgaaggatgaattgctaagtgaaaaaccagaggtcaagcagaagtgggcatctcgacttctggcaaagttgcggaaagatatccgacccgaatatcgagaggattttgttcttacagttacagggaaaaaacctccatgttgtgttctttccaacccagaccagaaaggcaagatgcgaagaattgactgcctccgccaggcagataaagtctggaggttggaccttgttatggtgattttgtttaaaggtattccgctggaaagtactgatggcgagcgccttgtaaagtccccacaatgctctaatccagggctctgtgtccaaccccatcacataggggtttctgttaaggaactcgatttatatttggcatactttgtgcatgcagcagattcaagtcaatctgaaagtcccagccagccaagtgacgctgacattaaggaccagccagaaaatggacatttgggcttccaggacagttttgtcacatcaggtgtttttagtgtcactgagctagtaagagtgtcacaga

SEQ ID NO: 160359 - DNA, 3200 bp, Homo sapiens
  Payload ID: 11360
  Gene Symbol: NFIA
  Gene Name: nuclear factor I/A
  ENST ID: ENST00000357977
  CDS Start-End: 10-483
ataaccctgatgttttcttttcctgcagcaagtccgcatgcaacaccatcgactcttcatttcccgacatcacccattatccagcagcctgggccttacttctcacacccagccatccgctatcaccctcaggagacgctgaaagaatttgtccaacttgtctgccctgatgctggtcagcaggctggacaggtggggttcctcaatcccaatgggagcagccaaggcaaggtgcacaacccattccttcccaccccaatgttgccaccgccaccgccaccaccgatggccaggcctgtgcctctgccggtgccagacacaaagcctccaaccacgtcaacagaaggaggtgcagcctcccccacgtcaccaacctactcgacacccagcacctcccccgcaaaccgattcgtcagtgttggaccacgggatccaagctttgtaaatatccctcaacagacacagtcctggtacctgggataaaagttgcagcgtcccaccatccaccagacagaccacctgaccccttctcaactctgtaacatggacgcaacctcaacccagcgcagttacaacttcactatcagcggaaggggagaaaaaccgattcaaatcaacttgtacatggaaacagcaagcattatggtcaaacagcaaaggccataaccttttgggatttttttttttttaaaatactttagggactgttgtaatttctcatatggtgctggaaatggttgggctttgtaacatttgaagtgtttccatggtagcgtgagcattaggtgacgtggctagcggaggactacccttgctcactgacttcctgttgtaacacactttccttacggagcctggctgtttcacagtatttcatgaatttacccacacaggtgtgatcctccttgagcattgaggaggcacatggagaactaaatcttttgtagtagctgagatctgcaatatataacgggacagtcaaagggcaatgtttttctgtaacatattggaaaaagaaaatgcagttatattccttttttatttgttcctttagtttgttttggttcagcagtcagcagttaagtatataacatggcccgcaaggacaatgaatccactcacattgcagaacaattccgaaaatggcaaactactactactactgttcagttttttaaaagttttgaaatgctgcacttacatttaaaaaaacaacaacaacattttttcaacaatttcaacaatgacacaaaaattcacatggaaatggggaagatggtctgttttgacagaaactgacaggaatcaatcaaaacaatcgaattttgaattgagtaaagtgcaatttcattggatagctaaatatctttgtaagatagagattgttgaaaattctatttttgtttttctagtcctttcaccccaggactctaaattattggggtaaaaaacagccttgcaagaaaaaggggagctatttttgctttttatgttttttattgttaaacttgtatccctttaaaaactgaaggaaattaaaaaaaaaaaacaaaaaaacaaatctaatggtgcttttaccacaatatgttaactacattaaatgctaattaattattttctgttatcaaagcacatgactaaaatgaaatcatggtatctgttaattttataagctagaagtcactataatggattacgccaattctaaaaaattttacacctatctggcatcataggatttatcagttatcagacacctcattgtaccagagattgtccagaagttttaaagacctttgcatccctgaactgggctatgggaaataataatagtaataataataataataataatgatgaaaccaatactgacacaaatgctggtgcccattcagatcaagggtacttgttagggaaaaaaaaaaaagtttgcacccccaaacgtcctgtatcttatgaaaaaaaaaacaaaaaacaaaaacaaaaaaaaaacacaaaaaaccacagaaacaaaaacaaaaaaaagtgcaagtgatttttctaccagacagcgaagcacccctttgcttcccatgcgacttcaagaaggtttcctatactatacatatatatacgttctggttggcaagccctgctgatcagagaaagtctctgcatgttctagtgttagtaactaatttttatatagttaatgtaggataaagtagagtgcattaagacacaatattgtaatccctactctaggcacttgcctttaaactatgtttttcagcccttcagaagggttctactactgtcctatacaatcaagtaactgaaattcttgggaagacactttgctcctcatctttctccccgaaacaatgttgttttgttttgttttttttccttaatttgcacgaaaacaaaaattccatatcaatgtgccttgccctggatagcgattatttgtggaattgttgcacatgctcctctattgaaaggggtttttccctagtcaagcatttggagacactttttgtaaatgtgacttttatgtcagccatcgtcagtttcaacatctagaactaaatagaaagctagttgttccgcagataggagtagtctttattgtcctgtacggtcggtggcagtgctattctgagatctgtagatgcttagaatatcagtattttggatgttgctgcattttacaatttatttggagtcttcctttattttcccccagatatatgaaaatatgcaatacctgcttatatcatgtagaaaagcttagcaattattaatttttcttttatttttttttatttgaccaaagtcggtgctgcacttgacgcagtgtgttttaggtgtttgtctttgtacttttttgtgatttttgaatgcacgtgcgcaggaagggctcctcttagagaagcagtcaaactgtgaagcactaagctgaccctgcttcaagcaattttgtttttacaactgttcctttcacaagcaagccttaaaaaaaaaaaagacaacttcctttttcttcagctcccacaccccatttttcttagcagactgcagtcaatccacattcaataaaaagtatataatgcccatttttatatgcacgtttttaaacttccaagttctgaaaattgtttactggttatctctatttaaggaaaaaaaaataaaataaaacattttggattttcata

SEQ ID NO: 160360 - DNA, 552 bp, Homo sapiens
  Payload ID: 11360
  Gene Symbol: NFIA
  Gene Name: nuclear factor I/A
  ENST ID: ENST00000482020
  CDS Start-End: 1-552
caccaatagctgcaggaactggcccaaatttttctctctcagatttggaaagttcttcatactacagcatgagtccaggagcaatgaggaggtctttacccagcacatcctctacgagctccacaaagcgcctcaagtctgtggaggatgaaatggacagtcctggtgaggagccattttatacaggccaagggcgctccccaggaagtggcagtcagtcaagtggatggcatgaagtggagccaggaatgccatctccaaccacactgaagaagtcggagaagtctggtttcagcagcccctccccttcacagacctcctccctgggaacggcgttcacacagcatcaccgacctgtcattacaggacccagagaattcaagatggctcccagcatcctcggctctcctttctggaaagtctactcagcaagtccgcatgcaacaccatcgactcttcatttcccgacatcacccattatccagcagcctgggccttacttctcacacccagccatccgctatcaccctcaggagacgctgaaagaatttg

SEQ ID NO: 160361 - DNA, 696 bp, Homo sapiens
  Payload ID: 11360
  Gene Symbol: NFIA
  Gene Name: nuclear factor I/A
  ENST ID: ENST00000493627
  CDS Start-End: 1-142
cacaaagcctccaaccacgtcaacagaaggaggtgcagcctcccccacgtcaccaaggtgccacatgacaggacgagtattatgggaaacattgatctcactccgatggtgtggacctgagcagtcctggtacctgggataaaagttgcagcgtcccaccatccaccagacagaccacctgaccccttctcaactctgtaacatggacgcaacctcaacccagcgcagttacaacttcactatcagcggaaggggagaaaaaccgattcaaatcaacttgtacatggaaacagcaagcattatggtcaaacagcaaaggccataaccttttgggatttttttttttttaaaatactttagggactgttgtaatttctcatatggtgctggaaatggttgggctttgtaacatttgaagtgtttccatggtagcgtgagcattaggtgacgtggctagcggaggactacccttgctcactgacttcctgttgtaacacactttccttacggagcctggctgtttcacagtatttcatgaatttacccacacaggtgtgatcctccttgagcattgaggaggcacatggagaactaaatcttttgtagtagctgagatctgcaatatataacgggacagtcaaagggcaatgtttttctgtaacatattggaaaaagaaaatgcagttatattccttt

SEQ ID NO: 160362 - DNA, 1274 bp, Homo sapiens
  Payload ID: 11361
  Gene Symbol: NFIB
  Gene Name: nuclear factor I/B
  ENST ID: ENST00000380921
  CDS Start-End: 447-1049
gcccccctccccgccttttttgaaaaagcattttaccaccaaccaccaccccaatccaacccacaccgaaccttcgcgcaccccctacaccccaacaacaacaacaactgcaaaatagaaaacaaatccccaaacccaggcgaaaagcagccaacaccggcggcggcggcggcctcggcaagcacggccagcgcgctcggactgcaagagggttaaaagtgtagattggatttcacccctggaaatctagcacgccgagtgaacttgaatctttggctatttaaggaggactgggtttgttgtgaagttgcggtgatccagcgcagagccccgtcctgattgatcgcatcgcggggctcagatgactgtaaaatgaatagatgaaattcttgcttctcgaagattttcttgggcatctcccggaaagtgcgttttaaggcgaagtcatgatgtattctcccatctgtctcactcaggatgaatttcacccattcatcgaggcacttcttccacatgtccgtgcaattgcctatacttggttcaacctgcaggctcgaaaacgcaagtactttaaaaagcatgagaagcgaatgtcaaaggatgaagaaagagcagtcaaagatgagcttctcagtgaaaagcctgaaatcaaacagaagtgggcatccaggctccttgccaaactgcgcaaagatattcgccaggagtatcgagaggactttgtgctcaccgtgactggcaagaagcacccgtgctgtgtcttatccaatcccgaccagaagggtaagattaggagaatcgactgcctgcgacaggcagacaaagtctggcgtctggatctagtcatggtgatcctgttcaaaggcatccccttggaaagtaccgatggagagcggctcatgaaatccccacattgcacaaacccagcactttgtgtccagccacatcatatcacagtatcagttaaggagcttgatttgtttttggcatactacgtgcaggagcaaggtaagaatttcttttcttcaaataaatgcatcaagatatagatgtccttgcattaccaacaatccatagtaaaacaatcattttacaaagccgcataccaaaagtagactgaagtttgagctgtcacagatggtaggtcatttccaaacttggcctggtgggaggaaaaatggcctgcagatagccaggtgacagactgttacctgaggtttgttatataaatgtgggacttaataaactgctatgagctttattattcaaaaaaa

SEQ ID NO: 160363 - DNA, 840 bp, Homo sapiens
  Payload ID: 11361
  Gene Symbol: NFIB
  Gene Name: nuclear factor I/B
  ENST ID: ENST00000380924
  CDS Start-End: 329-835
atgaacagcacactgaggaggacacaaaagaagtagacagaatctctgcctctgcttaggagtatgcaatttagttggggcgacaaaacttaaatgctagaaccaataaaagaagattacaaagcaactcgcaaattctggacaatcaggaagtccaagccacaatgatcctgccaagaatcctccaggttaccttgaggatagttttgtaaaatctggagtcttcaatgtatcagaacttgtaagagtatccagaacgcccataacccagggaactggagtcaacttcccaattggagaaatcccaagccaaccatactatcatgacatgaactcgggggtcaatcttcagaggtctctgtcttctccaccaagcagcaaaagacccaaaactatatccatagatgaaaatatggaaccaagtcctacaggagacttttacccctctccaagttcaccagctgctggaagtcgaacatggcacgaaagagatcaagatatgtcttctccgactactatgaagaagcctgaaaagccattgttcagctctgcatctccacaggattcttccccaagactgagcactttcccccagcaccaccatcccggaatacctggagttgcacacagtgtcatctcaactcgaactccacctccaccttcaccgttgccatttccaacacaagctatccttcctccagccccatcgagctacttttctcatccaacaatcagatatcctccccacctgaatcctcaggatactctgaagaactatgtaccttcttatgacccatccagtccacaaaccagccagtcctggtacctgggctagcttgg

SEQ ID NO: 160364 - DNA, 2142 bp, Homo sapiens
  Payload ID: 11361
  Gene Symbol: NFIB
  Gene Name: nuclear factor I/B
  ENST ID: ENST00000380934
  CDS Start-End: 353-1693
tattgggcagtacaggtctagatgatcaaatgcctacactgaatgacttcatagaatatcactgttgagctgacaccgatctaaaagattcacatgtcggagcaagactgttagtggagtaaactcctcgagtgtacaggacccctttgttcttgttctattttgtttttaacagcttgctctgctccataaagatccatcagtcaccctcaaactcttcggaccttctgcctgttcattcctatgaagctgcgtttgctaaggtactcggtgacctggagcaaacattctaaaacagcgcaaatggcagaagcagagcctacaggcttcttgtcgggaatccgttcggagtatggaaagaatcccagtgtctgtggacttctgggttgtctgctgtgcagttctgaaatgtaaccctgggattcctaaaagaatgtcaactctgtgctttggattttctgatgaatttcacccattcatcgaggcacttcttccacatgtccgtgcaattgcctatacttggttcaacctgcaggctcgaaaacgcaagtactttaaaaagcatgagaagcgaatgtcaaaggatgaagaaagagcagtcaaagatgagcttctcagtgaaaagcctgaaatcaaacagaagtgggcatccaggctccttgccaaactgcgcaaagatattcgccaggagtatcgagaggactttgtgctcaccgtgactggcaagaagcacccgtgctgtgtcttatccaatcccgaccagaagggtaagattaggagaatcgactgcctgcgacaggcagacaaagtctggcgtctggatctagtcatggtgatcctgttcaaaggcatccccttggaaagtaccgatggagagcggctcatgaaatccccacattgcacaaacccagcactttgtgtccagccacatcatatcacagtatcagttaaggagcttgatttgtttttggcatactacgtgcaggagcaagattctggacaatcaggaagtccaagccacaatgatcctgccaagaatcctccaggttaccttgaggatagttttgtaaaatctggagtcttcaatgtatcagaacttgtaagagtatccagaacgcccataacccagggaactggagtcaacttcccaattggagaaatcccaagccaaccatactatcatgacatgaactcgggggtcaatcttcagaggtctctgtcttctccaccaagcagcaaaagacccaaaactatatccatagatgaaaatatggaaccaagtcctacaggagacttttacccctctccaagttcaccagctgctggaagtcgaacatggcacgaaagagatcaagatatgtcttctccgactactatgaagaagcctgaaaagccattgttcagctctgcatctccacaggattcttccccaagactgagcactttcccccagcaccaccatcccggaatacctggagttgcacacagtgtcatctcaactcgaactccacctccaccttcaccgttgccatttccaacacaagctatccttcctccagccccatcgagctacttttctcatccaacaatcagatatcctccccacctgaatcctcaggatactctgaagaactatgtaccttcttatgacccatccagtccacaaaccagccagtcctggtacctgggctagcttggttcctttccaagtgtcaaataggacacccatcttaccggccaatgtccaaaattacggtttgaacataattggagaacctttccttcaagcagaaacaagcaactgagggaaaaagaaacacaacaatagtttaagaaattttttttttaaataaaaaaaaaggaaaagaggaagactggacaaaacaacacaaaggcagaaaggaaagaaactgaagaaagaagataatagaccagcaattgcagcacttacaatcactaattcccttaaggttgaaactgtaatgacataaaaagggtcgatgatatttcactgatggtagatcgcagcccctgcaacgtagcctttgttacatgaagtccgctgggaaatagatgttctgtctctatgacaatatattttaactgactttctagatgccttaatatttgcatgataagcta

SEQ ID NO: 160365 - DNA, 2381 bp, Homo sapiens
  Payload ID: 11361
  Gene Symbol: NFIB
  Gene Name: nuclear factor I/B
  Uniprot ID: O00712
  ENST ID: ENST00000380953
  CDS Start-End: 157-1641
ctgggtttgttgtgaagttgcggtgatccagcgcagagccccgtcctgattgatcgcatcgcggggctcagatgactgtaaaatgaatagatgaaattcttgcttctcgaagattttcttgggcatctcccggaaagtgcgttttaaggcgaagtcatgatgtattctcccatctgtctcactcaggatgaatttcacccattcatcgaggcacttcttccacatgtccgtgcaattgcctatacttggttcaacctgcaggctcgaaaacgcaagtactttaaaaagcatgagaagcgaatgtcaaaggatgaagaaagagcagtcaaagatgagcttctcagtgaaaagcctgaaatcaaacagaagtgggcatccaggctccttgccaaactgcgcaaagatattcgccaggagtatcgagaggactttgtgctcaccgtgactggcaagaagcacccgtgctgtgtcttatccaatcccgaccagaagggtaagattaggagaatcgactgcctgcgacaggcagacaaagtctggcgtctggatctagtcatggtgatcctgttcaaaggcatccccttggaaagtaccgatggagagcggctcatgaaatccccacattgcacaaacccagcactttgtgtccagccacatcatatcacagtatcagttaaggagcttgatttgtttttggcatactacgtgcaggagcaagattctggacaatcaggaagtccaagccacaatgatcctgccaagaatcctccaggttaccttgaggatagttttgtaaaatctggagtcttcaatgtatcagaacttgtaagagtatccagaacgcccataacccagggaactggagtcaacttcccaattggagaaatcccaagccaaccatactatcatgacatgaactcgggggtcaatcttcagaggtctctgtcttctccaccaagcagcaaaagacccaaaactatatccatagatgaaaatatggaaccaagtcctacaggagacttttacccctctccaagttcaccagctgctggaagtcgaacatggcacgaaagagatcaagatatgtcttctccgactactatgaagaagcctgaaaagccattgttcagctctgcatctccacaggattcttccccaagactgagcactttcccccagcaccaccatcccggaatacctggagttgcacacagtgtcatctcaactcgaactccacctccaccttcaccgttgccatttccaacacaagctatccttcctccagccccatcgagctacttttctcatccaacaatcagatatcctccccacctgaatcctcaggatactctgaagaactatgtaccttcttatgacccatccagtccacaaaccagccagcctaacggcagtggtcaagtagtagggaaagtgcctggccatttcactcctgtcttggcaccctctccccatcccagtgcagtgcgacctgtgaccctgagcatgacagatactaaacccatcactacatccactgaagcctacacagcctcaggcacatctcaagccaatcgatatgtgggactaagcccaagagacccatccttcctacatcagcaacagtcctggtacctgggctagcttggttcctttccaagtgtcaaataggacacccatcttaccggccaatgtccaaaattacggtttgaacataattggagaacctttccttcaagcagaaacaagcaactgagggaaaaagaaacacaacaatagtttaagaaattttttttttaaataaaaaaaaaggaaaagaggaagactggacaaaacaacacaaaggcagaaaggaaagaaactgaagaaagaagataatagaccagcaattgcagcacttacaatcactaattcccttaaggttgaaactgtaatgacataaaaagggtcgatgatatttcactgatggtagatcgcagcccctgcaacgtagcctttgttacatgaagtccgctgggaaatagatgttctgtctctatgacaatatattttaactgactttctagatgccttaatatttgcatgataagctagttttattggtttagtattcttgttgtttacgcatggaatcactattcctggttatctcaccaacgaaggctaggaggcggcgtcagaggtgctgggtgacagagccatgagccagccattttataagcactctgatttctaaaagttaaaaaaaatatatgaaatctctgtagcctttagttatcagtacagatttattaaatttcggcccttaacccagccttttccagtgtgtaacccagtttgaaatcttaaaaaaagaaaaaatgaaaaaaaaaggaaaaaaagaa

SEQ ID NO: 160366 - DNA, 8198 bp, Homo sapiens
  Payload ID: 11361
  Gene Symbol: NFIB
  Gene Name: nuclear factor I/B
  Uniprot ID: O00712
  ENST ID: ENST00000380959
  CDS Start-End: 475-1737
gcccgctcgccctcctgcgccctcccgcgcccccctccccgccttttttgaaaaagcattttaccaccaaccaccaccccaatccaacccacaccgaaccttcgcgcaccccctacaccccaacaacaacaacaactgcaaaatagaaaacaaatccccaaacccaggcgaaaagcagccaacaccggcggcggcggcggcctcggcaagcacggccagcgcgctcggactgcaagagggttaaaagtgtagattggatttcacccctggaaatctagcacgccgagtgaacttgaatctttggctatttaaggaggactgggtttgttgtgaagttgcggtgatccagcgcagagccccgtcctgattgatcgcatcgcggggctcagatgactgtaaaatgaatagatgaaattcttgcttctcgaagattttcttgggcatctcccggaaagtgcgttttaaggcgaagtcatgatgtattctcccatctgtctcactcaggatgaatttcacccattcatcgaggcacttcttccacatgtccgtgcaattgcctatacttggttcaacctgcaggctcgaaaacgcaagtactttaaaaagcatgagaagcgaatgtcaaaggatgaagaaagagcagtcaaagatgagcttctcagtgaaaagcctgaaatcaaacagaagtgggcatccaggctccttgccaaactgcgcaaagatattcgccaggagtatcgagaggactttgtgctcaccgtgactggcaagaagcacccgtgctgtgtcttatccaatcccgaccagaagggtaagattaggagaatcgactgcctgcgacaggcagacaaagtctggcgtctggatctagtcatggtgatcctgttcaaaggcatccccttggaaagtaccgatggagagcggctcatgaaatccccacattgcacaaacccagcactttgtgtccagccacatcatatcacagtatcagttaaggagcttgatttgtttttggcatactacgtgcaggagcaagattctggacaatcaggaagtccaagccacaatgatcctgccaagaatcctccaggttaccttgaggatagttttgtaaaatctggagtcttcaatgtatcagaacttgtaagagtatccagaacgcccataacccagggaactggagtcaacttcccaattggagaaatcccaagccaaccatactatcatgacatgaactcgggggtcaatcttcagaggtctctgtcttctccaccaagcagcaaaagacccaaaactatatccatagatgaaaatatggaaccaagtcctacaggagacttttacccctctccaagttcaccagctgctggaagtcgaacatggcacgaaagagatcaagatatgtcttctccgactactatgaagaagcctgaaaagccattgttcagctctgcatctccacaggattcttccccaagactgagcactttcccccagcaccaccatcccggaatacctggagttgcacacagtgtcatctcaactcgaactccacctccaccttcaccgttgccatttccaacacaagctatccttcctccagccccatcgagctacttttctcatccaacaatcagatatcctccccacctgaatcctcaggatactctgaagaactatgtaccttcttatgacccatccagtccacaaaccagccagtcctggtacctgggctagcttggttcctttccaagtgtcaaataggacacccatcttaccggccaatgtccaaaattacggtttgaacataattggagaacctttccttcaagcagaaacaagcaactgagggaaaaagaaacacaacaatagtttaagaaattttttttttaaataaaaaaaaaggaaaagaggaagactggacaaaacaacacaaaggcagaaaggaaagaaactgaagaaagaagataatagaccagcaattgcagcacttacaatcactaattcccttaaggttgaaactgtaatgacataaaaagggtcgatgatatttcactgatggtagatcgcagcccctgcaacgtagcctttgttacatgaagtccgctgggaaatagatgttctgtctctatgacaatatattttaactgactttctagatgccttaatatttgcatgataagctagttttattggtttagtattcttgttgtttacgcatggaatcactattcctggttatctcaccaacgaaggctaggaggcggcgtcagaggtgctgggtgacagagccatgagccagccattttataagcactctgatttctaaaagttaaaaaaaatatatgaaatctctgtagcctttagttatcagtacagatttattaaatttcggcccttaacccagccttttccagtgtgtaacccagtttgaaatcttaaaaaaagaaaaaatgaaaaaaaaaggaaaaaaagaaaaaaggaaaaaaacagtttgaacacaaaggctctatggaagaaatgcctctatgtaggtgaagtgttctctctgcatgcaacagtaaaaattaatataatattttccccacaaaagaaacacttaacagaggcaagtgcaatttataaatttatatctaaaggggaatcatgattataagtccttcagcccttggactctaaattgaggggattaaaaagaatttaaaataattttgaacgaatttattttcccctcagtttttgagggcattaaaaaggcattaaatcaagacaaatcatgtgcttgagaaaaataaaattaatgaaaacacagcacttatgttggtttagctgcagcctccttggaggtagaatttatttatttaaaattactggttgcatcaagaacccatagggtgtacaaaaggttctataaaatctgcattatagagacaaagaggcaggcaaatccatgtcacaagggtaaagcttacagtttacaaactgggaacgccagggtgtaggatataaaaacgcactcttgagaaaacaaatgtaatcagggtgctgaaaacttgcatggtgctttcagacattagccttgttcaacaaatttcttgtattgacagatccatagtgtgcatgggcagacacattttgcctctatgtctcttaaaattttaattaaaaatactctttccagtaatcctaatttgcacgaagatataatgtccacattacgtgccttgccttgaaatctaaaaaacaaaaaacaaaaaaaaaaaaacaaaaaaatacaacaaagtgacatcactacacttgttttgctgcatttattatcattttaaatctttaccatttttatgacaaaatattttgtactccagacgaagaaaaatgtgtgacatcatggattttttagacagttatacctttatctcacatttataaagcatatcatggctgtgtatagttgccgcttaaaaattgtaatcgaccagcaatattttcagtattttggtgtttttttctattaacctttcatgtttttcatcttccaattaatatttgggggggaggggtttcaaatttatacgaattatgcaataccaagttttgcctatgtaggtagtgcttttagctgtattggttattataggtaagtacacagatttaaaaaaaaaataatgtatgcttttttgtttgtttgtttgttttaattgaccaaagtgggtactgctatttttgcagtgtgatgaggtccttttgtgtactgagagatggacaggggattttttttaatatacatatatatatattctggggtgggtgggaggatttttaacactttgcagtgtagctgtgaagcagtgcaccctgagatgggcctgggctgcaaagcgactgttctgcctactgtgacaaacttcaacttacacaggttcccctctctaacttcccacctgggttgcaagctgaactcattactggttttcataacaacacaatagtaagaacaagcaaacacaacaaattctcctggaggcagacttggcttaaaaaggcagacttggcttggtgatagtttttcttgaaagttccagatccacagtggagagtgagcctgtctcatatttggcaaaaatatttgttgaaatgtccacataggggatgttggatgtttaacacttttgagagtttaacacatgaatattctttctcctagaaaacacattagacctgttggagggagtctcccgtattccttttctgccacttttcgtccccatttcatttcattaatgataggatatgatttacctgtgacttactacttcaaatggatggcagtgcacttggatttttttttaatatccagaagattgaacagagggttgctattgttgaatgtatttggactgatagattaaaatcaaagttcaatttttaaggaacaaaaaagtaaatcctgttttcattttatctccccttttaaaactgagaaccagagcagaagggaaatatagaattttaagcaattaatcttcctgtggatgaattaaacccattagatgctgatgggatttttttaaggaatggtaccttaactatatatttgatttcgtttcccctgagggctagaggctgaatggaggctggttttattttgcctttccctcaccgcccagtcccattgagtgtattcattactagaaggaaaatctttcagaattggtgacacatggtaggctgtcttaaggagtcccctggcccccttcccctaggccatggcctaataaaataaactgtcaattgttctcacagcatatcatttaataatgaatactttagaacaatgcttatgggctggagaattgtatttgattagcccattcagtttgatagcccaaatgctgaacagcacagcgggatcctagcagtgcaagttcaaaagtaagtccaatcatttctgtgatactcgccctggtagcaaacagatcatctcagccaagctcttcatgtatctttgacctattaggtgaacaaatgaacctcacaggacacacagtattttttaaaggcagactcgctctcttttttgccagtgagcagttctagctaaccaagttacacactgtgggtattcctgcctgcctcttgaatacaaaggcctagttcaagtgttgctttttttatttcaaatcaattttttcttctttcctttttgagataaaactattaaaagtactactatatatataaaatctcaaatcaacttttcggcctcctcctcgtgtaccaggaagtatattctgacgaagggccccacttttgcaggtcttgcacgcccctcccttacccagaactgcagagcttcaggatggcgaaggtcacccaagggcatgagtagggagtggtgtctccaaccatcagttccgtggcactgttcagcctttgtgtgctgccctgccacccaccactcacagtgcctctgaagcgtgttacccctggagtgacgtgagcatttgaggcttgtctaaggaaaaaaataaaaggcagtgaaggagactgtacataaagacatggcaaaaatcttaattatagcaatatagttatcgggtaatgttcgggtgggcagctccattaaaaaatatgtgaatgaatctgtgaagctgcaagtagcgagaagagcgaaaggtcttcttaatgaaccgcctaccttgtagacagtaatttgtacactgtatagttttgttaagaattttttttaaattaaaattcccatgtttgtaaagctaactttttaacaattataatggaactatatgttgtttccatttttaaagtaaacaagaatattccttgtttagagactggacttgagttaaaactctccagtctcttaagttatgtattaaaaagaaaatctgtccatgttaggagttatttcacagattcctgtgcttgaaaagcataggatactaatcctttaaaaaagtgtaaatggagaaaagttatattttatgaaggttattttgttgtatttagtattggaaaagttggtttccagagcatttcagaatgtcgaagcaccactgtctttttattagtatatacggcctttagcaaaagtttttgtgattgttacgtgatggtatttaaggttaagtttcacagagcattcaggataggcagaaaactaaaacagtgctatgtctcacataacgtgtcctcagggagcagaatcttggatttgtgacttgtagcttcataaggactcaacgaaagagattgcacagggacatcttcagcggtgtgacagcaggacatgttctttacctagattcaaattctatgtactgtgtgaaatgatgaaggctgcagaaagttatcccatattcagtgtacagtattcatttttaatgaaacaactctacaatattgctggcagataggccccaagcatgacattcaatatagtttacatgttcctgtcaaggtcttttgttaacattaaccagctgcatgctttctggactttaagaaattgggtttctatagaaaactttttttttttttttttttttaatgtgcaggctattcaagttcaatagtaaaagctcaaaaatgaatgttctactccatgctgaaggagctgaaagctgccttcttcatattttgcactttctggtagttcccctgttttttctaattccctaaaattgtgtgggtggagtggagccctgcagttggggggtaacatggaccactgattttgccctttgaccctgcacaatgacctttgcatcagccaaactcattgccatgacaactctttgtactgtgtccgtgccacagatctgttggtcacattgttaatagtaaaggggacaagttggagacggtcaatttttacattttttgttgcaattttttcttcaatggttgtaagtagtttttttttttttttaataataaaagggttcactagttaatactctagaaatatctgtgtgttgcaattcaaatgtatgttgagattgtgaaaagcgcttcagtgccactagcttaccggtacactagactaagcccttgatgacttattgcatgatacagtaccaggaacaacaggtggcctaaatacatgaaaagcagtgtaagctagtgacactaaagccagtcttgtattactgtatttttgacagaatggttttgaaaactgtgctacagggactgatgtggcaaatatatctctttatgcagaaggaagtctttttttttcttttttttttttttaagaagtatggctttttatgcatccttcatcgagggcattgaagttgcatggactgataaaagttgatgcaaaacaagaaagaaacaaacaaaaaaaaaaaaccagcaaaatgtttaccaaaaaactcaaacaaatgagcagtgcctgttcaatttcacagtctctgttgagttcagttgtaaatatgtttcaaatgacattttcttgggaaaaaaaatctctacaacattgtagaatgtgaggggtaactacatcccaggcataggtttctcaaagctgcagtagattatgtcttcatcaagctgttaatttgtgcttatatcatatagaacttttagcatcctgggaagagctgcccccacctcaatgatatttctctgagaacaacttttgtaggactgtgtgtttctttagatacatttagtacaactgtaggtgacgagtagtcagttattgcttgctagctacacaccagggttgatccattttaaaacttttggcattttgtcctcatgggccataaatacagaaccttgtattttaattaaatttttttacaaaaggaggcacatgcacaatctccatgtaacaaacctttagcagtaggatgtattatacgacagttacttaatttctagagttcaggcctctgggatcaaccccagactgggccagaatgttagtgaaggttttattgtgcccggttggaggataacgttctttgggtactttttgtgggttgcaaatgaactcaattgccacaagttttaaactggtgtaaatcaagcttgacttaatgtgattgttactgttatatccagcctatactgctagcagctgctcatactgcagtcaattactggaagcggatatatttcctatgcaaaaactgtttaaacaataaaatgagctatgctacaga

SEQ ID NO: 160367 - DNA, 2869 bp, Homo sapiens
  Payload ID: 11361
  Gene Symbol: NFIB
  Gene Name: nuclear factor I/B
  ENST ID: ENST00000397575
  CDS Start-End: 559-2244
ccgggatcctgccgcagtgcttggggctgtaaccttgaactttcccagcgcggtgacacattctccccgctctccctcccgcccgcccgctcgccctcctgcgccctcccgcgcccccctccccgccttttttgaaaaagcattttaccaccaaccaccaccccaatccaacccacaccgaaccttcgcgcaccccctacaccccaacaacaacaacaactgcaaaatagaaaacaaatccccaaacccaggcgaaaagcagccaacaccggcggcggcggcggcctcggcaagcacggccagcgcgctcggactgcaagagggttaaaagtgtagattggatttcacccctggaaatctagcacgccgagtgaacttgaatctttggctatttaaggaggactgggtttgttgtgaagttgcggtgatccagcgcagagccccgtcctgattgatcgcatcgcggggctcagatgactgtaaaatgaatagatgaaattcttgcttctcgaagattttcttgggcatctcccggaaagtgcgttttaaggcgaagtcatgatgtattctcccatctgtctcactcaggatgaatttcacccattcatcgaggcacttcttccacatgtccgtgcaattgcctatacttggttcaacctgcaggctcgaaaacgcaagtactttaaaaagcatgagaagcgaatgtcaaaggatgaagaaagagcagtcaaagatgagcttctcagtgaaaagcctgaaatcaaacagaagtgggcatccaggctccttgccaaactgcgcaaagatattcgccaggagtatcgagaggactttgtgctcaccgtgactggcaagaagcacccgtgctgtgtcttatccaatcccgaccagaagggtaagattaggagaatcgactgcctgcgacaggcagacaaagtctggcgtctggatctagtcatggtgatcctgttcaaaggcatccccttggaaagtaccgatggagagcggctcatgaaatccccacattgcacaaacccagcactttgtgtccagccacatcatatcacagtatcagttaaggagcttgatttgtttttggcatactacgtgcaggagcaagattctggacaatcaggaagtccaagccacaatgatcctgccaagaatcctccaggttaccttgaggatagttttgtaaaatctggagtcttcaatgtatcagaacttgtaagagtatccagaacgcccataacccagggaactggagtcaacttcccaattggagaaatcccaagccaaccatactatcatgacatgaactcgggggtcaatcttcagaggtctctgtcttctccaccaagcagcaaaagacccaaaactatatccatagatgaaaatatggaaccaagtcctacaggagacttttacccctctccaagttcaccagctgctggaagtcgaacatggcacgaaagagatcaagatatgtcttctccgactactatgaagaagcctgaaaagccattgttcagctctgcatctccacaggattcttccccaagactgagcactttcccccagcaccaccatcccggaatacctggagttgcacacagtgtcatctcaactcgaactccacctccaccttcaccgttgccatttccaacacaagctatccttcctccagccccatcgagctacttttctcatccaacaatcagatatcctccccacctgaatcctcaggatactctgaagaactatgtaccttcttatgacccatccagtccacaaaccagccagcctaacggcagtggtcaagtagtagggaaagtgcctggccatttcactcctgtcttggcaccctctccccatcccagtgcagtgcgacctgtgaccctgagcatgacagatactaaacccatcactacatccactgaagcctacacagcctcaggcacatctcaagccaatcgatatgtgggactaagcccaagagacccatccttcctacatcagcaacagctgaggatttgtgactggaccatgaatcaaaacggcaggcatttataccccagtaccagtgaggatacattgggaattacttggcaaagtcctggtacctgggctagcttggttcctttccaagtgtcaaataggacacccatcttaccggccaatgtccaaaattacggtttgaacataattggagaacctttccttcaagcagaaacaagcaactgagggaaaaagaaacacaacaatagtttaagaaattttttttttaaataaaaaaaaaggaaaagaggaagactggacaaaacaacacaaaggcagaaaggaaagaaactgaagaaagaagataatagaccagcaattgcagcacttacaatcactaattcccttaaggttgaaactgtaatgacataaaaagggtcgatgatatttcactgatggtagatcgcagcccctgcaacgtagcctttgttacatgaagtccgctgggaaatagatgttctgtctctatgacaatatattttaactgactttctagatgccttaatatttgcatgataagctagttttattggtttagtattcttgttgtttacgcatggaatcactattcctggttatctcaccaacgaaggctaggaggcggcgtcagaggtgctgggtgacagagccatgagccagccattttataagcactctgatttctaaaagttaaaaaaaatatatgaaatctctgtagcctttagttatcagtacagatttattaaatttcggcccttaacccagccttttccagtgtgtaacccagtttgaaatcttaaaaaaagaaaaaatgaaaaaaaaaggaaaaaaa

SEQ ID NO: 160368 - DNA, 3129 bp, Homo sapiens
  Payload ID: 11361
  Gene Symbol: NFIB
  Gene Name: nuclear factor I/B
  ENST ID: ENST00000397579
  CDS Start-End: 1072-2535
tcgagcggggtccagagggtggaaccggtgaatttttcaacttccaagttttgcaacgaaagaaagcaagagagggagggaaaaaaaagagcctagagcagaaaagagaggagtttggagccgagcgggagagcgggatttatcgtttggaatttttcaggagatcgttttgatacccctgggctctgggcagcggcggcaacagcagcctccacgctcggccgggtcagacgcggggcgaggcgggcgggcgggcggccgggcgccgaagacccggcgcgggcggcggcggctgctgctgccggggaccacgcgccgcgagcctcttccgccccagagatcagcgctcgcgccccctccctcaccccggcctctcccttctcccccatcccaccccgcccccaccccggccctctcccgcgcgcgccccgccacccgcgcgcactcgctcacgctgcccctcgcgcacacacatggtcggctcgcggcaaagtttcgcctgcgatcaccactccgggatcctgccgcagtgcttggggctgtaaccttgaactttcccagcgcggtgacacattctccccgctctccctcccgcccgcccgctcgccctcctgcgccctcccgcgcccccctccccgccttttttgaaaaagcattttaccaccaaccaccaccccaatccaacccacaccgaaccttcgcgcaccccctacaccccaacaacaacaacaactgcaaaatagaaaacaaatccccaaacccaggcgaaaagcagccaacaccggcggcggcggcggcctcggcaagcacggccagcgcgctcggactgcaagagggttaaaagtgtagattggatttcacccctggaaatctagcacgccgagtgaacttgaatctttggctatttaaggaggactgggtttgttgtgaagttgcggtgatccagcgcagagccccgtcctgattgatcgcatcgcggggctcagatgactgtaaaatgaatagatgaaattcttgcttctcgaagattttcttgggcatctcccggaaagtgcgttttaaggcgaagtcatgatgtattctcccatctgtctcactcaggatgaatttcacccattcatcgaggcacttcttccacatgtccgtgcaattgcctatacttggttcaacctgcaggctcgaaaacgcaagtactttaaaaagcatgagaagcgaatgtcaaaggatgaagaaagagcagtcaaagatgagcttctcagtgaaaagcctgaaatcaaacagaagtgggcatccaggctccttgccaaactgcgcaaagatattcgccaggagtatcgagaggactttgtgctcaccgtgactggcaagaagcacccgtgctgtgtcttatccaatcccgaccagaagggtaagattaggagaatcgactgcctgcgacaggcagacaaagtctggcgtctggatctagtcatggtgatcctgttcaaaggcatccccttggaaagtaccgatggagagcggctcatgaaatccccacattgcacaaacccagcactttgtgtccagccacatcatatcacagtatcagttaaggagcttgatttgtttttggcatactacgtgcaggagcaagattctggacaatcaggaagtccaagccacaatgatcctgccaagaatcctccaggttaccttgaggatagttttgtaaaatctggagtcttcaatgtatcagaacttgtaagagtatccagaacgcccataacccagggaactggagtcaacttcccaattggagaaatcccaagccaaccatactatcatgacatgaactcgggggtcaatcttcagaggtctctgtcttctccaccaagcagcaaaagacccaaaactatatccatagatgaaaatatggaaccaagtcctacaggagacttttacccctctccaagttcaccagctgctggaagtcgaacatggcacgaaagagatcaagatatgtcttctccgactactatgaagaagcctgaaaagccattgttcagctctgcatctccacaggattcttccccaagactgagcactttcccccagcaccaccatcccggaatacctggagttgcacacagtgtcatctcaactcgaactccacctccaccttcaccgttgccatttccaacacaagctatccttcctccagccccatcgagctacttttctcatccaacaatcagatatcctccccacctgaatcctcaggatactctgaagaactatgtaccttcttatgacccatccagtccacaaaccagccagctgaggatttgtgactggaccatgaatcaaaacggcaggcatttataccccagtaccagtgaggatacattgggaattacttggcaaagtcctggtacctgggctagcttggttcctttccaagtgtcaaataggacacccatcttaccggccaatgtccaaaattacggtttgaacataattggagaacctttccttcaagcagaaacaagcaactgagggaaaaagaaacacaacaatagtttaagaaattttttttttaaataaaaaaaaaggaaaagaggaagactggacaaaacaacacaaaggcagaaaggaaagaaactgaagaaagaagataatagaccagcaattgcagcacttacaatcactaattcccttaaggttgaaactgtaatgacataaaaagggtcgatgatatttcactgatggtagatcgcagcccctgcaacgtagcctttgttacatgaagtccgctgggaaatagatgttctgtctctatgacaatatattttaactgactttctagatgccttaatatttgcatgataagctagttttattggtttagtattcttgttgtttacgcatggaatcactattcctggttatctcaccaacgaaggctaggaggcggcgtcagaggtgctgggtgacagagccatgagccagccattttataagcactctgatttctaaaagttaaaaaaaatatatgaaatctctgtagcctttagttatcagtacagatttattaaatttcggcccttaacccagccttttccagtgtgtaacccagtttgaaatcttaaa

SEQ ID NO: 160369 - DNA, 3318 bp, Homo sapiens
  Payload ID: 11361
  Gene Symbol: NFIB
  Gene Name: nuclear factor I/B
  ENST ID: ENST00000397581
  CDS Start-End: 1009-2721
aagcaagagagggagggaaaaaaaagagcctagagcagaaaagagaggagtttggagccgagcgggagagcgggatttatcgtttggaatttttcaggagatcgttttgatacccctgggctctgggcagcggcggcaacagcagcctccacgctcggccgggtcagacgcggggcgaggcgggcgggcgggcggccgggcgccgaagacccggcgcgggcggcggcggctgctgctgccggggaccacgcgccgcgagcctcttccgccccagagatcagcgctcgcgccccctccctcaccccggcctctcccttctcccccatcccaccccgcccccaccccggccctctcccgcgcgcgccccgccacccgcgcgcactcgctcacgctgcccctcgcgcacacacatggtcggctcgcggcaaagtttcgcctgcgatcaccactccgggatcctgccgcagtgcttggggctgtaaccttgaactttcccagcgcggtgacacattctccccgctctccctcccgcccgcccgctcgccctcctgcgccctcccgcgcccccctccccgccttttttgaaaaagcattttaccaccaaccaccaccccaatccaacccacaccgaaccttcgcgcaccccctacaccccaacaacaacaacaactgcaaaatagaaaacaaatccccaaacccaggcgaaaagcagccaacaccggcggcggcggcggcctcggcaagcacggccagcgcgctcggactgcaagagggttaaaagtgtagattggatttcacccctggaaatctagcacgccgagtgaacttgaatctttggctatttaaggaggactgggtttgttgtgaagttgcggtgatccagcgcagagccccgtcctgattgatcgcatcgcggggctcagatgactgtaaaatgaatagatgaaattcttgcttctcgaagattttcttgggcatctcccggaaagtgcgttttaaggcgaagtcatgatgtattctcccatctgtctcactcaggatgaatttcacccattcatcgaggcacttcttccacatgtccgtgcaattgcctatacttggttcaacctgcaggctcgaaaacgcaagtactttaaaaagcatgagaagcgaatgtcaaaggatgaagaaagagcagtcaaagatgagcttctcagtgaaaagcctgaaatcaaacagaagtgggcatccaggctccttgccaaactgcgcaaagatattcgccaggagtatcgagaggactttgtgctcaccgtgactggcaagaagcacccgtgctgtgtcttatccaatcccgaccagaagggtaagattaggagaatcgactgcctgcgacaggcagacaaagtctggcgtctggatctagtcatggtgatcctgttcaaaggcatccccttggaaagtaccgatggagagcggctcatgaaatccccacattgcacaaacccagcactttgtgtccagccacatcatatcacagtatcagttaaggagcttgatttgtttttggcatactacgtgcaggagcaagattctggacaatcaggaagtccaagccacaatgatcctgccaagaatcctccaggttaccttgaggatagttttgtaaaatctggagtcttcaatgtatcagaacttgtaagagtatccagaacgcccataacccagggaactggagtcaacttcccaattggagaaatcccaagccaaccatactatcatgacatgaactcgggggtcaatcttcagaggtctctgtcttctccaccaagcagcaaaagacccaaaactatatccatagatgaaaatatggaaccaagtcctacaggagacttttacccctctccaagttcaccagctgctggaagtcgaacatggcacgaaagagatcaagatatgtcttctccgactactatgaagaagcctgaaaagccattgttcagctctgcatctccacaggattcttccccaagactgagcactttcccccagcaccaccatcccggaatacctggagttgcacacagtgtcatctcaactcgaactccacctccaccttcaccgttgccatttccaacacaagctatccttcctccagccccatcgagctacttttctcatccaacaatcagatatcctccccacctgaatcctcaggatactctgaagaactatgtaccttcttatgacccatccagtccacaaaccagccagcctaacggcagtggtcaagtagtagggaaagtgcctggccatttcactcctgtcttggcaccctctccccatcccagtgcagtgcgacctgtgaccctgagcatgacagatactaaacccatcactacatccactgaaggtgaggcagcttcacctacagcaaccacctacacagcctcaggcacatctcaagccaatcgatatgtgggactaagcccaagagacccatccttcctacatcagcaacagctgaggatttgtgactggaccatgaatcaaaacggcaggcatttataccccagtaccagtgaggatacattgggaattacttggcaaagtcctggtacctgggctagcttggttcctttccaagtgtcaaataggacacccatcttaccggccaatgtccaaaattacggtttgaacataattggagaacctttccttcaagcagaaacaagcaactgagggaaaaagaaacacaacaatagtttaagaaattttttttttaaataaaaaaaaaggaaaagaggaagactggacaaaacaacacaaaggcagaaaggaaagaaactgaagaaagaagataatagaccagcaattgcagcacttacaatcactaattcccttaaggttgaaactgtaatgacataaaaagggtcgatgatatttcactgatggtagatcgcagcccctgcaacgtagcctttgttacatgaagtccgctgggaaatagatgttctgtctctatgacaatatattttaactgactttctagatgccttaatatttgcatgataagctagttttattggtttagtattcttgttgtttacgcatggaatcactattcctggttatctcaccaacgaaggctaggaggcggcgtcagaggtgctgggtgacagagccatgagccagccattttataagcactctgatttctaaaagttaaaaaaaatatatgaaatctctgtagcctttagttatcagtacagatttattaaatttcggcccttaacccagccttttccagtgtgtaacccagtttgaaatcttaaaaaa

SEQ ID NO: 160370 - DNA, 7622 bp, Homo sapiens
  Payload ID: 11361
  Gene Symbol: NFIB
  Gene Name: nuclear factor I/B
  Uniprot ID: O00712
  ENST ID: ENST00000543693
  CDS Start-End: 339-1268
attcacagccatgaacagcacactgaggaggacacaaaagaagtagacagaatctctgcctctgcttaggagtatgcaatttagttggggcgacaaaacttaaatgctagaaccaataaaagaagattacaaagcaactcgcaaattctggacaatcaggaagtccaagccacaatgatcctgccaagaatcctccaggttaccttgaggatagttttgtaaaatctggagtcttcaatgtatcagaacttgtaagagtatccagaacgcccataacccagggaactggagtcaacttcccaattggagaaatcccaagccaaccatactatcatgacatgaactcgggggtcaatcttcagaggtctctgtcttctccaccaagcagcaaaagacccaaaactatatccatagatgaaaatatggaaccaagtcctacaggagacttttacccctctccaagttcaccagctgctggaagtcgaacatggcacgaaagagatcaagatatgtcttctccgactactatgaagaagcctgaaaagccattgttcagctctgcatctccacaggattcttccccaagactgagcactttcccccagcaccaccatcccggaatacctggagttgcacacagtgtcatctcaactcgaactccacctccaccttcaccgttgccatttccaacacaagctatccttcctccagccccatcgagctacttttctcatccaacaatcagatatcctccccacctgaatcctcaggatactctgaagaactatgtaccttcttatgacccatccagtccacaaaccagccagcctaacggcagtggtcaagtagtagggaaagtgcctggccatttcactcctgtcttggcaccctctccccatcccagtgcagtgcgacctgtgaccctgagcatgacagatactaaacccatcactacatccactgaagcctacacagcctcaggcacatctcaagccaatcgatatgtgggactaagcccaagagacccatccttcctacatcagcaacagctgaggatttgtgactggaccatgaatcaaaacggcaggcatttataccccagtaccagtgaggatacattgggaattacttggcaaagtcctggtacctgggctagcttggttcctttccaagtgtcaaataggacacccatcttaccggccaatgtccaaaattacggtttgaacataattggagaacctttccttcaagcagaaacaagcaactgagggaaaaagaaacacaacaatagtttaagaaattttttttttaaataaaaaaaaaggaaaagaggaagactggacaaaacaacacaaaggcagaaaggaaagaaactgaagaaagaagataatagaccagcaattgcagcacttacaatcactaattcccttaaggttgaaactgtaatgacataaaaagggtcgatgatatttcactgatggtagatcgcagcccctgcaacgtagcctttgttacatgaagtccgctgggaaatagatgttctgtctctatgacaatatattttaactgactttctagatgccttaatatttgcatgataagctagttttattggtttagtattcttgttgtttacgcatggaatcactattcctggttatctcaccaacgaaggctaggaggcggcgtcagaggtgctgggtgacagagccatgagccagccattttataagcactctgatttctaaaagttaaaaaaaatatatgaaatctctgtagcctttagttatcagtacagatttattaaatttcggcccttaacccagccttttccagtgtgtaacccagtttgaaatcttaaaaaaagaaaaaatgaaaaaaaaaggaaaaaaagaaaaaaggaaaaaaacagtttgaacacaaaggctctatggaagaaatgcctctatgtaggtgaagtgttctctctgcatgcaacagtaaaaattaatataatattttccccacaaaagaaacacttaacagaggcaagtgcaatttataaatttatatctaaaggggaatcatgattataagtccttcagcccttggactctaaattgaggggattaaaaagaatttaaaataattttgaacgaatttattttcccctcagtttttgagggcattaaaaaggcattaaatcaagacaaatcatgtgcttgagaaaaataaaattaatgaaaacacagcacttatgttggtttagctgcagcctccttggaggtagaatttatttatttaaaattactggttgcatcaagaacccatagggtgtacaaaaggttctataaaatctgcattatagagacaaagaggcaggcaaatccatgtcacaagggtaaagcttacagtttacaaactgggaacgccagggtgtaggatataaaaacgcactcttgagaaaacaaatgtaatcagggtgctgaaaacttgcatggtgctttcagacattagccttgttcaacaaatttcttgtattgacagatccatagtgtgcatgggcagacacattttgcctctatgtctcttaaaattttaattaaaaatactctttccagtaatcctaatttgcacgaagatataatgtccacattacgtgccttgccttgaaatctaaaaaacaaaaaacaaaaaaaaaaaaacaaaaaaatacaacaaagtgacatcactacacttgttttgctgcatttattatcattttaaatctttaccatttttatgacaaaatattttgtactccagacgaagaaaaatgtgtgacatcatggattttttagacagttatacctttatctcacatttataaagcatatcatggctgtgtatagttgccgcttaaaaattgtaatcgaccagcaatattttcagtattttggtgtttttttctattaacctttcatgtttttcatcttccaattaatatttgggggggaggggtttcaaatttatacgaattatgcaataccaagttttgcctatgtaggtagtgcttttagctgtattggttattataggtaagtacacagatttaaaaaaaaaataatgtatgcttttttgtttgtttgtttgttttaattgaccaaagtgggtactgctatttttgcagtgtgatgaggtccttttgtgtactgagagatggacaggggattttttttaatatacatatatatatattctggggtgggtgggaggatttttaacactttgcagtgtagctgtgaagcagtgcaccctgagatgggcctgggctgcaaagcgactgttctgcctactgtgacaaacttcaacttacacaggttcccctctctaacttcccacctgggttgcaagctgaactcattactggttttcataacaacacaatagtaagaacaagcaaacacaacaaattctcctggaggcagacttggcttaaaaaggcagacttggcttggtgatagtttttcttgaaagttccagatccacagtggagagtgagcctgtctcatatttggcaaaaatatttgttgaaatgtccacataggggatgttggatgtttaacacttttgagagtttaacacatgaatattctttctcctagaaaacacattagacctgttggagggagtctcccgtattccttttctgccacttttcgtccccatttcatttcattaatgataggatatgatttacctgtgacttactacttcaaatggatggcagtgcacttggatttttttttaatatccagaagattgaacagagggttgctattgttgaatgtatttggactgatagattaaaatcaaagttcaatttttaaggaacaaaaaagtaaatcctgttttcattttatctccccttttaaaactgagaaccagagcagaagggaaatatagaattttaagcaattaatcttcctgtggatgaattaaacccattagatgctgatgggatttttttaaggaatggtaccttaactatatatttgatttcgtttcccctgagggctagaggctgaatggaggctggttttattttgcctttccctcaccgcccagtcccattgagtgtattcattactagaaggaaaatctttcagaattggtgacacatggtaggctgtcttaaggagtcccctggcccccttcccctaggccatggcctaataaaataaactgtcaattgttctcacagcatatcatttaataatgaatactttagaacaatgcttatgggctggagaattgtatttgattagcccattcagtttgatagcccaaatgctgaacagcacagcgggatcctagcagtgcaagttcaaaagtaagtccaatcatttctgtgatactcgccctggtagcaaacagatcatctcagccaagctcttcatgtatctttgacctattaggtgaacaaatgaacctcacaggacacacagtattttttaaaggcagactcgctctcttttttgccagtgagcagttctagctaaccaagttacacactgtgggtattcctgcctgcctcttgaatacaaaggcctagttcaagtgttgctttttttatttcaaatcaattttttcttctttcctttttgagataaaactattaaaagtactactatatatataaaatctcaaatcaacttttcggcctcctcctcgtgtaccaggaagtatattctgacgaagggccccacttttgcaggtcttgcacgcccctcccttacccagaactgcagagcttcaggatggcgaaggtcacccaagggcatgagtagggagtggtgtctccaaccatcagttccgtggcactgttcagcctttgtgtgctgccctgccacccaccactcacagtgcctctgaagcgtgttacccctggagtgacgtgagcatttgaggcttgtctaaggaaaaaaataaaaggcagtgaaggagactgtacataaagacatggcaaaaatcttaattatagcaatatagttatcgggtaatgttcgggtgggcagctccattaaaaaatatgtgaatgaatctgtgaagctgcaagtagcgagaagagcgaaaggtcttcttaatgaaccgcctaccttgtagacagtaatttgtacactgtatagttttgttaagaattttttttaaattaaaattcccatgtttgtaaagctaactttttaacaattataatggaactatatgttgtttccatttttaaagtaaacaagaatattccttgtttagagactggacttgagttaaaactctccagtctcttaagttatgtattaaaaagaaaatctgtccatgttaggagttatttcacagattcctgtgcttgaaaagcataggatactaatcctttaaaaaagtgtaaatggagaaaagttatattttatgaaggttattttgttgtatttagtattggaaaagttggtttccagagcatttcagaatgtcgaagcaccactgtctttttattagtatatacggcctttagcaaaagtttttgtgattgttacgtgatggtatttaaggttaagtttcacagagcattcaggataggcagaaaactaaaacagtgctatgtctcacataacgtgtcctcagggagcagaatcttggatttgtgacttgtagcttcataaggactcaacgaaagagattgcacagggacatcttcagcggtgtgacagcaggacatgttctttacctagattcaaattctatgtactgtgtgaaatgatgaaggctgcagaaagttatcccatattcagtgtacagtattcatttttaatgaaacaactctacaatattgctggcagataggccccaagcatgacattcaatatagtttacatgttcctgtcaaggtcttttgttaacattaaccagctgcatgctttctggactttaagaaattgggtttctatagaaaactttttttttttttttttttttaatgtgcaggctattcaagttcaatagtaaaagctcaaaaatgaatgttctactccatgctgaaggagctgaaagctgccttcttcatattttgcactttctggtagttcccctgttttttctaattccctaaaattgtgtgggtggagtggagccctgcagttggggggtaacatggaccactgattttgccctttgaccctgcacaatgacctttgcatcagccaaactcattgccatgacaactctttgtactgtgtccgtgccacagatctgttggtcacattgttaatagtaaaggggacaagttggagacggtcaatttttacattttttgttgcaattttttcttcaatggttgtaagtagtttttttttttttttaataataaaagggttcactagttaatactctagaaatatctgtgtgttgcaattcaaatgtatgttgagattgtgaaaagcgcttcagtgccactagcttaccggtacactagactaagcccttgatgacttattgcatgatacagtaccaggaacaacaggtggcctaaatacatgaaaagcagtgtaagctagtgacactaaagccagtcttgtattactgtatttttgacagaatggttttgaaaactgtgctacagggactgatgtggcaaatatatctctttatgcagaaggaagtctttttttttcttttttttttttttaagaagtatggctttttatgcatccttcatcgagggcattgaagttgcatggactgataaaagttgatgcaaaacaagaaagaaacaaacaaaaaaaaaaaaccagcaaaatgtttaccaaaaaactcaaacaaatgagcagtgcctgttcaatttcacagtctctgttgagttcagttgtaaatatgtttcaaatgacattttcttgggaaaaaaaatctctacaacattgtagaatgtgaggggtaactacatcccaggcataggtttctcaaagctgcagtagattatgtcttcatcaagctgttaatttgtgcttatatcatatagaacttttagcatcctgggaagagctgcccccacctcaatgatatttctctgagaacaacttttgtaggactgtgtgtttctttagatacatttagtacaactgtaggtgacgagtagtcagttattgcttgctagctacacaccagggttgatccattttaaaacttttggcattttgtcctcatgggccataaatacagaaccttgtattttaattaaatttttttacaaaaggaggcacatgcacaatctccatgtaacaaacctttagcagtaggatgtattatacgacagttacttaatttctagagttcaggcctctgggatcaaccccagactgggccagaatgttagtgaaggttttattgtgcccggttggaggataacgttctttgggtactttttgtgggttgcaaatgaactcaattgccacaagttttaaactggtgtaaatcaagcttgacttaatgtgattgttactgttatatccagcctatactgctagcagctgctcatactgcagtcaattactggaagcggatatatttcctatgcaaaaactgtttaaacaataaaatgagctatgctacagactctg

SEQ ID NO: 160371 - DNA, 591 bp, Homo sapiens
  Payload ID: 11361
  Gene Symbol: NFIB
  Gene Name: nuclear factor I/B
  ENST ID: ENST00000493697
  CDS Start-End: 92-591
agagaagagaaatgaactgtggcatcgctcctgccttctgaacagctctactccgattaaaaaaaaaaaatctcactgtgttctttgtaaaatggtactgcatagtgatgaatttcacccattcatcgaggcacttcttccacatgtccgtgcaattgcctatacttggttcaacctgcaggctcgaaaacgcaagtactttaaaaagcatgagaagcgaatgtcaaaggatgaagaaagagcagtcaaagatgagcttctcagtgaaaagcctgaaatcaaacagaagtgggcatccaggctccttgccaaactgcgcaaagatattcgccaggagtatcgagaggactttgtgctcaccgtgactggcaagaagcacccgtgctgtgtcttatccaatcccgaccagaagggtaagattaggagaatcgactgcctgcgacaggcagacaaagtctggcgtctggatctagtcatggtgatcctgttcaaaggcatccccttggaaagtaccgatggagagcggctcatgaaatccccacattgcacaaacccagcactttgtgtccagccacatcatatcacagtatc

SEQ ID NO: 160372 - DNA, 557 bp, Homo sapiens
  Payload ID: 11361
  Gene Symbol: NFIB
  Gene Name: nuclear factor I/B
  ENST ID: ENST00000606230
  CDS Start-End: 381-557
acatacatgcacacacgcacacgcgggcgcacacacacacaccatcctggacggcgttcaagtcaagcacgagaaacagccttctgcaagggagaggaaagaaagctggaaatccagacagactgaagggctgcctgcttttagacttgactttgaccgccttttcttctcgggccaagaactgtggcagtgcagaaattacaattaaaaaatacataagactactcccggattgcttttttttttttttttttttttttttaactaaacacaaaaagcgacaccaaaacaacccctgagaaaatccacaaatctgtacctgagacacgtcaagtcagcggcccagggttctgttacagactcaagatctcttttatttaatgcaatacagtgcgatggatgaatttcacccattcatcgaggcacttcttccacatgtccgtgcaattgcctatacttggttcaacctgcaggctcgaaaacgcaagtactttaaaaagcatgagaagcgaatgtcaaaggatgaagaaagagcagtcaaagatgagcttctcagt

SEQ ID NO: 160373 - DNA, 1274 bp, Homo sapiens
  Payload ID: 11361
  Gene Symbol: NFIB
  Gene Name: nuclear factor I/B
  ENST ID: ENST00000622520
  CDS Start-End: 453-1019
tcccgcgcccccctccccgccttttttgaaaaagcattttaccaccaaccaccaccccaatccaacccacaccgaaccttcgcgcaccccctacaccccaacaacaacaacaactgcaaaatagaaaacaaatccccaaacccaggcgaaaagcagccaacaccggcggcggcggcggcctcggcaagcacggccagcgcgctcggactgcaagagggttaaaagtgtagattggatttcacccctggaaatctagcacgccgagtgaacttgaatctttggctatttaaggaggactgggtttgttgtgaagttgcggtgatccagcgcagagccccgtcctgattgatcgcatcgcggggctcagatgactgtaaaatgaatagatgaaattcttgcttctcgaagattttcttgggcatctcccggaaagtgcgttttaaggcgaagtcatgatgtattctcccatctgtctcactcaggatgaatttcacccattcatcgaggcacttcttccacatgtccgtgcaattgcctatacttggttcaacctgcaggctcgaaaacgcaagtactttaaaaagcatgagaagcgaatgtcaaaggatgaagaaagagcagtcaaagatgagcttctcagtgaaaagcctgaaatcaaacagaagtgggcatccaggctccttgccaaactgcgcaaagatattcgccaggagtatcgagaggactttgtgctcaccgtgactggcaagaagcacccgtgctgtgtcttatccaatcccgaccagaagggtaagattaggagaatcgactgcctgcgacaggcagacaaagtctggcgtctggatctagtcatggtgatcctgttcaaaggcatccccttggaaagtaccgatggagagcggctcatgaaatccccacattgcacaaacccagcactttgtgtccagccacatcatatcacagtatcagttaaggagcttgatttgtttttggcatactacgtgcaggagcaaaggtaagaatttcttttcttcaaataaatgcatcaagatatagatgtccttgcattaccaacaatccatagtaaaacaatcattttacaaagccgcataccaaaagtagactgaagtttgagctgtcacagatggtaggtcatttccaaacttggcctggtgggaggaaaaatggcctgcagatagccaggtgacagactgttacctgaggtttgttatataaatgtgggacttaataaactgctatgagctttattattc

SEQ ID NO: 160374 - DNA, 1573 bp, Homo sapiens
  Payload ID: 11362
  Gene Symbol: NFIC
  Gene Name: nuclear factor I/C (CCAAT-binding transcription factor)
  Uniprot ID: P08651
  ENST ID: ENST00000341919
  CDS Start-End: 89-1375
gggggggcgggggggtggtttggaaaaatgactcagtaagttcagcgcgcccgctccggccggccctgcgcctcccgccgcgcccgggatgtattcgtccccgctctgcctcacccaggatgagttccacccgttcatcgaggccctgctgcctcacgtccgcgccttcgcctacacctggttcaacctgcaggcgcggaagcgcaagtacttcaagaagcacgagaagcggatgtcgaaggacgaggagcgtgcggtcaaggacgagctgctgggcgagaagcccgaggtcaagcagaagtgggcgtcgcggctgctggccaagctgcgcaaggacatccggcccgagtgccgcgaggacttcgtgctgagcatcaccggcaagaaggcgccgggctgcgtgctctccaaccccgaccagaagggcaagatgcggcgcatcgactgtctccggcaggcggacaaggtgtggcggctggacctggtcatggtcatcctgttcaagggcatcccgctggagagcaccgacggcgagcgcctggtcaaggctgcgcagtgcggtcacccggtcctgtgcgtgcagccgcaccacattggcgtggccgtcaaggagctggacctctacctggcctacttcgtgcgtgagcgagatgcagagcaaagcggcagtccccggacagggatgggctctgaccaggaggacagcaagcccatcacgctggacacgaccgacttccaggagagctttgtcacctccggcgtgttcagcgtcactgagctcatccaagtgtcccggacacccgtggtgactggaacaggacccaacttctccctgggggagctgcaggggcacctggcatacgacctgaacccagccagcactggcctcagaagaacgctgcccagcacctcctccagtgggagcaagcggcacaaatcgggctcgatggaggaagacgtggacacgagccctggcggcgattactacacttcgcccagctcgcccacgagtagcagccgcaactggacggaggacatggaaggaggcatctcgtccccggtgaagaagacagagatggacaagtcaccattcaacagcccgtccccccaggactctccccgcctctccagcttcacccagcaccaccggcccgtcatcgccgtgcacagcgggatcgcccggagcccacacccgtcctccgctctgcatttccctacgacgtccatcctaccccagacggcctccacctacttcccccacacggccatccgctacccacctcatctcaacccccaggacccgctcaaagatcttgtctcgctggcctgcgacccagccagccagcaacctggaccgtcctggtatctgggatagcaaaggtcttcttccctcgccccttctccatcgtcccaggaatcccagggggcagcacagccggcccccggcccacgttttcggtggaaaattagagtgaacaagaacacccctgccgactcccagcccggccaaaaagacaaaacacatagacgcacacactcaggaggaaaagaaaaaacaaaggcagaagaagaa

SEQ ID NO: 160375 - DNA, 1755 bp, Homo sapiens
  Payload ID: 11362
  Gene Symbol: NFIC
  Gene Name: nuclear factor I/C (CCAAT-binding transcription factor)
  Uniprot ID: P08651
  ENST ID: ENST00000395111
  CDS Start-End: 37-1329
gctccggcgccggcctcgcctcctcgcagcagcgccatggatgagttccacccgttcatcgaggccctgctgcctcacgtccgcgccttcgcctacacctggttcaacctgcaggcgcggaagcgcaagtacttcaagaagcacgagaagcggatgtcgaaggacgaggagcgtgcggtcaaggacgagctgctgggcgagaagcccgaggtcaagcagaagtgggcgtcgcggctgctggccaagctgcgcaaggacatccggcccgagtgccgcgaggacttcgtgctgagcatcaccggcaagaaggcgccgggctgcgtgctctccaaccccgaccagaagggcaagatgcggcgcatcgactgtctccggcaggcggacaaggtgtggcggctggacctggtcatggtcatcctgttcaagggcatcccgctggagagcaccgacggcgagcgcctggtcaaggctgcgcagtgcggtcacccggtcctgtgcgtgcagccgcaccacattggcgtggccgtcaaggagctggacctctacctggcctacttcgtgcgtgagcgagatgcagagcaaagcggcagtccccggacagggatgggctctgaccaggaggacagcaagcccatcacgctggacacgaccgacttccaggagagctttgtcacctccggcgtgttcagcgtcactgagctcatccaagtgtcccggacacccgtggtgactggaacaggacccaacttctccctgggggagctgcaggggcacctggcatacgacctgaacccagccagcactggcctcagaagaacgctgcccagcacctcctccagtgggagcaagcggcacaaatcgggctcgatggaggaagacgtggacacgagccctggcggcgattactacacttcgcccagctcgcccacgagtagcagccgcaactggacggaggacatggaaggaggcatctcgtccccggtgaagaagacagagatggacaagtcaccattcaacagcccgtccccccaggactctccccgcctctccagcttcacccagcaccaccggcccgtcatcgccgtgcacagcgggatcgcccggagcccacacccgtcctccgctctgcatttccctacgacgtccatcctaccccagacggcctccacctacttcccccacacggccatccgctacccacctcatctcaacccccaggacccgctcaaagatcttgtctcgctggcctgcgacccagccagccagcaacctggaccgcctactctccgcccgacacgtcccctgcaaaccgttcctttgtgggattaggaccaagggatcctgcgggcatttatcaggcacagtcctggtatctgggatagcaaaggtcttcttccctcgccccttctccatcgtcccaggaatcccagggggcagcacagccggcccccggcccacgttttcggtggaaaattagagtgaacaagaacacccctgccgactcccagcccggccaaaaagacaaaacacatagacgcacacactcaggaggaaaagaaaaaacaaaggcagaagaagaagaagaagaaataaaaacccacccaagcaagaagacaaaaggtaaagacgcaacgtttccaactctcgggacgccaaggccgcaggactggagggccaggccccgccacccccacgggagacccgggacagggcgtcttcctaagttattcatctcctctccgcctgctgctcggg

SEQ ID NO: 160376 - DNA, 1716 bp, Homo sapiens
  Payload ID: 11362
  Gene Symbol: NFIC
  Gene Name: nuclear factor I/C (CCAAT-binding transcription factor)
  Uniprot ID: P08651
  ENST ID: ENST00000443272
  CDS Start-End: 52-1578
aagttcagcgcgcccgctccggccggccctgcgcctcccgccgcgcccgggatgtattcgtccccgctctgcctcacccaggatgagttccacccgttcatcgaggccctgctgcctcacgtccgcgccttcgcctacacctggttcaacctgcaggcgcggaagcgcaagtacttcaagaagcacgagaagcggatgtcgaaggacgaggagcgtgcggtcaaggacgagctgctgggcgagaagcccgaggtcaagcagaagtgggcgtcgcggctgctggccaagctgcgcaaggacatccggcccgagtgccgcgaggacttcgtgctgagcatcaccggcaagaaggcgccgggctgcgtgctctccaaccccgaccagaagggcaagatgcggcgcatcgactgtctccggcaggcggacaaggtgtggcggctggacctggtcatggtcatcctgttcaagggcatcccgctggagagcaccgacggcgagcgcctggtcaaggctgcgcagtgcggtcacccggtcctgtgcgtgcagccgcaccacattggcgtggccgtcaaggagctggacctctacctggcctacttcgtgcgtgagcgagatgcagagcaaagcggcagtccccggacagggatgggctctgaccaggaggacagcaagcccatcacgctggacacgaccgacttccaggagagctttgtcacctccggcgtgttcagcgtcactgagctcatccaagtgtcccggacacccgtggtgactggaacaggacccaacttctccctgggggagctgcaggggcacctggcatacgacctgaacccagccagcactggcctcagaagaacgctgcccagcacctcctccagtgggagcaagcggcacaaatcgggctcgatggaggaagacgtggacacgagccctggcggcgattactacacttcgcccagctcgcccacgagtagcagccgcaactggacggaggacatggaaggaggcatctcgtccccggtgaagaagacagagatggacaagtcaccattcaacagcccgtccccccaggactctccccgcctctccagcttcacccagcaccaccggcccgtcatcgccgtgcacagcgggatcgcccggagcccacacccgtcctccgctctgcatttccctacgacgtccatcctaccccagacggcctccacctacttcccccacacggccatccgctacccacctcatctcaacccccaggacccgctcaaagatcttgtctcgctggcctgcgacccagccagccagcaacctggaccgttaaatggaagtggtcagctcaaaatgcccagccactgcctttctgctcagatgctggcacctccgcccccggggctgccacggctggcgctcccccctgccaccaaacccgccaccacctccgagggaggagccacgtcgccgacctcgccttcctactctccgcccgacacgtcccctgcaaaccgttcctttgtgggattaggaccaagggatcctgcgggcatttatcaggcacagtcctggtatctgggatagcaaaggtcttcttccctcgccccttctccatcgtcccaggaatcccagggggcagcacagccggcccccggcccacgttttcggtggaaaattagagtgaacaagaacacccctgccgactcccagcccggccaaaaa

SEQ ID NO: 160377 - DNA, 1221 bp, Homo sapiens
  Payload ID: 11362
  Gene Symbol: NFIC
  Gene Name: nuclear factor I/C (CCAAT-binding transcription factor)
  Uniprot ID: P08651
  ENST ID: ENST00000586919
  CDS Start-End: 1-1221
atggatgagttccacccgttcatcgaggccctgctgcctcacgtccgcgccttcgcctacacctggttcaacctgcaggcgcggaagcgcaagtacttcaagaagcacgagaagcggatgtcgaaggacgaggagcgtgcggtcaaggacgagctgctgggcgagaagcccgaggtcaagcagaagtgggcgtcgcggctgctggccaagctgcgcaaggacatccggcccgagtgccgcgaggacttcgtgctgagcatcaccggcaagaaggcgccgggctgcgtgctctccaaccccgaccagaagggcaagatgcggcgcatcgactgtctccggcaggcggacaaggtgtggcggctggacctggtcatggtcatcctgttcaagggcatcccgctggagagcaccgacggcgagcgcctggtcaaggctgcgcagtgcggtcacccggtcctgtgcgtgcagccgcaccacattggcgtggccgtcaaggagctggacctctacctggcctacttcgtgcgtgagcgagacacgaccgacttccaggagagctttgtcacctccggcgtgttcagcgtcactgagctcatccaagtgtcccggacacccgtggtgactggaacaggacccaacttctccctgggggagctgcaggggcacctggcatacgacctgaacccagccagcactggcctcagaagaacgctgcccagcacctcctccagtgggagcaagcggcacaaatcgggctcgatggaggaagacgtggacacgagccctggcggcgattactacacttcgcccagctcgcccacgagtagcagccgcaactggacggaggacatggaaggaggcatctcgtccccggtgaagaagacagagatggacaagtcaccattcaacagcccgtccccccaggactctccccgcctctccagcttcacccagcaccaccggcccgtcatcgccgtgcacagcgggatcgcccggagcccacacccgtcctccgctctgcatttccctacgacgtccatcctaccccagacggcctccacctacttcccccacacggccatccgctacccacctcatctcaacccccaggacccgctcaaagatcttgtctcgctggcctgcgacccagccagccagcaacctggaccgcctactctccgcccgacacgtcccctgcaaaccgttcctttgtgggattag

SEQ ID NO: 160378 - DNA, 8068 bp, Homo sapiens
  Payload ID: 11362
  Gene Symbol: NFIC
  Gene Name: nuclear factor I/C (CCAAT-binding transcription factor)
  Uniprot ID: P08651
  ENST ID: ENST00000589123
  CDS Start-End: 121-1620
gctcgctccctcccccgcgcgccctccctcgccgcctcctcccgccgcctgcggcccccccctcgccggggaccgagcgcgctcgctccggcgccggcctcgcctcctcgcagcagcgccatggatgagttccacccgttcatcgaggccctgctgcctcacgtccgcgccttcgcctacacctggttcaacctgcaggcgcggaagcgcaagtacttcaagaagcacgagaagcggatgtcgaaggacgaggagcgtgcggtcaaggacgagctgctgggcgagaagcccgaggtcaagcagaagtgggcgtcgcggctgctggccaagctgcgcaaggacatccggcccgagtgccgcgaggacttcgtgctgagcatcaccggcaagaaggcgccgggctgcgtgctctccaaccccgaccagaagggcaagatgcggcgcatcgactgtctccggcaggcggacaaggtgtggcggctggacctggtcatggtcatcctgttcaagggcatcccgctggagagcaccgacggcgagcgcctggtcaaggctgcgcagtgcggtcacccggtcctgtgcgtgcagccgcaccacattggcgtggccgtcaaggagctggacctctacctggcctacttcgtgcgtgagcgagatgcagagcaaagcggcagtccccggacagggatgggctctgaccaggaggacagcaagcccatcacgctggacacgaccgacttccaggagagctttgtcacctccggcgtgttcagcgtcactgagctcatccaagtgtcccggacacccgtggtgactggaacaggacccaacttctccctgggggagctgcaggggcacctggcatacgacctgaacccagccagcactggcctcagaagaacgctgcccagcacctcctccagtgggagcaagcggcacaaatcgggctcgatggaggaagacgtggacacgagccctggcggcgattactacacttcgcccagctcgcccacgagtagcagccgcaactggacggaggacatggaaggaggcatctcgtccccggtgaagaagacagagatggacaagtcaccattcaacagcccgtccccccaggactctccccgcctctccagcttcacccagcaccaccggcccgtcatcgccgtgcacagcgggatcgcccggagcccacacccgtcctccgctctgcatttccctacgacgtccatcctaccccagacggcctccacctacttcccccacacggccatccgctacccacctcatctcaacccccaggacccgctcaaagatcttgtctcgctggcctgcgacccagccagccagcaacctggaccgttaaatggaagtggtcagctcaaaatgcccagccactgcctttctgctcagatgctggcacctccgcccccggggctgccacggctggcgctcccccctgccaccaaacccgccaccacctccgagggaggagccacgtcgccgacctcgccttcctactctccgcccgacacgtcccctgcaaaccgttcctttgtgggattaggaccaagggatcctgcgggcatttatcaggcacagtcctggtatctgggatagcaaaggtcttcttccctcgccccttctccatcgtcccaggaatcccagggggcagcacagccggcccccggcccacgttttcggtggaaaattagagtgaacaagaacacccctgccgactcccagcccggccaaaaagacaaaacacatagacgcacacactcaggaggaaaagaaaaaacaaaggcagaagaagaagaagaagaaataaaaacccacccaagcaagaagacaaaaggtaaagacgcaacgtttccaactctcgggacgccaaggccgcaggactggagggccaggccccgccacccccacgggagacccgggacagggcgtcttcctaagttattcatctcctctccgcctgctgctcgggaaggacagacgccggccgcccgcccgcgccccggaggccctggctctgtccggagaccaggtgagcacagcctggagcctgtgcccagggccgacaggcgcgacacccagcaaggccacctctccccgggcccccgcgcctctgccggacacggaccggcccctcagcccccaccgaggacgcagccactggggggaaagggagacacagcggaccccggccgggcagcggagaccgcagaggcgggcagggtggggcaggcgagtggtgtcgcgggggtgcgtggcgcttgcgagccctggccaggggaggaagtgaggcccaggcacctgctgcccctcgagggggccctgcctgccgcggggcctccccacaagcccctcccaaagcgccggccgactcgctgtctcgctggggactctttcagccctcgcgcccgcccgtttgggaggagaagtctctatgcaattggccccggcccctccaccccccacccccggcataggaggcccccccacctcgcccggctcacacccccaaagggagggacccacattgcacacactgtaagaaatgcactttccgaggaaggggatgggggagcccggacacccagagctccccgagttgggggtgcccgtctggagcgcccccgtcagcccctggcggtgggaggtgagagcgagtggtttaagtgcctgattaccaccacccgcccccccctttgtccagctgggacacggaatggccgcgggcctcctccccctcccctccagcctctccaccagcccctccagtcaaccctcatcgccgtgcccccccagagctagagagatggggcccctgcgtggcccgaggggcagagctgggcgtcacttcgcaagcgtcctgccctgccggggcgcgggggtgggctctggggaagccggtgcgccccccacgcctccgctgccagtgccttacattctggagcgacccccctccctggtgcctcccagcgaagggggaccgccgtttgcactttcatcgcctaccccgacgcggggcccagctgcgggacgtgcatcacggctgggcccccagaggagagaggaggccgacgccagcggtccccgctcggaacggggagggttttcggggggttcggcgtcgcaccttggggccccccgcagccgtgtagggggcctcccatctgctaagcgtttttccgttgagccgctccaaaaacactaagctggggacgccaggtgcccccccaccccggctccctggccctatccacacctccacccccaccccaggatcgccatctttaggggaggcctgggagggggtgttaggtgttttagggccaccgagctcaaacacaaggacccctccccggcccacccagcccagccccaactgacctccatgcctagggaaaaactccccccaccactgccccctcccccgacccaggccaaagccagggcaggtctccgggtctcacctgctcctagcctcacccccctgcccccgaaaaccagactctcctcccaaactagcctcaggagcttggcgaacccgctcgctcctaaagagaaagacccaggaccctcccccatcacccccaagagaggttcgccatcctctggcctcgagcccttggtccctccgtccgtctgtcctcggggcccgctcccccggtggcccttggggatcaaagcgtgggccgctctccgggagggcgggcgggggagggggtggtcgggttgtgccattggggtgtccggaagcttctcagccagggtgggggtcgtggagtgggggagggaggccagccgggctccagaggggtcagggcgcgacgagaaccaactctttacctaactttgcatggtgcttagtcaaggactcctgcgacctggctcccgaggtcagctggcggcgctgacacacatgcatggcagactatccctggctctatctccctgttcctcgccccctccaccccccacttcctctttaaaaaaaaaaaaaaaaaaaaaaagatacaagaaaaacctttaaaaaaattccatgtttcctaatttgcacgaaattttctaccacaagatgtgccttgccttccgagaataagtattacctttaaacaatatcagcgcacacacatagctgcatgttctgctcgtgtagtttaaaaaaaaaaagacaaaacagtgacatgaaataaaaaataaaaattgaaaagggatgtatttctatttgtaaaaaaaataaaataaaaaataagaaagtgagaatctaaaaaaaaaaaaaaaaaaaaaaaaggaagaaaaaccacgctaaaaatcaagccactgaaaacaattgcccccaggtctacccagcccctggctgtccttggtcctgtctcccctcctgctgtattcaggggtgccccctggtgctcagcctctaccacccccaaccctgctcttgggtacccagaggggtcatttctgaatcccttgcccagaggacagacctccggggcccatcttggccctgggaaagggctctcctctctgattggtccctaggccacgggccggcccccagacaccattcaccgacccactgcaggctgtcctccaaccatggggtggccactccacccgcagccagactccccgctccccacttttcatgcaggctggcatacccctggctcagggtcaaatgctgttccacacccacctcagaggcaccccctctcccctgccccgtgcatccccacccttcttgccaaaggacctcttttcccctatccagagaccaccccaggtggcattctctcccaccttctcctttgtcccccatcccctgtctctgtcttccagctgtgaatatgaagggtatcctgtatgaaacaaaaacaaaacctgatatatgcaatatctgtctgtctgtctgtacccatgggcctggctcagccattggaggcccagccgagggtccggcagggcacagggacagccaggtggcaccgagtcacaggctgtggtccggtggctgagcatgctgttgtcttgtccttgattttattttcttttgttctttttttttttcttttctttttgtttttaactccagcttcctttgctttttacttgaccaaagctaagacaatagccagatggttagtggggcagccaggcagggaggacccagggctgggattctccaaccttaggccattcctgcagccctcaccacctccagcccctccaagcatctcgtgtagggacccacgcagatggtcccattcattcactattgcccccaaccccgggattttgggtggtctccacagccaccatcatacactcatcccgtgttttcttccaaaaagtcacctcagcagcctccccaggcgatacagagggagagcccagaccaccacagctggccacgacattgcccttaagtaatatgcattggccagagagcccgggctggctgtgcacagcattcatgtagctgatttctagctttttttttttttctgccccactcctgagcaaatctgtcttgccaaggaactaggagcaaccggaggcaaagggagtgggtggccccatcactattgggaccatcgcgtccctgcacagcccacacccgggggcccagagtcctgggctggacgccacccttctcaccccgagcttgcctccttggctcacttggcaccttggctgagtacagcaggcaaaagcccataccaggcagcatgttgtggatggtttagttctccccgcctccctgtttcttggaaaagctacagggtccctgtagggcaaaattcccaggcgccttgctgcagacagagtaagacaaaaacaccaggaagcaggattccgtgcccatctctgcagtttgggttcacaaaagggggtgccgtcatccctgggtggaggagggagtgttggttttttgtttttgtttttttaacatgtatgaaactgacatcttctcaaatcttgttccacccccctctggaagcccccatcacccacccctgctatggacaccacacctatgccaggcccccccccccaccccagtctcattctggggtctgcccatgctgtgggaaagaatagggaggcctcccaaatatatgcaaattgtccccattccgtgggggcacctgacaatgacccgggtggagatggggcatggaggagtaggaagacccagccctatttgactggggagaggaggatctggagtccttcatgcccaggtctggaacccaggttctgaccccagggccccaccctgggctggacaatcagatcccaaaggaatgccaaaggggactcggttgggagagccgcttaggggccagacctgggtccccctgcaggtccccaggcagcagacaattccaccttccctgccccaggaccttgagagacagcagcattccaggcacagacagacttggctgcaccccactgtcccttgcaagacaggttctggagccaggagcaactgtccagccctccagaagagacagcaagcagcccccctacccactctggcctccccaatggtactttgacctccagtgtagggctatactatacatatatatatatatatatatatatatatataattttggaatttgtttctcataatacagaatatatagtggctaccttgtatcttggtctggattctctctctgagaccccggattttactttctctttggagggcgctgggacatacatctctcaatccagcttcctccgcatcctcccatcttgccccatttctgccacgtcagacacttcctgagagtctcaccttcaaaatgacaccgctgcccatccattgctcaatggtacagagtgtggggtcagtccaccacccttgacctcccggcagggcaaggtgaggaggcggacccaaagcagtaccagcaggacttgttgccagtgataccaaaacagacttttcccaagcagtgcctcacatgtctgctggtgtggctttgggattctcctgccccacccccccgtccatggcagccccctccccaaggctttgctcacacctgagacaggaaggaggaaggggatccaataggaatatgggccccggaggggaagtcatgcacccccaagccaccaccccccagccttccacgcacatctcctggctggaagagagccctccaaaaaggggacacaggctgccccggcccctcaactgcatccacaccccatcctctcatcttgggtcccagccaggcccccccaaaaccaaagccccctcaagtcctggggtcccagcctgtgcccccagcttcctgcccacccagccctgagcattctcacacagagaaagaacaagcaagggctccagggggacaggatggggcagggcatacagtggggggtgggggggcagctgggaggagggagggacaaaacaaaacattttcctttgggttttttttttctttcttttttctcccctttactctttgggtggtgttgcttttcctttccttttccctttgagatttttttgttgttgtttcctttttgtattttactgatatcaccaggatagtttactctccttctagctttctgcttaccgcacactggataacacacacatacacacccacaaaaatgctcatgaacccaatccggagaaggttccagcaggtcccccaccctcccctcctcctcctacttctcctcttgacagcgaggacaggagggggacaaggggacacctgggcagacccgccggctctccccccaccccaccccgcccctcacatcatactccaatcataaccttgtatattacgcagtcattttggttttcgcggacgcgcctacctaagtaccatttacagaaagtgactctggctgtcattattttgtttatttgttccctatgcaaaaaaaaaatgaaaatgaaaaaagggggattccataaaagattcaataaaagacaaacaaaaaaaaaagaaaaaagaaaaaaatgtataaaaattaaacaagctatgcttcgactctt

SEQ ID NO: 160379 - DNA, 1558 bp, Homo sapiens
  Payload ID: 11362
  Gene Symbol: NFIC
  Gene Name: nuclear factor I/C (CCAAT-binding transcription factor)
  Uniprot ID: P08651
  ENST ID: ENST00000590282
  CDS Start-End: 55-1374
agtaagttcagcgcgcccgctccggccggccctgcgcctcccgccgcgcccgggatgtattcgtccccgctctgcctcacccaggatgagttccacccgttcatcgaggccctgctgcctcacgtccgcgccttcgcctacacctggttcaacctgcaggcgcggaagcgcaagtacttcaagaagcacgagaagcggatgtcgaaggacgaggagcgtgcggtcaaggacgagctgctgggcgagaagcccgaggtcaagcagaagtgggcgtcgcggctgctggccaagctgcgcaaggacatccggcccgagtgccgcgaggacttcgtgctgagcatcaccggcaagaaggcgccgggctgcgtgctctccaaccccgaccagaagggcaagatgcggcgcatcgactgtctccggcaggcggacaaggtgtggcggctggacctggtcatggtcatcctgttcaagggcatcccgctggagagcaccgacggcgagcgcctggtcaaggctgcgcagtgcggtcacccggtcctgtgcgtgcagccgcaccacattggcgtggccgtcaaggagctggacctctacctggcctacttcgtgcgtgagcgagatgcagagcaaagcggcagtccccggacagggatgggctctgaccaggaggacagcaagcccatcacgctggacacgaccgacttccaggagagctttgtcacctccggcgtgttcagcgtcactgagctcatccaagtgtcccggacacccgtggtgactggaacaggacccaacttctccctgggggagctgcaggggcacctggcatacgacctgaacccagccagcactggcctcagaagaacgctgcccagcacctcctccagtgggagcaagcggcacaaatcgggctcgatggaggaagacgtggacacgagccctggcggcgattactacacttcgcccagctcgcccacgagtagcagccgcaactggacggaggacatggaaggaggcatctcgtccccggtgaagaagacagagatggacaagtcaccattcaacagcccgtccccccaggactctccccgcctctccagcttcacccagcaccaccggcccgtcatcgccgtgcacagcgggatcgcccggagcccacacccgtcctccgctctgcatttccctacgacgtccatcctaccccagacggcctccacctacttcccccacacggccatccgctacccacctcatctcaacccccaggacccgctcaaagatcttgtctcgctggcctgcgacccagccagccagcaacctggaccgcctactctccgcccgacacgtcccctgcaaaccgttcctttgtgggattaggaccaagggatcctgcgggcatttatcaggcacagtcctggtatctgggatagcaaaggtcttcttccctcgccccttctccatcgtcccaggaatcccagggggcagcacagccggcccccggcccacgttttcggtggaaaattagagtgaacaagaacacccctgccgactcccagcccgg

SEQ ID NO: 160380 - DNA, 1727 bp, Homo sapiens
  Payload ID: 11363
  Gene Symbol: NFIX
  Gene Name: nuclear factor I/X (CCAAT-binding transcription factor)
  ENST ID: ENST00000358552
  CDS Start-End: 66-1277
cagacggacactgtgccggggcgagctgacaggagttcacggctgcgatagaacatggagatgtcatgggcgcgacagagcctggcggggataccagcagcgatgagttccacccgttcatcgaggcactgctgcctcacgtccgcgctttctcctacacctggttcaacctgcaggcgcggaagcgcaagtacttcaagaagcatgaaaagcggatgtcgaaggacgaggagcgggcggtgaaggacgagctgctgggcgagaagcccgagatcaagcagaagtgggcatcccggctgctggccaagctgcgcaaggacatccggcccgagttccgcgaggacttcgtgctgaccatcacgggcaagaagcccccctgctgcgtgctctccaaccccgaccagaagggcaagatccggcggattgactgcctgcgccaggctgacaaggtgtggcggctggacctggtcatggtgattttgtttaaggggatccccctggaaagtactgatggggagcggctctacaagtcgcctcagtgctcgaaccccggcctgtgcgtccagccacatcacattggagtcacaatcaaagaactggatctttatctggcttactttgtccacactccggaatccggacaatcagatagttcaaaccagcaaggagatgcggacatcaaaccactgcccaacgggcacttaagtttccaggactgttttgtgacttccggggtctggaatgtgacggagctggtgagagtatcacagactcctgttgcaacagcatcagggcccaacttctccctggcggacctggagagtcccagctactacaacatcaaccaggtgaccctggggcggcggtccatcacctcccctccttccaccagcaccaccaagcgccccaagtccatcgatgacagtgagatggagagccctgttgatgacgtgttctatcccgggacaggccgttccccagcagctggcagcagccagtccagcgggtggcccaacgatgtggatgcagggagcccccgggccacagcatcagccctgcacttcccctccacgtccatcatccagcagtcgagcccgtatttcacgcacccgaccatccgctaccaccaccaccacgggcaggactcactgaaggagtttgtgcagtttgtgtgctcggatggctcgggccaggccaccggacagcattcgcaacgacaggcgcctcctctgccaaccggtttgtcagcatcggaccccgggacggcaactttctgaacatcccacagcagtctcagtcctggttcctctgataagatcgacaaaagaaacaacaaaatgagaagaagaggttcctcgaaaggggggagaagaaattttgagaatggaaaaatcccccagcccagcccagccccaccgaaaagcaaaaattacacgtcgtcagccactcagcccttctctcctccagcccggggacccccgcgggccccagaagcagcccagttctcagagagcccttggaaggggtctcggtggagctgtgcaccagcagccaagcagaaagaaacacgcgacatggactctgtcaagtagaggacagaaagcaagaaaggatgcagaactgccttcctccccctgaccccgccccgcccccgtcactgcgcttctgttataccatctttgcctgactctctccggcttctccattgaatggctaatgtgtatgtg

SEQ ID NO: 160381 - DNA, 5459 bp, Homo sapiens
  Payload ID: 11363
  Gene Symbol: NFIX
  Gene Name: nuclear factor I/X (CCAAT-binding transcription factor)
  ENST ID: ENST00000360105
  CDS Start-End: 66-1277
cagacggacactgtgccggggcgagctgacaggagttcacggctgcgatagaacatggagatgtcatgggcgcgacagagcctggcggggataccagcagcgatgagttccacccgttcatcgaggcactgctgcctcacgtccgcgctttctcctacacctggttcaacctgcaggcgcggaagcgcaagtacttcaagaagcatgaaaagcggatgtcgaaggacgaggagcgggcggtgaaggacgagctgctgggcgagaagcccgagatcaagcagaagtgggcatcccggctgctggccaagctgcgcaaggacatccggcccgagttccgcgaggacttcgtgctgaccatcacgggcaagaagcccccctgctgcgtgctctccaaccccgaccagaagggcaagatccggcggattgactgcctgcgccaggctgacaaggtgtggcggctggacctggtcatggtgattttgtttaaggggatccccctggaaagtactgatggggagcggctctacaagtcgcctcagtgctcgaaccccggcctgtgcgtccagccacatcacattggagtcacaatcaaagaactggatctttatctggcttactttgtccacactccggaatccggacaatcagatagttcaaaccagcaaggagatgcggacatcaaaccactgcccaacgggcacttaagtttccaggactgttttgtgacttccggggtctggaatgtgacggagctggtgagagtatcacagactcctgttgcaacagcatcagggcccaacttctccctggcggacctggagagtcccagctactacaacatcaaccaggtgaccctggggcggcggtccatcacctcccctccttccaccagcaccaccaagcgccccaagtccatcgatgacagtgagatggagagccctgttgatgacgtgttctatcccgggacaggccgttccccagcagctggcagcagccagtccagcgggtggcccaacgatgtggatgcagggagcccccgggccacagcatcagccctgcacttcccctccacgtccatcatccagcagtcgagcccgtatttcacgcacccgaccatccgctaccaccaccaccacgggcaggactcactgaaggagtttgtgcagtttgtgtgctcggatggctcgggccaggccaccggacagcattcgcaacgacaggcgcctcctctgccaaccggtttgtcagcatcggaccccgggacggcaactttctgaacatcccacagcagtctcagtcctggttcctctgataagatcgacaaaagaaacaacaaaatgagaagaagaggttcctcgaaaggggggagaagaaattttgagaatggaaaaatcccccagcccagcccagccccaccgaaaagcaaaaattacacgtcgtcagccactcagcccttctctcctccagcccggggacccccgcgggccccagaagcagcccagttctcagagagcccttggaaggggtctcggtggagctgtgcaccagcagccaagcagaaagaaacacgcgacatggactctgtcaagtagaggacagaaagcaagaaaggatgcagaactgccttcctccccctgaccccgccccggccttctggggaaggaacaaagtccccaaacaaagcaaccagcacaattctgaaggggcctggcctccaccctcaccccttcctaggggaaccccaccctccacacagccggagctgccctagggagcctggagggccagcttgtaaagatgatggggtttagatccctcaggctctcccctccagactccgcccttccctccctccctccctccctccctctctgccaaggctccagcttcttcccccagctgctcccgaccaggagggggagagcagcctccacttaccccaccccacccttgggctaaaagcccccaggcgggcagggggtgacccctggagctagttgcgtgtcccagaatggagggtgttctgacaccccaccctgagccgcaagagcagtcctggggccctggacccctctgtacagtccgtaggaaaaagtcggaatgctctcgacggcctcgtcccagcctgggacaggccccctttcccctctctctgcaggccaggagggcctccttcctgccacgagggaggggagtcgggccccaggtcgcccccgcccccagccctgcatgcaggtgccctcgctccgccccatcagttcctgcccctgcccctcatgcagactgccctgctggggccgggccggagggtggagcagaaaggggaccccggagccgagcgaggaggaccaggcagccgccgctgccgcgctaagccaccacctgcgcttaggtaggcgtcctgctcgccgactttcagttccttgggagggtgttgggtgtcgtccttttcaaaagtgttttggagctttctgtgccccccgactttcccccgcctccccgccccccacgtggccacttttctctggattttagctgtaatgtctttactctttatttaggggtggggcattcattgtttgggtcttttgctgttggaatgggaactcctcctccatttgagcaacttgggaacaatttggtaacacaccacaggaagtagctctcccccccagccccctcctccctcaagggagggttggggggcctgtccagagggtcttcagaagcccccctgggagggaggggaggatgagcacgcccagctcccctccagggtgtgacttggcccctctggcttgtctttctgtgccttactcctcctcctgcgtctcccgttcctggccccttcttgagtccttgtgcctctctctttctctctctttcttaattgtatgaaaacacaaagcacaggtcaggatcctctgagagaaaatcaacattgcaccacgtaggggtgggctatgggctgtatttattgtgaatctagtttgtgaggctgtggccccgagctggcggagggagggaagaggagggagtgacgggaggggaggaggtcagcgacctggggccgtagcggcaggcgaacggtgcctgctacccagctggaagccacaaggtggctggctccaggggcggcttttgttggaagttgagtgaagccctccccctgtcctcagcgtgcagccctagaggaccccagggctgaggggcagtggatcctgcgggagtctcccggggcgtggggagtaaggccccgggggtggggggccgggtgggccgggcgtgacgcgcggtcaaagtgcaatgatttttcagttcggttggctaaacagggtcagagctgagagcgaagcagaaggggctccctgtccggcccacgtgccctttccctcgacgacagtcgagggctcgggctctgtgggactgtgggagctagggtctgcggggcgcctgcccgggcgaggtcggaagctgcaggccagctgggcccgggccggagcgtgcccggcggggctgcccgggcgggcagggggtgggggctgctcctttcccaagtggtgttgtgaggggcaatgagggcaacaggagatgtggggacgtgttaggagagaaaaaaaaaaaaacaaaaatatatatgggggaaattaacttttttttttcattgaaccaagtgcaatgcatcagagagttttcctatctttgtatgttaagagattaagaaaaaaaaattctatttttgttgtaatgtcctcgcggctctggggacgctaaaagaaccgggcctgccccgccctgcgcggggataacgaaagctgagtgtttttcccttttttttgttcgtttttagtttttttttttttaagtcgttttcctgcgttgacgaggatgatctggggtttttatttgtttcgtcgttcgttctgtttcggtgggagggctgaaggaaacgttcacattttagagtttaaaaaaaacacctcgacatttaaaaaatcaaccaacacaagatcaaaaaggaaaaggacgagagaaaaattatttttaagataattaaacataaaaccctggtgcttcttacattataaagtacgttttaaagaacccacaaactattatacataagtttatgaatcaattaaatatcctgcacttgttaggaatacgcatatcccttctttgttgagtttaacggaacgggacagcggcgtgcccccggcggctggactgctccggccgcgggtctccccgggcgcccctccctggggcccagcacccctcctcgccccatccccgtccgggtacgggggcgcggcaggggtccccggcccctcccccgcagaggtcaatgccaacgaacaaacgtcccctccctccctccctctccgccccgagcgcccttctttgagccagacgccaacttgaccctcaccagcattatcaggagcgcgctcagcaagttggtagtttcctcccccctttcccggcgcccctcccgcccccattcaacatctctcatcctatccccgaccccctccggggaacaccgggaaggctcgacgctccaggacaggaccagccacgctgacaggtcgatttgcccaggcccgcgcccgcacgcacgcacgcacacggccccgcacacagccccgccccaccccgcaaccagccctgtcgactgccttatacacccgcccccgcgctggccggccgacctagtgccttgttctcacccccgtgctggcggagcggacgccgcgctctgggtcccagaggggccgggtggctcagacgacccaccactcccccaccctgaccgtgctgaacagacccccccacacgagagaaaataaaggagcaataaagtcacgagaactttcgtcccccaatcgagagcccgaggggcaccccagccccgcctctgctcccccccaccccacccaccctcggggcgcccccctccccccgcaagccagcctgggccagccccgcttcggcccctcccgggagatccgtgcgcccgaccagcaccagcatcgcggaccgcaaaggccgcccgtcccgtcaaacaagtttcttcttaggctaagaaacgcagtatatacgagtatctctatatatagtactaatggatttggtgtgcttcccccttagcgtccccctccctctgctcctcctccttcagcctggtctccccctcttctctgccctccacccccgtctctgcactgagatacataagaaacaagggtagtttactgtctgttttgttttctgggttttcagtgtcctagcggaatgcaagtaggcagccagcccgtctgttccctctccgccccgccccgccccgcccccgtcactgcgcttctgttataccatctttgcctgactctctccggcttctccattgaatggctaatgtgtatgtgaaataaagaaataaagaaaaacaaacgcga

SEQ ID NO: 160382 - DNA, 3143 bp, Homo sapiens
  Payload ID: 11363
  Gene Symbol: NFIX
  Gene Name: nuclear factor I/X (CCAAT-binding transcription factor)
  Uniprot ID: Q14938
  ENST ID: ENST00000397661
  CDS Start-End: 231-1556
gcgagcgcggcggcggcggcggcagcggcggccccggagccggcggggccgagcttgcgagcggcgagcgcggagcggcgccgggccgagcgcggggccgcgggccgggcgggcgcagcgcggcggaggccggaggagccgagccggagcccgagcccgagcgcggccgccgcctgccgggcctcccctcgccgcggccggccgccgcgctcccgcccgggcgcccagctatgtactccccgtactgcctcacccaggatgagttccacccgttcatcgaggcactgctgcctcacgtccgcgctttctcctacacctggttcaacctgcaggcgcggaagcgcaagtacttcaagaagcatgaaaagcggatgtcgaaggacgaggagcgggcggtgaaggacgagctgctgggcgagaagcccgagatcaagcagaagtgggcatcccggctgctggccaagctgcgcaaggacatccggcccgagttccgcgaggacttcgtgctgaccatcacgggcaagaagcccccctgctgcgtgctctccaaccccgaccagaagggcaagatccggcggattgactgcctgcgccaggctgacaaggtgtggcggctggacctggtcatggtgattttgtttaaggggatccccctggaaagtactgatggggagcggctctacaagtcgcctcagtgctcgaaccccggcctgtgcgtccagccacatcacattggagtcacaatcaaagaactggatctttatctggcttactttgtccacactccggaatccggacaatcagatagttcaaaccagcaaggagatgcggacatcaaaccactgcccaacgggcacttaagtttccaggactgttttgtgacttccggggtctggaatgtgacggagctggtgagagtatcacagactcctgttgcaacagcatcagggcccaacttctccctggcggacctggagagtcccagctactacaacatcaaccaggtgaccctggggcggcggtccatcacctcccctccttccaccagcaccaccaagcgccccaagtccatcgatgacagtgagatggagagccctgttgatgacgtgttctatcccgggacaggccgttccccagcagctggcagcagccagtccagcgggtggcccaacgatgtggatgcaggcccggcttctctaaagaagtcaggaaagctggacttctgcagtgccctctcctctcagggcagctccccgcgcatggctttcacccaccacccgctgcctgtgcttgctggagtcagaccagggagcccccgggccacagcatcagccctgcacttcccctccacgtccatcatccagcagtcgagcccgtatttcacgcacccgaccatccgctaccaccaccaccacgggcaggactcactgaaggagtttgtgcagtttgtgtgctcggatggctcgggccaggccaccggacagcattcgcaacgacaggcgcctcctctgccaaccggtttgtcagcatcggaccccgggacggcaactttctgaacatcccacagcagtctcagtcctggttcctctgataagatcgacaaaagaaacaacaaaatgagaagaagaggttcctcgaaaggggggagaagaaattttgagaatggaaaaatcccccagcccagcccagccccaccgaaaagcaaaaattacacgtcgtcagccactcagcccttctctcctccagcccggggacccccgcgggccccagaagcagcccagttctcagagagcccttggaaggggtctcggtggagctgtgcaccagcagccaagcagaaagaaacacgcgacatggactctgtcaagtagaggacagaaagcaagaaaggatgcagaactgccttcctccccctgaccccgccccggccttctggggaaggaacaaagtccccaaacaaagcaaccagcacaattctgaaggggcctggcctccaccctcaccccttcctaggggaaccccaccctccacacagccggagctgccctagggagcctggagggccagcttgtaaagatgatggggtttagatccctcaggctctcccctccagactccgcccttccctccctccctccctccctccctctctgccaaggctccagcttcttcccccagctgctcccgaccaggagggggagagcagcctccacttaccccaccccacccttgggctaaaagcccccaggcgggcagggggtgacccctggagctagttgcgtgtcccagaatggagggtgttctgacaccccaccctgagccgcaagagcagtcctggggccctggacccctctgtacagtccgtaggaaaaagtcggaatgctctcgacggcctcgtcccagcctgggacaggccccctttcccctctctctgcaggccaggagggcctccttcctgccacgagggaggggagtcgggccccaggtcgcccccgcccccagccctgcatgcaggtgccctcgctccgccccatcagttcctgcccctgcccctcatgcagactgccctgctggggccgggccggagggtggagcagaaaggggaccccggagccgagcgaggaggaccaggcagccgccgctgccgcgctaagccaccacctgcgcttaggtaggcgtcctgctcgccgactttcagttccttgggagggtgttgggtgtcgtccttttcaaaagtgttttggagctttctgtgccccccgactttcccccgcctccccgccccccacgtggccacttttctctggattttagctgtaatgtctttactctttatttaggggtggggcattcattgtttgggtcttttgctgttggaatgggaactcctcctccatttgagcaacttgggaacaatttggtaacacaccacaggaagtagctctcccccccagccccctcctccctcaagggagggttggggggcctgtccagagggtcttcagaagcccccctgggagggaggggaggatgagcacgcccagctcccctccagggtgtgacttggcccctctggcttgtctttctgtgccttactcctcctcctgcgtctcccgttcctggccccttcttgagtccttgtg

SEQ ID NO: 160383 - DNA, 582 bp, Homo sapiens
  Payload ID: 11363
  Gene Symbol: NFIX
  Gene Name: nuclear factor I/X (CCAAT-binding transcription factor)
  ENST ID: ENST00000591028
  CDS Start-End: 33-582
agttcacggctgcgatagaacatggagatgtcatgggcgcgacagagcctggcggggataccagcagcgtgtgtgtgtggacggcaacgttgtctgtgcgcgtgtgtgatgagttccacccgttcatcgaggcactgctgcctcacgtccgcgctttctcctacacctggttcaacctgcaggcgcggaagcgcaagtacttcaagaagcatgaaaagcggatgtcgaaggacgaggagcgggcggtgaaggacgagctgctgggcgagaagcccgagatcaagcagaagtgggcatcccggctgctggccaagctgcgcaaggacatccggcccgagttccgcgaggacttcgtgctgaccatcacgggcaagaagcccccctgctgcgtgctctccaaccccgaccagaagggcaagatccggcggattgactgcctgcgccaggctgacaaggtgtggcggctggacctggtcatggtgattttgtttaaggggatccccctggaaagtactgatggggagcggctctacaagtcgcctcagtgctcgaaccccggcctgtgcgtccagccacatcaca

SEQ ID NO: 160384 - DNA, 579 bp, Homo sapiens
  Payload ID: 11363
  Gene Symbol: NFIX
  Gene Name: nuclear factor I/X (CCAAT-binding transcription factor)
  ENST ID: ENST00000590027
  CDS Start-End: 194-579
gcatgtaccaggctggctccgacgacggaaccgccatgggtgctgagtggagagtggggaccgcggaccccgggggcaggatgagttccacccgttcatcgaggcactgctgcctcacgtccgcgctttctcctacacctggttcaacctgcaggcgcggaagcgcaagtacttcaagaagcatgaaaagcggatgtcgaaggacgaggagcgggcggtgaaggacgagctgctgggcgagaagcccgagatcaagcagaagtgggcatcccggctgctggccaagctgcgcaaggacatccggcccgagttccgcgaggacttcgtgctgaccatcacgggcaagaagcccccctgctgcgtgctctccaaccccgaccagaagggcaagatccggcggattgactgcctgcgccaggctgacaaggtgtggcggctggacctggtcatggtgattttgtttaaggggatccccctggaaagtactgatggggagcggctctacaagtcgcctcagtgctcgaaccccggcctgtgcgtccagccacatcacattggagtcacaatcaaagaactgga

SEQ ID NO: 160385 - DNA, 1487 bp, Homo sapiens
  Payload ID: 11363
  Gene Symbol: NFIX
  Gene Name: nuclear factor I/X (CCAAT-binding transcription factor)
  Uniprot ID: Q14938
  ENST ID: ENST00000587760
  CDS Start-End: 42-1343
ctcagaatcgggcgttgggctttgccgggtgcttcagatcaatggatgagttccacccgttcatcgaggcactgctgcctcacgtccgcgctttctcctacacctggttcaacctgcaggcgcggaagcgcaagtacttcaagaagcatgaaaagcggatgtcgaaggacgaggagcgggcggtgaaggacgagctgctgggcgagaagcccgagatcaagcagaagtgggcatcccggctgctggccaagctgcgcaaggacatccggcccgagttccgcgaggacttcgtgctgaccatcacgggcaagaagcccccctgctgcgtgctctccaaccccgaccagaagggcaagatccggcggattgactgcctgcgccaggctgacaaggtgtggcggctggacctggtcatggtgattttgtttaaggggatccccctggaaagtactgatggggagcggctctacaagtcgcctcagtgctcgaaccccggcctgtgcgtccagccacatcacattggagtcacaatcaaagaactggatctttatctggcttactttgtccacactccggaatccggacaatcagatagttcaaaccagcaaggagatgcggacatcaaaccactgcccaacgggcacttaagtttccaggactgttttgtgacttccggggtctggaatgtgacggagctggtgagagtatcacagactcctgttgcaacagcatcagggcccaacttctccctggcggacctggagagtcccagctactacaacatcaaccaggtgaccctggggcggcggtccatcacctcccctccttccaccagcaccaccaagcgccccaagtccatcgatgacagtgagatggagagccctgttgatgacgtgttctatcccgggacaggccgttccccagcagctggcagcagccagtccagcgggtggcccaacgatgtggatgcaggcccggcttctctaaagaagtcaggaaagctggacttctgcagtgccctctcctctcagggcagctccccgcgcatggctttcacccaccacccgctgcctgtgcttgctggagtcagaccagggagcccccgggccacagcatcagccctgcacttcccctccacgtccatcatccagcagtcgagcccgtatttcacgcacccgaccatccgctaccaccaccaccacgggcaggactcactgaaggagtttgtgcagtttgtgtgctcggatggctcgggccaggccaccggacagcattcgcaacgacaggcgcctcctctgccaaccggtttgtcagcatcggaccccgggacggcaactttctgaacatcccacagcagtctcagtcctggttcctctgataagatcgacaaaagaaacaacaaaatgagaagaagaggttcctcgaaaggggggagaagaaattttgagaatggaaaaatcccccagcccagcccagccccaccgaaa

SEQ ID NO: 160386 - DNA, 1083 bp, Homo sapiens
  Payload ID: 11363
  Gene Symbol: NFIX
  Gene Name: nuclear factor I/X (CCAAT-binding transcription factor)
  ENST ID: ENST00000585382
  CDS Start-End: 175-480
cgacgacggaaccgccatgggtgctgagtggagagtggggaccgcggaccccgggggcaggatgagttccacccgttcatcgaggcactgctgcctcacgtccgcgctttctcctacacctggttcaacctgcaggcgcggaagcgcaagtacttcaagaagcatgaaaagcggatgtcgaaggacgaggagcgggcggtgaaggacgagctgctgggcgagaagcccgagatcaagcagaagtgggcatcccggctgctggccaagctgcgcaaggacatccggcccgagttccgcgaggacttcgtgctgaccatcacgggcaagaagcccccctgctgcgtgctctccaaccccgaccagaagggcaagatccggcggattgactgcctgcgccaggctgacaagaatccggacaatcagatagttcaaaccagcaaggagatgcggacatcaaaccactgcccaacgggcacttaagtttccaggactgttttgtgacttccggggtctggaatgtgacggagctggtgagagtatcacagactcctgttgcaacagcatcagggcccaacttctccctggcggacctggagagtcccagctactacaacatcaaccaggtgaccctggggcggcggtccatcacctcccctccttccaccagcaccaccaagcgccccaagtccatcgatgacagtgagatggagagccctgttgatgacgtgttctatcccgggacaggccgttccccagcagctggcagcagccagtccagcgggtggcccaacgatgtggatgcaggcccggcttctctaaagaagtcaggaaagctggacttctgcagtgccctctcctctcagggcagctccccgcgcatggctttcacccaccacccgctgcctgtgcttgctggagtcagaccagggagcccccgggccacagcatcagccctgcacttcccctccacgtccatcatccagcagtcgagcccgtatttcacgcacccgaccatccgctaccaccaccaccacgggcaggactcactgaaggagtttgtgcagtttgtgtgctcggatggct

SEQ ID NO: 160387 - DNA, 1692 bp, Homo sapiens
  Payload ID: 11363
  Gene Symbol: NFIX
  Gene Name: nuclear factor I/X (CCAAT-binding transcription factor)
  ENST ID: ENST00000588228
  CDS Start-End: 219-1586
agacggacactgtgccggggcgagctgacaggagttcacggctgcgatagaacatggagatgtcatgggcgcgacagagcctggcggggataccagcagcgtgtgatgagttccacccgttcatcgaggcactgctgcctcacgtccgcgctttctcctacacctggttcaacctgcaggcgcggaagcgcaagtacttcaagaagcatgaaaagcggatgtcgaaggacgaggagcgggcggtgaaggacgagctgctgggcgagaagcccgagatcaagcagaagtgggcatcccggctgctggccaagctgcgcaaggacatccggcccgagttccgcgaggacttcgtgctgaccatcacgggcaagaagcccccctgctgcgtgctctccaaccccgaccagaagggcaagatccggcggattgactgcctgcgccaggctgacaaggtgtggcggctggacctggtcatggtgattttgtttaaggggatccccctggaaagtactgatggggagcggctctacaagtcgcctcagtgctcgaaccccggcctgtgcgtccagccacatcacattggagtcacaatcaaagaactggatctttatctggcttactttgtccacactccggaatccggacaatcagatagttcaaaccagcaaggagatgcggacatcaaaccactgcccaacgggcacttaagtttccaggactgttttgtgacttccggggtctggaatgtgacggagctggtgagagtatcacagactcctgttgcaacagcatcagggcccaacttctccctggcggacctggagagtcccagctactacaacatcaaccaggtgaccctggggcggcggtccatcacctcccctccttccaccagcaccaccaagcgccccaagtccatcgatgacagtgagatggagagccctgttgatgacgtgttctatcccgggacaggccgttccccagcagctggcagcagccagtccagcgggtggcccaacgatgtggatgcaggcccggcttctctaaagaagtcaggaaagctggacttctgcagtgccctctcctctcagggcagctccccgcgcatggctttcacccaccacccgctgcctgtgcttgctggagtcagaccagggagcccccgggccacagcatcagccctgcacttcccctccacgtccatcatccagcagtcgagcccgtatttcacgcacccgaccatccgctaccaccaccaccacgggcaggactcactgaaggagtttgtgcagtttgtgtgctcggatggctcgggccaggccaccggacagcccaacggtagcggccagggcaaagtcccggggtcatttttgctaccgccgccgcctccagtggccagacctgtgccccttcctatgcctgattccaaatccaccagcactgccccagacggcgccgccttgactcctccatcaccttcattcgcaacgacaggcgcctcctctgccaaccggtttgtcagcatcggaccccgggacggcaactttctgaacatcccacagcagtctcagtcctggttcctctgataagatcgacaaaagaaacaacaaaatgagaagaagaggttcctcgaaaggggggagaagaaattttgagaatggaaaaatcccccagcccagcccagccccaccg

SEQ ID NO: 160388 - DNA, 1509 bp, Homo sapiens
  Payload ID: 11363
  Gene Symbol: NFIX
  Gene Name: nuclear factor I/X (CCAAT-binding transcription factor)
  Uniprot ID: Q14938
  ENST ID: ENST00000592199
  CDS Start-End: 1-1509
atgtactccccgtactgcctcacccaggatgagttccacccgttcatcgaggcactgctgcctcacgtccgcgctttctcctacacctggttcaacctgcaggcgcggaagcgcaagtacttcaagaagcatgaaaagcggatgtcgaaggacgaggagcgggcggtgaaggacgagctgctgggcgagaagcccgagatcaagcagaagtgggcatcccggctgctggccaagctgcgcaaggacatccggcccgagttccgcgaggacttcgtgctgaccatcacgggcaagaagcccccctgctgcgtgctctccaaccccgaccagaagggcaagatccggcggattgactgcctgcgccaggctgacaaggtgtggcggctggacctggtcatggtgattttgtttaaggggatccccctggaaagtactgatggggagcggctctacaagtcgcctcagtgctcgaaccccggcctgtgcgtccagccacatcacattggagtcacaatcaaagaactggatctttatctggcttactttgtccacactccggaatccggacaatcagatagttcaaaccagcaaggagatgcggacatcaaaccactgcccaacgggcacttaagtttccaggactgttttgtgacttccggggtctggaatgtgacggagctggtgagagtatcacagactcctgttgcaacagcatcagggcccaacttctccctggcggacctggagagtcccagctactacaacatcaaccaggtgaccctggggcggcggtccatcacctcccctccttccaccagcaccaccaagcgccccaagtccatcgatgacagtgagatggagagccctgttgatgacgtgttctatcccgggacaggccgttccccagcagctggcagcagccagtccagcgggtggcccaacgatgtggatgcaggcccggcttctctaaagaagtcaggaaagctggacttctgcagtgccctctcctctcagggcagctccccgcgcatggctttcacccaccacccgctgcctgtgcttgctggagtcagaccagggagcccccgggccacagcatcagccctgcacttcccctccacgtccatcatccagcagtcgagcccgtatttcacgcacccgaccatccgctaccaccaccaccacgggcaggactcactgaaggagtttgtgcagtttgtgtgctcggatggctcgggccaggccaccggacagcccaacggtagcggccagggcaaagtcccggggtcatttttgctaccgccgccgcctccagtggccagacctgtgccccttcctatgcctgattccaaatccaccagcactgccccagacggcgccgccttgactcctccatcaccttcattcgcaacgacaggcgcctcctctgccaaccggtttgtcagcatcggaccccgggacggcaactttctgaacatcccacagcagtctcagtcctggttcctctga

SEQ ID NO: 160389 - DNA, 1615 bp, Homo sapiens
  Payload ID: 11363
  Gene Symbol: NFIX
  Gene Name: nuclear factor I/X (CCAAT-binding transcription factor)
  ENST ID: ENST00000586797
  CDS Start-End: 61-240
ggacactgtgccggggcgagctgacaggagttcacggctgcgatagaacatggagatgtcatgggcgcgacagagcctggcggggataccagcagcgtgatgagttccacccgttcatcgaggcactgctgcctcacgtccgcgctttctcctacacctggttcaacctgcaggcgcggaagcgcaagtacttcaagaagcatgaaaagcggatgtcgaaggacgaggagcgggcggtgaaggacgagctgctgggcgagaagcccgagatcaagcagaagtgggcatcccggctgctggccaagctgcgcaaggacatccggcccgagttccgcgaggacttcgtgctgaccatcacgggcaagaagcccccctgctgcgtgctctccaaccccgaccagaagggcaagatccggcggattgactgcctgcgccaggctgacaaggtgtggcggctggacctggtcatggtgattttgtttaaggggatccccctggaaagtactgatggggagcggctctacaagtcgcctcagtgctcgaaccccggcctgtgcgtccagccacatcacattggagtcacaatcaaagaactggatctttatctggcttactttgtccacactccggaatccggacaatcagatagttcaaaccagcaaggagatgcggacatcaaaccactgcccaacgggcacttaagtttccaggactgttttgtgacttccggggtctggaatgtgacggagctggtgagagtatcacagactcctgttgcaacagcatcagggcccaacttctccctggcggacctggagagtcccagctactacaacatcaaccaggtgaccctggggcggcggtccatcacctcccctccttccaccagcaccaccaagcgccccaagtccatcgatgacagtgagatggagagccctgttgatgacgtgttctatcccgggacaggccgttccccagcagctggcagcagccagtccagcgggtggcccaacgatgtggatgcaggcccggcttctctaaagaagtcaggaaagctggacttctgcagtgccctctcctctcagggcagctccccgcgcatggctttcacccaccacccgctgcctgtgcttgctggagtcagaccagggagcccccgggccacagcatcagccctgcacttcccctccacgtccatcatccagcagtcgagcccgtatttcacgcacccgaccatccgctaccaccaccaccacgggcaggactcactgaaggagtttgtgcagtttgtgtgctcggatggctcgggccaggccaccggacagcccaacggtagcggccagggcaaagtcccggggtcatttttgctaccgccgccgcctccagtggccagacctgtgccccttcctatgcctgattccaaatccaccagcactgccccagacggcgccgccttgactcctccatcaccttcattcgcaacgacaggcgcctcctctgccaaccggtttgtcagcatcggaccccgggacggcaactttctgaacatcccacagcagtctcagtcctggttcctctgataagatcgacaaaagaaacaacaaaatgagaagaa

SEQ ID NO: 160390 - DNA, 1537 bp, Homo sapiens
  Payload ID: 11363
  Gene Symbol: NFIX
  Gene Name: nuclear factor I/X (CCAAT-binding transcription factor)
  Uniprot ID: Q14938
  ENST ID: ENST00000587260
  CDS Start-End: 59-1381
tccttctctctttccccctcatcccgtcttcccctcctcccgtcctccctcgccccgcatgctcccggcttgccgcctgcaggatgagttccacccgttcatcgaggcactgctgcctcacgtccgcgctttctcctacacctggttcaacctgcaggcgcggaagcgcaagtacttcaagaagcatgaaaagcggatgtcgaaggacgaggagcgggcggtgaaggacgagctgctgggcgagaagcccgagatcaagcagaagtgggcatcccggctgctggccaagctgcgcaaggacatccggcccgagttccgcgaggacttcgtgctgaccatcacgggcaagaagcccccctgctgcgtgctctccaaccccgaccagaagggcaagatccggcggattgactgcctgcgccaggctgacaaggtgtggcggctggacctggtcatggtgattttgtttaaggggatccccctggaaagtactgatggggagcggctctacaagtcgcctcagtgctcgaaccccggcctgtgcgtccagccacatcacattggagtcacaatcaaagaactggatctttatctggcttactttgtccacactccggaatccggacaatcagatagttcaaaccagcaaggagatgcggacatcaaaccactgcccaacgggcacttaagtttccaggactgttttgtgacttccggggtctggaatgtgacggagctggtgagagtatcacagactcctgttgcaacagcatcagggcccaacttctccctggcggacctggagagtcccagctactacaacatcaaccaggtgaccctggggcggcggtccatcacctcccctccttccaccagcaccaccaagcgccccaagtccatcgatgacagtgagatggagagccctgttgatgacgtgttctatcccgggacaggccgttccccagcagctggcagcagccagtccagcgggtggcccaacgatgtggatgcaggcccggcttctctaaagaagtcaggaaagctggacttctgcagtgccctctcctctcagggcagctccccgcgcatggctttcacccaccacccgctgcctgtgcttgctggagtcagaccagggagcccccgggccacagcatcagccctgcacttcccctccacgtccatcatccagcagtcgagcccgtatttcacgcacccgaccatccgctaccaccaccaccacgggcaggactcactgaaggagtttgtgcagtttgtgtgctcggatggctcgggccaggccaccggacagcattcgcaacgacaggcgcctcctctgccaaccggtttgtcagcatcggaccccgggacggcaactttctgaacatcccacagcagtctcagtcctggttcctctgataagatcgacaaaagaaacaacaaaatgagaagaagaggttcctcgaaaggggggagaagaaattttgagaatggaaaaatcccccagcccagcccagccccaccgaaaagcaaaaattac

SEQ ID NO: 160391 - DNA, 587 bp, Homo sapiens
  Payload ID: 11363
  Gene Symbol: NFIX
  Gene Name: nuclear factor I/X (CCAAT-binding transcription factor)
  ENST ID: ENST00000586873
  CDS Start-End: 212-587
atagaacatggagatgtcatgggcgcgacagagcctggcggggataccagcagcgtgtgtgtgtggacggcaacgttgtctgtgcgcgtgtgtgtgagatgagttccacccgttcatcgaggcactgctgcctcacgtccgcgctttctcctacacctggttcaacctgcaggcgcggaagcgcaagtacttcaagaagcatgaaaagcggatgtcgaaggacgaggagcgggcggtgaaggacgagctgctgggcgagaagcccgagatcaagcagaagtgggcatcccggctgctggccaagctgcgcaaggacatccggcccgagttccgcgaggacttcgtgctgaccatcacgggcaagaagcccccctgctgcgtgctctccaaccccgaccagaagggcaagatccggcggattgactgcctgcgccaggctgacaaggtgtggcggctggacctggtcatggtgattttgtttaaggggatccccctggaaagtactgatggggagcggctctacaagtcgcctcagtgctcgaaccccggcctgtgcgtccagccacatcacattggagtcacaatca

SEQ ID NO: 160392 - DNA, 1485 bp, Homo sapiens
  Payload ID: 11363
  Gene Symbol: NFIX
  Gene Name: nuclear factor I/X (CCAAT-binding transcription factor)
  Uniprot ID: Q14938
  ENST ID: ENST00000585575
  CDS Start-End: 1-1485
atggatgagttccacccgttcatcgaggcactgctgcctcacgtccgcgctttctcctacacctggttcaacctgcaggcgcggaagcgcaagtacttcaagaagcatgaaaagcggatgtcgaaggacgaggagcgggcggtgaaggacgagctgctgggcgagaagcccgagatcaagcagaagtgggcatcccggctgctggccaagctgcgcaaggacatccggcccgagttccgcgaggacttcgtgctgaccatcacgggcaagaagcccccctgctgcgtgctctccaaccccgaccagaagggcaagatccggcggattgactgcctgcgccaggctgacaaggtgtggcggctggacctggtcatggtgattttgtttaaggggatccccctggaaagtactgatggggagcggctctacaagtcgcctcagtgctcgaaccccggcctgtgcgtccagccacatcacattggagtcacaatcaaagaactggatctttatctggcttactttgtccacactccggaatccggacaatcagatagttcaaaccagcaaggagatgcggacatcaaaccactgcccaacgggcacttaagtttccaggactgttttgtgacttccggggtctggaatgtgacggagctggtgagagtatcacagactcctgttgcaacagcatcagggcccaacttctccctggcggacctggagagtcccagctactacaacatcaaccaggtgaccctggggcggcggtccatcacctcccctccttccaccagcaccaccaagcgccccaagtccatcgatgacagtgagatggagagccctgttgatgacgtgttctatcccgggacaggccgttccccagcagctggcagcagccagtccagcgggtggcccaacgatgtggatgcaggcccggcttctctaaagaagtcaggaaagctggacttctgcagtgccctctcctctcagggcagctccccgcgcatggctttcacccaccacccgctgcctgtgcttgctggagtcagaccagggagcccccgggccacagcatcagccctgcacttcccctccacgtccatcatccagcagtcgagcccgtatttcacgcacccgaccatccgctaccaccaccaccacgggcaggactcactgaaggagtttgtgcagtttgtgtgctcggatggctcgggccaggccaccggacagcccaacggtagcggccagggcaaagtcccggggtcatttttgctaccgccgccgcctccagtggccagacctgtgccccttcctatgcctgattccaaatccaccagcactgccccagacggcgccgccttgactcctccatcaccttcattcgcaacgacaggcgcctcctctgccaaccggtttgtcagcatcggaccccgggacggcaactttctgaacatcccacagcagtctcagtcctggttcctctga

SEQ ID NO: 160393 - DNA, 13362 bp, Homo sapiens
  Payload ID: 11364
  Gene Symbol: NFAT5
  Gene Name: nuclear factor of activated T-cells 5, tonicity-responsive
  Uniprot ID: O94916
  ENST ID: ENST00000349945
  CDS Start-End: 681-5048
agattcctgtcagcggcggcggcggtggcggcgaccgtcagttttcgctgaggagaaacacgaaacggaccctttggctctcccccttccccttccccgtcctgaacccctctcctggtcaccgagaatcagtccccgtggagttccccctccacctcgccatcgtttcctcggtcctcggcccagtggaagtcactaccctcgaggaggaggcagcggcagccgccctcgcgtcgccgcccccggttcggtgcccgcggtcccggagaggaggtgccgccgccaccgccgctccccccctcccgctgccctcgggccgggctgggtcgagctgcgatgccctcggacttcatctcattgctcagcgcggacctagacctggaatcgcccaagtccctctactcgcgagattctctgaagttacacccatcacagaattttcatagagctggactattggaagaatctgtctatgatcttctcccaaaggagttacagttacctccatctagagaaacatctgtagcatcaatgagtcagacaagcggtggtgaggcaggctcgcctcctccagctgttgttgctgctggatttgcctctgaagcagggagtgtctgcattaaaaatgacctgtagttctctgcttcatagatgcttcttcagctccctcctcttcctccatgggcggtgcttgcagctcctttaccacctcttccagccctaccatttattctacctcagtcaccgacagcaaggctatgcaagtggagagctgctcctcagccgtgggggtaagtaacagaggggtaagtgaaaagcagttaaccagtaacacagttcagcagcatccatcaacaccgaagaggcacacagtcttgtacatctcaccaccacctgaggacttgctggataacagtcggatgtcctgccaggatgaggggtgtggattggaatctgagcagagctgcagtatgtggatggaggattccccctccaacttcagtaacatgagcaccagttcctacaatgataacactgaggtacctcgtaaatcacgaaaacgaaatccaaagcagaggccgggggtcaaacgacgagattgtgaagaatctaatatggatatatttgatgccgacagtgccaaagcacctcactatgtgctttctcagcttaccacggacaacaaaggcaactcaaaagcgggaaatggaacattggaaaaccaaaaaggaactggagtaaagaagagccctatgttgtgtggacaatatcctgttaaaagtgagggaaaggagctgaagatagttgtacaacctgagacacagcaccgagctcggtacctgactgagggcagccgtggctcagtgaaagatagaacacagcaaggctttcctacagtaaagctggaaggccataatgaacctgtagtgttgcaagtgtttgtgggcaacgactctggacgagtgaaaccacatggattttatcaggcctgcagagtaactggacgaaatacaactccttgcaaagaagtggacattgaaggcactactgttatagaagtcggccttgatcctagcaacaacatgacactggcggtggactgcgtagggatattgaaattgaggaatgctgatgtcgaagccagaataggaattgctggttccaagaagaaaagcactcgtgccagattggtttttcgagttaatatcatgaggaaagatggctccactttgacactgcaaacaccctcttctccaattttgtgtactcagccagcaggagtgccagaaatcttaaagaaaagcttgcatagctgttcagtgaaaggagaagaagaagtgtttttaatcggcaagaactttctgaaaggaactaaagttattttccaagaaaatgtttctgatgaaaactcttggaagtcagaagctgaaattgatatggaactatttcatcagaatcatcttattgtgaaggttcctccctatcatgaccaacatataactttgcctgtgtcagtgggaatatatgtagtgacaaatgctggaagatctcatgatgttcaaccattcacttacactccagacccagcagcagctggtgctttgaatgtaaatgtgaagaaggaaatatctagtccagcaagaccttgctcttttgaagaggccatgaaagcaatgaaaactactggatgtaatttagataaggtaaatattatccctaatgccctgatgactccactcataccaagcagtatgattaagagtgaagatgttactccaatggaagtaacagcagaaaaaagatcttccactatttttaagactacaaagtctgttggatcaactcagcaaacattagaaaacatctcaaacatagcaggaaatggctctttttcatcaccatcatcttcccacctaccttctgaaaatgaaaaacagcagcagattcagcccaaggcatacaacccagagaccctgacaactattcaaacccaggacatctcacagcctggtacttttccagcagtttctgcttctagtcagctgcccaacagcgatgcactattgcagcaggctacacagtttcagacaagagaaactcagtctagagagatattacagtcagatggtacagtggttaatttgtcacaactgactgaggcatcacaacaacagcagcagtcaccactacaagaacaagcacagactttacagcagcagatttcatcaaatatttttccatcaccaaatagtgtgagtcagcttcagaatactattcagcagctgcaagcagggagtttcacaggcagtactgctagtggcagcagtggaagtgttgacttggtccaacaagttttagaggcacagcagcagttatcttcagttttattttctgctccagatggtaatgagaatgttcaagagcagcttagtgcagatatttttcaacaagtcagtcaaattcagagtggtgtaagccctggaatgttttcctcaacagagccaacagtccataccagaccagataatttattacctggaagagctgaaagtgttcatccacagtctgaaaacacgttatctaatcaacagcagcagcagcagcagcaacagcaagtgatggaatcttcagccgcaatggtgatggagatgcaacagagtatctgccaggcagctgcccagattcagtcagagttattcccttcaactgcttcagcaaatggaaaccttcagcaatcgccagtttaccagcagacttctcacatgatgagtgcattgtctaccaatgaggatatgcaaatgcagtgtgaattgttttcttctcctcctgcagtttctggaaatgaaacttctacaactaccacacagcaggttgcaacccctggcactaccatgtttcagacatcaagttcaggagatggagaagaaactggaacacaagcaaaacagattcagaacagtgtctttcagaccatggtccaaatgcaacatagtggggacaatcaacctcaagttaaccttttttcatccacaaaaagtatgatgagtgttcagaatagtggtacccaacaacaaggtaatggtttattccagcaagggaatgagatgatgtcacttcaatctggaaattttttgcagcagtcttctcattcacaggcccaactttttcatcctcaaaatcctattgccgatgctcagaacctttcccaggaaactcaaggttctctctttcatagtccaaatcctattgtccacagtcagacttctacaacctcctctgaacaaatgcagcctccaatgtttcactctcaaagtaccattgctgtgttacagggctcttcagttcctcaagaccagcagtcaaccaacatatttctttcccagagtcccatgaataatcttcagactaacacagtagcccaagaagcattttttgcagcaccgaactcaatttctccacttcagtcaacatcaaacagtgaacaacaagctgctttccaacagcaagctccaatatcacacatccagactcctatgctttcccaagaacaggcacaacccccgcagcagggtttatttcagcctcaggtggccctgggctcccttccacctaatccaatgcctcaaagccaacaaggaaccatgttccagtcacagcactcaatagttgccatgcagagtaactctccatcccaggaacagcagcagcagcagcaacagcagcagcaacagcagcagcaacaacaacagagcattttattcagtaatcagaataccatggctacaatggcgtctccaaagcaaccaccaccaaacatgatattcaacccaaatcaaaatccaatggctaatcaggagcaacagaaccagtcaatttttcaccaacaaagtaacatggccccaatgaatcaagagcaacagcccatgcaatttcagagtcagtccacagtttcctcacttcagaacccaggtcctacccagtcggaatcatcacagacccccttgttccatagctctcctcagattcagttggtacaagggtcacctagttctcaagagcagcaagtaactctcttcttatctccagcatccatgtctgccttgcagaccagtataaatcaacaagatatgcaacagtctcctctttattcccctcagaacaacatgcctggaattcaaggagccacatcttcgcctcaaccacaggctactttatttcacaacacagcaggaggcacaatgaaccaactgcagaattctcctggctcatctcagcagacatcaggaatgttcttatttggcattcaaaataactgtagtcagcttttaacctctggaccagctacattgcctgatcagttgatggccataagtcagccaggccaaccacaaaacgagggccagccacctgtgacaacacttctttctcagcaaatgccagagaattctccactggcatcctctataaacaccaaccagaacatcgaaaagattgatttgcttgtttcattgcaaaaccaagggaacaacttgactggctccttttaactggatataaattccacgaagaaaatcctgattccaagatgtcctgagatcttgtggttccatgagaattattactttaaaaacaaaacaaaatataaaaaactgtgtttgagtaaactgatagattttactctgactgcaaaagagcacacctatgctgcttgttgcagtaactaaccaccaatgttaacatcttcatattttatattcctaataacagtgatgactgagaatctatttgagtttccagctggcagaattaattgttattattttcctaggcgcaatttccttaaacgtacagtttaaattcaaggctggaccactcagttattattgctattagaaaataatatatcatgtttacttttgttcttcattattttctttcctgcattgttttagtcaagtaatggcttttgaaaaagtaaagttcaataataactaaggctgtgatttttttcaatataaaaggcacagctgttggccaaagtgaaggaatcttttttcagttttattggagaaactgaagggtaacattctaacaagtaaactgtatgtgcagataaaagtactcttgatttaacacaaaggcagatgatacacttataaaactgggaacagctggaatgcttcttgattttattttttcagagagttgttagttctctgggtttctactaaggggtttagccataactgtgcatagaaaaataattatctgtaaaaaatgaaggggataatatatgataaattatgttctgatatcctcctacagtagtttaaattgacagaaaaatttgaatgttttcttcttaacccagtcttaggctggtattccctttttatatatatctatattacttttcacctctttttcactttactttagagaactattaatatactactggcttcatgaccctgtagcatctttggccactttaatctagggtgacctagcaatcctgcagcacagggcagagagtactgtcttaggaattattaggagttgattcctgagaaacaacacatttttccccatgaacggtgctgttctgaagtcttcaaatttttccctctaataggaaacagtataaattttaattaaaaaaaaaaggcaaactaaaatttcttgaaatatcacttctccctgatctgcagtgagtataaattcacttgtcacctcagtgctttacagtttgaagtggtcacttacctgatggttcccacaagccttaggctttacagggttgtatcattgacttaaaatgaagaattaacttgtgttacatctataaagagcaaaataacacactccagaacttggcagttgtagcattagttatacagttttgggtgttcttgccacccgtgggatgcctgcttctcactaccacctgtgtctggacacatgcttatgtctcattttccttttggcatgtggaaagctgtcaatgcagtgtaaggccaacgtgtgtgtggcttctatgtgttgagataatgttttggtatccttgtccgtttcatttattttttaagtgtacaaaaaataacctgttaattgttgaaggctacttttctgttctttttttttttttttttctatcctgtacatttagttgaactgtgcggaattgtggtgttggttttgtttacacagccagatttttccttctttttgttttgtgatgatcttcctttgttctttgaatgtgctcttttgtctttttctcttttttctcatgttttcttccctccacctccacccctttctttctttctctctctgattgagaggcattgaattacgttttcagtagtacaggcttcttgccgatatgaagggaacttttcagaaagagacctactctgggtcatttaattttgaatacagttttcaatcgttcaagttttggatggtttatatctaatgtgtgtttcatttttttggaaagctatattttgtatttaggaaatggtatactattttgctatttgtactgagtgagtacattggcataaatatagaaatttatatatatacatatatataaactattcttttttgccacacatttttgtggtaaatttgtgagtttgtctgatgttctaccacaacgtggcgtctgataacagtgagggggggtggggtttgttatgtctttattgagtatttaagtatcttttgaaacaaatgacctgttcatctgtggccattccatcaggcagttagttccttgatgtcagtagtgggctaaaggcagcttactgtgtgtttgctggagctttcactcagccaagtgttagagtcaggaaacccattgaggcaatggcgtcaaatggtgtttcacaagaatgagccattcagtctttgctcactatatatttaatattttattattgttgttattgttattattaattggctttctgtattctatgccttttatttataaagacactaagaaaacccatgtttgtaattttaataacatttttcccatcttgtaatatccagagctactttataaattctctgaaccaaaagtattttcctcagtgtatctcttctcccccagcccctattgggaaaaattacccagtatagttcaggttatgaggaggatcagccacacaatccagtgcttcagtttgaaaatgtaaaattctaaccctaaagtagggttggttgaaatttcagacaaagcaaacccagcaggtataaaaagtagtataaatacaaatctgtaagttatttttgaattttctgaacttttttctaagagattacataggagactaaagaaatctatctgttcaagttctaattaggatgattgttaatactgcactgtggatgaagtggcgactggcttgtgtgctgacttctgtggtttagcaagaggtttattgttatcaaatgctaattggcaatgccaagtcactgggaccaattttctgttttataatatctaagtttagaacagaatatatacctgaactgtagtggtttgatcggatggagacagaaaacccgatttttattctcataaattttgtggttatttatacaagggctgtgctatgctaccatattcttgttcaataataataggtttgttgttttttttacattgttaaatgttccttacccctaaaggtcaatgttaagtacaacattctgaaaatacaatttggctacgaagagtattcatcttctttgaagctcagtggttgatatttgtgctaataatgcaatttcctgattactgttacaagttatagctacatatgggagagactcagtgagccagcaaaggccatagaaacaacaatttattaaatgtatttatggcagaaggacctaaataaactgtgagccaccttttcttctttatattgttacatttaagtgttcttgctttcagcaactcacattaatgcttggagcttatctctttctctctctctctctctctctctgtgtgtgtgtgtgtatgtgtgtgtgtgtgtgtgtgtgtttccttattgtcattccattatatatccacaccaacatgggtgacgataattcaaagtcatattttgcctctaagcttgatcatgttacctttatgattaaagtatcatgttatttagccaatgcaaatctgttttaaaacaaatagtttaaaaaaagaacaagtttttaagggctttattatagaagaagtattaatgaaggactttccttcctccctccctttcctcccctccctgcctcccttcttcccttccatctccccctcctccctgccttctttgtttctccttcccttattcctccctccctcctttctcccttccttcctttcttccattcatccttccttgccttttatttttattttttgtaatatcacatgtgctgtagtttggaattttattctagtgcatttcttgctcatcagaacctcagctaatctacctaggaaaaatagtatcaaaggaaatgagaaagttgtatctgagtccctccagaactaagataattctttttgaccatttaagcctttataaatgcgttttgaccatttaagcctttataaatgcttgttttaggaaagtgaatctgttagatgcatcaacaaataatgaccaggacaaaacgatttaataattaaagtctcaaatcaccatggttatacattttcaccagaaatagtaatcttacaatttttcatttttctgatgaagatttctgttccaatatctgtttcctaatagattttttaaattaattagctttcctctgctttatgaccacaggttttatccctaaccgagacagctgtcttatatctgcatgccttagactgtgtggagggactccatgaagaaagaccataggttagaaaaataactcatagtatataccctagtaagtgggttagtagaatctcataacatgtattaaaaagaggttttcttctctgcttgtttgtgtcactagagcaaaattgtagagataatgctcataatgcagtaaatatcagaataatatctacaatatcatttgtggatggtcccaggtcccagtgctctagttactttacttctttttttttttttgagatggagtcttgctctgtctctcaggctagagcagtgtgcgatctcagctcactgcagcctccacctcccaggttcaagcgattctcctgcctcagcctcccaagtagccaggattacaggcaccctccactaggcccggctaattttttttgtatttttttagtagagatggggttttgccatgttggccaggctggtttcgaactcctaacctccagtgatccacctgcctcggcgtcccaaagtgctaggattacaggcatgagccaccacatccggcctaattacttctttaatccccatttatttttatgccattctagcctcatttattaataaaattatgtttttactttctctttcaggaaattttttaaattaatattttatatctagatctaatgctatggaaaagtgcctttttatcatttataatttcatttttcactatttccaaaaacacataaacaaatagtttcagtaggtcccagcttttactttttccatttaaaccttcttttctccatttcttccctttggcttaagaataaaagaaaaggtacattgctagaattgtttctttgggagagggtaaaagattacagaattagactgttcagcctttatataaactaaatttgtcttcatctcaaccagctaatggtaggtcttatctgaatactcatgagaattttagcatctgtgaaactccatgcaccagatgtgtgtaaatttcaggaagaaagtgttgaaagcattttctctgatgttaattagatggaaataaatcactaaaacatagtttaggtaaagcctgattatgccacttttttttaactagacagggcaaagttgtttatgttagtgtacttcttgtctatcctcagttaatttacctagacaaaaagtgtcaaaggaaatgagaaaaaggttatatctgactccctccagacctaagataattccttttgatcagatacagtcagatggagtgccttggtttttgttaattttgcctctattccagctccttaccacagcggtggtgcttaaagaaaggatcatcagcaacaggtcaggatagttctacctttgggatagggctgctttccccgtgctagtatttctgtgactgttagtggcactgaggactgcaaacttttatgcaatattcttaataccctattgatattatgcactttaatcattccaaagaagccaagaatgctgtatagtgatgattccttcctaatgaattcatcttaactatttagaatgttatgtcccttttcttttggatagccaacttggtataaatgttatatggatttttctaaaatgactatataggacttaagactttgaaatgtaatttacttataaggggaaataattatgctttagcacatcattttagaaacgtcacattttagaaacattcagcttgctaacctacatgtttgggaattcattaaaaccagttgtctatatattttgtgccatgtatataagaacattacaatatatctttttctacatatgtagtatgtgcaaccagtggttctcagagtatggttctcagcccaccagctagtatcagtatcacctgggaactagttagaaatgtaaattctttggccccatcccagacatactgagtcagaaactctggaatagggcccccgcaatctgttttcacaagccctccaggtgattctgatgcacactttaaagtttaggaaccactgggctaagactctgttgagatatagagtttttcttccactcagactgatatagttatacattgttcttcatgtaaattcagcttaacctggttatctataatcttttattggcaaaagttaattctcagtactgcctatagagatacagtgtattttatgtacatacacaattagtctaattcttgataattcagttaatttagtttggcattttcctaccacttactaaaaggtttacattaaatgactgatttaaatatataggtgcaatgttctatgtttattttaattgttatgacatttaagtagctaatataattgaccggtgctaaagtctcctgtttatccataaaatgggtacattatgggcagtgtaatacaagctttcttttcattgcctagtactttaccagcagaccacagttttgccctggctagaccaaccctcagaacaaaatcatcattccttgtatttatatttgtatctgagatagtaaacaagatggctggccaggtcaacatggcaccttaacttatttttttaataggtaaaacttcttcaaaagtagcttgctttgtataagaactaagctatcagtatagatatagctatccttggagcttatgtttcagacaagaattatttactaaaataaataataaacaagataatgcattatacaatttgggcatttctcgtttctcaagtgtatgcatcatggtaaatataaactaaccacaagataggtagattgattcatttcattttaatctccttgtgtaattcagtacctccataattgttctaatcttcttcccactgtttacaaattaccagttaattaactcgtgaaagaaaaattcacatatcagaataaaaataaatgtatactcactttataaaaatcaccactgctgtctttccttaatactagcagtggaaatgtaagtggcttactctacaaattttggtgctggcaaatacataggcaaactgttgggagctgctctagttacattcctcccttcttattccctttttctcttcctcactttattgcataacatattcctgtacccaaagcattctaccacagttctatttgactcccacttgtaataactcctttaaaaaattccatgtttaaccatatgaccctgcttgcttactcatattctccctccctctccccttcctttctctctcttccagaagtcatttgcctggtttgaaatattttgtagggattgcttattatattattttagctgatgaacctcaggacaacgtctacacacacacacatacatacacgcacacaaaatctcagctgttgaagagtgggcttggaatcagacttctgtgtccagtaaaaaactcctgcactgaagtcattgtgacttgagtagttacagactgattccagtgaacttgatctaatttcttttgatctaatgaatgtgtctgcttaccttgtttccttttaattgataagctccaagtagttgctaattttttgacaactttaaatgagtttcattcacttcttttacttaatgttttaagtatagtaccaataatttcattaacctgttctcaagtggtttagctaccattctgccatttttaatttttatttaattttatttgcttgagcacactgatcaaccactgaactgccttcttccattgtcctgcaatgatataagggttacatttttgtgtatatggctttcatagttgggatttcagagcactgataccagatattttcagtttgttctctgggggaatttcatttgcatctatgtttttagctatctgtgataacttgttaaatattaaaaagatattttgcttctattggaacatttgtatactcgcaactatatttctgtaaacagctgcagtcaaaaataaaacactgaaagttttcattttgcagtgg

SEQ ID NO: 160394 - DNA, 13229 bp, Homo sapiens
  Payload ID: 11364
  Gene Symbol: NFAT5
  Gene Name: nuclear factor of activated T-cells 5, tonicity-responsive
  Uniprot ID: O94916
  ENST ID: ENST00000354436
  CDS Start-End: 319-4914
gcggcggtggcggcgaccgtcagttttcgctgaggagaaacacgaaacggaccctttggctctcccccttccccttccccgtcctgaacccctctcctggtcaccgagaatcagtccccgtggagttccccctccacctcgccatcgtttcctcggtcctcggcccagtggaagtcactaccctcgaggaggaggcagcggcagccgccctcgcgtcgccgcccccggttcggtgcccgcggtcccggagaggaggtgccgccgccaccgccgctccccccctcccgctgccctcgggccgggctgggtcgagctgcgatgccctcggacttcatctcattgctcagcgcggacctagacctggaatcgcccaagtccctctactcgcgagaatctgtctatgatcttctcccaaaggagttacagttacctccatctagagaaacatctgtagcatcaatgagtcagacaagcggtggtgaggcaggctcgcctcctccagctgttgttgctgctgatgcttcttcagctccctcctcttcctccatgggcggtgcttgcagctcctttaccacctcttccagccctaccatttattctacctcagtcaccgacagcaaggctatgcaagtggagagctgctcctcagccgtgggggtaagtaacagaggggtaagtgaaaagcagttaaccagtaacacagttcagcagcatccatcaacaccgaagaggcacacagtcttgtacatctcaccaccacctgaggacttgctggataacagtcggatgtcctgccaggatgaggggtgtggattggaatctgagcagagctgcagtatgtggatggaggattccccctccaacttcagtaacatgagcaccagttcctacaatgataacactgaggtacctcgtaaatcacgaaaacgaaatccaaagcagaggccgggggtcaaacgacgagattgtgaagaatctaatatggatatatttgatgccgacagtgccaaagcacctcactatgtgctttctcagcttaccacggacaacaaaggcaactcaaaagcgggaaatggaacattggaaaaccaaaaaggaactggagtaaagaagagccctatgttgtgtggacaatatcctgttaaaagtgagggaaaggagctgaagatagttgtacaacctgagacacagcaccgagctcggtacctgactgagggcagccgtggctcagtgaaagatagaacacagcaaggctttcctacagtaaagctggaaggccataatgaacctgtagtgttgcaagtgtttgtgggcaacgactctggacgagtgaaaccacatggattttatcaggcctgcagagtaactggacgaaatacaactccttgcaaagaagtggacattgaaggcactactgttatagaagtcggccttgatcctagcaacaacatgacactggcggtggactgcgtagggatattgaaattgaggaatgctgatgtcgaagccagaataggaattgctggttccaagaagaaaagcactcgtgccagattggtttttcgagttaatatcatgaggaaagatggctccactttgacactgcaaacaccctcttctccaattttgtgtactcagccagcaggagtgccagaaatcttaaagaaaagcttgcatagctgttcagtgaaaggagaagaagaagtgtttttaatcggcaagaactttctgaaaggaactaaagttattttccaagaaaatgtttctgatgaaaactcttggaagtcagaagctgaaattgatatggaactatttcatcagaatcatcttattgtgaaggttcctccctatcatgaccaacatataactttgcctgtgtcagtgggaatatatgtagtgacaaatgctggaagatctcatgatgttcaaccattcacttacactccagacccagcagcagctggtgctttgaatgtaaatgtgaagaaggaaatatctagtccagcaagaccttgctcttttgaagaggccatgaaagcaatgaaaactactggatgtaatttagataaggtaaatattatccctaatgccctgatgactccactcataccaagcagtatgattaagagtgaagatgttactccaatggaagtaacagcagaaaaaagatcttccactatttttaagactacaaagtctgttggatcaactcagcaaacattagaaaacatctcaaacatagcaggaaatggctctttttcatcaccatcatcttcccacctaccttctgaaaatgaaaaacagcagcagattcagcccaaggcatacaacccagagaccctgacaactattcaaacccaggacatctcacagcctggtacttttccagcagtttctgcttctagtcagctgcccaacagcgatgcactattgcagcaggctacacagtttcagacaagagaaactcagtctagagagatattacagtcagatggtacagtggttaatttgtcacaactgactgaggcatcacaacaacagcagcagtcaccactacaagaacaagcacagactttacagcagcagatttcatcaaatatttttccatcaccaaatagtgtgagtcagcttcagaatactattcagcagctgcaagcagggagtttcacaggcagtactgctagtggcagcagtggaagtgttgacttggtccaacaagttttagaggcacagcagcagttatcttcagttttattttctgctccagatggtaatgagaatgttcaagagcagcttagtgcagatatttttcaacaagtcagtcaaattcagagtggtgtaagccctggaatgttttcctcaacagagccaacagtccataccagaccagataatttattacctggaagagctgaaagtgttcatccacagtctgaaaacacgttatctaatcaacagcagcagcagcagcagcaacagcaagtgatggaatcttcagccgcaatggtgatggagatgcaacagagtatctgccaggcagctgcccagattcagtcagagttattcccttcaactgcttcagcaaatggaaaccttcagcaatcgccagtttaccagcagacttctcacatgatgagtgcattgtctaccaatgaggatatgcaaatgcagtgtgaattgttttcttctcctcctgcagtttctggaaatgaaacttctacaactaccacacagcaggttgcaacccctggcactaccatgtttcagacatcaagttcaggagatggagaagaaactggaacacaagcaaaacagattcagaacagtgtctttcagaccatggtccaaatgcaacatagtggggacaatcaacctcaagttaaccttttttcatccacaaaaagtatgatgagtgttcagaatagtggtacccaacaacaaggtaatggtttattccagcaagggaatgagatgatgtcacttcaatctggaaattttttgcagcagtcttctcattcacaggcccaactttttcatcctcaaaatcctattgccgatgctcagaacctttcccaggaaactcaaggttctctctttcatagtccaaatcctattgtccacagtcagacttctacaacctcctctgaacaaatgcagcctccaatgtttcactctcaaagtaccattgctgtgttacagggctcttcagttcctcaagaccagcagtcaaccaacatatttctttcccagagtcccatgaataatcttcagactaacacagtagcccaagaagcattttttgcagcaccgaactcaatttctccacttcagtcaacatcaaacagtgaacaacaagctgctttccaacagcaagctccaatatcacacatccagactcctatgctttcccaagaacaggcacaacccccgcagcagggtttatttcagcctcaggtggccctgggctcccttccacctaatccaatgcctcaaagccaacaaggaaccatgttccagtcacagcactcaatagttgccatgcagagtaactctccatcccaggaacagcagcagcagcagcaacagcagcagcaacagcagcagcaacaacaacagagcattttattcagtaatcagaataccatggctacaatggcgtctccaaagcaaccaccaccaaacatgatattcaacccaaatcaaaatccaatggctaatcaggagcaacagaaccagtcaatttttcaccaacaaagtaacatggccccaatgaatcaagagcaacagcccatgcaatttcagagtcagtccacagtttcctcacttcagaacccaggtcctacccagtcggaatcatcacagacccccttgttccatagctctcctcagattcagttggtacaagggtcacctagttctcaagagcagcaagtaactctcttcttatctccagcatccatgtctgccttgcagaccagtataaatcaacaagatatgcaacagtctcctctttattcccctcagaacaacatgcctggaattcaaggagccacatcttcgcctcaaccacaggctactttatttcacaacacagcaggaggcacaatgaaccaactgcagaattctcctggctcatctcagcagacatcaggaatgttcttatttggcattcaaaataactgtagtcagcttttaacctctggaccagctacattgcctgatcagttgatggccataagtcagccaggccaaccacaaaacgagggccagccacctgtgacaacacttctttctcagcaaatgccagagaattctccactggcatcctctataaacaccaaccagaacatcgaaaagattgatttgcttgtttcattgcaaaaccaagggaacaacttgactggctccttttaactggatataaattccacgaagaaaatcctgattccaagatgtcctgagatcttgtggttccatgagaattattactttaaaaacaaaacaaaatataaaaaactgtgtttgagtaaactgatagattttactctgactgcaaaagagcacacctatgctgcttgttgcagtaactaaccaccaatgttaacatcttcatattttatattcctaataacagtgatgactgagaatctatttgagtttccagctggcagaattaattgttattattttcctaggcgcaatttccttaaacgtacagtttaaattcaaggctggaccactcagttattattgctattagaaaataatatatcatgtttacttttgttcttcattattttctttcctgcattgttttagtcaagtaatggcttttgaaaaagtaaagttcaataataactaaggctgtgatttttttcaatataaaaggcacagctgttggccaaagtgaaggaatcttttttcagttttattggagaaactgaagggtaacattctaacaagtaaactgtatgtgcagataaaagtactcttgatttaacacaaaggcagatgatacacttataaaactgggaacagctggaatgcttcttgattttattttttcagagagttgttagttctctgggtttctactaaggggtttagccataactgtgcatagaaaaataattatctgtaaaaaatgaaggggataatatatgataaattatgttctgatatcctcctacagtagtttaaattgacagaaaaatttgaatgttttcttcttaacccagtcttaggctggtattccctttttatatatatctatattacttttcacctctttttcactttactttagagaactattaatatactactggcttcatgaccctgtagcatctttggccactttaatctagggtgacctagcaatcctgcagcacagggcagagagtactgtcttaggaattattaggagttgattcctgagaaacaacacatttttccccatgaacggtgctgttctgaagtcttcaaatttttccctctaataggaaacagtataaattttaattaaaaaaaaaaggcaaactaaaatttcttgaaatatcacttctccctgatctgcagtgagtataaattcacttgtcacctcagtgctttacagtttgaagtggtcacttacctgatggttcccacaagccttaggctttacagggttgtatcattgacttaaaatgaagaattaacttgtgttacatctataaagagcaaaataacacactccagaacttggcagttgtagcattagttatacagttttgggtgttcttgccacccgtgggatgcctgcttctcactaccacctgtgtctggacacatgcttatgtctcattttccttttggcatgtggaaagctgtcaatgcagtgtaaggccaacgtgtgtgtggcttctatgtgttgagataatgttttggtatccttgtccgtttcatttattttttaagtgtacaaaaaataacctgttaattgttgaaggctacttttctgttctttttttttttttttttctatcctgtacatttagttgaactgtgcggaattgtggtgttggttttgtttacacagccagatttttccttctttttgttttgtgatgatcttcctttgttctttgaatgtgctcttttgtctttttctcttttttctcatgttttcttccctccacctccacccctttctttctttctctctctgattgagaggcattgaattacgttttcagtagtacaggcttcttgccgatatgaagggaacttttcagaaagagacctactctgggtcatttaattttgaatacagttttcaatcgttcaagttttggatggtttatatctaatgtgtgtttcatttttttggaaagctatattttgtatttaggaaatggtatactattttgctatttgtactgagtgagtacattggcataaatatagaaatttatatatatacatatatataaactattcttttttgccacacatttttgtggtaaatttgtgagtttgtctgatgttctaccacaacgtggcgtctgataacagtgagggggggtggggtttgttatgtctttattgagtatttaagtatcttttgaaacaaatgacctgttcatctgtggccattccatcaggcagttagttccttgatgtcagtagtgggctaaaggcagcttactgtgtgtttgctggagctttcactcagccaagtgttagagtcaggaaacccattgaggcaatggcgtcaaatggtgtttcacaagaatgagccattcagtctttgctcactatatatttaatattttattattgttgttattgttattattaattggctttctgtattctatgccttttatttataaagacactaagaaaacccatgtttgtaattttaataacatttttcccatcttgtaatatccagagctactttataaattctctgaaccaaaagtattttcctcagtgtatctcttctcccccagcccctattgggaaaaattacccagtatagttcaggttatgaggaggatcagccacacaatccagtgcttcagtttgaaaatgtaaaattctaaccctaaagtagggttggttgaaatttcagacaaagcaaacccagcaggtataaaaagtagtataaatacaaatctgtaagttatttttgaattttctgaacttttttctaagagattacataggagactaaagaaatctatctgttcaagttctaattaggatgattgttaatactgcactgtggatgaagtggcgactggcttgtgtgctgacttctgtggtttagcaagaggtttattgttatcaaatgctaattggcaatgccaagtcactgggaccaattttctgttttataatatctaagtttagaacagaatatatacctgaactgtagtggtttgatcggatggagacagaaaacccgatttttattctcataaattttgtggttatttatacaagggctgtgctatgctaccatattcttgttcaataataataggtttgttgttttttttacattgttaaatgttccttacccctaaaggtcaatgttaagtacaacattctgaaaatacaatttggctacgaagagtattcatcttctttgaagctcagtggttgatatttgtgctaataatgcaatttcctgattactgttacaagttatagctacatatgggagagactcagtgagccagcaaaggccatagaaacaacaatttattaaatgtatttatggcagaaggacctaaataaactgtgagccaccttttcttctttatattgttacatttaagtgttcttgctttcagcaactcacattaatgcttggagcttatctctttctctctctctctctctctctctgtgtgtgtgtgtgtatgtgtgtgtgtgtgtgtgtgtgtttccttattgtcattccattatatatccacaccaacatgggtgacgataattcaaagtcatattttgcctctaagcttgatcatgttacctttatgattaaagtatcatgttatttagccaatgcaaatctgttttaaaacaaatagtttaaaaaaagaacaagtttttaagggctttattatagaagaagtattaatgaaggactttccttcctccctccctttcctcccctccctgcctcccttcttcccttccatctccccctcctccctgccttctttgtttctccttcccttattcctccctccctcctttctcccttccttcctttcttccattcatccttccttgccttttatttttattttttgtaatatcacatgtgctgtagtttggaattttattctagtgcatttcttgctcatcagaacctcagctaatctacctaggaaaaatagtatcaaaggaaatgagaaagttgtatctgagtccctccagaactaagataattctttttgaccatttaagcctttataaatgcgttttgaccatttaagcctttataaatgcttgttttaggaaagtgaatctgttagatgcatcaacaaataatgaccaggacaaaacgatttaataattaaagtctcaaatcaccatggttatacattttcaccagaaatagtaatcttacaatttttcatttttctgatgaagatttctgttccaatatctgtttcctaatagattttttaaattaattagctttcctctgctttatgaccacaggttttatccctaaccgagacagctgtcttatatctgcatgccttagactgtgtggagggactccatgaagaaagaccataggttagaaaaataactcatagtatataccctagtaagtgggttagtagaatctcataacatgtattaaaaagaggttttcttctctgcttgtttgtgtcactagagcaaaattgtagagataatgctcataatgcagtaaatatcagaataatatctacaatatcatttgtggatggtcccaggtcccagtgctctagttactttacttctttttttttttttgagatggagtcttgctctgtctctcaggctagagcagtgtgcgatctcagctcactgcagcctccacctcccaggttcaagcgattctcctgcctcagcctcccaagtagccaggattacaggcaccctccactaggcccggctaattttttttgtatttttttagtagagatggggttttgccatgttggccaggctggtttcgaactcctaacctccagtgatccacctgcctcggcgtcccaaagtgctaggattacaggcatgagccaccacatccggcctaattacttctttaatccccatttatttttatgccattctagcctcatttattaataaaattatgtttttactttctctttcaggaaattttttaaattaatattttatatctagatctaatgctatggaaaagtgcctttttatcatttataatttcatttttcactatttccaaaaacacataaacaaatagtttcagtaggtcccagcttttactttttccatttaaaccttcttttctccatttcttccctttggcttaagaataaaagaaaaggtacattgctagaattgtttctttgggagagggtaaaagattacagaattagactgttcagcctttatataaactaaatttgtcttcatctcaaccagctaatggtaggtcttatctgaatactcatgagaattttagcatctgtgaaactccatgcaccagatgtgtgtaaatttcaggaagaaagtgttgaaagcattttctctgatgttaattagatggaaataaatcactaaaacatagtttaggtaaagcctgattatgccacttttttttaactagacagggcaaagttgtttatgttagtgtacttcttgtctatcctcagttaatttacctagacaaaaagtgtcaaaggaaatgagaaaaaggttatatctgactccctccagacctaagataattccttttgatcagatacagtcagatggagtgccttggtttttgttaattttgcctctattccagctccttaccacagcggtggtgcttaaagaaaggatcatcagcaacaggtcaggatagttctacctttgggatagggctgctttccccgtgctagtatttctgtgactgttagtggcactgaggactgcaaacttttatgcaatattcttaataccctattgatattatgcactttaatcattccaaagaagccaagaatgctgtatagtgatgattccttcctaatgaattcatcttaactatttagaatgttatgtcccttttcttttggatagccaacttggtataaatgttatatggatttttctaaaatgactatataggacttaagactttgaaatgtaatttacttataaggggaaataattatgctttagcacatcattttagaaacgtcacattttagaaacattcagcttgctaacctacatgtttgggaattcattaaaaccagttgtctatatattttgtgccatgtatataagaacattacaatatatctttttctacatatgtagtatgtgcaaccagtggttctcagagtatggttctcagcccaccagctagtatcagtatcacctgggaactagttagaaatgtaaattctttggccccatcccagacatactgagtcagaaactctggaatagggcccccgcaatctgttttcacaagccctccaggtgattctgatgcacactttaaagtttaggaaccactgggctaagactctgttgagatatagagtttttcttccactcagactgatatagttatacattgttcttcatgtaaattcagcttaacctggttatctataatcttttattggcaaaagttaattctcagtactgcctatagagatacagtgtattttatgtacatacacaattagtctaattcttgataattcagttaatttagtttggcattttcctaccacttactaaaaggtttacattaaatgactgatttaaatatataggtgcaatgttctatgtttattttaattgttatgacatttaagtagctaatataattgaccggtgctaaagtctcctgtttatccataaaatgggtacattatgggcagtgtaatacaagctttcttttcattgcctagtactttaccagcagaccacagttttgccctggctagaccaaccctcagaacaaaatcatcattccttgtatttatatttgtatctgagatagtaaacaagatggctggccaggtcaacatggcaccttaacttatttttttaataggtaaaacttcttcaaaagtagcttgctttgtataagaactaagctatcagtatagatatagctatccttggagcttatgtttcagacaagaattatttactaaaataaataataaacaagataatgcattatacaatttgggcatttctcgtttctcaagtgtatgcatcatggtaaatataaactaaccacaagataggtagattgattcatttcattttaatctccttgtgtaattcagtacctccataattgttctaatcttcttcccactgtttacaaattaccagttaattaactcgtgaaagaaaaattcacatatcagaataaaaataaatgtatactcactttataaaaatcaccactgctgtctttccttaatactagcagtggaaatgtaagtggcttactctacaaattttggtgctggcaaatacataggcaaactgttgggagctgctctagttacattcctcccttcttattccctttttctcttcctcactttattgcataacatattcctgtacccaaagcattctaccacagttctatttgactcccacttgtaataactcctttaaaaaattccatgtttaaccatatgaccctgcttgcttactcatattctccctccctctccccttcctttctctctcttccagaagtcatttgcctggtttgaaatattttgtagggattgcttattatattattttagctgatgaacctcaggacaacgtctacacacacacacatacatacacgcacacaaaatctcagctgttgaagagtgggcttggaatcagacttctgtgtccagtaaaaaactcctgcactgaagtcattgtgacttgagtagttacagactgattccagtgaacttgatctaatttcttttgatctaatgaatgtgtctgcttaccttgtttccttttaattgataagctccaagtagttgctaattttttgacaactttaaatgagtttcattcacttcttttacttaatgttttaagtatagtaccaataatttcattaacctgttctcaagtggtttagctaccattctgccatttttaatttttatttaattttatttgcttgagcacactgatcaaccactgaactgccttcttccattgtcctgcaatgatataagggttacatttttgtgtatatggctttcatagttgggatttcagagcactgataccagatattttcagtttgttctctgggggaatttcatttgcatctatgtttttagctatctgtgataacttgttaaatattaaaaagatattttgcttctattggaacatttgtatactcgcaactatatttctgtaaacagctgcagtcaaaaataaaacactgaaagttttcattttgcagtgga

SEQ ID NO: 160395 - DNA, 13067 bp, Homo sapiens
  Payload ID: 11364
  Gene Symbol: NFAT5
  Gene Name: nuclear factor of activated T-cells 5, tonicity-responsive
  Uniprot ID: O94916
  ENST ID: ENST00000393742
  CDS Start-End: 385-4752
ccggttcggtgcccgcggtcccggagaggaggtgccgccgccaccgccgctccccccctcccgctgccctcgggccgggctgggtcgagctgcgatgccctcggacttcatctcattgctcagcgcggacctagacctggaatcgcccaagtccctctactcgcgagaatctgtctatgatcttctcccaaaggagttacagttacctccatctagagaaacatctgtagcatcaatgagtcagacaagcggtggtgaggcaggctcgcctcctccagctgttgttgctgctggatttgcctctgaagcagggagtgtctgcattaaaaatgacctgtagttctctgcttcatagatgcttcttcagctccctcctcttcctccatgggcggtgcttgcagctcctttaccacctcttccagccctaccatttattctacctcagtcaccgacagcaaggctatgcaagtggagagctgctcctcagccgtgggggtaagtaacagaggggtaagtgaaaagcagttaaccagtaacacagttcagcagcatccatcaacaccgaagaggcacacagtcttgtacatctcaccaccacctgaggacttgctggataacagtcggatgtcctgccaggatgaggggtgtggattggaatctgagcagagctgcagtatgtggatggaggattccccctccaacttcagtaacatgagcaccagttcctacaatgataacactgaggtacctcgtaaatcacgaaaacgaaatccaaagcagaggccgggggtcaaacgacgagattgtgaagaatctaatatggatatatttgatgccgacagtgccaaagcacctcactatgtgctttctcagcttaccacggacaacaaaggcaactcaaaagcgggaaatggaacattggaaaaccaaaaaggaactggagtaaagaagagccctatgttgtgtggacaatatcctgttaaaagtgagggaaaggagctgaagatagttgtacaacctgagacacagcaccgagctcggtacctgactgagggcagccgtggctcagtgaaagatagaacacagcaaggctttcctacagtaaagctggaaggccataatgaacctgtagtgttgcaagtgtttgtgggcaacgactctggacgagtgaaaccacatggattttatcaggcctgcagagtaactggacgaaatacaactccttgcaaagaagtggacattgaaggcactactgttatagaagtcggccttgatcctagcaacaacatgacactggcggtggactgcgtagggatattgaaattgaggaatgctgatgtcgaagccagaataggaattgctggttccaagaagaaaagcactcgtgccagattggtttttcgagttaatatcatgaggaaagatggctccactttgacactgcaaacaccctcttctccaattttgtgtactcagccagcaggagtgccagaaatcttaaagaaaagcttgcatagctgttcagtgaaaggagaagaagaagtgtttttaatcggcaagaactttctgaaaggaactaaagttattttccaagaaaatgtttctgatgaaaactcttggaagtcagaagctgaaattgatatggaactatttcatcagaatcatcttattgtgaaggttcctccctatcatgaccaacatataactttgcctgtgtcagtgggaatatatgtagtgacaaatgctggaagatctcatgatgttcaaccattcacttacactccagacccagcagcagctggtgctttgaatgtaaatgtgaagaaggaaatatctagtccagcaagaccttgctcttttgaagaggccatgaaagcaatgaaaactactggatgtaatttagataaggtaaatattatccctaatgccctgatgactccactcataccaagcagtatgattaagagtgaagatgttactccaatggaagtaacagcagaaaaaagatcttccactatttttaagactacaaagtctgttggatcaactcagcaaacattagaaaacatctcaaacatagcaggaaatggctctttttcatcaccatcatcttcccacctaccttctgaaaatgaaaaacagcagcagattcagcccaaggcatacaacccagagaccctgacaactattcaaacccaggacatctcacagcctggtacttttccagcagtttctgcttctagtcagctgcccaacagcgatgcactattgcagcaggctacacagtttcagacaagagaaactcagtctagagagatattacagtcagatggtacagtggttaatttgtcacaactgactgaggcatcacaacaacagcagcagtcaccactacaagaacaagcacagactttacagcagcagatttcatcaaatatttttccatcaccaaatagtgtgagtcagcttcagaatactattcagcagctgcaagcagggagtttcacaggcagtactgctagtggcagcagtggaagtgttgacttggtccaacaagttttagaggcacagcagcagttatcttcagttttattttctgctccagatggtaatgagaatgttcaagagcagcttagtgcagatatttttcaacaagtcagtcaaattcagagtggtgtaagccctggaatgttttcctcaacagagccaacagtccataccagaccagataatttattacctggaagagctgaaagtgttcatccacagtctgaaaacacgttatctaatcaacagcagcagcagcagcagcaacagcaagtgatggaatcttcagccgcaatggtgatggagatgcaacagagtatctgccaggcagctgcccagattcagtcagagttattcccttcaactgcttcagcaaatggaaaccttcagcaatcgccagtttaccagcagacttctcacatgatgagtgcattgtctaccaatgaggatatgcaaatgcagtgtgaattgttttcttctcctcctgcagtttctggaaatgaaacttctacaactaccacacagcaggttgcaacccctggcactaccatgtttcagacatcaagttcaggagatggagaagaaactggaacacaagcaaaacagattcagaacagtgtctttcagaccatggtccaaatgcaacatagtggggacaatcaacctcaagttaaccttttttcatccacaaaaagtatgatgagtgttcagaatagtggtacccaacaacaaggtaatggtttattccagcaagggaatgagatgatgtcacttcaatctggaaattttttgcagcagtcttctcattcacaggcccaactttttcatcctcaaaatcctattgccgatgctcagaacctttcccaggaaactcaaggttctctctttcatagtccaaatcctattgtccacagtcagacttctacaacctcctctgaacaaatgcagcctccaatgtttcactctcaaagtaccattgctgtgttacagggctcttcagttcctcaagaccagcagtcaaccaacatatttctttcccagagtcccatgaataatcttcagactaacacagtagcccaagaagcattttttgcagcaccgaactcaatttctccacttcagtcaacatcaaacagtgaacaacaagctgctttccaacagcaagctccaatatcacacatccagactcctatgctttcccaagaacaggcacaacccccgcagcagggtttatttcagcctcaggtggccctgggctcccttccacctaatccaatgcctcaaagccaacaaggaaccatgttccagtcacagcactcaatagttgccatgcagagtaactctccatcccaggaacagcagcagcagcagcaacagcagcagcaacagcagcagcaacaacaacagagcattttattcagtaatcagaataccatggctacaatggcgtctccaaagcaaccaccaccaaacatgatattcaacccaaatcaaaatccaatggctaatcaggagcaacagaaccagtcaatttttcaccaacaaagtaacatggccccaatgaatcaagagcaacagcccatgcaatttcagagtcagtccacagtttcctcacttcagaacccaggtcctacccagtcggaatcatcacagacccccttgttccatagctctcctcagattcagttggtacaagggtcacctagttctcaagagcagcaagtaactctcttcttatctccagcatccatgtctgccttgcagaccagtataaatcaacaagatatgcaacagtctcctctttattcccctcagaacaacatgcctggaattcaaggagccacatcttcgcctcaaccacaggctactttatttcacaacacagcaggaggcacaatgaaccaactgcagaattctcctggctcatctcagcagacatcaggaatgttcttatttggcattcaaaataactgtagtcagcttttaacctctggaccagctacattgcctgatcagttgatggccataagtcagccaggccaaccacaaaacgagggccagccacctgtgacaacacttctttctcagcaaatgccagagaattctccactggcatcctctataaacaccaaccagaacatcgaaaagattgatttgcttgtttcattgcaaaaccaagggaacaacttgactggctccttttaactggatataaattccacgaagaaaatcctgattccaagatgtcctgagatcttgtggttccatgagaattattactttaaaaacaaaacaaaatataaaaaactgtgtttgagtaaactgatagattttactctgactgcaaaagagcacacctatgctgcttgttgcagtaactaaccaccaatgttaacatcttcatattttatattcctaataacagtgatgactgagaatctatttgagtttccagctggcagaattaattgttattattttcctaggcgcaatttccttaaacgtacagtttaaattcaaggctggaccactcagttattattgctattagaaaataatatatcatgtttacttttgttcttcattattttctttcctgcattgttttagtcaagtaatggcttttgaaaaagtaaagttcaataataactaaggctgtgatttttttcaatataaaaggcacagctgttggccaaagtgaaggaatcttttttcagttttattggagaaactgaagggtaacattctaacaagtaaactgtatgtgcagataaaagtactcttgatttaacacaaaggcagatgatacacttataaaactgggaacagctggaatgcttcttgattttattttttcagagagttgttagttctctgggtttctactaaggggtttagccataactgtgcatagaaaaataattatctgtaaaaaatgaaggggataatatatgataaattatgttctgatatcctcctacagtagtttaaattgacagaaaaatttgaatgttttcttcttaacccagtcttaggctggtattccctttttatatatatctatattacttttcacctctttttcactttactttagagaactattaatatactactggcttcatgaccctgtagcatctttggccactttaatctagggtgacctagcaatcctgcagcacagggcagagagtactgtcttaggaattattaggagttgattcctgagaaacaacacatttttccccatgaacggtgctgttctgaagtcttcaaatttttccctctaataggaaacagtataaattttaattaaaaaaaaaaggcaaactaaaatttcttgaaatatcacttctccctgatctgcagtgagtataaattcacttgtcacctcagtgctttacagtttgaagtggtcacttacctgatggttcccacaagccttaggctttacagggttgtatcattgacttaaaatgaagaattaacttgtgttacatctataaagagcaaaataacacactccagaacttggcagttgtagcattagttatacagttttgggtgttcttgccacccgtgggatgcctgcttctcactaccacctgtgtctggacacatgcttatgtctcattttccttttggcatgtggaaagctgtcaatgcagtgtaaggccaacgtgtgtgtggcttctatgtgttgagataatgttttggtatccttgtccgtttcatttattttttaagtgtacaaaaaataacctgttaattgttgaaggctacttttctgttctttttttttttttttttctatcctgtacatttagttgaactgtgcggaattgtggtgttggttttgtttacacagccagatttttccttctttttgttttgtgatgatcttcctttgttctttgaatgtgctcttttgtctttttctcttttttctcatgttttcttccctccacctccacccctttctttctttctctctctgattgagaggcattgaattacgttttcagtagtacaggcttcttgccgatatgaagggaacttttcagaaagagacctactctgggtcatttaattttgaatacagttttcaatcgttcaagttttggatggtttatatctaatgtgtgtttcatttttttggaaagctatattttgtatttaggaaatggtatactattttgctatttgtactgagtgagtacattggcataaatatagaaatttatatatatacatatatataaactattcttttttgccacacatttttgtggtaaatttgtgagtttgtctgatgttctaccacaacgtggcgtctgataacagtgagggggggtggggtttgttatgtctttattgagtatttaagtatcttttgaaacaaatgacctgttcatctgtggccattccatcaggcagttagttccttgatgtcagtagtgggctaaaggcagcttactgtgtgtttgctggagctttcactcagccaagtgttagagtcaggaaacccattgaggcaatggcgtcaaatggtgtttcacaagaatgagccattcagtctttgctcactatatatttaatattttattattgttgttattgttattattaattggctttctgtattctatgccttttatttataaagacactaagaaaacccatgtttgtaattttaataacatttttcccatcttgtaatatccagagctactttataaattctctgaaccaaaagtattttcctcagtgtatctcttctcccccagcccctattgggaaaaattacccagtatagttcaggttatgaggaggatcagccacacaatccagtgcttcagtttgaaaatgtaaaattctaaccctaaagtagggttggttgaaatttcagacaaagcaaacccagcaggtataaaaagtagtataaatacaaatctgtaagttatttttgaattttctgaacttttttctaagagattacataggagactaaagaaatctatctgttcaagttctaattaggatgattgttaatactgcactgtggatgaagtggcgactggcttgtgtgctgacttctgtggtttagcaagaggtttattgttatcaaatgctaattggcaatgccaagtcactgggaccaattttctgttttataatatctaagtttagaacagaatatatacctgaactgtagtggtttgatcggatggagacagaaaacccgatttttattctcataaattttgtggttatttatacaagggctgtgctatgctaccatattcttgttcaataataataggtttgttgttttttttacattgttaaatgttccttacccctaaaggtcaatgttaagtacaacattctgaaaatacaatttggctacgaagagtattcatcttctttgaagctcagtggttgatatttgtgctaataatgcaatttcctgattactgttacaagttatagctacatatgggagagactcagtgagccagcaaaggccatagaaacaacaatttattaaatgtatttatggcagaaggacctaaataaactgtgagccaccttttcttctttatattgttacatttaagtgttcttgctttcagcaactcacattaatgcttggagcttatctctttctctctctctctctctctctctgtgtgtgtgtgtgtatgtgtgtgtgtgtgtgtgtgtgtttccttattgtcattccattatatatccacaccaacatgggtgacgataattcaaagtcatattttgcctctaagcttgatcatgttacctttatgattaaagtatcatgttatttagccaatgcaaatctgttttaaaacaaatagtttaaaaaaagaacaagtttttaagggctttattatagaagaagtattaatgaaggactttccttcctccctccctttcctcccctccctgcctcccttcttcccttccatctccccctcctccctgccttctttgtttctccttcccttattcctccctccctcctttctcccttccttcctttcttccattcatccttccttgccttttatttttattttttgtaatatcacatgtgctgtagtttggaattttattctagtgcatttcttgctcatcagaacctcagctaatctacctaggaaaaatagtatcaaaggaaatgagaaagttgtatctgagtccctccagaactaagataattctttttgaccatttaagcctttataaatgcgttttgaccatttaagcctttataaatgcttgttttaggaaagtgaatctgttagatgcatcaacaaataatgaccaggacaaaacgatttaataattaaagtctcaaatcaccatggttatacattttcaccagaaatagtaatcttacaatttttcatttttctgatgaagatttctgttccaatatctgtttcctaatagattttttaaattaattagctttcctctgctttatgaccacaggttttatccctaaccgagacagctgtcttatatctgcatgccttagactgtgtggagggactccatgaagaaagaccataggttagaaaaataactcatagtatataccctagtaagtgggttagtagaatctcataacatgtattaaaaagaggttttcttctctgcttgtttgtgtcactagagcaaaattgtagagataatgctcataatgcagtaaatatcagaataatatctacaatatcatttgtggatggtcccaggtcccagtgctctagttactttacttctttttttttttttgagatggagtcttgctctgtctctcaggctagagcagtgtgcgatctcagctcactgcagcctccacctcccaggttcaagcgattctcctgcctcagcctcccaagtagccaggattacaggcaccctccactaggcccggctaattttttttgtatttttttagtagagatggggttttgccatgttggccaggctggtttcgaactcctaacctccagtgatccacctgcctcggcgtcccaaagtgctaggattacaggcatgagccaccacatccggcctaattacttctttaatccccatttatttttatgccattctagcctcatttattaataaaattatgtttttactttctctttcaggaaattttttaaattaatattttatatctagatctaatgctatggaaaagtgcctttttatcatttataatttcatttttcactatttccaaaaacacataaacaaatagtttcagtaggtcccagcttttactttttccatttaaaccttcttttctccatttcttccctttggcttaagaataaaagaaaaggtacattgctagaattgtttctttgggagagggtaaaagattacagaattagactgttcagcctttatataaactaaatttgtcttcatctcaaccagctaatggtaggtcttatctgaatactcatgagaattttagcatctgtgaaactccatgcaccagatgtgtgtaaatttcaggaagaaagtgttgaaagcattttctctgatgttaattagatggaaataaatcactaaaacatagtttaggtaaagcctgattatgccacttttttttaactagacagggcaaagttgtttatgttagtgtacttcttgtctatcctcagttaatttacctagacaaaaagtgtcaaaggaaatgagaaaaaggttatatctgactccctccagacctaagataattccttttgatcagatacagtcagatggagtgccttggtttttgttaattttgcctctattccagctccttaccacagcggtggtgcttaaagaaaggatcatcagcaacaggtcaggatagttctacctttgggatagggctgctttccccgtgctagtatttctgtgactgttagtggcactgaggactgcaaacttttatgcaatattcttaataccctattgatattatgcactttaatcattccaaagaagccaagaatgctgtatagtgatgattccttcctaatgaattcatcttaactatttagaatgttatgtcccttttcttttggatagccaacttggtataaatgttatatggatttttctaaaatgactatataggacttaagactttgaaatgtaatttacttataaggggaaataattatgctttagcacatcattttagaaacgtcacattttagaaacattcagcttgctaacctacatgtttgggaattcattaaaaccagttgtctatatattttgtgccatgtatataagaacattacaatatatctttttctacatatgtagtatgtgcaaccagtggttctcagagtatggttctcagcccaccagctagtatcagtatcacctgggaactagttagaaatgtaaattctttggccccatcccagacatactgagtcagaaactctggaatagggcccccgcaatctgttttcacaagccctccaggtgattctgatgcacactttaaagtttaggaaccactgggctaagactctgttgagatatagagtttttcttccactcagactgatatagttatacattgttcttcatgtaaattcagcttaacctggttatctataatcttttattggcaaaagttaattctcagtactgcctatagagatacagtgtattttatgtacatacacaattagtctaattcttgataattcagttaatttagtttggcattttcctaccacttactaaaaggtttacattaaatgactgatttaaatatataggtgcaatgttctatgtttattttaattgttatgacatttaagtagctaatataattgaccggtgctaaagtctcctgtttatccataaaatgggtacattatgggcagtgtaatacaagctttcttttcattgcctagtactttaccagcagaccacagttttgccctggctagaccaaccctcagaacaaaatcatcattccttgtatttatatttgtatctgagatagtaaacaagatggctggccaggtcaacatggcaccttaacttatttttttaataggtaaaacttcttcaaaagtagcttgctttgtataagaactaagctatcagtatagatatagctatccttggagcttatgtttcagacaagaattatttactaaaataaataataaacaagataatgcattatacaatttgggcatttctcgtttctcaagtgtatgcatcatggtaaatataaactaaccacaagataggtagattgattcatttcattttaatctccttgtgtaattcagtacctccataattgttctaatcttcttcccactgtttacaaattaccagttaattaactcgtgaaagaaaaattcacatatcagaataaaaataaatgtatactcactttataaaaatcaccactgctgtctttccttaatactagcagtggaaatgtaagtggcttactctacaaattttggtgctggcaaatacataggcaaactgttgggagctgctctagttacattcctcccttcttattccctttttctcttcctcactttattgcataacatattcctgtacccaaagcattctaccacagttctatttgactcccacttgtaataactcctttaaaaaattccatgtttaaccatatgaccctgcttgcttactcatattctccctccctctccccttcctttctctctcttccagaagtcatttgcctggtttgaaatattttgtagggattgcttattatattattttagctgatgaacctcaggacaacgtctacacacacacacatacatacacgcacacaaaatctcagctgttgaagagtgggcttggaatcagacttctgtgtccagtaaaaaactcctgcactgaagtcattgtgacttgagtagttacagactgattccagtgaacttgatctaatttcttttgatctaatgaatgtgtctgcttaccttgtttccttttaattgataagctccaagtagttgctaattttttgacaactttaaatgagtttcattcacttcttttacttaatgttttaagtatagtaccaataatttcattaacctgttctcaagtggtttagctaccattctgccatttttaatttttatttaattttatttgcttgagcacactgatcaaccactgaactgccttcttccattgtcctgcaatgatataagggttacatttttgtgtatatggctttcatagttgggatttcagagcactgataccagatattttcagtttgttctctgggggaatttcatttgcatctatgtttttagctatctgtgataacttgttaaatattaaaaagatattttgcttctattggaacatttgtatactcgcaactatatttctgtaaacagctgcagtcaaaaataaaacactgaaagttttcattttgcagtgga

SEQ ID NO: 160396 - DNA, 14219 bp, Homo sapiens
  Payload ID: 11364
  Gene Symbol: NFAT5
  Gene Name: nuclear factor of activated T-cells 5, tonicity-responsive
  ENST ID: ENST00000426654
  CDS Start-End: 1209-1508
tgcaacggaaacttttggctccacgaacagaaaagcaagagcaaaaactcagttaaatgcgttcttcctccatctttgcctagtccaaaaggaaaaaaaaagaaacagaaaaaagaaaaactgtttggaagagtagcgttgaggtttgctttttacctgtttttcctctagaacagccaggtggattcacatgatccaattttttaattgtcttctatgtcccactccgaataacccggatgccccagcacaatcagagagatcgttttttttaaaaaaaatttcagcctccaaaggtaggaggggagtgttaggggagaaagtactttaattaaaaatcaataactcgaggtttttgggatacggtttgccatttcctaattaagaaatgggtttgacagtccctttgtacacactgctatgcaaaccccaaagggttggcggctgtccgggcgatgacactccggtcccctgcgagaccccgggccagccaggcccgtccgccgccggcctctggggtccgtccccggctcgcgcagacctctcgcttctctcggctctgtctcctgcgctcagctctgctcggggccggccgcctcaggctcgccgccaccaggtcgttgcaaataccttttccctccccggggccccagcgcgcggccacctcccagcctccccccctcccaccctggcagcggggccctttcccggctcaggaacagcagcagcccgggccgcgccggcaggaagcgaggcccatgttgctgctgttccctggcgcgcctccccgccctccgggggccgccacggctcttccgcgctcccgggcacccccctccgcgcctgcgctgtgccccacgggggcggggctcagattcctgtcagcggcggcggcggtggcggcgaccgtcagttttcgctgaggagaaacacgaaacggaccctttggctctcccccttccccttccccgtcctgaacccctctcctggtcaccgagaatcagtccccgtggagttccccctccacctcgccatcgtttcctcggtcctcggcccagtggaagtcactaccctcgaggaggaggcagcggcagccgccctcgcgtcgccgcccccggttcggtgcccgcggtcccggagaggaggtgccgccgccaccgccgctccccccctcccgctgccctcgggccgggctgggtcgagctgcgatgccctcggacttcatctcattgctcagcgcggacctagacctggaatcgcccaagtccctctactcgcgagattctctgaagttacacccatcacagaattttcatagagctggactattggaagaatctgtctatgatcttctcccaaaggagttacagttacctccatctagagaaacatctgtagcatcaatgagtcagacaagcggtggtgaggcaggctcgcctcctccagctgttgttgctgctggatttgcctctgaagcagggagtgtctgcattaaaaatgacctgtagttctctgcttcatagatgcttcttcagctccctcctcttcctccatgggcggtgcttgcagctcctttaccacctcttccagccctaccatttattctacctcagtcaccgacagcaaggctatgcaagtggagagctgctcctcagccgtgggggtaagtaacagaggggtaagtgaaaagcagttaaccagtaacacagttcagcagcatccatcaacaccgaagaggcacacagtcttgtacatctcaccaccacctgaggacttgctggataacagtcggatgtcctgccaggatgaggggtgtggattggaatctgagcagagctgcagtatgtggatggaggattccccctccaacttcagtaacatgagcaccagttcctacaatgataacactgaggtacctcgtaaatcacgaaaacgaaatccaaagcagaggccgggggtcaaacgacgagattgtgaagaatctaatatggatatatttgatgccgacagtgccaaagcacctcactatgtgctttctcagcttaccacggacaacaaaggcaactcaaaagcgggaaatggaacattggaaaaccaaaaaggaactggagtaaagaagagccctatgttgtgtggacaatatcctgttaaaagtgagggaaaggagctgaagatagttgtacaacctgagacacagcaccgagctcggtacctgactgagggcagccgtggctcagtgaaagatagaacacagcaaggctttcctacagtaaagctggaaggccataatgaacctgtagtgttgcaagtgtttgtgggcaacgactctggacgagtgaaaccacatggattttatcaggcctgcagagtaactggacgaaatacaactccttgcaaagaagtggacattgaaggcactactgttatagaagtcggccttgatcctagcaacaacatgacactggcggtggactgcgtagggatattgaaattgaggaatgctgatgtcgaagccagaataggaattgctggttccaagaagaaaagcactcgtgccagattggtttttcgagttaatatcatgaggaaagatggctccactttgacactgcaaacaccctcttctccaattttgtgtactcagccagcaggagtgccagaaatcttaaagaaaagcttgcatagctgttcagtgaaaggagaagaagaagtgtttttaatcggcaagaactttctgaaaggaactaaagttattttccaagaaaatgtttctgatgaaaactcttggaagtcagaagctgaaattgatatggaactatttcatcagaatcatcttattgtgaaggttcctccctatcatgaccaacatataactttgcctgtgtcagtgggaatatatgtagtgacaaatgctggaagatctcatgatgttcaaccattcacttacactccagacccagcagcagctggtgctttgaatgtaaatgtgaagaaggaaatatctagtccagcaagaccttgctcttttgaagaggccatgaaagcaatgaaaactactggatgtaatttagataaggtaaatattatccctaatgccctgatgactccactcataccaagcagtatgattaagagtgaagatgttactccaatggaagtaacagcagaaaaaagatcttccactatttttaagactacaaagtctgttggatcaactcagcaaacattagaaaacatctcaaacatagcaggaaatggctctttttcatcaccatcatcttcccacctaccttctgaaaatgaaaaacagcagcagattcagcccaaggcatacaacccagagaccctgacaactattcaaacccaggacatctcacagcctggtacttttccagcagtttctgcttctagtcagctgcccaacagcgatgcactattgcagcaggctacacagtttcagacaagagaaactcagtctagagagatattacagtcagatggtacagtggttaatttgtcacaactgactgaggcatcacaacaacagcagcagtcaccactacaagaacaagcacagactttacagcagcagatttcatcaaatatttttccatcaccaaatagtgtgagtcagcttcagaatactattcagcagctgcaagcagggagtttcacaggcagtactgctagtggcagcagtggaagtgttgacttggtccaacaagttttagaggcacagcagcagttatcttcagttttattttctgctccagatggtaatgagaatgttcaagagcagcttagtgcagatatttttcaacaagtcagtcaaattcagagtggtgtaagccctggaatgttttcctcaacagagccaacagtccataccagaccagataatttattacctggaagagctgaaagtgttcatccacagtctgaaaacacgttatctaatcaacagcagcagcagcagcagcaacagcaagtgatggaatcttcagccgcaatggtgatggagatgcaacagagtatctgccaggcagctgcccagattcagtcagagttattcccttcaactgcttcagcaaatggaaaccttcagcaatcgccagtttaccagcagacttctcacatgatgagtgcattgtctaccaatgaggatatgcaaatgcagtgtgaattgttttcttctcctcctgcagtttctggaaatgaaacttctacaactaccacacagcaggttgcaacccctggcactaccatgtttcagacatcaagttcaggagatggagaagaaactggaacacaagcaaaacagattcagaacagtgtctttcagaccatggtccaaatgcaacatagtggggacaatcaacctcaagttaaccttttttcatccacaaaaagtatgatgagtgttcagaatagtggtacccaacaacaaggtaatggtttattccagcaagggaatgagatgatgtcacttcaatctggaaattttttgcagcagtcttctcattcacaggcccaactttttcatcctcaaaatcctattgccgatgctcagaacctttcccaggaaactcaaggttctctctttcatagtccaaatcctattgtccacagtcagacttctacaacctcctctgaacaaatgcagcctccaatgtttcactctcaaagtaccattgctgtgttacagggctcttcagttcctcaagaccagcagtcaaccaacatatttctttcccagagtcccatgaataatcttcagactaacacagtagcccaagaagcattttttgcagcaccgaactcaatttctccacttcagtcaacatcaaacagtgaacaacaagctgctttccaacagcaagctccaatatcacacatccagactcctatgctttcccaagaacaggcacaacccccgcagcagggtttatttcagcctcaggtggccctgggctcccttccacctaatccaatgcctcaaagccaacaaggaaccatgttccagtcacagcactcaatagttgccatgcagagtaactctccatcccaggaacagcagcagcagcagcaacagcagcagcaacagcagcagcaacaacaacagagcattttattcagtaatcagaataccatggctacaatggcgtctccaaagcaaccaccaccaaacatgatattcaacccaaatcaaaatccaatggctaatcaggagcaacagaaccagtcaatttttcaccaacaaagtaacatggccccaatgaatcaagagcaacagcccatgcaatttcagagtcagtccacagtttcctcacttcagaacccaggtcctacccagtcggaatcatcacagacccccttgttccatagctctcctcagattcagttggtacaagggtcacctagttctcaagagcagcaagtaactctcttcttatctccagcatccatgtctgccttgcagaccagtataaatcaacaagatatgcaacagtctcctctttattcccctcagaacaacatgcctggaattcaaggagccacatcttcgcctcaaccacaggctactttatttcacaacacagcaggaggcacaatgaaccaactgcagaattctcctggctcatctcagcagacatcaggaatgttcttatttggcattcaaaataactgtagtcagcttttaacctctggaccagctacattgcctgatcagttgatggccataagtcagccaggccaaccacaaaacgagggccagccacctgtgacaacacttctttctcagcaaatgccagagaattctccactggcatcctctataaacaccaaccagaacatcgaaaagattgatttgcttgtttcattgcaaaaccaagggaacaacttgactggctccttttaactggatataaattccacgaagaaaatcctgattccaagatgtcctgagatcttgtggttccatgagaattattactttaaaaacaaaacaaaatataaaaaactgtgtttgagtaaactgatagattttactctgactgcaaaagagcacacctatgctgcttgttgcagtaactaaccaccaatgttaacatcttcatattttatattcctaataacagtgatgactgagaatctatttgagtttccagctggcagaattaattgttattattttcctaggcgcaatttccttaaacgtacagtttaaattcaaggctggaccactcagttattattgctattagaaaataatatatcatgtttacttttgttcttcattattttctttcctgcattgttttagtcaagtaatggcttttgaaaaagtaaagttcaataataactaaggctgtgatttttttcaatataaaaggcacagctgttggccaaagtgaaggaatcttttttcagttttattggagaaactgaagggtaacattctaacaagtaaactgtatgtgcagataaaagtactcttgatttaacacaaaggcagatgatacacttataaaactgggaacagctggaatgcttcttgattttattttttcagagagttgttagttctctgggtttctactaaggggtttagccataactgtgcatagaaaaataattatctgtaaaaaatgaaggggataatatatgataaattatgttctgatatcctcctacagtagtttaaattgacagaaaaatttgaatgttttcttcttaacccagtcttaggctggtattccctttttatatatatctatattacttttcacctctttttcactttactttagagaactattaatatactactggcttcatgaccctgtagcatctttggccactttaatctagggtgacctagcaatcctgcagcacagggcagagagtactgtcttaggaattattaggagttgattcctgagaaacaacacatttttccccatgaacggtgctgttctgaagtcttcaaatttttccctctaataggaaacagtataaattttaattaaaaaaaaaaggcaaactaaaatttcttgaaatatcacttctccctgatctgcagtgagtataaattcacttgtcacctcagtgctttacagtttgaagtggtcacttacctgatggttcccacaagccttaggctttacagggttgtatcattgacttaaaatgaagaattaacttgtgttacatctataaagagcaaaataacacactccagaacttggcagttgtagcattagttatacagttttgggtgttcttgccacccgtgggatgcctgcttctcactaccacctgtgtctggacacatgcttatgtctcattttccttttggcatgtggaaagctgtcaatgcagtgtaaggccaacgtgtgtgtggcttctatgtgttgagataatgttttggtatccttgtccgtttcatttattttttaagtgtacaaaaaataacctgttaattgttgaaggctacttttctgttctttttttttttttttttctatcctgtacatttagttgaactgtgcggaattgtggtgttggttttgtttacacagccagatttttccttctttttgttttgtgatgatcttcctttgttctttgaatgtgctcttttgtctttttctcttttttctcatgttttcttccctccacctccacccctttctttctttctctctctgattgagaggcattgaattacgttttcagtagtacaggcttcttgccgatatgaagggaacttttcagaaagagacctactctgggtcatttaattttgaatacagttttcaatcgttcaagttttggatggtttatatctaatgtgtgtttcatttttttggaaagctatattttgtatttaggaaatggtatactattttgctatttgtactgagtgagtacattggcataaatatagaaatttatatatatacatatatataaactattcttttttgccacacatttttgtggtaaatttgtgagtttgtctgatgttctaccacaacgtggcgtctgataacagtgagggggggtggggtttgttatgtctttattgagtatttaagtatcttttgaaacaaatgacctgttcatctgtggccattccatcaggcagttagttccttgatgtcagtagtgggctaaaggcagcttactgtgtgtttgctggagctttcactcagccaagtgttagagtcaggaaacccattgaggcaatggcgtcaaatggtgtttcacaagaatgagccattcagtctttgctcactatatatttaatattttattattgttgttattgttattattaattggctttctgtattctatgccttttatttataaagacactaagaaaacccatgtttgtaattttaataacatttttcccatcttgtaatatccagagctactttataaattctctgaaccaaaagtattttcctcagtgtatctcttctcccccagcccctattgggaaaaattacccagtatagttcaggttatgaggaggatcagccacacaatccagtgcttcagtttgaaaatgtaaaattctaaccctaaagtagggttggttgaaatttcagacaaagcaaacccagcaggtataaaaagtagtataaatacaaatctgtaagttatttttgaattttctgaacttttttctaagagattacataggagactaaagaaatctatctgttcaagttctaattaggatgattgttaatactgcactgtggatgaagtggcgactggcttgtgtgctgacttctgtggtttagcaagaggtttattgttatcaaatgctaattggcaatgccaagtcactgggaccaattttctgttttataatatctaagtttagaacagaatatatacctgaactgtagtggtttgatcggatggagacagaaaacccgatttttattctcataaattttgtggttatttatacaagggctgtgctatgctaccatattcttgttcaataataataggtttgttgttttttttacattgttaaatgttccttacccctaaaggtcaatgttaagtacaacattctgaaaatacaatttggctacgaagagtattcatcttctttgaagctcagtggttgatatttgtgctaataatgcaatttcctgattactgttacaagttatagctacatatgggagagactcagtgagccagcaaaggccatagaaacaacaatttattaaatgtatttatggcagaaggacctaaataaactgtgagccaccttttcttctttatattgttacatttaagtgttcttgctttcagcaactcacattaatgcttggagcttatctctttctctctctctctctctctctctgtgtgtgtgtgtgtatgtgtgtgtgtgtgtgtgtgtgtttccttattgtcattccattatatatccacaccaacatgggtgacgataattcaaagtcatattttgcctctaagcttgatcatgttacctttatgattaaagtatcatgttatttagccaatgcaaatctgttttaaaacaaatagtttaaaaaaagaacaagtttttaagggctttattatagaagaagtattaatgaaggactttccttcctccctccctttcctcccctccctgcctcccttcttcccttccatctccccctcctccctgccttctttgtttctccttcccttattcctccctccctcctttctcccttccttcctttcttccattcatccttccttgccttttatttttattttttgtaatatcacatgtgctgtagtttggaattttattctagtgcatttcttgctcatcagaacctcagctaatctacctaggaaaaatagtatcaaaggaaatgagaaagttgtatctgagtccctccagaactaagataattctttttgaccatttaagcctttataaatgcgttttgaccatttaagcctttataaatgcttgttttaggaaagtgaatctgttagatgcatcaacaaataatgaccaggacaaaacgatttaataattaaagtctcaaatcaccatggttatacattttcaccagaaatagtaatcttacaatttttcatttttctgatgaagatttctgttccaatatctgtttcctaatagattttttaaattaattagctttcctctgctttatgaccacaggttttatccctaaccgagacagctgtcttatatctgcatgccttagactgtgtggagggactccatgaagaaagaccataggttagaaaaataactcatagtatataccctagtaagtgggttagtagaatctcataacatgtattaaaaagaggttttcttctctgcttgtttgtgtcactagagcaaaattgtagagataatgctcataatgcagtaaatatcagaataatatctacaatatcatttgtggatggtcccaggtcccagtgctctagttactttacttctttttttttttttgagatggagtcttgctctgtctctcaggctagagcagtgtgcgatctcagctcactgcagcctccacctcccaggttcaagcgattctcctgcctcagcctcccaagtagccaggattacaggcaccctccactaggcccggctaattttttttgtatttttttagtagagatggggttttgccatgttggccaggctggtttcgaactcctaacctccagtgatccacctgcctcggcgtcccaaagtgctaggattacaggcatgagccaccacatccggcctaattacttctttaatccccatttatttttatgccattctagcctcatttattaataaaattatgtttttactttctctttcaggaaattttttaaattaatattttatatctagatctaatgctatggaaaagtgcctttttatcatttataatttcatttttcactatttccaaaaacacataaacaaatagtttcagtaggtcccagcttttactttttccatttaaaccttcttttctccatttcttccctttggcttaagaataaaagaaaaggtacattgctagaattgtttctttgggagagggtaaaagattacagaattagactgttcagcctttatataaactaaatttgtcttcatctcaaccagctaatggtaggtcttatctgaatactcatgagaattttagcatctgtgaaactccatgcaccagatgtgtgtaaatttcaggaagaaagtgttgaaagcattttctctgatgttaattagatggaaataaatcactaaaacatagtttaggtaaagcctgattatgccacttttttttaactagacagggcaaagttgtttatgttagtgtacttcttgtctatcctcagttaatttacctagacaaaaagtgtcaaaggaaatgagaaaaaggttatatctgactccctccagacctaagataattccttttgatcagatacagtcagatggagtgccttggtttttgttaattttgcctctattccagctccttaccacagcggtggtgcttaaagaaaggatcatcagcaacaggtcaggatagttctacctttgggatagggctgctttccccgtgctagtatttctgtgactgttagtggcactgaggactgcaaacttttatgcaatattcttaataccctattgatattatgcactttaatcattccaaagaagccaagaatgctgtatagtgatgattccttcctaatgaattcatcttaactatttagaatgttatgtcccttttcttttggatagccaacttggtataaatgttatatggatttttctaaaatgactatataggacttaagactttgaaatgtaatttacttataaggggaaataattatgctttagcacatcattttagaaacgtcacattttagaaacattcagcttgctaacctacatgtttgggaattcattaaaaccagttgtctatatattttgtgccatgtatataagaacattacaatatatctttttctacatatgtagtatgtgcaaccagtggttctcagagtatggttctcagcccaccagctagtatcagtatcacctgggaactagttagaaatgtaaattctttggccccatcccagacatactgagtcagaaactctggaatagggcccccgcaatctgttttcacaagccctccaggtgattctgatgcacactttaaagtttaggaaccactgggctaagactctgttgagatatagagtttttcttccactcagactgatatagttatacattgttcttcatgtaaattcagcttaacctggttatctataatcttttattggcaaaagttaattctcagtactgcctatagagatacagtgtattttatgtacatacacaattagtctaattcttgataattcagttaatttagtttggcattttcctaccacttactaaaaggtttacattaaatgactgatttaaatatataggtgcaatgttctatgtttattttaattgttatgacatttaagtagctaatataattgaccggtgctaaagtctcctgtttatccataaaatgggtacattatgggcagtgtaatacaagctttcttttcattgcctagtactttaccagcagaccacagttttgccctggctagaccaaccctcagaacaaaatcatcattccttgtatttatatttgtatctgagatagtaaacaagatggctggccaggtcaacatggcaccttaacttatttttttaataggtaaaacttcttcaaaagtagcttgctttgtataagaactaagctatcagtatagatatagctatccttggagcttatgtttcagacaagaattatttactaaaataaataataaacaagataatgcattatacaatttgggcatttctcgtttctcaagtgtatgcatcatggtaaatataaactaaccacaagataggtagattgattcatttcattttaatctccttgtgtaattcagtacctccataattgttctaatcttcttcccactgtttacaaattaccagttaattaactcgtgaaagaaaaattcacatatcagaataaaaataaatgtatactcactttataaaaatcaccactgctgtctttccttaatactagcagtggaaatgtaagtggcttactctacaaattttggtgctggcaaatacataggcaaactgttgggagctgctctagttacattcctcccttcttattccctttttctcttcctcactttattgcataacatattcctgtacccaaagcattctaccacagttctatttgactcccacttgtaataactcctttaaaaaattccatgtttaaccatatgaccctgcttgcttactcatattctccctccctctccccttcctttctctctcttccagaagtcatttgcctggtttgaaatattttgtagggattgcttattatattattttagctgatgaacctcaggacaacgtctacacacacacacatacatacacgcacacaaaatctcagctgttgaagagtgggcttggaatcagacttctgtgtccagtaaaaaactcctgcactgaagtcattgtgacttgagtagttacagactgattccagtgaacttgatctaatttcttttgatctaatgaatgtgtctgcttaccttgtttccttttaattgataagctccaagtagttgctaattttttgacaactttaaatgagtttcattcacttcttttacttaatgttttaagtatagtaccaataatttcattaacctgttctcaagtggtttagctaccattctgccatttttaatttttatttaattttatttgcttgagcacactgatcaaccactgaactgccttcttccattgtcctgcaatgatataagggttacatttttgtgtatatggctttcatagttgggatttcagagcactgataccagatattttcagtttgttctctgggggaatttcatttgcatctatgtttttagctatctgtgataacttgttaaatattaaaaagatattttgcttctattggaacatttgtatactcgcaactatatttctgtaaacagctgcagtcaaaaataaaacactgaaagtt

SEQ ID NO: 160397 - DNA, 2855 bp, Homo sapiens
  Payload ID: 11364
  Gene Symbol: NFAT5
  Gene Name: nuclear factor of activated T-cells 5, tonicity-responsive
  ENST ID: ENST00000567990
  CDS Start-End: 277-636
cgaaacggaccctttggctctcccccttccccttccccgtcctgaacccctctcctggtcaccgagaatcagtccccgtggagttccccctccacctcgccatcgtttcctcggtcctcggcccagtggaagtcactaccctcgaggaggaggcagcggcagccgccctcgcgtcgccgcccccggttcggtgcccgcggtcccggagaggaggtgccgccgccaccgccgctccccccctcccgctgccctcgggccgggctgggtcgagctgcgatgccctcggacttcatctcattgctcagcgcggacctagacctggaatcgcccaagtccctctactcgcgagattctctgaagttacacccatcacagaattttcatagagctggactattggaagaatctgtctatgatcttctcccaaaggagttacagttacctccatctagagaaacatctgtagcatcaatgagtcagacaagcggtggtgaggcaggctcgcctcctccagctgttgttgctgctgggatccctgagatgttcatactctgcattctcatgtgcatgatccttagatttaaaaagggatttgcctctgaagcagggagtgtctgcattaaaaatgacctgtagttctctgcttcatagatgcttcttcagctccctcctcttcctccatgggcggtgcttgcagctcctttaccacctcttccagccctaccatttattctacctcagtcaccgacagcaaggctatgcaagtggagagctgctcctcagccgtggggaacattggaaaaccaaaaaggaactggagtaaagaagagccctatgttgtgtggacaatatcctgttaaaagtgagggaaaggagctgaagatagttgtacaacctgagacacagcaccgagctcggtacctgactgagggcagccgtggctcagtgaaagatagaacacagcaaggctttcctacagtaaagctggaaggccataatgaacctgtagtgttgcaagtgtttgtgggcaacgactctggacgagtgaaaccacatggattttatcaggcctgcagagtaactggacgaaatacaactccttgcaaagaagtggacattgaaggcactactgttatagaagtcggccttgatcctagcaacaacatgacactggcggtggactgcgtagggatattgaaattgaggaatgctgatgtcgaagccagaataggaattgctggttccaagaagaaaagcactcgtgccagattggtttttcgagttaatatcatgaggaaagatggctccactttgacactgcaaacaccctcttctccaattttgtgtactcagccagcaggagtgccagaaatcttaaagaaaagcttgcatagctgttcagtgaaaggagaagaagaagtgtttttaatcggcaagaactttctgaaaggaactaaagttattttccaagaaaatgtttctgatgaaaactcttggaagtcagaagctgaaattgatatggaactatttcatcagaatcatcttattgtgaaggttcctccctatcatgaccaacatataactttgcctgtgtcagtgggaatatatgtagtgacaaatgctggaagatctcatgatgttcaaccattcacttacactccagacccagcagctggtgctttgaatgtaaatgtgaagaaggaaatatctagtccagcaagaccttgctcttttgaagaggccatgaaaggtaccaagtaaattcttctcaaaaatcgtaattgggtgctcctgtatgttttctctagcacaccttactattttgttttctcttaggtacttataatactttgcagggtatcttcatattgtaaaataaatatgtgtttaactttactaaatgtagagacttgttttccaatttgatatttttcttgctgaatatgtttttatatatatatatatatatatttttttttttaagtatattggagtggaggagttttgtttttttttttaattacccaatattaaaagtatatgaggctgggcacagtggttcatgcctgtaatgccagcactttgggaggccgagtcaggtagatcatttgaggtcaggacttcaagacctgcctggccaacatggtgaaaccctgtctctactgaaaatacaaaaattagccaggggtggtggcaggtgcccgtagtcccagctgctcgggaggctgagtcaggagaatctctttaatctgggaggcaggggttgcagtgagccaaggtcatgccactgtactccagcctgggcgacagagcgagaccctgtcttaaaaaaaaaaaaaaagtgaaataaggccaggcacggtgggtcacacctatagtcccagcactttcagaggccaaggtaggaagattacttgagtccagaaatttgagatgataaatatccattggctaataattaaatgcatcatctatagttattgctgaacagatatgggcagcacagtgagaagatttcttgtctctacaaaaaaattaaaacaggccaggcgcagtggctcacgcctgtaatcccagcactttaggaggccaaggtgggcagataacctgaggtcaggcatttaagaccagagtgaccaacatggagaaacccattctctactaaaaatacaaaattagccaggcatggtggtgcatgcctgtaatcccagctacttgggaagctgaggcagaagaatcgcttgaactcaggaagcagaggttgcggtgagccgagatcgtgccaccgcactccagtctgggcaacaagagcaaaactatctccaaaaaagaaagaaagaaaaataggccaggcg

SEQ ID NO: 160398 - DNA, 4914 bp, Homo sapiens
  Payload ID: 11364
  Gene Symbol: NFAT5
  Gene Name: nuclear factor of activated T-cells 5, tonicity-responsive
  Uniprot ID: O94916
  ENST ID: ENST00000566899
  CDS Start-End: 242-4609
cgcccaagtccctctactcgcgagaatctgtctatgatcttctcccaaaggagttacagttacctccatctagagaaacatctgtagcatcaatgagtcagacaagcggtggtgaggcaggctcgcctcctccagctgttgttgctgctggatttgcctctgaagcagggagtgtctgcattaaaaatgacctgtagttctctgcttcatagatgcttcttcagctccctcctcttcctccatgggcggtgcttgcagctcctttaccacctcttccagccctaccatttattctacctcagtcaccgacagcaaggctatgcaagtggagagctgctcctcagccgtgggggtaagtaacagaggggtaagtgaaaagcagttaaccagtaacacagttcagcagcatccatcaacaccgaagaggcacacagtcttgtacatctcaccaccacctgaggacttgctggataacagtcggatgtcctgccaggatgaggggtgtggattggaatctgagcagagctgcagtatgtggatggaggattccccctccaacttcagtaacatgagcaccagttcctacaatgataacactgaggtacctcgtaaatcacgaaaacgaaatccaaagcagaggccgggggtcaaacgacgagattgtgaagaatctaatatggatatatttgatgccgacagtgccaaagcacctcactatgtgctttctcagcttaccacggacaacaaaggcaactcaaaagcgggaaatggaacattggaaaaccaaaaaggaactggagtaaagaagagccctatgttgtgtggacaatatcctgttaaaagtgagggaaaggagctgaagatagttgtacaacctgagacacagcaccgagctcggtacctgactgagggcagccgtggctcagtgaaagatagaacacagcaaggctttcctacagtaaagctggaaggccataatgaacctgtagtgttgcaagtgtttgtgggcaacgactctggacgagtgaaaccacatggattttatcaggcctgcagagtaactggacgaaatacaactccttgcaaagaagtggacattgaaggcactactgttatagaagtcggccttgatcctagcaacaacatgacactggcggtggactgcgtagggatattgaaattgaggaatgctgatgtcgaagccagaataggaattgctggttccaagaagaaaagcactcgtgccagattggtttttcgagttaatatcatgaggaaagatggctccactttgacactgcaaacaccctcttctccaattttgtgtactcagccagcaggagtgccagaaatcttaaagaaaagcttgcatagctgttcagtgaaaggagaagaagaagtgtttttaatcggcaagaactttctgaaaggaactaaagttattttccaagaaaatgtttctgatgaaaactcttggaagtcagaagctgaaattgatatggaactatttcatcagaatcatcttattgtgaaggttcctccctatcatgaccaacatataactttgcctgtgtcagtgggaatatatgtagtgacaaatgctggaagatctcatgatgttcaaccattcacttacactccagacccagcagcagctggtgctttgaatgtaaatgtgaagaaggaaatatctagtccagcaagaccttgctcttttgaagaggccatgaaagcaatgaaaactactggatgtaatttagataaggtaaatattatccctaatgccctgatgactccactcataccaagcagtatgattaagagtgaagatgttactccaatggaagtaacagcagaaaaaagatcttccactatttttaagactacaaagtctgttggatcaactcagcaaacattagaaaacatctcaaacatagcaggaaatggctctttttcatcaccatcatcttcccacctaccttctgaaaatgaaaaacagcagcagattcagcccaaggcatacaacccagagaccctgacaactattcaaacccaggacatctcacagcctggtacttttccagcagtttctgcttctagtcagctgcccaacagcgatgcactattgcagcaggctacacagtttcagacaagagaaactcagtctagagagatattacagtcagatggtacagtggttaatttgtcacaactgactgaggcatcacaacaacagcagcagtcaccactacaagaacaagcacagactttacagcagcagatttcatcaaatatttttccatcaccaaatagtgtgagtcagcttcagaatactattcagcagctgcaagcagggagtttcacaggcagtactgctagtggcagcagtggaagtgttgacttggtccaacaagttttagaggcacagcagcagttatcttcagttttattttctgctccagatggtaatgagaatgttcaagagcagcttagtgcagatatttttcaacaagtcagtcaaattcagagtggtgtaagccctggaatgttttcctcaacagagccaacagtccataccagaccagataatttattacctggaagagctgaaagtgttcatccacagtctgaaaacacgttatctaatcaacagcagcagcagcagcagcaacagcaagtgatggaatcttcagccgcaatggtgatggagatgcaacagagtatctgccaggcagctgcccagattcagtcagagttattcccttcaactgcttcagcaaatggaaaccttcagcaatcgccagtttaccagcagacttctcacatgatgagtgcattgtctaccaatgaggatatgcaaatgcagtgtgaattgttttcttctcctcctgcagtttctggaaatgaaacttctacaactaccacacagcaggttgcaacccctggcactaccatgtttcagacatcaagttcaggagatggagaagaaactggaacacaagcaaaacagattcagaacagtgtctttcagaccatggtccaaatgcaacatagtggggacaatcaacctcaagttaaccttttttcatccacaaaaagtatgatgagtgttcagaatagtggtacccaacaacaaggtaatggtttattccagcaagggaatgagatgatgtcacttcaatctggaaattttttgcagcagtcttctcattcacaggcccaactttttcatcctcaaaatcctattgccgatgctcagaacctttcccaggaaactcaaggttctctctttcatagtccaaatcctattgtccacagtcagacttctacaacctcctctgaacaaatgcagcctccaatgtttcactctcaaagtaccattgctgtgttacagggctcttcagttcctcaagaccagcagtcaaccaacatatttctttcccagagtcccatgaataatcttcagactaacacagtagcccaagaagcattttttgcagcaccgaactcaatttctccacttcagtcaacatcaaacagtgaacaacaagctgctttccaacagcaagctccaatatcacacatccagactcctatgctttcccaagaacaggcacaacccccgcagcagggtttatttcagcctcaggtggccctgggctcccttccacctaatccaatgcctcaaagccaacaaggaaccatgttccagtcacagcactcaatagttgccatgcagagtaactctccatcccaggaacagcagcagcagcagcaacagcagcagcaacagcagcagcaacaacaacagagcattttattcagtaatcagaataccatggctacaatggcgtctccaaagcaaccaccaccaaacatgatattcaacccaaatcaaaatccaatggctaatcaggagcaacagaaccagtcaatttttcaccaacaaagtaacatggccccaatgaatcaagagcaacagcccatgcaatttcagagtcagtccacagtttcctcacttcagaacccaggtcctacccagtcggaatcatcacagacccccttgttccatagctctcctcagattcagttggtacaagggtcacctagttctcaagagcagcaagtaactctcttcttatctccagcatccatgtctgccttgcagaccagtataaatcaacaagatatgcaacagtctcctctttattcccctcagaacaacatgcctggaattcaaggagccacatcttcgcctcaaccacaggctactttatttcacaacacagcaggaggcacaatgaaccaactgcagaattctcctggctcatctcagcagacatcaggaatgttcttatttggcattcaaaataactgtagtcagcttttaacctctggaccagctacattgcctgatcagttgatggccataagtcagccaggccaaccacaaaacgagggccagccacctgtgacaacacttctttctcagcaaatgccagagaattctccactggcatcctctataaacaccaaccagaacatcgaaaagattgatttgcttgtttcattgcaaaaccaagggaacaacttgactggctccttttaactggatatgtaagtattgcattttggcttcttattgaaaagcatcagattttattcttcttaacagatttaggttaagtaatagtagttctaatcttttaaaatgtggctttctcacaagatgatacttttttactctgaataaaattattctgaatgatagcttatggtcatatagttaatacagaccaggccgggcgtggtggctcatgcctgtaatcccagcactttgagagaccaaggtgggcggatcacgaggtcaggcgatcgagaccatcctggctaacatggtgaaaccccgtctct

SEQ ID NO: 160399 - DNA, 6376 bp, Homo sapiens
  Payload ID: 11364
  Gene Symbol: NFAT5
  Gene Name: nuclear factor of activated T-cells 5, tonicity-responsive
  Uniprot ID: O94916
  ENST ID: ENST00000567239
  CDS Start-End: 241-4887
ccgtcctgaacccctctcctggtcaccgagaatcagtccccgtggagttccccctccacctcgccatcgtttcctcggtcctcggcccagtggaagtcactaccctcgaggaggaggcagcggcagccgccctcgcgtcgccgcccccggttcggtgcccgcggtcccggagaggaggtgccgccgccaccgccgctccccccctcccgctgccctcgggccgggctgggtcgagctgcgatgccctcggacttcatctcattgctcagcgcggacctagacctggaatcgcccaagtccctctactcgcgagattctctgaagttacacccatcacagaattttcatagagctggactattggaagaatctgtctatgatcttctcccaaaggagttacagttacctccatctagagaaacatctgtagcatcaatgagtcagacaagcggtggtgaggcaggctcgcctcctccagctgttgttgctgctgatgcttcttcagctccctcctcttcctccatgggcggtgcttgcagctcctttaccacctcttccagccctaccatttattctacctcagtcaccgacagcaaggctatgcaagtggagagctgctcctcagccgtgggggtaagtaacagaggggtaagtgaaaagcagttaaccagtaacacagttcagcagcatccatcaacaccgaagaggcacacagtcttgtacatctcaccaccacctgaggacttgctggataacagtcggatgtcctgccaggatgaggggtgtggattggaatctgagcagagctgcagtatgtggatggaggattccccctccaacttcagtaacatgagcaccagttcctacaatgataacactgaggtacctcgtaaatcacgaaaacgaaatccaaagcagaggccgggggtcaaacgacgagattgtgaagaatctaatatggatatatttgatgccgacagtgccaaagcacctcactatgtgctttctcagcttaccacggacaacaaaggcaactcaaaagcgggaaatggaacattggaaaaccaaaaaggaactggagtaaagaagagccctatgttgtgtggacaatatcctgttaaaagtgagggaaaggagctgaagatagttgtacaacctgagacacagcaccgagctcggtacctgactgagggcagccgtggctcagtgaaagatagaacacagcaaggctttcctacagtaaagctggaaggccataatgaacctgtagtgttgcaagtgtttgtgggcaacgactctggacgagtgaaaccacatggattttatcaggcctgcagagtaactggacgaaatacaactccttgcaaagaagtggacattgaaggcactactgttatagaagtcggccttgatcctagcaacaacatgacactggcggtggactgcgtagggatattgaaattgaggaatgctgatgtcgaagccagaataggaattgctggttccaagaagaaaagcactcgtgccagattggtttttcgagttaatatcatgaggaaagatggctccactttgacactgcaaacaccctcttctccaattttgtgtactcagccagcaggagtgccagaaatcttaaagaaaagcttgcatagctgttcagtgaaaggagaagaagaagtgtttttaatcggcaagaactttctgaaaggaactaaagttattttccaagaaaatgtttctgatgaaaactcttggaagtcagaagctgaaattgatatggaactatttcatcagaatcatcttattgtgaaggttcctccctatcatgaccaacatataactttgcctgtgtcagtgggaatatatgtagtgacaaatgctggaagatctcatgatgttcaaccattcacttacactccagacccagcagctggtgctttgaatgtaaatgtgaagaaggaaatatctagtccagcaagaccttgctcttttgaagaggccatgaaagcaatgaaaactactggatgtaatttagataaggtaaatattatccctaatgccctgatgactccactcataccaagcagtatgattaagagtgaagatgttactccaatggaagtaacagcagaaaaaagatcttccactatttttaagactacaaagtctgttggatcaactcagcaaacattagaaaacatctcaaacatagcaggaaatggctctttttcatcaccatcatcttcccacctaccttctgaaaatgaaaaacagcagcagattcagcccaaggcatacaacccagagaccctgacaactattcaaacccaggacatctcacagcctggtacttttccagcagtttctgcttctagtcagctgcccaacagcgatgcactattgcagcaggctacacagtttcagacaagagaaactcagtctagagagatattacagtcagatggtacagtggttaatttgtcacaactgactgaggcatcacaacaacagcagcagtcaccactacaagaacaagcacagactttacagcagcagatttcatcaaatatttttccatcaccaaatagtgtgagtcagcttcagaatactattcagcagctgcaagcagggagtttcacaggcagtactgctagtggcagcagtggaagtgttgacttggtccaacaagttttagaggcacagcagcagttatcttcagttttattttctgctccagatggtaatgagaatgttcaagagcagcttagtgcagatatttttcaacaagtcagtcaaattcagagtggtgtaagccctggaatgttttcctcaacagagccaacagtccataccagaccagataatttattacctggaagagctgaaagtgttcatccacagtctgaaaacacgttatctaatcaacagcagcagcagcagcagcaacagcaagtgatggaatcttcagccgcaatggtgatggagatgcaacagagtatctgccaggcagctgcccagattcagtcagagttattcccttcaactgcttcagcaaatggaaaccttcagcaatcgccagtttaccagcagacttctcacatgatgagtgcattgtctaccaatgaggatatgcaaatgcagtgtgaattgttttcttctcctcctgcagtttctggaaatgaaacttctacaactaccacacagcaggttgcaacccctggcactaccatgtttcagacatcaagttcaggagatggagaagaaactggaacacaagcaaaacagattcagaacagtgtctttcagaccatggtccaaatgcaacatagtggggacaatcaacctcaagttaaccttttttcatccacaaaaagtatgatgagtgttcagaatagtggtacccaacaacaaggtaatggtttattccagcaagggaatgagatgatgtcacttcaatctggaaattttttgcagcagtcttctcattcacaggcccaactttttcatcctcaaaatcctattgccgatgctcagaacctttcccaggaaactcaaggttctctctttcatagtccaaatcctattgtccacagtcagacttctacaacctcctctgaacaaatgcagcctccaatgtttcactctcaaagtaccattgctgtgttacagggctcttcagttcctcaagaccagcagtcaaccaacatatttctttcccagagtcccatgaataatcttcagactaacacagtagcccaagaagcattttttgcagcaccgaactcaatttctccacttcagtcaacatcaaacagtgaacaacaagctgctttccaacagcaagctccaatatcacacatccagactcctatgctttcccaagaacaggcacaacccccgcagcagggtttatttcagcctcaggtggccctgggctcccttccacctaatccaatgcctcaaagccaacaaggaaccatgttccagtcacagcactcaatagttgccatgcagagtaactctccatcccaggaacagcagcagcagcagcaacagcagcagcaacagcagcagcaacaacaacagagcattttattcagtaatcagaataccatggctacaatggcgtctccaaagcaaccaccaccaaacatgatattcaacccaaatcaaaatccaatggctaatcaggagcaacagaaccagtcaatttttcaccaacaaagtaacatggccccaatgaatcaagagcaacagcccatgcaatttcagagtcagtccacagtttcctcacttcagaacccaggtcctacccagtcggaatcatcacagacccccttgttccatagctctcctcagattcagttggtacaagggtcacctagttctcaagagcagcaagtaactctcttcttatctccagcatccatgtctgccttgcagaccagtataaatcaacaagatatgcaacagtctcctctttattcccctcagaacaacatgcctggaattcaaggagccacatcttcgcctcaaccacaggctactttatttcacaacacagcaggaggcacaatgaaccaactgcagaattctcctggctcatctcagcagacatcaggaatgttcttatttggcattcaaaataactgtagtcagcttttaacctctggaccagctacattgcctgatcagttgatggccataagtcagccaggccaaccacaaaacgagggccagccacctgtgacaacacttctttctcagcaaatgccagagaattctccactggcatcctctataaacaccaaccagaacatcgaaaagattgatttgcttgtttcattgcaaaaccaagggaacaacttgactggctccttttaactggatataaattccacgaagaaaatcctgattccaagatgtcctgagatcttgtggttccatgagaattattactttaaaaacaaaacaaaatataaaaaactgtgtttgagtaaactgatagattttactctgactgcaaaagagcacacctatgctgcttgttgcagtaactaaccaccaatgttaacatcttcatattttatattcctaataacagtgatgactgagaatctatttgagtttccagctggcagaattaattgttattattttcctaggcgcaatttccttaaacgtacagtttaaattcaaggctggaccactcagttattattgctattagaaaataatatatcatgtttacttttgttcttcattattttctttcctgcattgttttagtcaagtaatggcttttgaaaaagtaaagttcaataataactaaggctgtgatttttttcaatataaaaggcacagctgttggccaaagtgaaggaatcttttttcagttttattggagaaactgaagggtaacattctaacaagtaaactgtatgtgcagataaaagtactcttgatttaacacaaaggcagatgatacacttataaaactgggaacagctggaatgcttcttgattttattttttcagagagttgttagttctctgggtttctactaaggggtttagccataactgtgcatagaaaaataattatctgtaaaaaatgaaggggataatatatgataaattatgttctgatatcctcctacagtagtttaaattgacagaaaaatttgaatgttttcttcttaacccagtcttaggctggtattccctttttatatatatctatattacttttcacctctttttcactttactttagagaactattaatatactactggcttcatgaccctgtagcatctttggccactttaatctagggtgacctagcaatcctgcagcacagggcagagagtactgtcttaggaattattaggagttgattcctgagaaacaacacatttttccccatgaacggtgctgttctgaagtcttcaaatttttccctctaataggaaacagtataaattttaattaaaaaaaaaaggcaaactaaaatttcttgaaatatcacttctccctgatctgcagtgagtataaattcacttgtcacctcagtgctttacagtttgaagtggtcacttacctgatggttcccacaagccttaggctttacagggttgtatcattgacttaaaatgaagaattaacttgtgttacatctataaagagcaaaataacacactccagaacttggcagttgtagcattagttatacagttttgggtgttcttgccacccgtgggatgcctgcttctcactaccacctgtgtctggacacatgcttatgtctcattttccttttggcatgtggaaagctgtcaatgcagtgtaaggccaacgtgtgtgtggcttc

SEQ ID NO: 160400 - DNA, 732 bp, Homo sapiens
  Payload ID: 11364
  Gene Symbol: NFAT5
  Gene Name: nuclear factor of activated T-cells 5, tonicity-responsive
  ENST ID: ENST00000563474
  CDS Start-End: 1-430
aacattggaaaaccaaaaaggaactggagtaaagaagagccctatgttgtgtggacaatatcctgttaaaagtgagggaaaggagctgaagatagttgtacaacctgagacacagcaccgagctcggtacctgactgagggcagccgtggctcagtgaaagatagaacacagcaaggctttcctacagtaaagctggaaggccataatgaacctgtagtgttgcaagtgtttgtgggcaacgactctggacgagtgaaaccacatggattttatcaggcctgcagagtaactggacgaaatacaactccttgcaaagaagtggacattgaaggcactactgttatagaagtcggccttgatcctagcaacaacatgacactggcctcagccagcaggagtgccagaaatcttaaagaaaagcttgcatagctgttcagtgaaaggagaagaagaagtgtttttaatcggcaagaactttctgaaaggaactaaagttattttccaagaaaatgtttctgatgaaaactcttggaagtcagaagctgaaattgatatggaactatttcatcagaatcatcttattgtgaaggttcctccctatcatgaccaacatataactttgcctgtgtcagtgggaatatatgtagtgacaaatgctggaagatctcatgatgttcaaccattcacttacactccagacccagcagctggtgctttgaatgtaaatgtga

SEQ ID NO: 160401 - DNA, 653 bp, Homo sapiens
  Payload ID: 11364
  Gene Symbol: NFAT5
  Gene Name: nuclear factor of activated T-cells 5, tonicity-responsive
  ENST ID: ENST00000565301
  CDS Start-End: 1-426
gctatgcaagtggagagctgctcctcagccgtggggaacaacatgcctggaattcaaggagccacatcttcgcctcaaccacaggctactttatttcacaacacagcaggaggcacaatgaaccaactgcagaattctcctggctcatctcagcagacatcaggaatgttcttatttggcattcaaaataactgtagtcagcttttaacctctggaccagctacattgcctgatcagttgatggccataagtcagccaggccaaccacaaaacgagggccagccacctgtgacaacacttctttctcagcaaatgccagagaattctccactggcatcctctataaacaccaaccagaacatcgaaaagattgatttgcttgtttcattgcaaaaccaagggaacaacttgactggctccttttaactggatataaattccacgaagaaaatcctgattccaagatgtcctgagatcttgtggttccatgagaattattactttaaaaacaaaacaaaatataaaaaactgtgtttgagtaaactgatagattttactctgactgcaaaagagcacacctatgctgcttgttgcagtaactaaccaccaatgttaacatcttcatattttatattcctaataacagtgatgac

SEQ ID NO: 160402 - DNA, 5875 bp, Homo sapiens
  Payload ID: 11364
  Gene Symbol: NFAT5
  Gene Name: nuclear factor of activated T-cells 5, tonicity-responsive
  Uniprot ID: O94916
  ENST ID: ENST00000627621
  CDS Start-End: 95-4744
ccggttcggtgcccgcggtcccggagaggaggtgccgccgccaccgccgctccccccctcccgctgccctcgggccgggctgggtcgagctgcgatgccctcggacttcatctcattgctcagcgcggacctagacctggaatcgcccaagtccctctactcgcgagattctctgaagttacacccatcacagaattttcatagagctggactattggaagaatctgtctatgatcttctcccaaaggagttacagttacctccatctagagaaacatctgtagcatcaatgagtcagacaagcggtggtgaggcaggctcgcctcctccagctgttgttgctgctgatgcttcttcagctccctcctcttcctccatgggcggtgcttgcagctcctttaccacctcttccagccctaccatttattctacctcagtcaccgacagcaaggctatgcaagtggagagctgctcctcagccgtgggggtaagtaacagaggggtaagtgaaaagcagttaaccagtaacacagttcagcagcatccatcaacaccgaagaggcacacagtcttgtacatctcaccaccacctgaggacttgctggataacagtcggatgtcctgccaggatgaggggtgtggattggaatctgagcagagctgcagtatgtggatggaggattccccctccaacttcagtaacatgagcaccagttcctacaatgataacactgaggtacctcgtaaatcacgaaaacgaaatccaaagcagaggccgggggtcaaacgacgagattgtgaagaatctaatatggatatatttgatgccgacagtgccaaagcacctcactatgtgctttctcagcttaccacggacaacaaaggcaactcaaaagcgggaaatggaacattggaaaaccaaaaaggaactggagtaaagaagagccctatgttgtgtggacaatatcctgttaaaagtgagggaaaggagctgaagatagttgtacaacctgagacacagcaccgagctcggtacctgactgagggcagccgtggctcagtgaaagatagaacacagcaaggctttcctacagtaaagctggaaggccataatgaacctgtagtgttgcaagtgtttgtgggcaacgactctggacgagtgaaaccacatggattttatcaggcctgcagagtaactggacgaaatacaactccttgcaaagaagtggacattgaaggcactactgttatagaagtcggccttgatcctagcaacaacatgacactggcggtggactgcgtagggatattgaaattgaggaatgctgatgtcgaagccagaataggaattgctggttccaagaagaaaagcactcgtgccagattggtttttcgagttaatatcatgaggaaagatggctccactttgacactgcaaacaccctcttctccaattttgtgtactcagccagcaggagtgccagaaatcttaaagaaaagcttgcatagctgttcagtgaaaggagaagaagaagtgtttttaatcggcaagaactttctgaaaggaactaaagttattttccaagaaaatgtttctgatgaaaactcttggaagtcagaagctgaaattgatatggaactatttcatcagaatcatcttattgtgaaggttcctccctatcatgaccaacatataactttgcctgtgtcagtgggaatatatgtagtgacaaatgctggaagatctcatgatgttcaaccattcacttacactccagacccagcagcagctggtgctttgaatgtaaatgtgaagaaggaaatatctagtccagcaagaccttgctcttttgaagaggccatgaaagcaatgaaaactactggatgtaatttagataaggtaaatattatccctaatgccctgatgactccactcataccaagcagtatgattaagagtgaagatgttactccaatggaagtaacagcagaaaaaagatcttccactatttttaagactacaaagtctgttggatcaactcagcaaacattagaaaacatctcaaacatagcaggaaatggctctttttcatcaccatcatcttcccacctaccttctgaaaatgaaaaacagcagcagattcagcccaaggcatacaacccagagaccctgacaactattcaaacccaggacatctcacagcctggtacttttccagcagtttctgcttctagtcagctgcccaacagcgatgcactattgcagcaggctacacagtttcagacaagagaaactcagtctagagagatattacagtcagatggtacagtggttaatttgtcacaactgactgaggcatcacaacaacagcagcagtcaccactacaagaacaagcacagactttacagcagcagatttcatcaaatatttttccatcaccaaatagtgtgagtcagcttcagaatactattcagcagctgcaagcagggagtttcacaggcagtactgctagtggcagcagtggaagtgttgacttggtccaacaagttttagaggcacagcagcagttatcttcagttttattttctgctccagatggtaatgagaatgttcaagagcagcttagtgcagatatttttcaacaagtcagtcaaattcagagtggtgtaagccctggaatgttttcctcaacagagccaacagtccataccagaccagataatttattacctggaagagctgaaagtgttcatccacagtctgaaaacacgttatctaatcaacagcagcagcagcagcagcaacagcaagtgatggaatcttcagccgcaatggtgatggagatgcaacagagtatctgccaggcagctgcccagattcagtcagagttattcccttcaactgcttcagcaaatggaaaccttcagcaatcgccagtttaccagcagacttctcacatgatgagtgcattgtctaccaatgaggatatgcaaatgcagtgtgaattgttttcttctcctcctgcagtttctggaaatgaaacttctacaactaccacacagcaggttgcaacccctggcactaccatgtttcagacatcaagttcaggagatggagaagaaactggaacacaagcaaaacagattcagaacagtgtctttcagaccatggtccaaatgcaacatagtggggacaatcaacctcaagttaaccttttttcatccacaaaaagtatgatgagtgttcagaatagtggtacccaacaacaaggtaatggtttattccagcaagggaatgagatgatgtcacttcaatctggaaattttttgcagcagtcttctcattcacaggcccaactttttcatcctcaaaatcctattgccgatgctcagaacctttcccaggaaactcaaggttctctctttcatagtccaaatcctattgtccacagtcagacttctacaacctcctctgaacaaatgcagcctccaatgtttcactctcaaagtaccattgctgtgttacagggctcttcagttcctcaagaccagcagtcaaccaacatatttctttcccagagtcccatgaataatcttcagactaacacagtagcccaagaagcattttttgcagcaccgaactcaatttctccacttcagtcaacatcaaacagtgaacaacaagctgctttccaacagcaagctccaatatcacacatccagactcctatgctttcccaagaacaggcacaacccccgcagcagggtttatttcagcctcaggtggccctgggctcccttccacctaatccaatgcctcaaagccaacaaggaaccatgttccagtcacagcactcaatagttgccatgcagagtaactctccatcccaggaacagcagcagcagcagcaacagcagcagcaacagcagcagcaacaacaacagagcattttattcagtaatcagaataccatggctacaatggcgtctccaaagcaaccaccaccaaacatgatattcaacccaaatcaaaatccaatggctaatcaggagcaacagaaccagtcaatttttcaccaacaaagtaacatggccccaatgaatcaagagcaacagcccatgcaatttcagagtcagtccacagtttcctcacttcagaacccaggtcctacccagtcggaatcatcacagacccccttgttccatagctctcctcagattcagttggtacaagggtcacctagttctcaagagcagcaagtaactctcttcttatctccagcatccatgtctgccttgcagaccagtataaatcaacaagatatgcaacagtctcctctttattcccctcagaacaacatgcctggaattcaaggagccacatcttcgcctcaaccacaggctactttatttcacaacacagcaggaggcacaatgaaccaactgcagaattctcctggctcatctcagcagacatcaggaatgttcttatttggcattcaaaataactgtagtcagcttttaacctctggaccagctacattgcctgatcagttgatggccataagtcagccaggccaaccacaaaacgagggccagccacctgtgacaacacttctttctcagcaaatgccagagaattctccactggcatcctctataaacaccaaccagaacatcgaaaagattgatttgcttgtttcattgcaaaaccaagggaacaacttgactggctccttttaactggatataaattccacgaagaaaatcctgattccaagatgtcctgagatcttgtggttccatgagaattattactttaaaaacaaaacaaaatataaaaaactgtgtttgagtaaactgatagattttactctgactgcaaaagagcacacctatgctgcttgttgcagtaactaaccaccaatgttaacatcttcatattttatattcctaataacagtgatgactgagaatctatttgagtttccagctggcagaattaattgttattattttcctaggcgcaatttccttaaacgtacagtttaaattcaaggctggaccactcagttattattgctattagaaaataatatatcatgtttacttttgttcttcattattttctttcctgcattgttttagtcaagtaatggcttttgaaaaagtaaagttcaataataactaaggctgtgatttttttcaatataaaaggcacagctgttggccaaagtgaaggaatcttttttcagttttattggagaaactgaagggtaacattctaacaagtaaactgtatgtgcagataaaagtactcttgatttaacacaaaggcagatgatacacttataaaactgggaacagctggaatgcttcttgattttattttttcagagagttgttagttctctgggtttctactaaggggtttagccataactgtgcatagaaaaataattatctgtaaaaaatgaaggggataatatatgataaattatgttctgatatcctcctacagtagtttaaattgacagaaaaatttgaatgttttcttcttaacccagtcttaggctggtattccctttttatatatatctatattacttttcacctctttttcactttactttagagaactattaatatactactggcttcatgaccctgtagcatctttggccactttaatctagggtgacctagcaatcctgcagcacagggcagagagtactgtcttaggaattattaggagttgattcctgagaaacaacacatttttccccatgaacggtgctgttctgaagtcttcaaatttttccctctaataggaaacagtataaattttaattaaaaaaaaaaggcaaactaaaa

SEQ ID NO: 160403 - DNA, 4642 bp, Homo sapiens
  Payload ID: 11365
  Gene Symbol: NFATC1
  Gene Name: nuclear factor of activated T-cells, cytoplasmic, calcineurin-dependent 1
  Uniprot ID: O95644
  ENST ID: ENST00000253506
  CDS Start-End: 370-2847
gagccgccgggccggcggggaggcgggggaggtgttttccagctttaaaaaggcaggaggcagagcgcggccctgcgtcagagcgagactcagaggctccgaactcgccggcggagtcgccgcgccagatcccagcagcagggcgcgggcaccggggcgcgggcagggctcggagccaccgcgcaggtcctagggccgcggccgggccccgccacgcgcgcacacgcccctcgatgactttcctccggggcgcgcggcgctgagcccggggcgagggctgtcttcccggagacccgaccccggcagcgcggggcggccgcttctcctgtgcctccgcccgccgctccactccccgccgccgccgcgcggatgccaagcaccagctttccagtcccttccaagtttccacttggccctgcggctgcggtcttcgggagaggagaaactttggggcccgcgccgcgcgccggcggcaccatgaagtcagcggaggaagaacactatggctatgcatcctccaacgtcagccccgccctgccgctccccacggcgcactccaccctgccggccccgtgccacaaccttcagacctccacaccgggcatcatcccgccggcggatcacccctcggggtacggagcagctttggacggtgggcccgcgggctacttcctctcctccggccacaccaggcctgatggggcccctgccctggagagtcctcgcatcgagataacctcgtgcttgggcctgtaccacaacaataaccagtttttccacgatgtggaggtggaagacgtcctccctagctccaaacggtccccctccacggccacgctgagtctgcccagcctggaggcctacagagacccctcgtgcctgagcccggccagcagcctgtcctcccggagctgcaactcagaggcctcctcctacgagtccaactactcgtacccgtacgcgtccccccagacgtcgccatggcagtctccctgcgtgtctcccaagaccacggaccccgaggagggctttccccgcgggctgggggcctgcacactgctgggttccccgcggcactccccctccacctcgccccgcgccagcgtcactgaggagagctggctgggtgcccgctcctccagacccgcgtccccttgcaacaagaggaagtacagcctcaacggccggcagccgccctactcaccccaccactcgcccacgccgtccccgcacggctccccgcgggtcagcgtgaccgacgactcgtggttgggcaacaccacccagtacaccagctcggccatcgtggccgccatcaacgcgctgaccaccgacagcagcctggacctgggagatggcgtccctgtcaagtcccgcaagaccaccctggagcagccgccctcagtggcgctcaaggtggagcccgtcggggaggacctgggcagccccccgcccccggccgacttcgcgcccgaagactactcctctttccagcacatcaggaagggcggcttctgcgaccagtacctggcggtgccgcagcacccctaccagtgggcgaagcccaagcccctgtcccctacgtcctacatgagcccgaccctgcccgccctggactggcagctgccgtcccactcaggcccgtatgagcttcggattgaggtgcagcccaagtcccaccaccgagcccactacgagacggagggcagccggggggccgtgaaggcgtcggccggaggacaccccatcgtgcagctgcatggctacttggagaatgagccgctgatgctgcagcttttcattgggacggcggacgaccgcctgctgcgcccgcacgccttctaccaggtgcaccgcatcacagggaagaccgtgtccaccaccagccacgaggccatcctctccaacaccaaagtcctggagatcccactcctgccggagaacagcatgcgagccgtcattgactgtgccggaatcctgaaactcagaaactccgacattgaacttcggaaaggagagacggacatcgggaggaagaacacacgggtacggctggtgttccgcgttcacgtcccgcaacccagcggccgcacgctgtccctgcaggtggcctccaaccccatcgaatgctcccagcgctcagctcaggagctgcctctggtggagaagcagagcacggacagctatccggtcgtgggcgggaagaagatggtcctgtctggccacaacttcctgcaggactccaaggtcattttcgtggagaaagccccagatggccaccatgtctgggagatggaagcgaaaactgaccgggacctgtgcaagccgaattctctggtggttgagatcccgccatttcggaatcagaggataaccagccccgttcacgtcagtttctacgtctgcaacgggaagagaaagcgaagccagtaccagcgtttcacctaccttcccgccaacgttccaattataaaaacagaacccactgatgattatgagcctgctccaacctgtggaccggtgagccaggggttaagtcctctcccaagaccatactacagccagcagctcgcgatgccacccgaccccagctcctgcctcgtggccggcttcccgccctgtccgcagagaagcaccctgatgccagcggcccctggcgtgagccccaagctccacgacctttctcccgctgcctacaccaagggcgttgccagcccgggccactgtcacctcggactcccgcagccggccggagaggcccccgccgtccaggacgtgcccaggccagtggccacgcaccccggctcgcccgggcagccacccccggccctgctgccacagcagtaaatgaaataatacgaaatgacctctccagcacgagcacccactcctagttgccacattggagcactcagttcagcaggggtatgctgacttcagcagacaaagacttttgaataaataaactgaactcacacctggtaccactcagaacctccaactgactgaatgccaggagctgaacattaatatgtgcaaagattggctctccaacaagaaggaaagcagggaggaagggagaccactgtgtcacctggaggagaagtcatctcatgacaacagaagggaggtggccgggctgagcacgggagacccaccgtgcaggggcctttcatgggaacggcccacacgcagtttgaccccacgcccagcccttctggcacccctggggttcaatactggaagtgccttatttaaccagaccatcagggcatcatagaattgagcattgaatttgctactgtaggagtatttttaggagcagaaactgcaaacacatttcattgtgaggttttaccctctgtatgaatgaagagaacgctggaaggctgcgagaggactctagtatgagtctccaacatttggaacgtttcctgggctgtcacgtacactcctgctgccttacacagtgcattttagaatcttccagtctgtcatctcagctcttttgtaacatgcttcccttgtctgcgcggttgaaaccgtaggcttgttcatagtcgcatgctcgcatctttgtttttaatctggcttcgaacatagcacaagtaacttgaatagcacatcaataggttactggacaaaagcagaaaaacctgttacaggatagcctgcatttgcatgtgtgtacatatctaggcatctatttatgtataaataataacagagccgacgtgtcctcgcccaggagggcttccctgtcagcaataaccggcatccgttttggaacctgcgtctggggctccagtcgctgctcttgctggcgtccatcgccgcctcggacggccgtgcattttctcgtctcacgcagttcgaggaggaccctagaaagccaggagctgtgattgacagtagctgtaggttaccagacggcaacattagaaagtgattgtaaataacatgcaacctaagtgtaatatatttgttcagttataagatgattgtttcacagaagccttaccactctctgcttcatctaagaaaaccaataccaaaaacgccactttaatgctcagccctgcgttgtgtgttttcagatgagttactgttaacaggtaggtttgtgtaggccttgctgggcactctgtacaattagttgcttattacgtatgattactcacagcgatctattgttccatataaccaaaaagcatggtttattcattgaaacacggttgacctgaactcgtgccttaggaattaatgcccccttatggaacctgcctgaattgcacctgcgggtggaggctccggctgtgaagtcactgaacagaacgtcgctgatggagaaagggctcccgcagaaggaacggcctgtaccgtgcgctccggcacaatcgcgtctcttgtgtctcactcacggaaagaaacaacctgaaggccatcccgtcggtctgcacgtaaccgtgaagacgtgtggccgcgtcccacctgcggctgggtaccctgcacccggcactgtaggagtcacgtgcagcctttctcaggggactgtcattgaaaaggaaacgtttgatgtctgtgtcagctgtctttgtagttaggaaatagatccaataaagccgtatttttttgctggaca

SEQ ID NO: 160404 - DNA, 4302 bp, Homo sapiens
  Payload ID: 11365
  Gene Symbol: NFATC1
  Gene Name: nuclear factor of activated T-cells, cytoplasmic, calcineurin-dependent 1
  Uniprot ID: O95644
  ENST ID: ENST00000318065
  CDS Start-End: 71-2509
cagcgccgggagaaccgaacccctggcggccgcgaccccggctcccgccccggccccggcccgacccgccatgacggggctggaggaccaggagttcgacttcgagttcctcttcgagtttaaccagcgcgacgagggcgccgccgcggccgccccagaacactatggctatgcatcctccaacgtcagccccgccctgccgctccccacggcgcactccaccctgccggccccgtgccacaaccttcagacctccacaccgggcatcatcccgccggcggatcacccctcggggtacggagcagctttggacggtgggcccgcgggctacttcctctcctccggccacaccaggcctgatggggcccctgccctggagagtcctcgcatcgagataacctcgtgcttgggcctgtaccacaacaataaccagtttttccacgatgtggaggtggaagacgtcctccctagctccaaacggtccccctccacggccacgctgagtctgcccagcctggaggcctacagagacccctcgtgcctgagcccggccagcagcctgtcctcccggagctgcaactcagaggcctcctcctacgagtccaactactcgtacccgtacgcgtccccccagacgtcgccatggcagtctccctgcgtgtctcccaagaccacggaccccgaggagggctttccccgcgggctgggggcctgcacactgctgggttccccgcggcactccccctccacctcgccccgcgccagcgtcactgaggagagctggctgggtgcccgctcctccagacccgcgtccccttgcaacaagaggaagtacagcctcaacggccggcagccgccctactcaccccaccactcgcccacgccgtccccgcacggctccccgcgggtcagcgtgaccgacgactcgtggttgggcaacaccacccagtacaccagctcggccatcgtggccgccatcaacgcgctgaccaccgacagcagcctggacctgggagatggcgtccctgtcaagtcccgcaagaccaccctggagcagccgccctcagtggcgctcaaggtggagcccgtcggggaggacctgggcagccccccgcccccggccgacttcgcgcccgaagactactcctctttccagcacatcaggaagggcggcttctgcgaccagtacctggcggtgccgcagcacccctaccagtgggcgaagcccaagcccctgtcccctacgtcctacatgagcccgaccctgcccgccctggactggcagctgccgtcccactcaggcccgtatgagcttcggattgaggtgcagcccaagtcccaccaccgagcccactacgagacggagggcagccggggggccgtgaaggcgtcggccggaggacaccccatcgtgcagctgcatggctacttggagaatgagccgctgatgctgcagcttttcattgggacggcggacgaccgcctgctgcgcccgcacgccttctaccaggtgcaccgcatcacagggaagaccgtgtccaccaccagccacgaggccatcctctccaacaccaaagtcctggagatcccactcctgccggagaacagcatgcgagccgtcattgactgtgccggaatcctgaaactcagaaactccgacattgaacttcggaaaggagagacggacatcgggaggaagaacacacgggtacggctggtgttccgcgttcacgtcccgcaacccagcggccgcacgctgtccctgcaggtggcctccaaccccatcgaatgctcccagcgctcagctcaggagctgcctctggtggagaagcagagcacggacagctatccggtcgtgggcgggaagaagatggtcctgtctggccacaacttcctgcaggactccaaggtcattttcgtggagaaagccccagatggccaccatgtctgggagatggaagcgaaaactgaccgggacctgtgcaagccgaattctctggtggttgagatcccgccatttcggaatcagaggataaccagccccgttcacgtcagtttctacgtctgcaacgggaagagaaagcgaagccagtaccagcgtttcacctaccttcccgccaacgttccaattataaaaacagaacccactgatgattatgagcctgctccaacctgtggaccggtgagccaggggttaagtcctctcccaagaccatactacagccagcagctcgcgatgccacccgaccccagctcctgcctcgtggccggcttcccgccctgtccgcagagaagcaccctgatgccagcggcccctggcgtgagccccaagctccacgacctttctcccgctgcctacaccaagggcgttgccagcccgggccactgtcacctcggactcccgcagccggccggagaggcccccgccgtccaggacgtgcccaggccagtggccacgcaccccggctcgcccgggcagccacccccggccctgctgccacagcagtaaatgaaataatacgaaatgacctctccagcacgagcacccactcctagttgccacattggagcactcagttcagcaggggtatgctgacttcagcagacaaagacttttgaataaataaactgaactcacacctggtaccactcagaacctccaactgactgaatgccaggagctgaacattaatatgtgcaaagattggctctccaacaagaaggaaagcagggaggaagggagaccactgtgtcacctggaggagaagtcatctcatgacaacagaagggaggtggccgggctgagcacgggagacccaccgtgcaggggcctttcatgggaacggcccacacgcagtttgaccccacgcccagcccttctggcacccctggggttcaatactggaagtgccttatttaaccagaccatcagggcatcatagaattgagcattgaatttgctactgtaggagtatttttaggagcagaaactgcaaacacatttcattgtgaggttttaccctctgtatgaatgaagagaacgctggaaggctgcgagaggactctagtatgagtctccaacatttggaacgtttcctgggctgtcacgtacactcctgctgccttacacagtgcattttagaatcttccagtctgtcatctcagctcttttgtaacatgcttcccttgtctgcgcggttgaaaccgtaggcttgttcatagtcgcatgctcgcatctttgtttttaatctggcttcgaacatagcacaagtaacttgaatagcacatcaataggttactggacaaaagcagaaaaacctgttacaggatagcctgcatttgcatgtgtgtacatatctaggcatctatttatgtataaataataacagagccgacgtgtcctcgcccaggagggcttccctgtcagcaataaccggcatccgttttggaacctgcgtctggggctccagtcgctgctcttgctggcgtccatcgccgcctcggacggccgtgcattttctcgtctcacgcagttcgaggaggaccctagaaagccaggagctgtgattgacagtagctgtaggttaccagacggcaacattagaaagtgattgtaaataacatgcaacctaagtgtaatatatttgttcagttataagatgattgtttcacagaagccttaccactctctgcttcatctaagaaaaccaataccaaaaacgccactttaatgctcagccctgcgttgtgtgttttcagatgagttactgttaacaggtaggtttgtgtaggccttgctgggcactctgtacaattagttgcttattacgtatgattactcacagcgatctattgttccatataaccaaaaagcatggtttattcattgaaacacggttgacctgaactcgtgccttaggaattaatgcccccttatggaacctgcctgaattgcacctgcgggtggaggctccggctgtgaagtcactgaacagaacgtcgctgatggagaaagggctcccgcagaaggaacggcctgtaccgtgcgctccggcacaatcgcgtctcttgtgtctcactcacggaaagaaacaacctgaaggccatcccgtcggtctgcacgtaaccgtgaagacgtgtggccgcgtcccacctgcggctgggtaccctgcacccggcactgtaggagtcacgtgcagcctttctcaggggactgtcattgaaaaggaaacgtttgatgtctgtgtcagctgtctttgtagttaggaaatagatccaataaagccgtatttttttgctgga

SEQ ID NO: 160405 - DNA, 4595 bp, Homo sapiens
  Payload ID: 11365
  Gene Symbol: NFATC1
  Gene Name: nuclear factor of activated T-cells, cytoplasmic, calcineurin-dependent 1
  Uniprot ID: O95644
  ENST ID: ENST00000329101
  CDS Start-End: 57-2849
ccgaacccctggcggccgcgaccccggctcccgccccggccccggcccgacccgccatgacggggctggaggaccaggagttcgacttcgagttcctcttcgagtttaaccagcgcgacgagggcgccgccgcggccgccccagaacactatggctatgcatcctccaacgtcagccccgccctgccgctccccacggcgcactccaccctgccggccccgtgccacaaccttcagacctccacaccgggcatcatcccgccggcggatcacccctcggggtacggagcagctttggacggtgggcccgcgggctacttcctctcctccggccacaccaggcctgatggggcccctgccctggagagtcctcgcatcgagataacctcgtgcttgggcctgtaccacaacaataaccagtttttccacgatgtggaggtggaagacgtcctccctagctccaaacggtccccctccacggccacgctgagtctgcccagcctggaggcctacagagacccctcgtgcctgagcccggccagcagcctgtcctcccggagctgcaactcagaggcctcctcctacgagtccaactactcgtacccgtacgcgtccccccagacgtcgccatggcagtctccctgcgtgtctcccaagaccacggaccccgaggagggctttccccgcgggctgggggcctgcacactgctgggttccccgcggcactccccctccacctcgccccgcgccagcgtcactgaggagagctggctgggtgcccgctcctccagacccgcgtccccttgcaacaagaggaagtacagcctcaacggccggcagccgccctactcaccccaccactcgcccacgccgtccccgcacggctccccgcgggtcagcgtgaccgacgactcgtggttgggcaacaccacccagtacaccagctcggccatcgtggccgccatcaacgcgctgaccaccgacagcagcctggacctgggagatggcgtccctgtcaagtcccgcaagaccaccctggagcagccgccctcagtggcgctcaaggtggagcccgtcggggaggacctgggcagccccccgcccccggccgacttcgcgcccgaagactactcctctttccagcacatcaggaagggcggcttctgcgaccagtacctggcggtgccgcagcacccctaccagtgggcgaagcccaagcccctgtcccctacgtcctacatgagcccgaccctgcccgccctggactggcagctgccgtcccactcaggcccgtatgagcttcggattgaggtgcagcccaagtcccaccaccgagcccactacgagacggagggcagccggggggccgtgaaggcgtcggccggaggacaccccatcgtgcagctgcatggctacttggagaatgagccgctgatgctgcagcttttcattgggacggcggacgaccgcctgctgcgcccgcacgccttctaccaggtgcaccgcatcacagggaagaccgtgtccaccaccagccacgaggccatcctctccaacaccaaagtcctggagatcccactcctgccggagaacagcatgcgagccgtcattgactgtgccggaatcctgaaactcagaaactccgacattgaacttcggaaaggagagacggacatcgggaggaagaacacacgggtacggctggtgttccgcgttcacgtcccgcaacccagcggccgcacgctgtccctgcaggtggcctccaaccccatcgaatgctcccagcgctcagctcaggagctgcctctggtggagaagcagagcacggacagctatccggtcgtgggcgggaagaagatggtcctgtctggccacaacttcctgcaggactccaaggtcattttcgtggagaaagccccagatggccaccatgtctgggagatggaagcgaaaactgaccgggacctgtgcaagccgaattctctggtggttgagatcccgccatttcggaatcagaggataaccagccccgttcacgtcagtttctacgtctgcaacgggaagagaaagcgaagccagtaccagcgtttcacctaccttcccgccaacgttccaattataaaaacagaacccactgatgattatgagcctgctccaacctgtggaccggtgagccaggggttaagtcctctcccaagaccatactacagccagcagctcgcgatgccacccgaccccagctcctgcctcgtggccggcttcccgccctgtccgcagagaagcaccctgatgccagcggcccctggcgtgagccccaagctccacgacctttctcccgctgcctacaccaagggcgttgccagcccgggccactgtcacctcggactcccgcagccggccggagaggcccccgccgtccaggacgtgcccaggccagtggccacgcaccccggctcgcccgggcagccacccccggccctgctgccacagcaggtgagtgcgcctccaagcagtagctgcccccctggtctcgaacactcgctctgccccagcagcccctctcctccactcccgcctgccacccaagagccgacctgcctgcagccctgcagcccagcgtgcccgcccgccacgggccgcccgcagcacctgccgtccacggtccgcagggacgagtctccgactgccgggccacggctgctgccagaggtgcatgaggacggtagtcctaatttggcccctattcctgtaacggtcaagcgagagcctgaagagttggaccagttgtacctggatgacgtaaatgaaataatacgaaatgacctctccagcacgagcacccactcctagttgccacattggagcactcagttcagcaggggtatgctgacttcagcagacaaagacttttgaataaataaactgaactcacacctggtaccactcagaacctccaactgactgaatgccaggagctgaacattaatatgtgcaaagattggctctccaacaagaaggaaagcagggaggaagggagaccactgtgtcacctggaggagaagtcatctcatgacaacagaagggaggtggccgggctgagcacgggagacccaccgtgcaggggcctttcatgggaacggcccacacgcagtttgaccccacgcccagcccttctggcacccctggggttcaatactggaagtgccttatttaaccagaccatcagggcatcatagaattgagcattgaatttgctactgtaggagtatttttaggagcagaaactgcaaacacatttcattgtgaggttttaccctctgtatgaatgaagagaacgctggaaggctgcgagaggactctagtatgagtctccaacatttggaacgtttcctgggctgtcacgtacactcctgctgccttacacagtgcattttagaatcttccagtctgtcatctcagctcttttgtaacatgcttcccttgtctgcgcggttgaaaccgtaggcttgttcatagtcgcatgctcgcatctttgtttttaatctggcttcgaacatagcacaagtaacttgaatagcacatcaataggttactggacaaaagcagaaaaacctgttacaggatagcctgcatttgcatgtgtgtacatatctaggcatctatttatgtataaataataacagagccgacgtgtcctcgcccaggagggcttccctgtcagcaataaccggcatccgttttggaacctgcgtctggggctccagtcgctgctcttgctggcgtccatcgccgcctcggacggccgtgcattttctcgtctcacgcagttcgaggaggaccctagaaagccaggagctgtgattgacagtagctgtaggttaccagacggcaacattagaaagtgattgtaaataacatgcaacctaagtgtaatatatttgttcagttataagatgattgtttcacagaagccttaccactctctgcttcatctaagaaaaccaataccaaaaacgccactttaatgctcagccctgcgttgtgtgttttcagatgagttactgttaacaggtaggtttgtgtaggccttgctgggcactctgtacaattagttgcttattacgtatgattactcacagcgatctattgttccatataaccaaaaagcatggtttattcattgaaacacggttgacctgaactcgtgccttaggaattaatgcccccttatggaacctgcctgaattgcacctgcgggtggaggctccggctgtgaagtcactgaacagaacgtcgctgatggagaaagggctcccgcagaaggaacggcctgtaccgtgcgctccggcacaatcgcgtctcttgtgtctcactcacggaaagaaacaacctgaaggccatcccgtcggtctgcacgtaaccgtgaagacgtgtggccgcgtcccacctgcggctgggtaccctgcacccggcactgtaggagtcacgtgcagcctttctcaggggactgtcattgaaaaggaaacgtttgatgtctgtgtcagctgtctttgtagttaggaaatagatccaataaagccgtatttttttgctgga

SEQ ID NO: 160406 - DNA, 3453 bp, Homo sapiens
  Payload ID: 11365
  Gene Symbol: NFATC1
  Gene Name: nuclear factor of activated T-cells, cytoplasmic, calcineurin-dependent 1
  Uniprot ID: O95644
  ENST ID: ENST00000397790
  CDS Start-End: 599-1660
ctcagaggctccgaactcgccggcggagtcgccgcgccagatcccagcagcagggcgcgggcaccggggcgcgggcagggctcggagccaccgcgcaggtcctagggccgcggccgggccccgccacgcgcgcacacgcccctcgatgactttcctccggggcgcgcggcgctgagcccggggcgagggctgtcttcccggagacccgaccccggcagcgcggggcggccgcttctcctgtgcctccgcccgccgctccactccccgccgccgccgcgcggatgccaagcaccagctttccagtcccttccaagtttccacttggccctgcggctgcggtcttcgggagaggagaaactttggggcccgcgccgcgcgccggcggcaccatgaagtcagcggaggaagcccgaccctgcccgccctggactggcagctgccgtcccactcaggcccgtatgagcttcggattgaggtgcagcccaagtcccaccaccgagcccactacgagacggagggcagccggggggccgtgaaggcgtcggccggaggacaccccatcgtgcagctgcatggctacttggagaatgagccgctgatgctgcagcttttcattgggacggcggacgaccgcctgctgcgcccgcacgccttctaccaggtgcaccgcatcacagggaagaccgtgtccaccaccagccacgaggccatcctctccaacaccaaagtcctggagatcccactcctgccggagaacagcatgcgagccgtcattgactgtgccggaatcctgaaactcagaaactccgacattgaacttcggaaaggagagacggacatcgggaggaagaacacacgggtacggctggtgttccgcgttcacgtcccgcaacccagcggccgcacgctgtccctgcaggtggcctccaaccccatcgaatgctcccagcgctcagctcaggagctgcctctggtggagaagcagagcacggacagctatccggtcgtgggcgggaagaagatggtcctgtctggccacaacttcctgcaggactccaaggtcattttcgtggagaaagccccagatggccaccatgtctgggagatggaagcgaaaactgaccgggacctgtgcaagccgaattctctggtggttgagatcccgccatttcggaatcagaggataaccagccccgttcacgtcagtttctacgtctgcaacgggaagagaaagcgaagccagtaccagcgtttcacctaccttcccgccaacgttccaattataaaaacagaacccactgatgattatgagcctgctccaacctgtggaccggtgagccaggggttaagtcctctcccaagaccatactacagccagcagctcgcgatgccacccgaccccagctcctgcctcgtggccggcttcccgccctgtccgcagagaagcaccctgatgccagcggcccctggcgtgagccccaagctccacgacctttctcccgctgcctacaccaagggcgttgccagcccgggccactgtcacctcggactcccgcagccggccggagaggcccccgccgtccaggacgtgcccaggccagtggccacgcaccccggctcgcccgggcagccacccccggccctgctgccacagcagtaaatgaaataatacgaaatgacctctccagcacgagcacccactcctagttgccacattggagcactcagttcagcaggggtatgctgacttcagcagacaaagacttttgaataaataaactgaactcacacctggtaccactcagaacctccaactgactgaatgccaggagctgaacattaatatgtgcaaagattggctctccaacaagaaggaaagcagggaggaagggagaccactgtgtcacctggaggagaagtcatctcatgacaacagaagggaggtggccgggctgagcacgggagacccaccgtgcaggggcctttcatgggaacggcccacacgcagtttgaccccacgcccagcccttctggcacccctggggttcaatactggaagtgccttatttaaccagaccatcagggcatcatagaattgagcattgaatttgctactgtaggagtatttttaggagcagaaactgcaaacacatttcattgtgaggttttaccctctgtatgaatgaagagaacgctggaaggctgcgagaggactctagtatgagtctccaacatttggaacgtttcctgggctgtcacgtacactcctgctgccttacacagtgcattttagaatcttccagtctgtcatctcagctcttttgtaacatgcttcccttgtctgcgcggttgaaaccgtaggcttgttcatagtcgcatgctcgcatctttgtttttaatctggcttcgaacatagcacaagtaacttgaatagcacatcaataggttactggacaaaagcagaaaaacctgttacaggatagcctgcatttgcatgtgtgtacatatctaggcatctatttatgtataaataataacagagccgacgtgtcctcgcccaggagggcttccctgtcagcaataaccggcatccgttttggaacctgcgtctggggctccagtcgctgctcttgctggcgtccatcgccgcctcggacggccgtgcattttctcgtctcacgcagttcgaggaggaccctagaaagccaggagctgtgattgacagtagctgtaggttaccagacggcaacattagaaagtgattgtaaataacatgcaacctaagtgtaatatatttgttcagttataagatgattgtttcacagaagccttaccactctctgcttcatctaagaaaaccaataccaaaaacgccactttaatgctcagccctgcgttgtgtgttttcagatgagttactgttaacaggtaggtttgtgtaggccttgctgggcactctgtacaattagttgcttattacgtatgattactcacagcgatctattgttccatataaccaaaaagcatggtttattcattgaaacacggttgacctgaactcgtgccttaggaattaatgcccccttatggaacctgcctgaattgcacctgcgggtggaggctccggctgtgaagtcactgaacagaacgtcgctgatggagaaagggctcccgcagaaggaacggcctgtaccgtgcgctccggcacaatcgcgtctcttgtgtctcactcacggaaagaaacaacctgaaggccatcccgtcggtctgcacgtaaccgtgaagacgtgtggccgcgtcccacctgcggctgggtaccctgcacccggcactgtaggagtcacgtgcagcctttctcaggggactgtcattgaaaaggaaacgtttgatgtctgtgtcagctgtctttgtagttaggaaatagatccaataaagccgtatttttttgctgga

SEQ ID NO: 160407 - DNA, 2832 bp, Homo sapiens
  Payload ID: 11365
  Gene Symbol: NFATC1
  Gene Name: nuclear factor of activated T-cells, cytoplasmic, calcineurin-dependent 1
  Uniprot ID: O95644
  ENST ID: ENST00000427363
  CDS Start-End: 1-2832
atgccaagcaccagctttccagtcccttccaagtttccacttggccctgcggctgcggtcttcgggagaggagaaactttggggcccgcgccgcgcgccggcggcaccatgaagtcagcggaggaagaacactatggctatgcatcctccaacgtcagccccgccctgccgctccccacggcgcactccaccctgccggccccgtgccacaaccttcagacctccacaccgggcatcatcccgccggcggatcacccctcggggtacggagcagctttggacggtgggcccgcgggctacttcctctcctccggccacaccaggcctgatggggcccctgccctggagagtcctcgcatcgagataacctcgtgcttgggcctgtaccacaacaataaccagtttttccacgatgtggaggtggaagacgtcctccctagctccaaacggtccccctccacggccacgctgagtctgcccagcctggaggcctacagagacccctcgtgcctgagcccggccagcagcctgtcctcccggagctgcaactcagaggcctcctcctacgagtccaactactcgtacccgtacgcgtccccccagacgtcgccatggcagtctccctgcgtgtctcccaagaccacggaccccgaggagggctttccccgcgggctgggggcctgcacactgctgggttccccgcggcactccccctccacctcgccccgcgccagcgtcactgaggagagctggctgggtgcccgctcctccagacccgcgtccccttgcaacaagaggaagtacagcctcaacggccggcagccgccctactcaccccaccactcgcccacgccgtccccgcacggctccccgcgggtcagcgtgaccgacgactcgtggttgggcaacaccacccagtacaccagctcggccatcgtggccgccatcaacgcgctgaccaccgacagcagcctggacctgggagatggcgtccctgtcaagtcccgcaagaccaccctggagcagccgccctcagtggcgctcaaggtggagcccgtcggggaggacctgggcagccccccgcccccggccgacttcgcgcccgaagactactcctctttccagcacatcaggaagggcggcttctgcgaccagtacctggcggtgccgcagcacccctaccagtgggcgaagcccaagcccctgtcccctacgtcctacatgagcccgaccctgcccgccctggactggcagctgccgtcccactcaggcccgtatgagcttcggattgaggtgcagcccaagtcccaccaccgagcccactacgagacggagggcagccggggggccgtgaaggcgtcggccggaggacaccccatcgtgcagctgcatggctacttggagaatgagccgctgatgctgcagcttttcattgggacggcggacgaccgcctgctgcgcccgcacgccttctaccaggtgcaccgcatcacagggaagaccgtgtccaccaccagccacgaggccatcctctccaacaccaaagtcctggagatcccactcctgccggagaacagcatgcgagccgtcattgactgtgccggaatcctgaaactcagaaactccgacattgaacttcggaaaggagagacggacatcgggaggaagaacacacgggtacggctggtgttccgcgttcacgtcccgcaacccagcggccgcacgctgtccctgcaggtggcctccaaccccatcgaatgctcccagcgctcagctcaggagctgcctctggtggagaagcagagcacggacagctatccggtcgtgggcgggaagaagatggtcctgtctggccacaacttcctgcaggactccaaggtcattttcgtggagaaagccccagatggccaccatgtctgggagatggaagcgaaaactgaccgggacctgtgcaagccgaattctctggtggttgagatcccgccatttcggaatcagaggataaccagccccgttcacgtcagtttctacgtctgcaacgggaagagaaagcgaagccagtaccagcgtttcacctaccttcccgccaacgttccaattataaaaacagaacccactgatgattatgagcctgctccaacctgtggaccggtgagccaggggttaagtcctctcccaagaccatactacagccagcagctcgcgatgccacccgaccccagctcctgcctcgtggccggcttcccgccctgtccgcagagaagcaccctgatgccagcggcccctggcgtgagccccaagctccacgacctttctcccgctgcctacaccaagggcgttgccagcccgggccactgtcacctcggactcccgcagccggccggagaggcccccgccgtccaggacgtgcccaggccagtggccacgcaccccggctcgcccgggcagccacccccggccctgctgccacagcaggtgagtgcgcctccaagcagtagctgcccccctggtctcgaacactcgctctgccccagcagcccctctcctccactcccgcctgccacccaagagccgacctgcctgcagccctgcagcccagcgtgcccgcccgccacgggccgcccgcagcacctgccgtccacggtccgcagggacgagtctccgactgccgggccacggctgctgccagaggtgcatgaggacggtagtcctaatttggcccctattcctgtaacggtcaagcgagagcctgaagagttggaccagttgtacctggatgacgtaaatgaaataatacgaaatgacctctccagcacgagcacccactcctag

SEQ ID NO: 160408 - DNA, 3558 bp, Homo sapiens
  Payload ID: 11365
  Gene Symbol: NFATC1
  Gene Name: nuclear factor of activated T-cells, cytoplasmic, calcineurin-dependent 1
  ENST ID: ENST00000545796
  CDS Start-End: 397-1812
ggggacggggggaggggcgggggtcacgttacgcggaggacgcgcgggcagcgccgggagaaccgaacccctggcggccgcgaccccggctcccgccccggccccggcccgacccgccatgacggggctggaggaccaggagttcgacttcgagttcctcttcgagtttaaccagcgcgacgagggcgccgccgcggccgccccagcccgaccctgcccgccctggactggcagctgccgtcccactcaggcccgtatgagcttcggattgaggtgcagcccaagtcccaccaccgagcccactacgagacggagggcagccggggggccgtgaaggcgtcggccggaggacaccccatcgtgcagctgcatggctacttggagaatgagccgctgatgctgcagcttttcattgggacggcggacgaccgcctgctgcgcccgcacgccttctaccaggtgcaccgcatcacagggaagaccgtgtccaccaccagccacgaggccatcctctccaacaccaaagtcctggagatcccactcctgccggagaacagcatgcgagccgtcattgactgtgccggaatcctgaaactcagaaactccgacattgaacttcggaaaggagagacggacatcgggaggaagaacacacgggtacggctggtgttccgcgttcacgtcccgcaacccagcggccgcacgctgtccctgcaggtggcctccaaccccatcgaatgctcccagcgctcagctcaggagctgcctctggtggagaagcagagcacggacagctatccggtcgtgggcgggaagaagatggtcctgtctggccacaacttcctgcaggactccaaggtcattttcgtggagaaagccccagatggccaccatgtctgggagatggaagcgaaaactgaccgggacctgtgcaagccgaattctctggtggttgagatcccgccatttcggaatcagaggataaccagccccgttcacgtcagtttctacgtctgcaacgggaagagaaagcgaagccagtaccagcgtttcacctaccttcccgccaacgttccaattataaaaacagaacccactgatgattatgagcctgctccaacctgtggaccggtgagccaggggttaagtcctctcccaagaccatactacagccagcagctcgcgatgccacccgaccccagctcctgcctcgtggccggcttcccgccctgtccgcagagaagcaccctgatgccagcggcccctggcgtgagccccaagctccacgacctttctcccgctgcctacaccaagggcgttgccagcccgggccactgtcacctcggactcccgcagccggccggagaggcccccgccgtccaggacgtgcccaggccagtggccacgcaccccggctcgcccgggcagccacccccggccctgctgccacagcaggtgagtgcgcctccaagcagtagctgcccccctggtctcgaacactcgctctgccccagcagcccctctcctccactcccgcctgccacccaagagccgacctgcctgcagccctgcagcccagcgtgcccgcccgccacgggccgcccgcagcacctgccgtccacggtccgcagggacgagtctccgactgccgggccacggctgctgccagaggtgcatgaggacggtagtcctaatttggcccctattcctgtaacggtcaagcgagagcctgaagagttggaccagttgtacctggatgacgtaaatgaaataatacgaaatgacctctccagcacgagcacccactcctagttgccacattggagcactcagttcagcaggggtatgctgacttcagcagacaaagacttttgaataaataaactgaactcacacctggtaccactcagaacctccaactgactgaatgccaggagctgaacattaatatgtgcaaagattggctctccaacaagaaggaaagcagggaggaagggagaccactgtgtcacctggaggagaagtcatctcatgacaacagaagggaggtggccgggctgagcacgggagacccaccgtgcaggggcctttcatgggaacggcccacacgcagtttgaccccacgcccagcccttctggcacccctggggttcaatactggaagtgccttatttaaccagaccatcagggcatcatagaattgagcattgaatttgctactgtaggagtatttttaggagcagaaactgcaaacacatttcattgtgaggttttaccctctgtatgaatgaagagaacgctggaaggctgcgagaggactctagtatgagtctccaacatttggaacgtttcctgggctgtcacgtacactcctgctgccttacacagtgcattttagaatcttccagtctgtcatctcagctcttttgtaacatgcttcccttgtctgcgcggttgaaaccgtaggcttgttcatagtcgcatgctcgcatctttgtttttaatctggcttcgaacatagcacaagtaacttgaatagcacatcaataggttactggacaaaagcagaaaaacctgttacaggatagcctgcatttgcatgtgtgtacatatctaggcatctatttatgtataaataataacagagccgacgtgtcctcgcccaggagggcttccctgtcagcaataaccggcatccgttttggaacctgcgtctggggctccagtcgctgctcttgctggcgtccatcgccgcctcggacggccgtgcattttctcgtctcacgcagttcgaggaggaccctagaaagccaggagctgtgattgacagtagctgtaggttaccagacggcaacattagaaagtgattgtaaataacatgcaacctaagtgtaatatatttgttcagttataagatgattgtttcacagaagccttaccactctctgcttcatctaagaaaaccaataccaaaaacgccactttaatgctcagccctgcgttgtgtgttttcagatgagttactgttaacaggtaggtttgtgtaggccttgctgggcactctgtacaattagttgcttattacgtatgattactcacagcgatctattgttccatataaccaaaaagcatggtttattcattgaaacacggttgacctgaactcgtgccttaggaattaatgcccccttatggaacctgcctgaattgcacctgcgggtggaggctccggctgtgaagtcactgaacagaacgtcgctgatggagaaagggctcccgcagaaggaacggcctgtaccgtgcgctccggcacaatcgcgtctcttgtgtctcactcacggaaagaaacaacctgaaggccatcccgtcggtctgcacgtaaccgtgaagacgtgtggccgcgtcccacctgcggctgggtaccctgcacccggcactgtaggagtcacgtgcagcctttctcaggggactgtcattgaaaaggaaacgtttgatgtctgtgtcagctgtctttgtagttaggaaatagatccaataaagccgtatttttttgctgga

SEQ ID NO: 160409 - DNA, 2142 bp, Homo sapiens
  Payload ID: 11365
  Gene Symbol: NFATC1
  Gene Name: nuclear factor of activated T-cells, cytoplasmic, calcineurin-dependent 1
  Uniprot ID: O95644
  ENST ID: ENST00000542384
  CDS Start-End: 1-2142
atgccaagcaccagctttccagtcccttccaagtttccacttggccctgcggctgcggtcttcgggagaggagaaactttggggcccgcgccgcgcgccggcggcaccatgaagtcagcggaggaagaacactatggctatgcatcctccaacgtcagccccgccctgccgctccccacggcgcactccaccctgccggccccgtgccacaaccttcagacctccacaccgggcatcatcccgccggcggatcacccctcggggtacggagcagctttggacggtgggcccgcgggctacttcctctcctccggccacaccaggcctgatggggcccctgccctggagagtcctcgcatcgagataacctcgtgcttgggcctgtaccacaacaataaccagtttttccacgatgtggaggtggaagacgtcctccctagctccaaacggtccccctccacggccacgctgagtctgcccagcctggaggcctacagagacccctcgtgcctgagcccggccagcagcctgtcctcccggagctgcaactcagaggcctcctcctacgagtccaactactcgtacccgtacgcgtccccccagacgtcgccatggcagtctccctgcgtgtctcccaagaccacggaccccgaggagggctttccccgcgggctgggggcctgcacactgctgggttccccgcggcactccccctccacctcgccccgcgccagcgtcactgaggagagctggctgggtgcccgctcctccagacccgcgtccccttgcaacaagaggaagtacagcctcaacggccggcagccgccctactcaccccaccactcgcccacgccgtccccgcacggctccccgcgggtcagcgtgaccgacgactcgtggttgggcaacaccacccagtacaccagctcggccatcgtggccgccatcaacgcgctgaccaccgacagcagcctggacctgggagatggcgtccctgtcaagtcccgcaagaccaccctggagcagccgccctcagtggcgctcaaggtggagcccgtcggggaggacctgggcagccccccgcccccggccgacttcgcgcccgaagactactcctctttccagcacatcaggaagggcggcttctgcgaccagtacctggcggtgccgcagcacccctaccagtgggcgaagcccaagcccctgtcccctacgtcctacatgagcccgaccctgcccgccctggactggcagctgccgtcccactcaggcccgtatgagcttcggattgaggtgcagcccaagtcccaccaccgagcccactacgagacggagggcagccggggggccgtgaaggcgtcggccggaggacaccccatcgtgcagctgcatggctacttggagaatgagccgctgatgctgcagcttttcattgggacggcggacgaccgcctgctgcgcccgcacgccttctaccaggtgcaccgcatcacagggaagaccgtgtccaccaccagccacgaggccatcctctccaacaccaaagtcctggagatcccactcctgccggagaacagcatgcgagccgtcattgactgtgccggaatcctgaaactcagaaactccgacattgaacttcggaaaggagagacggacatcgggaggaagaacacacgggtacggctggtgttccgcgttcacgtcccgcaacccagcggccgcacgctgtccctgcaggtggcctccaaccccatcgaatgctcccagcgctcagctcaggagctgcctctggtggagaagcagagcacggacagctatccggtcgtgggcgggaagaagatggtcctgtctggccacaacttcctgcaggactccaaggtcattttcgtggagaaagccccagatggccaccatgtctgggagatggaagcgaaaactgaccgggacctgtgcaagccgaattctctggtggttgagatcccgccatttcggaatcagaggataaccagccccgttcacgtcagtttctacgtctgcaacgggaagagaaagcgaagccagtaccagcgtttcacctaccttcccgccaacgtaaatgaaataatacgaaatgacctctccagcacgagcacccactcctag

SEQ ID NO: 160410 - DNA, 4819 bp, Homo sapiens
  Payload ID: 11365
  Gene Symbol: NFATC1
  Gene Name: nuclear factor of activated T-cells, cytoplasmic, calcineurin-dependent 1
  Uniprot ID: O95644
  ENST ID: ENST00000591814
  CDS Start-End: 296-2446
gcgtcagagcgagactcagaggctccgaactcgccggcggagtcgccgcgccagatcccagcagcagggcgcgggcaccggggcgcgggcagggctcggagccaccgcgcaggtcctagggccgcggccgggccccgccacgcgcgcacacgcccctcgatgactttcctccggggcgcgcggcgctgagcccggggcgagggctgtcttcccggagacccgaccccggcagcgcggggcggccgcttctcctgtgcctccgcccgccgctccactccccgccgccgccgcgcggatgccaagcaccagctttccagtcccttccaagtttccacttggccctgcggctgcggtcttcgggagaggagaaactttggggcccgcgccgcgcgccggcggcaccatgaagtcagcggaggaagaacactatggctatgcatcctccaacgtcagccccgccctgccgctccccacggcgcactccaccctgccggccccgtgccacaaccttcagacctccacaccgggcatcatcccgccggcggatcacccctcggggtacggagcagctttggacggtgggcccgcgggctacttcctctcctccggccacaccaggcctgatggggcccctgccctggagagtcctcgcatcgagataacctcgtgcttgggcctgtaccacaacaataaccagtttttccacgatgtggaggtggaagacgtcctccctagctccaaacggtccccctccacggccacgctgagtctgcccagcctggaggcctacagagacccctcgtgcctgagcccggccagcagcctgtcctcccggagctgcaactcagaggcctcctcctacgagtccaactactcgtacccgtacgcgtccccccagacgtcgccatggcagtctccctgcgtgtctcccaagaccacggaccccgaggagggctttccccgcgggctgggggcctgcacactgctgggttccccgcggcactccccctccacctcgccccgcgccagcgtcactgaggagagctggctgggtgcccgctcctccagacccgcgtccccttgcaacaagaggaagtacagcctcaacggccggcagccgccctactcaccccaccactcgcccacgccgtccccgcacggctccccgcgggtcagcgtgaccgacgactcgtggttgggcaacaccacccagtacaccagctcggccatcgtggccgccatcaacgcgctgaccaccgacagcagcctggacctgggagatggcgtccctgtcaagtcccgcaagaccaccctggagcagccgccctcagtggcgctcaaggtggagcccgtcggggaggacctgggcagccccccgcccccggccgacttcgcgcccgaagactactcctctttccagcacatcaggaagggcggcttctgcgaccagtacctggcggtgccgcagcacccctaccagtgggcgaagcccaagcccctgtcccctacgtcctacatgagcccgaccctgcccgccctggactggcagctgccgtcccactcaggcccgtatgagcttcggattgaggtgcagcccaagtcccaccaccgagcccactacgagacggagggcagccggggggccgtgaaggcgtcggccggaggacaccccatcgtgcagctgcatggctacttggagaatgagccgctgatgctgcagcttttcattgggacggcggacgaccgcctgctgcgcccgcacgccttctaccaggtgcaccgcatcacagggaagaccgtgtccaccaccagccacgaggccatcctctccaacaccaaagtcctggagatcccactcctgccggagaacagcatgcgagccgtcattgactgtgccggaatcctgaaactcagaaactccgacattgaacttcggaaaggagagacggacatcgggaggaagaacacacgggtacggctggtgttccgcgttcacgtcccgcaacccagcggccgcacgctgtccctgcaggtggcctccaaccccatcgaatgctcccagcgctcagctcaggagctgcctctggtggagaagcagagcacggacagctatccggtcgtgggcgggaagaagatggtcctgtctggccacaacttcctgcaggactccaaggtcattttcgtggagaaagccccagatggccaccatgtctgggagatggaagcgaaaactgaccgggacctgtgcaagccgaattctctggtggttgagatcccgccatttcggaatcagaggataaccagccccgttcacgtcagtttctacgtctgcaacgggaagagaaagcgaagccagtaccagcgtttcacctaccttcccgccaacggtaacgccatctttctaaccgtaagccgtgaacatgagcgcgtggggtgctttttctaaagacgcagaaacgacgtcgccgtaaagcagcgtggcgtgttgcacatttaactgtgtgatgtcccgttagtgagaccgagccatcgatgccctgaaaaggaaaggaaaagggaagcttcggatgcattttccttgatccctgttgggggtggggggcgggggttgcatactcagatagtcacggttattttgcttcttgcgaatgtataacagccaaggggaaaacatggctcttctgctccaaaaaactgagggggtcctggtgtgcatttgcaccctaaagctgcttacggtgaaaaggcaaataggtatagctattttgcaggcacctttaggaataaactttgcttttaagcctgtagtcctgatgtggtctttaaggatggtgaatgagctttgtgctgggcggacgtccccgagacacttctccaggggtaacttcatctcctgggaccacgggcatccaggctggggcaccttctcctcaacctgcctgcccctcacccgccgtgggaatggctccttttcactcatacaaaaaaaaaaaaaaatcatcttacctttttaacctttagggtgttttcttaaagaaaataccatccagtttgtttcttcagtccctgaaccagtagaagagaaaggcgtcccccacgccatccccggcttcctttgtgggtacaggccactccccccagctcggagaggacagaattagcagtcatcctgaattttactgtattttgtgggtacaggccactccccacagctcggaggggacagttagcggtcatcctgaattttactgtattttgggtaagcttagctaacatcaataatctttttatattgctttttttctaaaaactgcagagattcctgtcatctgagagggaaattacacactgggcgctaattgcaaaagcagctgcgttctcttagtaaaatcagggtgttttggaaggtttccattttctctgaatgtaaacagcatttgtaatagaccagatcctaaggaagcccttgaatccccacgttcacaccaaactgttgggactccttgtttttatcaggcaagctctggaaaggcctctcaagatgtggaaaatggggttttgctgtaaagtcgctgtaccctaagagtgtctgtgagacagagctgcaggggtgatgtgcagcccccagcccagccctcgcggggaagagcctcacgctctgtgacccccaggattgtggggagggcctcatgctctgggacccccgggattgtggggaagagcctcatgctctgggacccccgggattgtggggaagggcctcacgctctgggacccccaggattgtggggaagagcctcacgctctgggacccccgggattgtggggaagagcctcacgctctgggacccccgggattgtggggaagggcctcacgctctggacccccctggggtttacgtggtctgtgccgcccacacttagtgagtccagcccattcttggaacaaagtacaatatatcttacagaagaaaatattttatctttttctgaaaatataatgattgagtcctaattaaacttcaagcatggttgaccagaaattgaatgttttaaagaaaacctaggccttatagagaaggattgctttccagagcagtgcattaatttttttcttatttgctcagcatgcggcagtccccaccgtgggtttgagcagcactgactttagcacagatcacgtatctcagaggcagaaggggcgtgcggggagcgtgcctgcccttcacaggtgggaggtggcggcccccaggaccgtggccacagcatgaagccggtggggctgagccgctcctgctacctccagtccacaccccacctggcagccggccgtcctgtcctaccagccacactcctgcctcgattggccccggctcccctctcagcattgtgcccagcgtggacatctctcctgcaccccctgcccagtgtctcggctgcaccctccaccccccatctgctccagcatggctcaacgcaggccaggttccccaggctcaccctgggcaccagccttcgcccgttctccctctctttgcctccgtcgtctcttctctcctggacgtagcaccatagtccctgggtgaccatcccaggtccccacaagcacactgaccagccccaccagcccccaggggctccccggctccctgtcaccccacctggtcctgggggctgcgaccgcaacctgcaccagactgtgagcccctcaggcagagcccccaggctgccgcagggcgagatccccagtgttgacgctgggcctacctcgaggccactgtcagtgtggttgttaaataaataatgaatagaaaccagc

SEQ ID NO: 160411 - DNA, 2103 bp, Homo sapiens
  Payload ID: 11365
  Gene Symbol: NFATC1
  Gene Name: nuclear factor of activated T-cells, cytoplasmic, calcineurin-dependent 1
  Uniprot ID: O95644
  ENST ID: ENST00000586434
  CDS Start-End: 1-2103
atgacggggctggaggaccaggagttcgacttcgagttcctcttcgagtttaaccagcgcgacgagggcgccgccgcggccgccccagaacactatggctatgcatcctccaacgtcagccccgccctgccgctccccacggcgcactccaccctgccggccccgtgccacaaccttcagacctccacaccgggcatcatcccgccggcggatcacccctcggggtacggagcagctttggacggtgggcccgcgggctacttcctctcctccggccacaccaggcctgatggggcccctgccctggagagtcctcgcatcgagataacctcgtgcttgggcctgtaccacaacaataaccagtttttccacgatgtggaggtggaagacgtcctccctagctccaaacggtccccctccacggccacgctgagtctgcccagcctggaggcctacagagacccctcgtgcctgagcccggccagcagcctgtcctcccggagctgcaactcagaggcctcctcctacgagtccaactactcgtacccgtacgcgtccccccagacgtcgccatggcagtctccctgcgtgtctcccaagaccacggaccccgaggagggctttccccgcgggctgggggcctgcacactgctgggttccccgcggcactccccctccacctcgccccgcgccagcgtcactgaggagagctggctgggtgcccgctcctccagacccgcgtccccttgcaacaagaggaagtacagcctcaacggccggcagccgccctactcaccccaccactcgcccacgccgtccccgcacggctccccgcgggtcagcgtgaccgacgactcgtggttgggcaacaccacccagtacaccagctcggccatcgtggccgccatcaacgcgctgaccaccgacagcagcctggacctgggagatggcgtccctgtcaagtcccgcaagaccaccctggagcagccgccctcagtggcgctcaaggtggagcccgtcggggaggacctgggcagccccccgcccccggccgacttcgcgcccgaagactactcctctttccagcacatcaggaagggcggcttctgcgaccagtacctggcggtgccgcagcacccctaccagtgggcgaagcccaagcccctgtcccctacgtcctacatgagcccgaccctgcccgccctggactggcagctgccgtcccactcaggcccgtatgagcttcggattgaggtgcagcccaagtcccaccaccgagcccactacgagacggagggcagccggggggccgtgaaggcgtcggccggaggacaccccatcgtgcagctgcatggctacttggagaatgagccgctgatgctgcagcttttcattgggacggcggacgaccgcctgctgcgcccgcacgccttctaccaggtgcaccgcatcacagggaagaccgtgtccaccaccagccacgaggccatcctctccaacaccaaagtcctggagatcccactcctgccggagaacagcatgcgagccgtcattgactgtgccggaatcctgaaactcagaaactccgacattgaacttcggaaaggagagacggacatcgggaggaagaacacacgggtacggctggtgttccgcgttcacgtcccgcaacccagcggccgcacgctgtccctgcaggtggcctccaaccccatcgaatgctcccagcgctcagctcaggagctgcctctggtggagaagcagagcacggacagctatccggtcgtgggcgggaagaagatggtcctgtctggccacaacttcctgcaggactccaaggtcattttcgtggagaaagccccagatggccaccatgtctgggagatggaagcgaaaactgaccgggacctgtgcaagccgaattctctggtggttgagatcccgccatttcggaatcagaggataaccagccccgttcacgtcagtttctacgtctgcaacgggaagagaaagcgaagccagtaccagcgtttcacctaccttcccgccaacgtaaatgaaataatacgaaatgacctctccagcacgagcacccactcctag

SEQ ID NO: 160412 - DNA, 2531 bp, Homo sapiens
  Payload ID: 11365
  Gene Symbol: NFATC1
  Gene Name: nuclear factor of activated T-cells, cytoplasmic, calcineurin-dependent 1
  Uniprot ID: O95644
  ENST ID: ENST00000592223
  CDS Start-End: 60-2171
gaaccgaacccctggcggccgcgaccccggctcccgccccggccccggcccgacccgccatgacggggctggaggaccaggagttcgacttcgagttcctcttcgagtttaaccagcgcgacgagggcgccgccgcggccgccccagaacactatggctatgcatcctccaacgtcagccccgccctgccgctccccacggcgcactccaccctgccggccccgtgccacaaccttcagacctccacaccgggcatcatcccgccggcggatcacccctcggggtacggagcagctttggacggtgggcccgcgggctacttcctctcctccggccacaccaggcctgatggggcccctgccctggagagtcctcgcatcgagataacctcgtgcttgggcctgtaccacaacaataaccagtttttccacgatgtggaggtggaagacgtcctccctagctccaaacggtccccctccacggccacgctgagtctgcccagcctggaggcctacagagacccctcgtgcctgagcccggccagcagcctgtcctcccggagctgcaactcagaggcctcctcctacgagtccaactactcgtacccgtacgcgtccccccagacgtcgccatggcagtctccctgcgtgtctcccaagaccacggaccccgaggagggctttccccgcgggctgggggcctgcacactgctgggttccccgcggcactccccctccacctcgccccgcgccagcgtcactgaggagagctggctgggtgcccgctcctccagacccgcgtccccttgcaacaagaggaagtacagcctcaacggccggcagccgccctactcaccccaccactcgcccacgccgtccccgcacggctccccgcgggtcagcgtgaccgacgactcgtggttgggcaacaccacccagtacaccagctcggccatcgtggccgccatcaacgcgctgaccaccgacagcagcctggacctgggagatggcgtccctgtcaagtcccgcaagaccaccctggagcagccgccctcagtggcgctcaaggtggagcccgtcggggaggacctgggcagccccccgcccccggccgacttcgcgcccgaagactactcctctttccagcacatcaggaagggcggcttctgcgaccagtacctggcggtgccgcagcacccctaccagtgggcgaagcccaagcccctgtcccctacgtcctacatgagcccgaccctgcccgccctggactggcagctgccgtcccactcaggcccgtatgagcttcggattgaggtgcagcccaagtcccaccaccgagcccactacgagacggagggcagccggggggccgtgaaggcgtcggccggaggacaccccatcgtgcagctgcatggctacttggagaatgagccgctgatgctgcagcttttcattgggacggcggacgaccgcctgctgcgcccgcacgccttctaccaggtgcaccgcatcacagggaagaccgtgtccaccaccagccacgaggccatcctctccaacaccaaagtcctggagatcccactcctgccggagaacagcatgcgagccgtcattgactgtgccggaatcctgaaactcagaaactccgacattgaacttcggaaaggagagacggacatcgggaggaagaacacacgggtacggctggtgttccgcgttcacgtcccgcaacccagcggccgcacgctgtccctgcaggtggcctccaaccccatcgaatgctcccagcgctcagctcaggagctgcctctggtggagaagcagagcacggacagctatccggtcgtgggcgggaagaagatggtcctgtctggccacaacttcctgcaggactccaaggtcattttcgtggagaaagccccagatggccaccatgtctgggagatggaagcgaaaactgaccgggacctgtgcaagccgaattctctggtggttgagatcccgccatttcggaatcagaggataaccagccccgttcacgtcagtttctacgtctgcaacgggaagagaaagcgaagccagtaccagcgtttcacctaccttcccgccaacggtaacgccatctttctaaccgtaagccgtgaacatgagcgcgtggggtgctttttctaaagacgcagaaacgacgtcgccgtaaagcagcgtggcgtgttgcacatttaactgtgtgatgtcccgttagtgagaccgagccatcgatgccctgaaaaggaaaggaaaagggaagcttcggatgcattttccttgatccctgttgggggtggggggcgggggttgcatactcagatagtcacggttattttgcttcttgcgaatgtataacagccaaggggaaaacatggctcttctgctccaaaaaactgagggggtcctggtgtgcatttgcaccctaaagctgcttacggtgaaaaggcaaataggtatagctattttgcaggcacctttaggaataaactttgcttttaagcctgt

SEQ ID NO: 160413 - DNA, 1919 bp, Homo sapiens
  Payload ID: 11365
  Gene Symbol: NFATC1
  Gene Name: nuclear factor of activated T-cells, cytoplasmic, calcineurin-dependent 1
  ENST ID: ENST00000590313
  CDS Start-End: 62-277
gagaaccgaacccctggcggccgcgaccccggctcccgccccggccccggcccgacccgccatgacggggctggaggaccaggagttcgacttcgagttcctcttcgagtttaaccagcgcgacgagggcgccgccgcggccgccccagcccgaccctgcccgccctggactggcagctgccgtcccactcaggcccgtatgagcttcggattgaggtgcagcccaagtcccaccaccgagcccactacgagacggagggcagccggggggccgtgaaggcgtcggccggaggacaccccatcgtgcagctgcatggctacttggagaatgagccgctgatgctgcagcttttcattgggacggcggacgaccgcctgctgcgcccgcacgccttctaccaggtgcaccgcatcacagggaagaccgtgtccaccaccagccacgaggccatcctctccaacaccaaagtcctggagatcccactcctgccggagaacagcatgcgagccgtcattgactgtgccggaatcctgaaactcagaaactccgacattgaacttcggaaaggagagacggacatcgggaggaagaacacacgggtacggctggtgttccgcgttcacgtcccgcaacccagcggccgcacgctgtccctgcaggtggcctccaaccccatcgaatgctcccagcgctcagctcaggagctgcctctggtggagaagcagagcacggacagctatccggtcgtgggcgggaagaagatggtcctgtctggccacaacttcctgcaggactccaaggtcattttcgtggagaaagccccagatggccaccatgtctgggagatggaagcgaaaactgaccgggacctgtgcaagccgaattctctggtggttgagatcccgccatttcggaatcagaggataaccagccccgttcacgtcagtttctacgtctgcaacgggaagagaaagcgaagccagtaccagcgtttcacctaccttcccgccaacgttccaattataaaaacagaacccactgatgattatgagcctgctccaacctgtggaccggtgagccaggggttaagtcctctcccaagaccatactacagccagcagctcgcgatgccacccgaccccagctcctgcctcgtggccggcttcccgccctgtccgcagagaagcaccctgatgccagcggcccctggcgtgagccccaagctccacgacctttctcccgctgcctacaccaagggcgttgccagcccgggccactgtcacctcggactcccgcagccggccggagaggcccccgccgtccaggacgtgcccaggccagtggccacgcaccccggctcgcccgggcagccacccccggccctgctgccacagcaggtgagtgcgcctccaagcagtagctgcccccctggtctcgaacactcgctctgccccagcagcccctctcctccactcccgcctgccacccaagagccgacctgcctgcagccctgcagcccagcgtgcccgcccgccacgggccgcccgcagcacctgccgtccacggtccgcagggacgagtctccgactgccgggccacggctgctgccagaggtgcatgaggacggtagtcctaatttggcccctattcctgtaacggtcaagcgagagcctgaagagttggaccagttgtacctggatgacgtaaatgaaataatacgaaatgacctctccagcacgagcacccactcctagttgccacattggagcactcagttcagcaggggtatgctgacttcagcagacaaagacttttgaataaataaactgaactcacacctggtaccactcagaacctccaactgactgaatgccaggagctgaacattaatatgtgcaaagattggctctccaacaag

SEQ ID NO: 160414 - DNA, 2195 bp, Homo sapiens
  Payload ID: 11365
  Gene Symbol: NFATC1
  Gene Name: nuclear factor of activated T-cells, cytoplasmic, calcineurin-dependent 1
  ENST ID: ENST00000587635
  CDS Start-End: 95-2014
ggctgtcttcccggagacccgaccccggcagcgcggggcggccgcttctcctgtgcctccgcccgccgctccactccccgccgccgccgcgcggatgccaagcaccagctttccagtcccttccaagtttccacttggccctgcggctgcggtcttcgggagaggagaaactttggggcccgcgccgcgcgccggcggcaccatgaagtcagcggaggaagaacactatggctatgcatcctccaacgtcagccccgccctgccgctccccacggcgcactccaccctgccggccccgtgccacaaccttcagacctccacaccgggcatcatcccgccggcggatcacccctcggggtacggagcagctttggacggtgggcccgcgggctacttcctctcctccggccacaccaggcctgatggggcccctgccctggagagtcctcgcatcgagataacctcgtgcttgggcctgtaccacaacaataaccagtttttccacgatgtggaggtggaagacgtcctccctagctccaaacggtccccctccacggccacgctgagtctgcccagcctggaggcctacagagacccctcgtgcctgagcccggccagcagcctgtcctcccggagctgcaactcagaggcctcctcctacgagtccaactactcgtacccgtacgcgtccccccagacgtcgccatggcagtctccctgcgtgtctcccaagaccacggaccccgaggagggctttccccgcgggctgggggcctgcacactgctgggttccccgcggcactccccctccacctcgccccgcgccagcgtcactgaggagagctggctgggtgcccgctcctccagacccgcgtccccttgcaacaagaggaagtacagcctcaacggccggcagccgccctactcaccccaccactcgcccacgccgtccccgcacggctccccgcgggtcagcgtgaccgacgactcgtggttgggcaacaccacccagtacaccagctcggccatcgtggccgccatcaacgcgctgaccaccgacagcagcctggacctgggagatggcgtccctgtcaagtcccgcaagaccaccctggagcagccgccctcagtggcgctcaaggtggagcccgtcggggaggacctgggcagccccccgcccccggccgacttcgcgcccgaagactactcctctttccagcacatcaggaagggcggcttctgcgaccagtacctggcggtgccgcagcacccctaccagtgggcgaagcccaagcccctgtcccctacgtcctacatgagcccgaccctgcccgccctggactggcagctgccgtcccactcaggcccgtatgagcttcggattgaggtgcagcccaagtcccaccaccgagcccactacgagacggagggcagccggggggccgtgaaggcgtcggccggaggacaccccatcgtgcagctgcatggctacttggagaatgagccgctgatgctgcagcttttcattgggacggcggacgaccgcctgctgcgcccgcacgccttctaccaggtgcaccgcatcacagggaagaccgtgtccaccaccagccacgaggccatcctctccaacaccaaagtcctggagatcccactcctgccggagaacagcatgcgagccgtcattgactgtgccggaatcctgaaactcagaaactccgacattgaacttcggaaaggagagacggacatcgggaggaagaacacacggcccagcgctcagctcaggagctgcctctggtggagaagcagagcacggacagctatccggtcgtgggcgggaagaagatggtcctgtctggccacaacttcctgcaggactccaaggtcattttcgtggagaaagccccagatggccaccatgtctgggagatggaagcgaaaactgaccgggacctgtgcaagccgaattctctggtggttgagatcccgccatttcggaatcagaggataaccagccccgttcacgtcagtttctacgtctgcaacgggaagagaaagcgaagccagtaccagcgtttcacctaccttcccgccaacggtaacgccatctttctaaccgtaagccgtgaacatgagcgcgtggggtgctttttctaaagacgcagaaacgacgtcgccgtaaagcagcgtgg

SEQ ID NO: 160415 - DNA, 7525 bp, Homo sapiens
  Payload ID: 11366
  Gene Symbol: NFATC2
  Gene Name: nuclear factor of activated T-cells, cytoplasmic, calcineurin-dependent 2
  Uniprot ID: Q13469
  ENST ID: ENST00000371564
  CDS Start-End: 221-2986
agcaggaagctcgcgccgccgtcgccgccgccgctcagcttccccgggcgcgtccaggacccgctgcgccaggcgcgccgtccccggacccggcgtgcgtccctacgaggaaagggaccccgccgctcgagccgcctccgccagccccactgcgaggggtcccagagccagccgcgcccgccctcgcccccggccccgcagccttcccgccctgcgcgccatgaacgcccccgagcggcagccccaacccgacggcggggacgccccaggccacgagcctgggggcagcccccaagacgagcttgacttctccatcctcttcgactatgagtatttgaatccgaacgaagaagagccgaatgcacataaggtcgccagcccaccctccggacccgcataccccgatgatgtcctggactatggcctcaagccatacagcccccttgctagtctctctggcgagccccccggccgattcggagagccggatagggtagggccgcagaagtttctgagcgcggccaagccagcaggggcctcgggcctgagccctcggatcgagatcactccgtcccacgaactgatccaggcagtggggcccctccgcatgagagacgcgggcctcctggtggagcagccgcccctggccggggtggccgccagcccgaggttcaccctgcccgtgcccggcttcgagggctaccgcgagccgctttgcttgagccccgctagcagcggctcctctgccagcttcatttctgacaccttctccccctacacctcgccctgcgtctcgcccaataacggcgggcccgacgacctgtgtccgcagtttcaaaacatccctgctcattattcccccagaacctcgccaataatgtcacctcgaaccagcctcgccgaggacagctgcctgggccgccactcgcccgtgccccgtccggcctcccgctcctcatcgcctggtgccaagcggaggcattcgtgcgccgaggccttggttgccctgccgcccggagcctcaccccagcgctcccggagcccctcgccgcagccctcatctcacgtggcaccccaggaccacggctccccggctgggtacccccctgtggctggctctgccgtgatcatggatgccctgaacagcctcgccacggactcgccttgtgggatcccccccaagatgtggaagaccagccctgacccctcgccggtgtctgccgccccatccaaggccggcctgcctcgccacatctacccggccgtggagttcctggggccctgcgagcagggcgagaggagaaactcggctccagaatccatcctgctggttccgcccacttggcccaagccgctggtgcctgccattcccatctgcagcatcccagtgactgcatccctccctccacttgagtggccgctgtccagtcagtcaggctcttacgagctgcggatcgaggtgcagcccaagccacatcaccgggcccactatgagacagaaggcagccgaggggctgtcaaagctccaactggaggccaccctgtggttcagctccatggctacatggaaaacaagcctctgggacttcagatcttcattgggacagctgatgagcggatccttaagccgcacgccttctaccaggtgcaccgaatcacggggaaaactgtcaccaccaccagctatgagaagatagtgggcaacaccaaagtcctggagatacccttggagcccaaaaacaacatgagggcaaccatcgactgtgcggggatcttgaagcttagaaacgccgacattgagctgcggaaaggcgagacggacattggaagaaagaacacgcgggtgagactggttttccgagttcacatcccagagtccagtggcagaatcgtctctttacagactgcatctaaccccatcgagtgctcccagcgatctgctcacgagctgcccatggttgaaagacaagacacagacagctgcctggtctatggcggccagcaaatgatcctcacggggcagaactttacatccgagtccaaagttgtgtttactgagaagaccacagatggacagcaaatttgggagatggaagccacggtggataaggacaagagccagcccaacatgctttttgttgagatccctgaatatcggaacaagcatatccgcacacctgtaaaagtgaacttctacgtcatcaatgggaagagaaaacgaagtcagcctcagcactttacctaccacccagtcccagccatcaagacggagcccacggatgaatatgaccccactctgatctgcagccccacccatggaggcctggggagccagccttactacccccagcacccgatggtggccgagtccccctcctgcctcgtggccaccatggctccctgccagcagttccgcacggggctctcatcccctgacgcccgctaccagcaacagaacccagcggccgtactctaccagcggagcaagagcctgagccccagcctgctgggctatcagcagccggccctcatggccgccccgctgtcccttgcggacgctcaccgctctgtgctggtgcacgccggctcccagggccagagctcagccctgctccacccctctccgaccaaccagcaggcctcgcctgtgatccactactcacccaccaaccagcagctgcgctgcggaagccaccaggagttccagcacatcatgtactgcgagaatttcgcaccaggcaccaccagacctggcccgcccccggtcagtcaaggtcagaggctgagcccgggttcctaccccacagtcattcagcagcagaatgccacgagccaaagagccgccaaaaacggacccccggtcagtgaccaaaaggaagtattacctgcgggggtgaccattaaacaggagcagaacttggaccagacctacttggatgatgagctgatagacacacaccttagctggatacaaaacatattatgaaacagaatgactgtgatctttgatccgagaaatcaaagttaaagttaatgaaattatcaggaaggagttttcaggacctcctgccagaaatcagacgtaaaagaagccattatagcaagacaccttctgtatctgacccctcggagccctccacagcccctcaccttctgtctcctttcatgttcatctcccagcccggagtccacacgcggatcaatgtatgggcactaagcggactctcacttaaggagctcgccacctccctctaaacaccagagagaactcttcttttcggtttatgttttaaatcccagagagcatcctggttgatcttaatggtgttccgtccaaatagtaagcacctgctgaccaaaagcacattctacatgagacaggacactggaactctcctgagaacagagtgactggagcttggggggatggacgggggacagaagatgtgggcactgtgattaaaccccagcccttgcgttcgtttttccaggtcacagatacagctcctgtaccttttgaaggcaaggagttctcagagcaaccaaaggaacgtgacccaagagcccagcttacaggctgaagaaacccaaaaccctcgatagagacagaaactgaactgtcagtccttagagctcgcccagtccatgccacaactgggccacagctaaagctttatttttgaattctcattccaaaaccaaactgtcttgcccagacaagatcacctgttaagacttcttggcgttaagttatgacatgtatacgcgtttgttattattattttttctgctttaaaaggctgaccagggcacctagccctggagctgtcttggcgagctgttctttaacccctgcagcacgcagtcctgctaacacaatttccatagacttggggggctgacccaggctgcagagagcaagcacctgtctgctgcagctgtacaacctggatgctttgcaaggttccggcttgctttcttcctagcagccagagtgcttttccgtaaagcggtggagaatctcaagcatgtgcatttaattgaggaatagcagaagggctaaagcaaccaagaaaagaagtgtgggtatttttgttaagtaaaacagcccaagtgcttctggaggtgggtttctaccaagatagaggaaaagggctgaattccctctaagtgggacagccgagctcaggatgtgcttcccagcttcactggttaatttgacctgaacctatttaaagatcccttctgcccctgaagacctatccgcactcaaattctaacatgaagaaatctactcgaatgcatcctttactttgaatgagctctattcggttgcatgttatatgtgatttccttcctcccaactgtttccactgagcgcacccagtctcccctagtcttcctctgtgggtgtgatttttgtgatttttacaaacaaaacccttgaagttcttggcagatgtgtttgtttctgtttgcatgtactgcagataccccaggacaagcgggggattcatttttcagccattcagttgtttcctcaataatccgcagcaaagtgaaaatattcttagcactcagactgtacttagagtgttttctcagtccagtctgtacagtctgtaggcagaaggcctcagaagaaagtcatggccactcagtgcccactgtgggctttgtaagtcctggctctcccgtcaaggttacccagaggtaaaagcttcctgggagtggggccaggtgtgtttggcactccagatagaaggcaaaatgctcagattcgggcctgtgcacttgtatgcaacctgtcggtcgatacctagcatttatttttccctgacaatgaacgacctttccctcacccaccctaagctcaaagagtttagcaaaattctcttttaaataaacagaatgccagtaagaggttgacccctaccatggaacttctgggatgctaaatacttcctcatgaacaaaataagttccttattataagttccttatactagcagcttcacctaaagaattttctctccagcaatattgacttcactggggaaaagccaagagtgtgtggtgagtgatttgttctcactcgacctggctaggactggctaggagctgttttttgtacatgagggaatttgggctttcctcagttatctgaatgttttacccaagtgccttcctgctattgtagcaaagtagctcagcttccttgtccacagggtgaaaaaggactaatgcattttccatcagttttctaactatgttagcaaaaacggcctcctggtagctcaacctcctgtacgcgtgtgtgtgtgtaatacacacacaaataaacccctctgtttttctaagacatcttagctggatattataggaagcactttcataaacaactgtaacaaatcgcaaaggaaagagaaacaaaagcattagatttgagacataaacaggcaagagaaagtgtattaggaactgacagctatcaaggaagttttgtcagttacaaatgctaggaggaaattttgccaagaaggatggctcatgaaatatttccagtacgggaagaggcaataagatcctctaagagaatgagaaagtaggggtgtctaaatggtaaagatgggtgtgttgcacgtgtgttagaaggatctcagttgagtgaaggtttgcactgctacatctaagttaatgtaaatatgtagcactctgacaggtctaccgtgttgctgaatgtagtatatttccaaagtttgcaagtcttcctgtattgtacaaagatgctgctgcttgataatatgtatagcaatccagattagtatgttattaaattttattttcttacctgtatttttatgctttttacctgtcctcaaaatattacacccctgttggaattagatttatatttataaatggtcagaaatctttttaagtgtctctttttacacataggttgatttttttttcttaagagaaatgatgtattcttgaaacatttgttactcattccaggaaacaaaaacccatataataaaacccccactcagagcctgttagtcacctctctagaagatggcatctcaggagaaggaatggctttgtggaagaaggaatcacctttttcttgctcaagaattatgctgacttcagccctgagcctggatctggtcactgagaatcatcaagtgtctagatcctccccccaaaataactaatttagtaggtgattttgattttaaaaaattgacaccaaaaccctgcctgcattgtaatggaattcgaaaagaattcatgttcacagaactcaacgttcaggctaatatttacagaagggaccaaatctaaatcctggtagataactcctgtatgctttatccaaaggacacccacagttttccagcatagatataaccaaggatgaattgattccttcaaagaactgggaggcacggatattgcattttttgtttacatccagtagccaagacgcctcagtgagccagtcttgggcagaggctgtcacatttaggcagattggaagttggtatgttctaattctcactctggactacagtgaggctgaatttatcatgtcaaaaaaaaaaaaaaaaaaagacctttccaagtgctttctattgctcagaattgaaagaatgttttcatttcaagtttacaagaggcatggatggagttgtgacgttcttgacaagctgggctaacctttcccgaacttgtttcccggaggcaaggtgctcggtgacccagcgcatcttaaccttgggtctcctaggctcgaggctagggcattacgtttcgtggaaccaaagcagccaattgcatagcaagtattttcctgcattccaattaaatgcttaagaaaaagcagcatcctataaaattgtgatcataaacatccatttccctcagcttttgtgagtgccttgacttacagccaacatcactgtttaactcagtctgtttaaaaacaaacttttctggtggttgataacagagagttgctccctgagccatcagggtcctgggagctggaagtgaaagggttattaacattctacctttatgcagctgttggctgaccagaataaactccctgctgagttcaagctttgaatggaatggatgcaaatgatgttgtttccattagagcaggtgctcacagcattctgattggcctgagcagaccgaggctatggctgttgggacaagcttagcatcctggacatcttgtcaaagaacctcactcacccctctggcctctacagccctcagaggagagaaaaccaattctccaacaaacaggtctctccaacatggtggtgctggcaggcttaggtttagaaaatcctgactgttaaaggcgtttgaatacatcacattcctatgcaaatgtttttaatctccagtttaatgtagtttatttttcctatatgtaaagtatttttatacggcttgtatcatgatagtttagcaataaaacagttggaagcaacatcta

SEQ ID NO: 160416 - DNA, 7437 bp, Homo sapiens
  Payload ID: 11366
  Gene Symbol: NFATC2
  Gene Name: nuclear factor of activated T-cells, cytoplasmic, calcineurin-dependent 2
  Uniprot ID: Q13469
  ENST ID: ENST00000396009
  CDS Start-End: 221-2998
agcaggaagctcgcgccgccgtcgccgccgccgctcagcttccccgggcgcgtccaggacccgctgcgccaggcgcgccgtccccggacccggcgtgcgtccctacgaggaaagggaccccgccgctcgagccgcctccgccagccccactgcgaggggtcccagagccagccgcgcccgccctcgcccccggccccgcagccttcccgccctgcgcgccatgaacgcccccgagcggcagccccaacccgacggcggggacgccccaggccacgagcctgggggcagcccccaagacgagcttgacttctccatcctcttcgactatgagtatttgaatccgaacgaagaagagccgaatgcacataaggtcgccagcccaccctccggacccgcataccccgatgatgtcctggactatggcctcaagccatacagcccccttgctagtctctctggcgagccccccggccgattcggagagccggatagggtagggccgcagaagtttctgagcgcggccaagccagcaggggcctcgggcctgagccctcggatcgagatcactccgtcccacgaactgatccaggcagtggggcccctccgcatgagagacgcgggcctcctggtggagcagccgcccctggccggggtggccgccagcccgaggttcaccctgcccgtgcccggcttcgagggctaccgcgagccgctttgcttgagccccgctagcagcggctcctctgccagcttcatttctgacaccttctccccctacacctcgccctgcgtctcgcccaataacggcgggcccgacgacctgtgtccgcagtttcaaaacatccctgctcattattcccccagaacctcgccaataatgtcacctcgaaccagcctcgccgaggacagctgcctgggccgccactcgcccgtgccccgtccggcctcccgctcctcatcgcctggtgccaagcggaggcattcgtgcgccgaggccttggttgccctgccgcccggagcctcaccccagcgctcccggagcccctcgccgcagccctcatctcacgtggcaccccaggaccacggctccccggctgggtacccccctgtggctggctctgccgtgatcatggatgccctgaacagcctcgccacggactcgccttgtgggatcccccccaagatgtggaagaccagccctgacccctcgccggtgtctgccgccccatccaaggccggcctgcctcgccacatctacccggccgtggagttcctggggccctgcgagcagggcgagaggagaaactcggctccagaatccatcctgctggttccgcccacttggcccaagccgctggtgcctgccattcccatctgcagcatcccagtgactgcatccctccctccacttgagtggccgctgtccagtcagtcaggctcttacgagctgcggatcgaggtgcagcccaagccacatcaccgggcccactatgagacagaaggcagccgaggggctgtcaaagctccaactggaggccaccctgtggttcagctccatggctacatggaaaacaagcctctgggacttcagatcttcattgggacagctgatgagcggatccttaagccgcacgccttctaccaggtgcaccgaatcacggggaaaactgtcaccaccaccagctatgagaagatagtgggcaacaccaaagtcctggagatacccttggagcccaaaaacaacatgagggcaaccatcgactgtgcggggatcttgaagcttagaaacgccgacattgagctgcggaaaggcgagacggacattggaagaaagaacacgcgggtgagactggttttccgagttcacatcccagagtccagtggcagaatcgtctctttacagactgcatctaaccccatcgagtgctcccagcgatctgctcacgagctgcccatggttgaaagacaagacacagacagctgcctggtctatggcggccagcaaatgatcctcacggggcagaactttacatccgagtccaaagttgtgtttactgagaagaccacagatggacagcaaatttgggagatggaagccacggtggataaggacaagagccagcccaacatgctttttgttgagatccctgaatatcggaacaagcatatccgcacacctgtaaaagtgaacttctacgtcatcaatgggaagagaaaacgaagtcagcctcagcactttacctaccacccagtcccagccatcaagacggagcccacggatgaatatgaccccactctgatctgcagccccacccatggaggcctggggagccagccttactacccccagcacccgatggtggccgagtccccctcctgcctcgtggccaccatggctccctgccagcagttccgcacggggctctcatcccctgacgcccgctaccagcaacagaacccagcggccgtactctaccagcggagcaagagcctgagccccagcctgctgggctatcagcagccggccctcatggccgccccgctgtcccttgcggacgctcaccgctctgtgctggtgcacgccggctcccagggccagagctcagccctgctccacccctctccgaccaaccagcaggcctcgcctgtgatccactactcacccaccaaccagcagctgcgctgcggaagccaccaggagttccagcacatcatgtactgcgagaatttcgcaccaggcaccaccagacctggcccgcccccggtcagtcaaggtcagaggctgagcccgggttcctaccccacagtcattcagcagcagaatgccacgagccaaagagccgccaaaaacggacccccggtcagtgaccaaaaggaagtattacctgcgggggtgaccattaaacaggagcagaacttggaccagacctacttggatgatgttaatgaaattatcaggaaggagttttcaggacctcctgccagaaatcagacgtaaaagaagccattatagcaagacaccttctgtatctgacccctcggagccctccacagcccctcaccttctgtctcctttcatgttcatctcccagcccggagtccacacgcggatcaatgtatgggcactaagcggactctcacttaaggagctcgccacctccctctaaacaccagagagaactcttcttttcggtttatgttttaaatcccagagagcatcctggttgatcttaatggtgttccgtccaaatagtaagcacctgctgaccaaaagcacattctacatgagacaggacactggaactctcctgagaacagagtgactggagcttggggggatggacgggggacagaagatgtgggcactgtgattaaaccccagcccttgcgttcgtttttccaggtcacagatacagctcctgtaccttttgaaggcaaggagttctcagagcaaccaaaggaacgtgacccaagagcccagcttacaggctgaagaaacccaaaaccctcgatagagacagaaactgaactgtcagtccttagagctcgcccagtccatgccacaactgggccacagctaaagctttatttttgaattctcattccaaaaccaaactgtcttgcccagacaagatcacctgttaagacttcttggcgttaagttatgacatgtatacgcgtttgttattattattttttctgctttaaaaggctgaccagggcacctagccctggagctgtcttggcgagctgttctttaacccctgcagcacgcagtcctgctaacacaatttccatagacttggggggctgacccaggctgcagagagcaagcacctgtctgctgcagctgtacaacctggatgctttgcaaggttccggcttgctttcttcctagcagccagagtgcttttccgtaaagcggtggagaatctcaagcatgtgcatttaattgaggaatagcagaagggctaaagcaaccaagaaaagaagtgtgggtatttttgttaagtaaaacagcccaagtgcttctggaggtgggtttctaccaagatagaggaaaagggctgaattccctctaagtgggacagccgagctcaggatgtgcttcccagcttcactggttaatttgacctgaacctatttaaagatcccttctgcccctgaagacctatccgcactcaaattctaacatgaagaaatctactcgaatgcatcctttactttgaatgagctctattcggttgcatgttatatgtgatttccttcctcccaactgtttccactgagcgcacccagtctcccctagtcttcctctgtgggtgtgatttttgtgatttttacaaacaaaacccttgaagttcttggcagatgtgtttgtttctgtttgcatgtactgcagataccccaggacaagcgggggattcatttttcagccattcagttgtttcctcaataatccgcagcaaagtgaaaatattcttagcactcagactgtacttagagtgttttctcagtccagtctgtacagtctgtaggcagaaggcctcagaagaaagtcatggccactcagtgcccactgtgggctttgtaagtcctggctctcccgtcaaggttacccagaggtaaaagcttcctgggagtggggccaggtgtgtttggcactccagatagaaggcaaaatgctcagattcgggcctgtgcacttgtatgcaacctgtcggtcgatacctagcatttatttttccctgacaatgaacgacctttccctcacccaccctaagctcaaagagtttagcaaaattctcttttaaataaacagaatgccagtaagaggttgacccctaccatggaacttctgggatgctaaatacttcctcatgaacaaaataagttccttattataagttccttatactagcagcttcacctaaagaattttctctccagcaatattgacttcactggggaaaagccaagagtgtgtggtgagtgatttgttctcactcgacctggctaggactggctaggagctgttttttgtacatgagggaatttgggctttcctcagttatctgaatgttttacccaagtgccttcctgctattgtagcaaagtagctcagcttccttgtccacagggtgaaaaaggactaatgcattttccatcagttttctaactatgttagcaaaaacggcctcctggtagctcaacctcctgtacgcgtgtgtgtgtgtaatacacacacaaataaacccctctgtttttctaagacatcttagctggatattataggaagcactttcataaacaactgtaacaaatcgcaaaggaaagagaaacaaaagcattagatttgagacataaacaggcaagagaaagtgtattaggaactgacagctatcaaggaagttttgtcagttacaaatgctaggaggaaattttgccaagaaggatggctcatgaaatatttccagtacgggaagaggcaataagatcctctaagagaatgagaaagtaggggtgtctaaatggtaaagatgggtgtgttgcacgtgtgttagaaggatctcagttgagtgaaggtttgcactgctacatctaagttaatgtaaatatgtagcactctgacaggtctaccgtgttgctgaatgtagtatatttccaaagtttgcaagtcttcctgtattgtacaaagatgctgctgcttgataatatgtatagcaatccagattagtatgttattaaattttattttcttacctgtatttttatgctttttacctgtcctcaaaatattacacccctgttggaattagatttatatttataaatggtcagaaatctttttaagtgtctctttttacacataggttgatttttttttcttaagagaaatgatgtattcttgaaacatttgttactcattccaggaaacaaaaacccatataataaaacccccactcagagcctgttagtcacctctctagaagatggcatctcaggagaaggaatggctttgtggaagaaggaatcacctttttcttgctcaagaattatgctgacttcagccctgagcctggatctggtcactgagaatcatcaagtgtctagatcctccccccaaaataactaatttagtaggtgattttgattttaaaaaattgacaccaaaaccctgcctgcattgtaatggaattcgaaaagaattcatgttcacagaactcaacgttcaggctaatatttacagaagggaccaaatctaaatcctggtagataactcctgtatgctttatccaaaggacacccacagttttccagcatagatataaccaaggatgaattgattccttcaaagaactgggaggcacggatattgcattttttgtttacatccagtagccaagacgcctcagtgagccagtcttgggcagaggctgtcacatttaggcagattggaagttggtatgttctaattctcactctggactacagtgaggctgaatttatcatgtcaaaaaaaaaaaaaaaaaaagacctttccaagtgctttctattgctcagaattgaaagaatgttttcatttcaagtttacaagaggcatggatggagttgtgacgttcttgacaagctgggctaacctttcccgaacttgtttcccggaggcaaggtgctcggtgacccagcgcatcttaaccttgggtctcctaggctcgaggctagggcattacgtttcgtggaaccaaagcagccaattgcatagcaagtattttcctgcattccaattaaatgcttaagaaaaagcagcatcctataaaattgtgatcataaacatccatttccctcagcttttgtgagtgccttgacttacagccaacatcactgtttaactcagtctgtttaaaaacaaacttttctggtggttgataacagagagttgctccctgagccatcagggtcctgggagctggaagtgaaagggttattaacattctacctttatgcagctgttggctgaccagaataaactccctgctgagttcaagctttgaatggaatggatgcaaatgatgttgtttccattagagcaggtgctcacagcattctgattggcctgagcagaccgaggctatggctgttgggacaagcttagcatcctggacatcttgtcaaagaacctcactcacccctctggcctctacagccctcagaggagagaaaaccaattctccaacaaacaggtctctccaacatggtggtgctggcaggcttaggtttagaaaatcctgactgttaaaggcgtttgaatacatcacattcctatgcaaatgtttttaatctccagtttaatgtagtttatttttcctatatgtaaagtatttttatacggcttgtatcatgatagtttagcaataaaacagttggaagcaacatcta

SEQ ID NO: 160417 - DNA, 2974 bp, Homo sapiens
  Payload ID: 11366
  Gene Symbol: NFATC2
  Gene Name: nuclear factor of activated T-cells, cytoplasmic, calcineurin-dependent 2
  Uniprot ID: Q13469
  ENST ID: ENST00000414705
  CDS Start-End: 1-2706
atgcagagagaggctgcgttcagactggggcactgccatcccctccgcatcatggggtctgtggaccaagaagagccgaatgcacataaggtcgccagcccaccctccggacccgcataccccgatgatgtcctggactatggcctcaagccatacagcccccttgctagtctctctggcgagccccccggccgattcggagagccggatagggtagggccgcagaagtttctgagcgcggccaagccagcaggggcctcgggcctgagccctcggatcgagatcactccgtcccacgaactgatccaggcagtggggcccctccgcatgagagacgcgggcctcctggtggagcagccgcccctggccggggtggccgccagcccgaggttcaccctgcccgtgcccggcttcgagggctaccgcgagccgctttgcttgagccccgctagcagcggctcctctgccagcttcatttctgacaccttctccccctacacctcgccctgcgtctcgcccaataacggcgggcccgacgacctgtgtccgcagtttcaaaacatccctgctcattattcccccagaacctcgccaataatgtcacctcgaaccagcctcgccgaggacagctgcctgggccgccactcgcccgtgccccgtccggcctcccgctcctcatcgcctggtgccaagcggaggcattcgtgcgccgaggccttggttgccctgccgcccggagcctcaccccagcgctcccggagcccctcgccgcagccctcatctcacgtggcaccccaggaccacggctccccggctgggtacccccctgtggctggctctgccgtgatcatggatgccctgaacagcctcgccacggactcgccttgtgggatcccccccaagatgtggaagaccagccctgacccctcgccggtgtctgccgccccatccaaggccggcctgcctcgccacatctacccggccgtggagttcctggggccctgcgagcagggcgagaggagaaactcggctccagaatccatcctgctggttccgcccacttggcccaagccgctggtgcctgccattcccatctgcagcatcccagtgactgcatccctccctccacttgagtggccgctgtccagtcagtcaggctcttacgagctgcggatcgaggtgcagcccaagccacatcaccgggcccactatgagacagaaggcagccgaggggctgtcaaagctccaactggaggccaccctgtggttcagctccatggctacatggaaaacaagcctctgggacttcagatcttcattgggacagctgatgagcggatccttaagccgcacgccttctaccaggtgcaccgaatcacggggaaaactgtcaccaccaccagctatgagaagatagtgggcaacaccaaagtcctggagatacccttggagcccaaaaacaacatgagggcaaccatcgactgtgcggggatcttgaagcttagaaacgccgacattgagctgcggaaaggcgagacggacattggaagaaagaacacgcgggtgagactggttttccgagttcacatcccagagtccagtggcagaatcgtctctttacagactgcatctaaccccatcgagtgctcccagcgatctgctcacgagctgcccatggttgaaagacaagacacagacagctgcctggtctatggcggccagcaaatgatcctcacggggcagaactttacatccgagtccaaagttgtgtttactgagaagaccacagatggacagcaaatttgggagatggaagccacggtggataaggacaagagccagcccaacatgctttttgttgagatccctgaatatcggaacaagcatatccgcacacctgtaaaagtgaacttctacgtcatcaatgggaagagaaaacgaagtcagcctcagcactttacctaccacccagtcccagccatcaagacggagcccacggatgaatatgaccccactctgatctgcagccccacccatggaggcctggggagccagccttactacccccagcacccgatggtggccgagtccccctcctgcctcgtggccaccatggctccctgccagcagttccgcacggggctctcatcccctgacgcccgctaccagcaacagaacccagcggccgtactctaccagcggagcaagagcctgagccccagcctgctgggctatcagcagccggccctcatggccgccccgctgtcccttgcggacgctcaccgctctgtgctggtgcacgccggctcccagggccagagctcagccctgctccacccctctccgaccaaccagcaggcctcgcctgtgatccactactcacccaccaaccagcagctgcgctgcggaagccaccaggagttccagcacatcatgtactgcgagaatttcgcaccaggcaccaccagacctggcccgcccccggtcagtcaaggtcagaggctgagcccgggttcctaccccacagtcattcagcagcagaatgccacgagccaaagagccgccaaaaacggacccccggtcagtgaccaaaaggaagtattacctgcgggggtgaccattaaacaggagcagaacttggaccagacctacttggatgatgagctgatagacacacaccttagctggatacaaaacatattatgaaacagaatgactgtgatctttgatccgagaaatcaaagttaaagttaatgaaattatcaggaaggagttttcaggacctcctgccagaaatcagacgtaaaagaagccattatagcaagacaccttctgtatctgacccctcggagccctccacagcccctcaccttctgtctcctttcatgttcatctcccagcccggagtccacacgcggatcaatgtatgggcactaagcggactctcacttaaggagctcgccacctccctcta

SEQ ID NO: 160418 - DNA, 2740 bp, Homo sapiens
  Payload ID: 11366
  Gene Symbol: NFATC2
  Gene Name: nuclear factor of activated T-cells, cytoplasmic, calcineurin-dependent 2
  Uniprot ID: Q13469
  ENST ID: ENST00000610033
  CDS Start-End: 364-2472
agcaggaagctcgcgccgccgtcgccgccgccgctcagcttccccgggcgcgtccaggacccgctgcgccaggcgcgccgtccccggacccggcgtgcgtccctacgaggaaagggaccccgccgctcgagccgcctccgccagccccactgcgaggggtcccagagccagccgcgcccgccctcgcccccggccccgcagccttcccgccctgcgcgccatgaacgcccccgagcggcagccccaacccgacggcggggacgccccaggccacgagcctgggggcagcccccaagacgagcttgacttctccatcctcttcgactatgagtatttgaatccgaacgaagaacctcgccaataatgtcacctcgaaccagcctcgccgaggacagctgcctgggccgccactcgcccgtgccccgtccggcctcccgctcctcatcgcctggtgccaagcggaggcattcgtgcgccgaggccttggttgccctgccgcccggagcctcaccccagcgctcccggagcccctcgccgcagccctcatctcacgtggcaccccaggaccacggctccccggctgggtacccccctgtggctggctctgccgtgatcatggatgccctgaacagcctcgccacggactcgccttgtgggatcccccccaagatgtggaagaccagccctgacccctcgccggtgtctgccgccccatccaaggccggcctgcctcgccacatctacccggccgtggagttcctggggccctgcgagcagggcgagaggagaaactcggctccagaatccatcctgctggttccgcccacttggcccaagccgctggtgcctgccattcccatctgcagcatcccagtgactgcatccctccctccacttgagtggccgctgtccagtcagtcaggctcttacgagctgcggatcgaggtgcagcccaagccacatcaccgggcccactatgagacagaaggcagccgaggggctgtcaaagctccaactggaggccaccctgtggttcagctccatggctacatggaaaacaagcctctgggacttcagatcttcattgggacagctgatgagcggatccttaagccgcacgccttctaccaggtgcaccgaatcacggggaaaactgtcaccaccaccagctatgagaagatagtgggcaacaccaaagtcctggagatacccttggagcccaaaaacaacatgagggcaaccatcgactgtgcggggatcttgaagcttagaaacgccgacattgagctgcggaaaggcgagacggacattggaagaaagaacacgcgggtgagactggttttccgagttcacatcccagagtccagtggcagaatcgtctctttacagactgcatctaaccccatcgagtgctcccagcgatctgctcacgagctgcccatggttgaaagacaagacacagacagctgcctggtctatggcggccagcaaatgatcctcacggggcagaactttacatccgagtccaaagttgtgtttactgagaagaccacagatggacagcaaatttgggagatggaagccacggtggataaggacaagagccagcccaacatgctttttgttgagatccctgaatatcggaacaagcatatccgcacacctgtaaaagtgaacttctacgtcatcaatgggaagagaaaacgaagtcagcctcagcactttacctaccacccagtcccagccatcaagacggagcccacggatgaatatgaccccactctgatctgcagccccacccatggaggcctggggagccagccttactacccccagcacccgatggtggccgagtccccctcctgcctcgtggccaccatggctccctgccagcagttccgcacggggctctcatcccctgacgcccgctaccagcaacagaacccagcggccgtactctaccagcggagcaagagcctgagccccagcctgctgggctatcagcagccggccctcatggccgccccgctgtcccttgcggacgctcaccgctctgtgctggtgcacgccggctcccagggccagagctcagccctgctccacccctctccgaccaaccagcaggcctcgcctgtgatccactactcacccaccaaccagcagctgcgctgcggaagccaccaggagttccagcacatcatgtactgcgagaatttcgcaccaggcaccaccagacctggcccgcccccggtcagtcaaggtcagaggctgagcccgggttcctaccccacagtcattcagcagcagaatgccacgagccaaagagccgccaaaaacggacccccggtcagtgaccaaaaggaagtattacctgcgggggtgaccattaaacaggagcagaacttggaccagacctacttggatgatgagctgatagacacacaccttagctggatacaaaacatattatgaaacagaatgactgtgatctttgatccgagaaatcaaagttaaagttaatgaaattatcaggaaggagttttcaggacctcctgccagaaatcagacgtaaaagaagccattatagcaagacaccttctgtatctgacccctcggagccctccacagcccctcaccttctgtctcctttcatgttcatctcccagcccggagtccacacgcggatcaatgtatgggcactaagcggactctcacttaaggagctcgccacctccctcta

SEQ ID NO: 160419 - DNA, 2662 bp, Homo sapiens
  Payload ID: 11366
  Gene Symbol: NFATC2
  Gene Name: nuclear factor of activated T-cells, cytoplasmic, calcineurin-dependent 2
  Uniprot ID: Q13469
  ENST ID: ENST00000609507
  CDS Start-End: 286-2394
tctggagtaagccggatcgcggagccgcgccgactccgccgagccgggagccgggaggcgcgcagctcccgggtcgctccgaggctcctcggccagggcagccccgcgggcacgcggtagagaagacggcgtcccctcggctgctggtcgatacaaacagatccccctttccaaacacgcgccaagtccccgtgccctccagatgcagagagaggctgcgttcagactggggcactgccatcccctccgcatcatggggtctgtggaccaagaacctcgccaataatgtcacctcgaaccagcctcgccgaggacagctgcctgggccgccactcgcccgtgccccgtccggcctcccgctcctcatcgcctggtgccaagcggaggcattcgtgcgccgaggccttggttgccctgccgcccggagcctcaccccagcgctcccggagcccctcgccgcagccctcatctcacgtggcaccccaggaccacggctccccggctgggtacccccctgtggctggctctgccgtgatcatggatgccctgaacagcctcgccacggactcgccttgtgggatcccccccaagatgtggaagaccagccctgacccctcgccggtgtctgccgccccatccaaggccggcctgcctcgccacatctacccggccgtggagttcctggggccctgcgagcagggcgagaggagaaactcggctccagaatccatcctgctggttccgcccacttggcccaagccgctggtgcctgccattcccatctgcagcatcccagtgactgcatccctccctccacttgagtggccgctgtccagtcagtcaggctcttacgagctgcggatcgaggtgcagcccaagccacatcaccgggcccactatgagacagaaggcagccgaggggctgtcaaagctccaactggaggccaccctgtggttcagctccatggctacatggaaaacaagcctctgggacttcagatcttcattgggacagctgatgagcggatccttaagccgcacgccttctaccaggtgcaccgaatcacggggaaaactgtcaccaccaccagctatgagaagatagtgggcaacaccaaagtcctggagatacccttggagcccaaaaacaacatgagggcaaccatcgactgtgcggggatcttgaagcttagaaacgccgacattgagctgcggaaaggcgagacggacattggaagaaagaacacgcgggtgagactggttttccgagttcacatcccagagtccagtggcagaatcgtctctttacagactgcatctaaccccatcgagtgctcccagcgatctgctcacgagctgcccatggttgaaagacaagacacagacagctgcctggtctatggcggccagcaaatgatcctcacggggcagaactttacatccgagtccaaagttgtgtttactgagaagaccacagatggacagcaaatttgggagatggaagccacggtggataaggacaagagccagcccaacatgctttttgttgagatccctgaatatcggaacaagcatatccgcacacctgtaaaagtgaacttctacgtcatcaatgggaagagaaaacgaagtcagcctcagcactttacctaccacccagtcccagccatcaagacggagcccacggatgaatatgaccccactctgatctgcagccccacccatggaggcctggggagccagccttactacccccagcacccgatggtggccgagtccccctcctgcctcgtggccaccatggctccctgccagcagttccgcacggggctctcatcccctgacgcccgctaccagcaacagaacccagcggccgtactctaccagcggagcaagagcctgagccccagcctgctgggctatcagcagccggccctcatggccgccccgctgtcccttgcggacgctcaccgctctgtgctggtgcacgccggctcccagggccagagctcagccctgctccacccctctccgaccaaccagcaggcctcgcctgtgatccactactcacccaccaaccagcagctgcgctgcggaagccaccaggagttccagcacatcatgtactgcgagaatttcgcaccaggcaccaccagacctggcccgcccccggtcagtcaaggtcagaggctgagcccgggttcctaccccacagtcattcagcagcagaatgccacgagccaaagagccgccaaaaacggacccccggtcagtgaccaaaaggaagtattacctgcgggggtgaccattaaacaggagcagaacttggaccagacctacttggatgatgagctgatagacacacaccttagctggatacaaaacatattatgaaacagaatgactgtgatctttgatccgagaaatcaaagttaaagttaatgaaattatcaggaaggagttttcaggacctcctgccagaaatcagacgtaaaagaagccattatagcaagacaccttctgtatctgacccctcggagccctccacagcccctcaccttctgtctcctttcatgttcatctcccagcccggagtccacacgcggatcaatgtatgggcactaagcggactctcacttaaggagctcgccacctccctcta

SEQ ID NO: 160420 - DNA, 5690 bp, Homo sapiens
  Payload ID: 11366
  Gene Symbol: NFATC2
  Gene Name: nuclear factor of activated T-cells, cytoplasmic, calcineurin-dependent 2
  Uniprot ID: Q13469
  ENST ID: ENST00000609943
  CDS Start-End: 203-2920
tctggagtaagccggatcgcggagccgcgccgactccgccgagccgggagccgggaggcgcgcagctcccgggtcgctccgaggctcctcggccagggcagccccgcgggcacgcggtagagaagacggcgtcccctcggctgctggtcgatacaaacagatccccctttccaaacacgcgccaagtccccgtgccctccagatgcagagagaggctgcgttcagactggggcactgccatcccctccgcatcatggggtctgtggaccaagaagagccgaatgcacataaggtcgccagcccaccctccggacccgcataccccgatgatgtcctggactatggcctcaagccatacagcccccttgctagtctctctggcgagccccccggccgattcggagagccggatagggtagggccgcagaagtttctgagcgcggccaagccagcaggggcctcgggcctgagccctcggatcgagatcactccgtcccacgaactgatccaggcagtggggcccctccgcatgagagacgcgggcctcctggtggagcagccgcccctggccggggtggccgccagcccgaggttcaccctgcccgtgcccggcttcgagggctaccgcgagccgctttgcttgagccccgctagcagcggctcctctgccagcttcatttctgacaccttctccccctacacctcgccctgcgtctcgcccaataacggcgggcccgacgacctgtgtccgcagtttcaaaacatccctgctcattattcccccagaacctcgccaataatgtcacctcgaaccagcctcgccgaggacagctgcctgggccgccactcgcccgtgccccgtccggcctcccgctcctcatcgcctggtgccaagcggaggcattcgtgcgccgaggccttggttgccctgccgcccggagcctcaccccagcgctcccggagcccctcgccgcagccctcatctcacgtggcaccccaggaccacggctccccggctgggtacccccctgtggctggctctgccgtgatcatggatgccctgaacagcctcgccacggactcgccttgtgggatcccccccaagatgtggaagaccagccctgacccctcgccggtgtctgccgccccatccaaggccggcctgcctcgccacatctacccggccgtggagttcctggggccctgcgagcagggcgagaggagaaactcggctccagaatccatcctgctggttccgcccacttggcccaagccgctggtgcctgccattcccatctgcagcatcccagtgactgcatccctccctccacttgagtggccgctgtccagtcagtcaggctcttacgagctgcggatcgaggtgcagcccaagccacatcaccgggcccactatgagacagaaggcagccgaggggctgtcaaagctccaactggaggccaccctgtggttcagctccatggctacatggaaaacaagcctctgggacttcagatcttcattgggacagctgatgagcggatccttaagccgcacgccttctaccaggtgcaccgaatcacggggaaaactgtcaccaccaccagctatgagaagatagtgggcaacaccaaagtcctggagatacccttggagcccaaaaacaacatgagggcaaccatcgactgtgcggggatcttgaagcttagaaacgccgacattgagctgcggaaaggcgagacggacattggaagaaagaacacgcgggtgagactggttttccgagttcacatcccagagtccagtggcagaatcgtctctttacagactgcatctaaccccatcgagtgctcccagcgatctgctcacgagctgcccatggttgaaagacaagacacagacagctgcctggtctatggcggccagcaaatgatcctcacggggcagaactttacatccgagtccaaagttgtgtttactgagaagaccacagatggacagcaaatttgggagatggaagccacggtggataaggacaagagccagcccaacatgctttttgttgagatccctgaatatcggaacaagcatatccgcacacctgtaaaagtgaacttctacgtcatcaatgggaagagaaaacgaagtcagcctcagcactttacctaccacccagtcccagccatcaagacggagcccacggatgaatatgaccccactctgatctgcagccccacccatggaggcctggggagccagccttactacccccagcacccgatggtggccgagtccccctcctgcctcgtggccaccatggctccctgccagcagttccgcacggggctctcatcccctgacgcccgctaccagcaacagaacccagcggccgtactctaccagcggagcaagagcctgagccccagcctgctgggctatcagcagccggccctcatggccgccccgctgtcccttgcggacgctcaccgctctgtgctggtgcacgccggctcccagggccagagctcagccctgctccacccctctccgaccaaccagcaggcctcgcctgtgatccactactcacccaccaaccagcagctgcgctgcggaagccaccaggagttccagcacatcatgtactgcgagaatttcgcaccaggcaccaccagacctggcccgcccccggtcagtcaaggtcagaggctgagcccgggttcctaccccacagtcattcagcagcagaatgccacgagccaaagagccgccaaaaacggacccccggtcagtgaccaaaaggaagtattacctgcgggggtgaccattaaacaggagcagaacttggaccagacctacttggatgatgttaatgaaattatcaggaaggagttttcaggacctcctgccagaaatcagacgtaaaagaagccattatagcaagacaccttctgtatctgacccctcggagccctccacagcccctcaccttctgtctcctttcatgttcatctcccagcccggagtccacacgcggatcaatgtatgggcactaagcggactctcacttaaggagctcgccacctccctctaaacaccagagagaactcttcttttcggtttatgttttaaatcccagagagcatcctggttgatcttaatggtgttccgtccaaatagtaagcacctgctgaccaaaagcacattctacatgagacaggacactggaactctcctgagaacagagtgactggagcttggggggatggacgggggacagaagatgtgggcactgtgattaaaccccagcccttgcgttcgtttttccaggtcacagatacagctcctgtaccttttgaaggcaaggagttctcagagcaaccaaaggaacgtgacccaagagcccagcttacaggctgaagaaacccaaaaccctcgatagagacagaaactgaactgtcagtccttagagctcgcccagtccatgccacaactgggccacagctaaagctttatttttgaattctcattccaaaaccaaactgtcttgcccagacaagatcacctgttaagacttcttggcgttaagttatgacatgtatacgcgtttgttattattattttttctgctttaaaaggctgaccagggcacctagccctggagctgtcttggcgagctgttctttaacccctgcagcacgcagtcctgctaacacaatttccatagacttggggggctgacccaggctgcagagagcaagcacctgtctgctgcagctgtacaacctggatgctttgcaaggttccggcttgctttcttcctagcagccagagtgcttttccgtaaagcggtggagaatctcaagcatgtgcatttaattgaggaatagcagaagggctaaagcaaccaagaaaagaagtgtgggtatttttgttaagtaaaacagcccaagtgcttctggaggtgggtttctaccaagatagaggaaaagggctgaattccctctaagtgggacagccgagctcaggatgtgcttcccagcttcactggttaatttgacctgaacctatttaaagatcccttctgcccctgaagacctatccgcactcaaattctaacatgaagaaatctactcgaatgcatcctttactttgaatgagctctattcggttgcatgttatatgtgatttccttcctcccaactgtttccactgagcgcacccagtctcccctagtcttcctctgtgggtgtgatttttgtgatttttacaaacaaaacccttgaagttcttggcagatgtgtttgtttctgtttgcatgtactgcagataccccaggacaagcgggggattcatttttcagccattcagttgtttcctcaataatccgcagcaaagtgaaaatattcttagcactcagactgtacttagagtgttttctcagtccagtctgtacagtctgtaggcagaaggcctcagaagaaagtcatggccactcagtgcccactgtgggctttgtaagtcctggctctcccgtcaaggttacccagaggtaaaagcttcctgggagtggggccaggtgtgtttggcactccagatagaaggcaaaatgctcagattcgggcctgtgcacttgtatgcaacctgtcggtcgatacctagcatttatttttccctgacaatgaacgacctttccctcacccaccctaagctcaaagagtttagcaaaattctcttttaaataaacagaatgccagtaagaggttgacccctaccatggaacttctgggatgctaaatacttcctcatgaacaaaataagttccttattataagttccttatactagcagcttcacctaaagaattttctctccagcaatattgacttcactggggaaaagccaagagtgtgtggtgagtgatttgttctcactcgacctggctaggactggctaggagctgttttttgtacatgagggaatttgggctttcctcagttatctgaatgttttacccaagtgccttcctgctattgtagcaaagtagctcagcttccttgtccacagggtgaaaaaggactaatgcattttccatcagttttctaactatgttagcaaaaacggcctcctggtagctcaacctcctgtacgcgtgtgtgtgtgtaatacacacacaaataaacccctctgtttttctaagacatcttagctggatattataggaagcactttcataaacaactgtaacaaatcgcaaaggaaagagaaacaaaagcattagatttgagacataaacaggcaagagaaagtgtattaggaactgacagctatcaaggaagttttgtcagttacaaatgctaggaggaaattttgccaagaaggatggctcatgaaatatttccagtacgggaagaggcaataagatcctctaagagaatgagaaagtaggggtgtctaaatggtaaagatgggtgtgttgcacgtgtgttagaaggatctcagttgagtgaaggtttgcactgctacatctaagttaatgtaaatatgtagcactctgacaggtctaccgtgttgctgaatgtagtatatttccaaagtttgcaagtcttcctgtattgtacaaagatgctgctgcttgataatatgtatagcaatccagattagtatgttattaaattttattttcttacctgta

SEQ ID NO: 160421 - DNA, 4569 bp, Homo sapiens
  Payload ID: 11367
  Gene Symbol: NFATC2IP
  Gene Name: nuclear factor of activated T-cells, cytoplasmic, calcineurin-dependent 2 interacting protein
  Uniprot ID: Q8NCF5
  ENST ID: ENST00000320805
  CDS Start-End: 76-1335
tgcaaggcgaaagtcgctgaagggggcggggcgaggcgagaggaggcgggcgtgtgttgtggaggaaagtgtgccatggcggagcctgtggggaagcggggccgctggtccggaggtagcggtgccggccgagggggtcggggcggctggggcggtcggggccggcgtcctcgggcccagcggtctccatcccggggcacgctggacgtagtgtctgtggacttggtcaccgacagcgatgaggaaattctggaggtcgccaccgctcgcggtgccgcggacgaggttgaggtggagcccccggagcccccggggccggtcgcgtcccgggataacagcaacagtgacagcgaaggggaggacaggcggcccgcaggacccccgcgggagccggtcaggcggcggcggcggctggtgctggatccgggggaggcgccgctggttccggtgtactcggggaaggttaaaagcagccttcgccttatcccagatgatctatccctcctgaaactctaccctccaggggatgaggaagaggcagagctggcagattcgagtggtctctaccatgagggctccccatcaccaggctctccctggaagacaaagctgaggactaaggataaagaagagaagaaaaagacagagtttctggatctggacaactctcctctgtccccaccttcaccaaggaccaaaagcagaacgcatactcgggcactcaagaagttaagtgaggtgaacaagcgcctccaggatctccgttcctgtctgagccccaagccacctcagggtcaagagcaacagggccaagaggatgaagtggtcttggtggaagggcccaccctcccagagaccccccgactcttcccactcaaaatccgttgccgggctgacctggtcagattgcccctcaggatgtcggagcccctgcagagtgtggtggaccacatggccacccaccttggggtgtccccaagcaggatccttttgctttttggagagacagagctatcacctactgccactcccaggaccctaaagctcggagtggctgacatcattgactgtgtggtactaacaagttctccagaggccacagagacgtcccaacagctccagctccgggtgcagggaaaggagaaacaccagacactggaagtctcactgtctcgagattcccctctaaagaccctcatgtcccactatgaggaggccatgggactgtcgggacggaagctctccttcttctttgatgggacaaagctttcaggcagggagctgccagctgacctgggcatggaatctggggacctcattgaggtctggggctgacaccccactccctgtttgacggcccagcctggacttggggagaatgactttcccttttttgccccataagggctagcataagctgaggtagaacttatctttaagctgcagcaaaatcaaggagtgacttttgtcccctctcctgttgaccctggtttagagccgttaaccacttggtgagttatgtgggtgttgttgccctgggtggcctgtggctccgtccacaagtcatgctgagttttgcagcctctgtgacttggagatgtcccttcacccctcccctttcaccaccatcctcttttcctcatggaaatgtctgctttatgaaactatgcacatattgaaagtgagttgaaacaaatgagggttgggtaggagcttccaggcctgggatttacaccacgcctagcccagcagaggccttagtcccatttggggcttgggagtgacatttgcttgaggcttatacactggtgtggttgcctggcttgcaggaaatgaccaagctcacacatgctggctgaagcgtaagcagacaactgaggtactcttttgaaggatgaaggtggtggattctcagccctgggggtcttcctcacctgaggacccttcagagccaccctttctagtttgcatttcctggtgcacacatttaaggcataacagcacattcatccctttggtttgggatctcaggaatacagtcccatgcaaagattctctggttttatggcttttttccctttctttacaccatcctctcccataagcacccatgtctttgaatatgaatgtatttgtaaaataccacgtttcatgtgtgaatatgtgcttttactgtacatagtgctattgtgcaataggtcttatgctgttttcactcaatgtgtgctaagatctagccccattgactcttctagaaatgcagtattgctttgacctgccatgtggcactccacaatgtcaattgcagtttacacacattgcctaaagtgggggacacctgggtgcccctgaccccttggcaccggatacaggccacgataaacatcctttcgtgtgttcccttctgtgcttgtgtggcatgtgtacccaggatgggcctataggtcacagaggtcagtttctctttggttttccagattttctttagaacggtgactgaccctcctacttgaggccgcccttttctccttatccttgccagcacttgtattgccagactacctaatttttgccagtctcatgggtagatagtggtgcagtgctttaacatacattcatctgatcagcattaatttggggaattttttcacttagcctttctggtttcccttcctgtgcattgcccattttctcatggagtttcttatcttttttggtttattctcaggagttgcttgtacattcttgggcaattgcagataattccaagaatgcatatttgggctgggtatggaggttcactggtaatcccagcactttgggaggcccaggcagaaggatcgctgcagcccaggagttcgagactagcctgggcaacatagcgagacctcgtctctacaaaaaaaaattaaaaagggggctttgggaggccaaggcgggcagatcatgagggcaggagattgagaccctcctggccaacatggtgaaaccccgtctctactaaaatacaaaaaattagctgggcatggtggcgcacacctgtagtcccagctactctggaggctgaggcaggggaatcgcttaaacccaggaggcggagattgcagtgagccaaggttccaccactgcactccagcctggcgacagagcaaggctccactcaaaaaaaagatttaaaggggaaaaaattgaaattttctttgtatctaggggtatccgtcactgaacagaaattcttaattttggctaggcgtgatggctcaggtctgtaatcccagcactttcggtggccggggtgggtggatcacttgaggccaggagttcaagaccaccctgaccaacttggtgaaatcccatctctactaaaaatacaaaaattagctgggtgcagtggcgcatgcttgtaatcccagctactcaggaggcagaggcaggagaatcacttgaacccgggaggtggaggctgcagtgaacagagacagtgccactgcacatcagcctgagtgacagagagactttgtctcaaaaaaaaaagaaaattttaattttaatgtagacagtatgaattatcttgttctgcagttggttgctttttgattgcttatttaatagagttgttaagatattttacatcttctcctgttagctgttcagcttttcctttcatattgagaacactacacagtgctgaagtccagctggtacacaccggggtgacaccttggctgcatctgttctcaacagtcagacacttcttctaattggttgatgctgggctgtactggttgctaaatattgcacatcattttaaaactatttgagatgcacttttgtactcaggaggccaaggcaggaggattgcttgagcccaggagtttgagaccagcctgggcaacacagcgagaccttgtctcttaaaaaaaaaaaaaaaaaaaaatgagagaaatcggctgggcatggtttctcatgcctgtaatcccagaactttgggaggctgaggcaggtggatcaccggaggttaggaattcaagactgaaaccttgtctctactgaaaatacaaaaaaaaaaaaaaaaaaaaatgagctaggtgtggtggcaggcgcctgtaatcccagttacttcgggaggctgaggcaggagaatcgcttgaacccaggaggcagaggttgcagtgagccaagatcgcgccattgcactccagcctgggcgacaagagtggaaactctgtctcaaaaaaaaaaaaaaaaattcagtgaaatacacctttatatatgagatccaagtttcactttttgtgatataatgagccagttttctcagtaatgtctactaaaaaaaaagccattaacctttctctaatatttgcatgattctaataaaagtatgtcaacttcttaaaatgttttattgaaatgtggcattcctttgaattttatgacattaaaataatccacgacatggtacagctcttcactttttcagctttttaaatgtccattaataagtttgaatacgttaaaattatatgtttaacctcaacaaaataaatggcaatatgttcaacttgt

SEQ ID NO: 160422 - DNA, 1157 bp, Homo sapiens
  Payload ID: 11367
  Gene Symbol: NFATC2IP
  Gene Name: nuclear factor of activated T-cells, cytoplasmic, calcineurin-dependent 2 interacting protein
  Uniprot ID: Q8NCF5
  ENST ID: ENST00000568148
  CDS Start-End: 358-741
catactggcccacgttcccacacagtgccaatcagctggagctgcgtaacagccagcctgtctaggtggcatgtgaattccagtttgctgcaatccccaccacccctttctttgttctaacccatggctgctatatttctttgtgttactcgcctgtaccccttgctgacacgattttattctataccttgccaggtaaatatgatgaaactcacagctgaggagcttagcaagtagctaaggccagagcttgtgtttgggtggtgtggctgggggcatggatttcaaggcaggaagacctcttttgcttgttgtccccatccctagtcggagcccctgcagagtgtggtggaccacatggccacccaccttggggtgtccccaagcaggatccttttgctttttggagagacagagctatcacctactgccactcccaggaccctaaagctcggagtggctgacatcattgactgtgtggtactaacaagttctccagaggccacagagacgtcccaacagctccagctccgggtgcagggaaaggagaaacaccagacactggaagtctcactgtctcgagattcccctctaaagaccctcatgtcccactatgaggaggccatgggactgtcgggacggaagctctccttcttctttgatgggacaaagctttcaggcagggagctgccagctgacctgggcatggaatctggggacctcattgaggtctggggctgacaccccactccctgtttgacggcccagcctggacttggggagaatgactttcccttttttgccccataagggctagcataagctgaggtagaacttatctttaagctgcagcaaaatcaaggagtgacttttgtcccctctcctgttgaccctggtttagagccgttaaccacttggtgagttatgtgggtgttgttgccctgggtggcctgtggctccgtccacaagtcatgctgagttttgcagcctctgtgacttggagatgtcccttcacccctcccctttcaccaccatcctcttttcctcatggaaatgtctgctttatgaaactatgcacatattgaaagtgagttgaaacaaatgagggttgggtaggagcttccaggcctgggatttacaccacgcctagcccagca

SEQ ID NO: 160423 - DNA, 2350 bp, Homo sapiens
  Payload ID: 11367
  Gene Symbol: NFATC2IP
  Gene Name: nuclear factor of activated T-cells, cytoplasmic, calcineurin-dependent 2 interacting protein
  ENST ID: ENST00000564978
  CDS Start-End: 93-515
tggaatctttggcgccttggtttcagaggttaaaagcagccttcgccttatcccagatgatctatccctcctgaaactctaccctccaggggatgaggaagtcggagcccctgcagagtgtggtggaccacatggccacccaccttggggtgtccccaagcaggatccttttgctttttggagagacagagctatcacctactgccactcccaggaccctaaagctcggagtggctgacatcattgactgtgtggtactaacaagttctccagaggccacagagacgtcccaacagctccagctccgggtgcagggaaaggagaaacaccagacactggaagtctcactgtctcgagattcccctctaaagaccctcatgtcccactatgaggaggccatgggactgtcgggacggaagctctccttcttctttgatgggacaaagctttcaggcagggagctgccagctgacctgggcatggaatctggggacctcattgaggtctggggctgacaccccactccctgtttgacggcccagcctggacttggggagaatgactttcccttttttgccccataagggctagcataagctgaggtagaacttatctttaagctgcagcaaaatcaaggagtgacttttgtcccctctcctgttgaccctggtttagagccgttaaccacttggtgagttatgtgggtgttgttgccctgggtggcctgtggctccgtccacaagtcatgctgagttttgcagcctctgtgacttggagatgtcccttcacccctcccctttcaccaccatcctcttttcctcatggaaatgtctgctttatgaaactatgcacatattgaaagtgagttgaaacaaatgagggttgggtaggagcttccaggcctgggatttacaccacgcctagcccagcagaggccttagtcccatttggggcttgggagtgacatttgcttgaggcttatacactggtgtggttgcctggcttgcaggaaatgaccaagctcacacatgctggctgaagcgtaagcagacaactgaggtactcttttgaaggatgaaggtggtggattctcagccctgggggtcttcctcacctgaggacccttcagagccaccctttctagtttgcatttcctggtgcacacatttaaggcataacagcacattcatccctttggtttgggatctcaggaatacagtcccatgcaaagattctctggttttatggcttttttccctttctttacaccatcctctcccataagcacccatgtctttgaatatgaatgtatttgtaaaataccacgtttcatgtgtgaatatgtgcttttactgtacatagtgctattgtgcaataggtcttatgctgttttcactcaatgtgtgctaagatctagccccattgactcttctagaaatgcagtattgctttgacctgccatgtggcactccacaatgtcaattgcagtttacacacattgcctaaagtgggggacacctgggtgcccctgaccccttggcaccggatacaggccacgataaacatcctttcgtgtgttcccttctgtgcttgtgtggcatgtgtacccaggatgggcctataggtcacagaggtcagtttctctttggttttccagattttctttagaacggtgactgaccctcctacttgaggccgcccttttctccttatccttgccagcacttgtattgccagactacctaatttttgccagtctcatgggtagatagtggtgcagtgctttaacatacattcatctgatcagcattaatttggggaattttttcacttagcctttctggtttcccttcctgtgcattgcccattttctcatggagtttcttatcttttttggtttattctcaggagttgcttgtacattcttgggcaattgcagataattccaagaatgcatatttgggctgggtatggaggttcactggtaatcccagcactttgggaggcccaggcagaaggatcgctgcagcccaggagttcgagactagcctgggcaacatagcgagacctcgtctctacaaaaaaaaattaaaaagggggctttgggaggccaaggcgggcagatcatgagggcaggagattgagaccctcctggccaacatggtgaaaccccgtctctactaaaatacaaaaaattagctgggcatggtggcgcacacctgtagtcccagctactctggaggctgaggcaggggaatcgcttaaacccaggaggcggagattgcagtgagccaaggttccaccactgcactccagcctggcgacagagcaaggctccactcaaaaaaaa

SEQ ID NO: 160424 - DNA, 6328 bp, Homo sapiens
  Payload ID: 11368
  Gene Symbol: NFATC3
  Gene Name: nuclear factor of activated T-cells, cytoplasmic, calcineurin-dependent 3
  Uniprot ID: Q12968
  ENST ID: ENST00000349223
  CDS Start-End: 225-3422
gcaccggtggcgggcggctgcggttcctggtgctgctcggcgcgcggccagctttcggaacggaacgctcggcgtcgcgggccccgcccggaaagtttgccgtggagtcgcgacctcttggcccgcgcggcccggcatgaagcggcgttgaggagctgctgccgccgcttgccgctgccgccgccgccgcctgaggaggagctgcagcaccctgggccacgccgatgactactgcaaactgtggcgcccacgacgagctcgacttcaaactcgtctttggcgaggacggggcgccggcgccgccgcccccgggctcgcggcctgcagatcttgagccagatgattgtgcatccatttacatctttaatgtagatccacctccatctactttaaccacaccactttgcttaccacatcatggattaccgtctcactcttctgttttgtcaccatcgtttcagctccaaagtcacaaaaactatgaaggaacttgtgagattcctgaatctaaatatagcccattaggtggtcccaaaccctttgagtgcccaagtattcaaattacatctatctctcctaactgtcatcaagaattagatgcacatgaagatgacctacagataaatgacccagaacgggaatttttggaaaggccttctagagatcatctctatcttcctcttgagccatcctaccgggagtcttctcttagtcctagtcctgccagcagcatctcttctaggagttggttctctgatgcatcttcttgtgaatcgctttcacatatttatgatgatgtggactcagagttgaatgaagctgcagcccgatttacccttggatcccctctgacttctcctggtggctctccagggggctgccctggagaagaaacttggcatcaacagtatggacttggacactcattatcacccaggcaatctccttgccactctcctagatccagtgtcactgatgagaattggctgagccccaggccagcctcaggaccctcatcaaggcccacatccccctgtgggaaacggaggcactccagtgctgaagtttgttatgctgggtccctttcaccccatcactcacctgttccttcacctggtcactcccccaggggaagtgtgacagaagatacgtggctcaatgcttctgtccatggtgggtcaggccttggccctgcagtttttccatttcagtactgtgtagagactgacatccctctcaaaacaaggaaaacttctgaagatcaagctgccatactaccaggaaaattagagctgtgttcagatgaccaagggagtttatcaccagcccgggagacttcaatagatgatggccttggatctcagtatcctttaaagaaagattcatgtggtgatcagtttctttcagttccttcaccctttacctggagcaaaccaaagcctggccacacccctatatttcgcacatcttcattacctccactagactggcctttaccagctcattttggacaatgtgaactgaaaatagaagtgcaacctaaaactcatcatcgagcccattatgaaactgaaggtagccgaggggcagtaaaagcatctactgggggacatcctgttgtgaagctcctgggctataacgaaaagccaataaatctacaaatgtttattgggacagcagatgatcgatatttacgacctcatgcattttaccaggtgcatcgaatcactgggaagacagtcgctactgcaagccaagagataataattgccagtacaaaagttctggaaattccacttcttcctgaaaataatatgtcagccagtattgattgtgcaggtattttgaaactccgcaattcagatatagaacttcgaaaaggagaaactgatattggcagaaagaatactagagtacgacttgtgtttcgtgtacacatcccacagcccagtggaaaagtcctttctctgcagatagcctctatacccgttgagtgctcccagcggtctgctcaagaacttcctcatattgagaagtacagtatcaacagttgttctgtaaatggaggtcatgaaatggttgtgactggatctaattttcttccagaatccaaaatcatttttcttgaaaaaggacaagatggacgacctcagtgggaggtagaagggaagataatcagggaaaaatgtcaaggggctcacattgtccttgaagttcctccatatcataacccagcagttacagctgcagtgcaggtgcacttttatctttgcaatggcaagaggaaaaaaagccagtctcaacgttttacttatacaccagttttgatgaagcaagaacacagagaagagattgatttgtcttcagttccatctttgcctgtgcctcatcctgctcagacccagaggccttcctctgattcagggtgttcacatgacagtgtactgtcaggacagagaagtttgatttgctccatcccacaaacatatgcatccatggtgacctcatcccatctgccacagttgcagtgtagagatgagagtgttagtaaagaacagcatatgattccttctccaattgtacaccagccttttcaagtcacaccaacacctcctgtggggtcttcctatcagcctatgcaaactaatgttgtgtacaatggaccaacttgtcttcctattaatgctgcctctagtcaagaatttgattcagttttgtttcagcaggatgcaactctttctggtttagtgaatcttggctgtcaaccactgtcatccataccatttcattcttcaaattcaggctcaacaggacatctcttagcccatacacctcattctgtgcataccctgcctcatctgcaatcaatgggatatcattgttcaaatacaggacaaagatctctttcttctccagtggctgaccagattacaggtcagccttcgtctcagttacaacctattacatatggtccttcacattcagggtctgctacaacagcttccccagcagcttctcatcccttggctagttcaccgctttctgggccaccatctcctcagcttcagcctatgccttaccaatctcctagctcaggaactgcctcatcaccgtctccagccaccagaatgcattctggacagcactcaactcaagcacaaagtacgggccaggggggtctttctgcaccttcatccttaatatgtcacagtttgtgtgatccagcgtcatttccacctgatggggcaactgtgagcattaaacctgaaccagaagatcgagagcctaactttgcaaccattggtctgcaggacatcactttagatgatgatttgtttaccagtaataattttgacttgcttcagttgagacctacgttttggccagtcccagcaggaagatatctgaggaatctagagtgaacgagataattgggagagacatgtcccagatttctgtttcccaaggagcaggggtgagcaggcaggctcccctcccgagtcctgagtccctggatttaggaagatctgatgggctctaacagtgcttactgcagccttgtgtccaccaccaacttctcagcatgtttctctccttggaccttgggtttccaactctgcagccttcaggtctggggccaggagtgggacccaccatttgtggggaaagtagcattcctccacctcaggccttgggtagatttggcaaaagaacaggagcagcataggctgtttgagctttggggaaatgaactttgctttttatatttaactaggatacttttatatgatgggtgctttgagtgtgaatgcagcaggctctcttgtttccgaggtgctgcttttgcaggtgacctggttacttagctaggattggtgatttgtactgctttatggtcatttgaagggccctttagtttttatgataatttttaaaataggaacttttgataagaccttctagaagcaaaaaaaaaaaaaaaaaaaaaaaaaagaaaaaaaaagaaaagaaaaaaagaaaaagaaaaaaatatcccaagcccacacctatgcctcagaaagtcagcatgtgtcctgaagacgttcatagatttataggaaataaagccaaatgtagctcatacctctttataaaactaaactgttgttagataaaatgagaagagaccattccatcattgaagtgttggaatataaaaagacattccagagcatagccttttggtaactttctaggtaatcttgcaatctctccatactggctccatgttgaaattgctttttccctcaggaccctgggtaagatggctacatttaaggtgactctgaatggtggggttctagcttggtcactttcatttcttgccatcataaaaactagtaggctgtggagtgcgcttcctgtttgtgtcatctggtcgtagaaccttttccaaacagaagcatctgcctttggctgttctgtgacctttgaagccagtctcagtggtttaggcagctttgcagttctaactctagctagaggccaggctgtgtgcagagctaaagcacaaatgagcagtacatcagcatgggcagagaaaatacaggactccagatgggaaggttttaagagtcacactggcatggaaggcttatctgccattctatttatagcctgaaatgattctggcctaccctgtcctgtctgtatgatctaaaaaccagccttttccccagaaggctctgagcacatccagaagtgataacctgaccctccacaccaaagacaccctggtgctgctgctggtgagactggtgtccaaggcagggcccagcagaaactgcagcctgctgtctaccaaaggaggtacccgagttgggtactttaaaaaaaaaaaaaacctgcccttacccctctccctaatgggattttttttacctgttcctgggcccattacagagcctctgaagtttgcagtatgctttcaaatgaaataatatacttccattgattcaggaagcagattttttgagtgcctatatgtgagacagtgtgctggttgaaggcctgatgctgttattccaggagactgcaggcccttgatgccaggactctctctactaaggccagttcaggtctgggaaagggagctggcctattgcccaccacctgttgtcagtaggttaggagctgttgactcaggatgaggaagtatggtctttaaaaaaaacaaaatatattttagatttctcccctaaagttagttagagaaaaaggtctattcttcagcagatcactgtggcccctcttggagctgggtgttttcaaattttcttgaaaagtgagttgtgtcacagaatgtggatagtgagatttgcttctgggcctgtggttggacgcccacagcttcctttggaggggcaagaagttggcctctcggttgacattccagagaaatggccagacttgcccctacccttttgcccctggtgtagctgcctcacatgaggttattgcaagagttccccttgcaataccctttgtgccctcaagaattaaaagcctctatgatccagagttgctatgcaccaaattttgatgccttctaaataccttgatgcctgtagcactagaaatgctttcctatttaaaataaacattaaattttaaaatagagctttgtatactatgtaagcagttttatatcagctttgtaaaagctttggtgttaagagtcaatattttttggctttgtagataaagacttaaatttttgtgcaacatagtggtgttaaagcacacatccattggactatgcaaatcaatttctactagcagcactgagcaactgggcacgtgctagtacgcaccccctcctactctaactgtgctagctcttgggttgaggaatggaatgggtagccttctgcttactggagatgcacagagaaacatggctgaaaacagctttaaaaagaacatgtctttgggttcatgtgtggtgctgctgcccgggtgtaaactatccccacccagggccagccattatcaccagacctcttctgggcctggctgtgaagccctgtttttggtattcagaatggatctttaaggctcagatgggctcaaattgaaaccttgtgttttataaaatggatgtttagtaaaggaactggttctcagttatgtttacagcacttggaattgtgtgttcttgtacattttgtattttaaaaccttttatgggagtgcagtgctccttacacaaatacaaagggaagaagagccagcagttgaggctcctcagttttagtgctgaaataataaacagtgacaggtcaacagt

SEQ ID NO: 160425 - DNA, 6040 bp, Homo sapiens
  Payload ID: 11368
  Gene Symbol: NFATC3
  Gene Name: nuclear factor of activated T-cells, cytoplasmic, calcineurin-dependent 3
  Uniprot ID: Q12968
  ENST ID: ENST00000346183
  CDS Start-End: 25-3252
gctgcagcaccctgggccacgccgatgactactgcaaactgtggcgcccacgacgagctcgacttcaaactcgtctttggcgaggacggggcgccggcgccgccgcccccgggctcgcggcctgcagatcttgagccagatgattgtgcatccatttacatctttaatgtagatccacctccatctactttaaccacaccactttgcttaccacatcatggattaccgtctcactcttctgttttgtcaccatcgtttcagctccaaagtcacaaaaactatgaaggaacttgtgagattcctgaatctaaatatagcccattaggtggtcccaaaccctttgagtgcccaagtattcaaattacatctatctctcctaactgtcatcaagaattagatgcacatgaagatgacctacagataaatgacccagaacgggaatttttggaaaggccttctagagatcatctctatcttcctcttgagccatcctaccgggagtcttctcttagtcctagtcctgccagcagcatctcttctaggagttggttctctgatgcatcttcttgtgaatcgctttcacatatttatgatgatgtggactcagagttgaatgaagctgcagcccgatttacccttggatcccctctgacttctcctggtggctctccagggggctgccctggagaagaaacttggcatcaacagtatggacttggacactcattatcacccaggcaatctccttgccactctcctagatccagtgtcactgatgagaattggctgagccccaggccagcctcaggaccctcatcaaggcccacatccccctgtgggaaacggaggcactccagtgctgaagtttgttatgctgggtccctttcaccccatcactcacctgttccttcacctggtcactcccccaggggaagtgtgacagaagatacgtggctcaatgcttctgtccatggtgggtcaggccttggccctgcagtttttccatttcagtactgtgtagagactgacatccctctcaaaacaaggaaaacttctgaagatcaagctgccatactaccaggaaaattagagctgtgttcagatgaccaagggagtttatcaccagcccgggagacttcaatagatgatggccttggatctcagtatcctttaaagaaagattcatgtggtgatcagtttctttcagttccttcaccctttacctggagcaaaccaaagcctggccacacccctatatttcgcacatcttcattacctccactagactggcctttaccagctcattttggacaatgtgaactgaaaatagaagtgcaacctaaaactcatcatcgagcccattatgaaactgaaggtagccgaggggcagtaaaagcatctactgggggacatcctgttgtgaagctcctgggctataacgaaaagccaataaatctacaaatgtttattgggacagcagatgatcgatatttacgacctcatgcattttaccaggtgcatcgaatcactgggaagacagtcgctactgcaagccaagagataataattgccagtacaaaagttctggaaattccacttcttcctgaaaataatatgtcagccagtattgattgtgcaggtattttgaaactccgcaattcagatatagaacttcgaaaaggagaaactgatattggcagaaagaatactagagtacgacttgtgtttcgtgtacacatcccacagcccagtggaaaagtcctttctctgcagatagcctctatacccgttgagtgctcccagcggtctgctcaagaacttcctcatattgagaagtacagtatcaacagttgttctgtaaatggaggtcatgaaatggttgtgactggatctaattttcttccagaatccaaaatcatttttcttgaaaaaggacaagatggacgacctcagtgggaggtagaagggaagataatcagggaaaaatgtcaaggggctcacattgtccttgaagttcctccatatcataacccagcagttacagctgcagtgcaggtgcacttttatctttgcaatggcaagaggaaaaaaagccagtctcaacgttttacttatacaccagttttgatgaagcaagaacacagagaagagattgatttgtcttcagttccatctttgcctgtgcctcatcctgctcagacccagaggccttcctctgattcagggtgttcacatgacagtgtactgtcaggacagagaagtttgatttgctccatcccacaaacatatgcatccatggtgacctcatcccatctgccacagttgcagtgtagagatgagagtgttagtaaagaacagcatatgattccttctccaattgtacaccagccttttcaagtcacaccaacacctcctgtggggtcttcctatcagcctatgcaaactaatgttgtgtacaatggaccaacttgtcttcctattaatgctgcctctagtcaagaatttgattcagttttgtttcagcaggatgcaactctttctggtttagtgaatcttggctgtcaaccactgtcatccataccatttcattcttcaaattcaggctcaacaggacatctcttagcccatacacctcattctgtgcataccctgcctcatctgcaatcaatgggatatcattgttcaaatacaggacaaagatctctttcttctccagtggctgaccagattacaggtcagccttcgtctcagttacaacctattacatatggtccttcacattcagggtctgctacaacagcttccccagcagcttctcatcccttggctagttcaccgctttctgggccaccatctcctcagcttcagcctatgccttaccaatctcctagctcaggaactgcctcatcaccgtctccagccaccagaatgcattctggacagcactcaactcaagcacaaagtacgggccaggggggtctttctgcaccttcatccttaatatgtcacagtttgtgtgatccagcgtcatttccacctgatggggcaactgtgagcattaaacctgaaccagaagatcgagagcctaactttgcaaccattggtctgcaggacatcactttagatgatgtgaacgagataattgggagagacatgtcccagatttctgtttcccaaggagcaggggtgagcaggcaggctcccctcccgagtcctgagtccctggatttaggaagatctgatgggctctaacagtgcttactgcagccttgtgtccaccaccaacttctcagcatgtttctctccttggaccttgggtttccaactctgcagccttcaggtctggggccaggagtgggacccaccatttgtggggaaagtagcattcctccacctcaggccttgggtagatttggcaaaagaacaggagcagcataggctgtttgagctttggggaaatgaactttgctttttatatttaactaggatacttttatatgatgggtgctttgagtgtgaatgcagcaggctctcttgtttccgaggtgctgcttttgcaggtgacctggttacttagctaggattggtgatttgtactgctttatggtcatttgaagggccctttagtttttatgataatttttaaaataggaacttttgataagaccttctagaagcaaaaaaaaaaaaaaaaaaaaaaaaaagaaaaaaaaagaaaagaaaaaaagaaaaagaaaaaaatatcccaagcccacacctatgcctcagaaagtcagcatgtgtcctgaagacgttcatagatttataggaaataaagccaaatgtagctcatacctctttataaaactaaactgttgttagataaaatgagaagagaccattccatcattgaagtgttggaatataaaaagacattccagagcatagccttttggtaactttctaggtaatcttgcaatctctccatactggctccatgttgaaattgctttttccctcaggaccctgggtaagatggctacatttaaggtgactctgaatggtggggttctagcttggtcactttcatttcttgccatcataaaaactagtaggctgtggagtgcgcttcctgtttgtgtcatctggtcgtagaaccttttccaaacagaagcatctgcctttggctgttctgtgacctttgaagccagtctcagtggtttaggcagctttgcagttctaactctagctagaggccaggctgtgtgcagagctaaagcacaaatgagcagtacatcagcatgggcagagaaaatacaggactccagatgggaaggttttaagagtcacactggcatggaaggcttatctgccattctatttatagcctgaaatgattctggcctaccctgtcctgtctgtatgatctaaaaaccagccttttccccagaaggctctgagcacatccagaagtgataacctgaccctccacaccaaagacaccctggtgctgctgctggtgagactggtgtccaaggcagggcccagcagaaactgcagcctgctgtctaccaaaggaggtacccgagttgggtactttaaaaaaaaaaaaaacctgcccttacccctctccctaatgggattttttttacctgttcctgggcccattacagagcctctgaagtttgcagtatgctttcaaatgaaataatatacttccattgattcaggaagcagattttttgagtgcctatatgtgagacagtgtgctggttgaaggcctgatgctgttattccaggagactgcaggcccttgatgccaggactctctctactaaggccagttcaggtctgggaaagggagctggcctattgcccaccacctgttgtcagtaggttaggagctgttgactcaggatgaggaagtatggtctttaaaaaaaacaaaatatattttagatttctcccctaaagttagttagagaaaaaggtctattcttcagcagatcactgtggcccctcttggagctgggtgttttcaaattttcttgaaaagtgagttgtgtcacagaatgtggatagtgagatttgcttctgggcctgtggttggacgcccacagcttcctttggaggggcaagaagttggcctctcggttgacattccagagaaatggccagacttgcccctacccttttgcccctggtgtagctgcctcacatgaggttattgcaagagttccccttgcaataccctttgtgccctcaagaattaaaagcctctatgatccagagttgctatgcaccaaattttgatgccttctaaataccttgatgcctgtagcactagaaatgctttcctatttaaaataaacattaaattttaaaatagagctttgtatactatgtaagcagttttatatcagctttgtaaaagctttggtgttaagagtcaatattttttggctttgtagataaagacttaaatttttgtgcaacatagtggtgttaaagcacacatccattggactatgcaaatcaatttctactagcagcactgagcaactgggcacgtgctagtacgcaccccctcctactctaactgtgctagctcttgggttgaggaatggaatgggtagccttctgcttactggagatgcacagagaaacatggctgaaaacagctttaaaaagaacatgtctttgggttcatgtgtggtgctgctgcccgggtgtaaactatccccacccagggccagccattatcaccagacctcttctgggcctggctgtgaagccctgtttttggtattcagaatggatctttaaggctcagatgggctcaaattgaaaccttgtgttttataaaatggatgtttagtaaaggaactggttctcagttatgtttacagcacttggaattgtgtgttcttgtacattttgtattttaaaaccttttatgggagtgcagtgctccttacacaaatacaaagggaagaagagccagcagttgaggctcctcagttttagtgctgaaataataaacagtgacaggtcaacagta

SEQ ID NO: 160426 - DNA, 6144 bp, Homo sapiens
  Payload ID: 11368
  Gene Symbol: NFATC3
  Gene Name: nuclear factor of activated T-cells, cytoplasmic, calcineurin-dependent 3
  Uniprot ID: Q12968
  ENST ID: ENST00000329524
  CDS Start-End: 25-3231
gctgcagcaccctgggccacgccgatgactactgcaaactgtggcgcccacgacgagctcgacttcaaactcgtctttggcgaggacggggcgccggcgccgccgcccccgggctcgcggcctgcagatcttgagccagatgattgtgcatccatttacatctttaatgtagatccacctccatctactttaaccacaccactttgcttaccacatcatggattaccgtctcactcttctgttttgtcaccatcgtttcagctccaaagtcacaaaaactatgaaggaacttgtgagattcctgaatctaaatatagcccattaggtggtcccaaaccctttgagtgcccaagtattcaaattacatctatctctcctaactgtcatcaagaattagatgcacatgaagatgacctacagataaatgacccagaacgggaatttttggaaaggccttctagagatcatctctatcttcctcttgagccatcctaccgggagtcttctcttagtcctagtcctgccagcagcatctcttctaggagttggttctctgatgcatcttcttgtgaatcgctttcacatatttatgatgatgtggactcagagttgaatgaagctgcagcccgatttacccttggatcccctctgacttctcctggtggctctccagggggctgccctggagaagaaacttggcatcaacagtatggacttggacactcattatcacccaggcaatctccttgccactctcctagatccagtgtcactgatgagaattggctgagccccaggccagcctcaggaccctcatcaaggcccacatccccctgtgggaaacggaggcactccagtgctgaagtttgttatgctgggtccctttcaccccatcactcacctgttccttcacctggtcactcccccaggggaagtgtgacagaagatacgtggctcaatgcttctgtccatggtgggtcaggccttggccctgcagtttttccatttcagtactgtgtagagactgacatccctctcaaaacaaggaaaacttctgaagatcaagctgccatactaccaggaaaattagagctgtgttcagatgaccaagggagtttatcaccagcccgggagacttcaatagatgatggccttggatctcagtatcctttaaagaaagattcatgtggtgatcagtttctttcagttccttcaccctttacctggagcaaaccaaagcctggccacacccctatatttcgcacatcttcattacctccactagactggcctttaccagctcattttggacaatgtgaactgaaaatagaagtgcaacctaaaactcatcatcgagcccattatgaaactgaaggtagccgaggggcagtaaaagcatctactgggggacatcctgttgtgaagctcctgggctataacgaaaagccaataaatctacaaatgtttattgggacagcagatgatcgatatttacgacctcatgcattttaccaggtgcatcgaatcactgggaagacagtcgctactgcaagccaagagataataattgccagtacaaaagttctggaaattccacttcttcctgaaaataatatgtcagccagtattgattgtgcaggtattttgaaactccgcaattcagatatagaacttcgaaaaggagaaactgatattggcagaaagaatactagagtacgacttgtgtttcgtgtacacatcccacagcccagtggaaaagtcctttctctgcagatagcctctatacccgttgagtgctcccagcggtctgctcaagaacttcctcatattgagaagtacagtatcaacagttgttctgtaaatggaggtcatgaaatggttgtgactggatctaattttcttccagaatccaaaatcatttttcttgaaaaaggacaagatggacgacctcagtgggaggtagaagggaagataatcagggaaaaatgtcaaggggctcacattgtccttgaagttcctccatatcataacccagcagttacagctgcagtgcaggtgcacttttatctttgcaatggcaagaggaaaaaaagccagtctcaacgttttacttatacaccagttttgatgaagcaagaacacagagaagagattgatttgtcttcagttccatctttgcctgtgcctcatcctgctcagacccagaggccttcctctgattcagggtgttcacatgacagtgtactgtcaggacagagaagtttgatttgctccatcccacaaacatatgcatccatggtgacctcatcccatctgccacagttgcagtgtagagatgagagtgttagtaaagaacagcatatgattccttctccaattgtacaccagccttttcaagtcacaccaacacctcctgtggggtcttcctatcagcctatgcaaactaatgttgtgtacaatggaccaacttgtcttcctattaatgctgcctctagtcaagaatttgattcagttttgtttcagcaggatgcaactctttctggtttagtgaatcttggctgtcaaccactgtcatccataccatttcattcttcaaattcaggctcaacaggacatctcttagcccatacacctcattctgtgcataccctgcctcatctgcaatcaatgggatatcattgttcaaatacaggacaaagatctctttcttctccagtggctgaccagattacaggtcagccttcgtctcagttacaacctattacatatggtccttcacattcagggtctgctacaacagcttccccagcagcttctcatcccttggctagttcaccgctttctgggccaccatctcctcagcttcagcctatgccttaccaatctcctagctcaggaactgcctcatcaccgtctccagccaccagaatgcattctggacagcactcaactcaagcacaaagtacgggccaggggggtctttctgcaccttcatccttaatatgtcacagtttgtgtgatccagcgtcatttccacctgatggggcaactgtgagcattaaacctgaaccagaagatcgagagcctaactttgcaaccattggtctgcaggacatcactttagatgatgaccaatttatatctgacttggaacaccagccatcaggttcagcagagaaatggcctaaccacagtgtgctctcatgtccagctcctttctggagaatctagaggtgaacgagataattgggagagacatgtcccagatttctgtttcccaaggagcaggggtgagcaggcaggctcccctcccgagtcctgagtccctggatttaggaagatctgatgggctctaacagtgcttactgcagccttgtgtccaccaccaacttctcagcatgtttctctccttggaccttgggtttccaactctgcagccttcaggtctggggccaggagtgggacccaccatttgtggggaaagtagcattcctccacctcaggccttgggtagatttggcaaaagaacaggagcagcataggctgtttgagctttggggaaatgaactttgctttttatatttaactaggatacttttatatgatgggtgctttgagtgtgaatgcagcaggctctcttgtttccgaggtgctgcttttgcaggtgacctggttacttagctaggattggtgatttgtactgctttatggtcatttgaagggccctttagtttttatgataatttttaaaataggaacttttgataagaccttctagaagcaaaaaaaaaaaaaaaaaaaaaaaaaagaaaaaaaaagaaaagaaaaaaagaaaaagaaaaaaatatcccaagcccacacctatgcctcagaaagtcagcatgtgtcctgaagacgttcatagatttataggaaataaagccaaatgtagctcatacctctttataaaactaaactgttgttagataaaatgagaagagaccattccatcattgaagtgttggaatataaaaagacattccagagcatagccttttggtaactttctaggtaatcttgcaatctctccatactggctccatgttgaaattgctttttccctcaggaccctgggtaagatggctacatttaaggtgactctgaatggtggggttctagcttggtcactttcatttcttgccatcataaaaactagtaggctgtggagtgcgcttcctgtttgtgtcatctggtcgtagaaccttttccaaacagaagcatctgcctttggctgttctgtgacctttgaagccagtctcagtggtttaggcagctttgcagttctaactctagctagaggccaggctgtgtgcagagctaaagcacaaatgagcagtacatcagcatgggcagagaaaatacaggactccagatgggaaggttttaagagtcacactggcatggaaggcttatctgccattctatttatagcctgaaatgattctggcctaccctgtcctgtctgtatgatctaaaaaccagccttttccccagaaggctctgagcacatccagaagtgataacctgaccctccacaccaaagacaccctggtgctgctgctggtgagactggtgtccaaggcagggcccagcagaaactgcagcctgctgtctaccaaaggaggtacccgagttgggtactttaaaaaaaaaaaaaacctgcccttacccctctccctaatgggattttttttacctgttcctgggcccattacagagcctctgaagtttgcagtatgctttcaaatgaaataatatacttccattgattcaggaagcagattttttgagtgcctatatgtgagacagtgtgctggttgaaggcctgatgctgttattccaggagactgcaggcccttgatgccaggactctctctactaaggccagttcaggtctgggaaagggagctggcctattgcccaccacctgttgtcagtaggttaggagctgttgactcaggatgaggaagtatggtctttaaaaaaaacaaaatatattttagatttctcccctaaagttagttagagaaaaaggtctattcttcagcagatcactgtggcccctcttggagctgggtgttttcaaattttcttgaaaagtgagttgtgtcacagaatgtggatagtgagatttgcttctgggcctgtggttggacgcccacagcttcctttggaggggcaagaagttggcctctcggttgacattccagagaaatggccagacttgcccctacccttttgcccctggtgtagctgcctcacatgaggttattgcaagagttccccttgcaataccctttgtgccctcaagaattaaaagcctctatgatccagagttgctatgcaccaaattttgatgccttctaaataccttgatgcctgtagcactagaaatgctttcctatttaaaataaacattaaattttaaaatagagctttgtatactatgtaagcagttttatatcagctttgtaaaagctttggtgttaagagtcaatattttttggctttgtagataaagacttaaatttttgtgcaacatagtggtgttaaagcacacatccattggactatgcaaatcaatttctactagcagcactgagcaactgggcacgtgctagtacgcaccccctcctactctaactgtgctagctcttgggttgaggaatggaatgggtagccttctgcttactggagatgcacagagaaacatggctgaaaacagctttaaaaagaacatgtctttgggttcatgtgtggtgctgctgcccgggtgtaaactatccccacccagggccagccattatcaccagacctcttctgggcctggctgtgaagccctgtttttggtattcagaatggatctttaaggctcagatgggctcaaattgaaaccttgtgttttataaaatggatgtttagtaaaggaactggttctcagttatgtttacagcacttggaattgtgtgttcttgtacattttgtattttaaaaccttttatgggagtgcagtgctccttacacaaatacaaagggaagaagagccagcagttgaggctcctcagttttagtgctgaaataataaacagtgacaggtcaacagta

SEQ ID NO: 160427 - DNA, 2484 bp, Homo sapiens
  Payload ID: 11368
  Gene Symbol: NFATC3
  Gene Name: nuclear factor of activated T-cells, cytoplasmic, calcineurin-dependent 3
  ENST ID: ENST00000539828
  CDS Start-End: 242-358
cgacagtggaggcttaggcaccggtggcgggcggctgcggttcctggtgctgctcggcgcgcggccagctttcggaacggaacgctcggcgtcgcgggccccgcccggaaagtttgccgtggagtcgcgacctcttggcccgcgcggcccggcatgaagcggcgttgaggagctgctgccgccgcttgccgctgccgccgccgccgcctgaggaggagctgcagcaccctgggccacgccgatgactactgcaaactgtggcgcccacgacgagctcgacttcaaactcgtctttggcgaggacggggcgccggcgccgccgcccccgggctcgcggcctgcagctcctgggctataacgaaaagccaataaatctacaaatgtttattgggacagcagatgatcgatatttacgacctcatgcattttaccaggtgcatcgaatcactgggaagacagtcgctactgcaagccaagagataataattgccagtacaaaagttctggaaattccacttcttcctgaaaataatatgtcagccagtattgattgtgcaggtattttgaaactccgcaattcagatatagaacttcgaaaaggagaaactgatattggcagaaagaatactagagtacgacttgtgtttcgtgtacacatcccacagcccagtggaaaagtcctttctctgcagatagcctctatacccgttgagtgctcccagcggtctgctcaagaacttcctcatattgagaagtacagtatcaacagttgttctgtaaatggaggtcatgaaatggttgtgactggatctaattttcttccagaatccaaaatcatttttcttgaaaaaggacaagatggacgacctcagtgggaggtagaagggaagataatcagggaaaaatgtcaaggggctcacattgtccttgaagttcctccatatcataacccagcagttacagctgcagtgcaggtgcacttttatctttgcaatggcaagaggaaaaaaagccagtctcaacgttttacttatacaccagttttgatgaagcaagaacacagagaagagattgatttgtcttcagttccatctttgcctgtgcctcatcctgctcagacccagaggccttcctctgattcagggtgttcacatgacagtgtactgtcaggacagagaagtttgatttgctccatcccacaaacatatgcatccatggtgacctcatcccatctgccacagttgcagtgtagagatgagagtgttagtaaagaacagcatatgattccttctccaattgtacaccagccttttcaagtcacaccaacacctcctgtggggtcttcctatcagcctatgcaaactaatgttgtgtacaatggaccaacttgtcttcctattaatgctgcctctagtcaagaatttgattcagttttgtttcagcaggatgcaactctttctggtttagtgaatcttggctgtcaaccactgtcatccataccatttcattcttcaaattcaggctcaacaggacatctcttagcccatacacctcattctgtgcataccctgcctcatctgcaatcaatgggatatcattgttcaaatacaggacaaagatctctttcttctccagtggctgaccagattacaggtcagccttcgtctcagttacaacctattacatatggtccttcacattcagggtctgctacaacagcttccccagcagcttctcatcccttggctagttcaccgctttctgggccaccatctcctcagcttcagcctatgccttaccaatctcctagctcaggaactgcctcatcaccgtctccagccaccagaatgcattctggacagcactcaactcaagcacaaagtacgggccaggggggtctttctgcaccttcatccttaatatgtcacagtttgtgtgatccagcgtcatttccacctgatggggcaactgtgagcattaaacctgaaccagaagatcgagagcctaactttgcaaccattggtctgcaggacatcactttagatgatggtaagttcatctctgatatgttcttgaagtagtgaagattcagggactttattctcccaagtgtcatgaaaaagtttctatggattgcttattggcatatggttgggcttttaaataagttgttattagaaatatatgttaatatataactttgccaggtaccacggctcacgcctgtatcccagcactttggaaggctgaggcgggtggatcacaaggtcaggagttcaagaccagcctggccaacatggtgtaacgctgtctctactaaaaatacaaaaaattagccaggcatggtggtgtgtgactataatcccagctactcgggaggctgagacaggagaatcacttgaacccgggaggtggcagttgcagggagctaagatcgcgccattgcactccagcctgggcggcagagcaagactccgtctcggg

SEQ ID NO: 160428 - DNA, 737 bp, Homo sapiens
  Payload ID: 11368
  Gene Symbol: NFATC3
  Gene Name: nuclear factor of activated T-cells, cytoplasmic, calcineurin-dependent 3
  ENST ID: ENST00000568466
  CDS Start-End: 294-410
gcggcggcggtggcggcgactgtgggggggcggcggggaacattggctaagccgacagtggaggcttaggcaccggtggcgggcggctgcggttcctggtgctgctcggcgcgcggccagctttcggaacggaacgctcggcgtcgcgggccccgcccggaaagtttgccgtggagtcgcgacctcttggcccgcgcggcccggcatgaagcggcgttgaggagctgctgccgccgcttgccgctgccgccgccgccgcctgaggaggagctgcagcaccctgggccacgccgatgactactgcaaactgtggcgcccacgacgagctcgacttcaaactcgtctttggcgaggacggggcgccggcgccgccgcccccgggctcgcggcctgcagctcctgggctataacgaaaagccaataaatctacaaatgtttattgggacagcagatgatcgatatttacgacctcatgcattttaccaggtgcatcgaatcactgggaagacagtcgctactgcaagccaagagataataattgccagtacaaaagttctggaaattccacttcttcctgaaaataatatgtcagccagcccagcggtctgctcaagaacttcctcatattgagaagtacagtatcaacagttgttctgtaaatggaggtcatgaaatggttgtgactggatctaattttcttccagaatccaaaatcatttttcttgaaaaaggacaag

SEQ ID NO: 160429 - DNA, 792 bp, Homo sapiens
  Payload ID: 11368
  Gene Symbol: NFATC3
  Gene Name: nuclear factor of activated T-cells, cytoplasmic, calcineurin-dependent 3
  ENST ID: ENST00000561714
  CDS Start-End: 317-433
cggcagggcgcgagagcgcacccgcggcggcggtggcggcgactgtgggggggcggcggggaacattggctaagccgacagtggaggcttaggcaccggtggcgggcggctgcggttcctggtgctgctcggcgcgcggccagctttcggaacggaacgctcggcgtcgcgggccccgcccggaaagtttgccgtggagtcgcgacctcttggcccgcgcggcccggcatgaagcggcgttgaggagctgctgccgccgcttgccgctgccgccgccgccgcctgaggaggagctgcagcaccctgggccacgccgatgactactgcaaactgtggcgcccacgacgagctcgacttcaaactcgtctttggcgaggacggggcgccggcgccgccgcccccgggctcgcggcctgcagctcctgggctataacgaaaagccaataaatctacaaatgtttattgggacagcagatgatcgatatttacgacctcatgcattttaccaggtgcatcgaatcactgggaagacagtcgctactgcaagccaagagataataattgccagtacaaaagttctggaaattccacttcttcctgaaaataatatgtcagccagtattgattgtgcaggtattttgaaactccgcaattcagatatagaacttcgaaaaggagaaactgatattggcagaaagaatactagagtacgacttgtgtttcgtgtacacatcccacagcccagtggaaaagtcctttctctgcagatagcctctatacccgttgagtgct

SEQ ID NO: 160430 - DNA, 3748 bp, Homo sapiens
  Payload ID: 11368
  Gene Symbol: NFATC3
  Gene Name: nuclear factor of activated T-cells, cytoplasmic, calcineurin-dependent 3
  ENST ID: ENST00000562926
  CDS Start-End: 1-3160
cttggatgaccggagaccgataaccctgtgtgtgtgtgtgcgcgcgcgtgtgtgtgatcttgagccagatgattgtgcatccatttacatctttaatgtagatccacctccatctactttaaccacaccactttgcttaccacatcatggattaccgtctcactcttctgttttgtcaccatcgtttcagctccaaagtcacaaaaactatgaaggaacttgtgagattcctgaatctaaatatagcccattaggtggtcccaaaccctttgagtgcccaagtattcaaattacatctatctctcctaactgtcatcaagaattagatgcacatgaagatgacctacagataaatgacccagaacgggaatttttggaaaggccttctagagatcatctctatcttcctcttgagccatcctaccgggagtcttctcttagtcctagtcctgccagcagcatctcttctaggagttggttctctgatgcatcttcttgtgaatcgctttcacatatttatgatgatgtggactcagagttgaatgaagctgcagcccgatttacccttggatcccctctgacttctcctggtggctctccagggggctgccctggagaagaaacttggcatcaacagtatggacttggacactcattatcacccaggcaatctccttgccactctcctagatccagtgtcactgatgagaattggctgagccccaggccagcctcaggaccctcatcaaggcccacatccccctgtgggaaacggaggcactccagtgctgaagtttgttatgctgggtccctttcaccccatcactcacctgttccttcacctggtcactcccccaggggaagtgtgacagaagatacgtggctcaatgcttctgtccatggtgggtcaggccttggccctgcagtttttccatttcagtactgtgtagagactgacatccctctcaaaacaaggaaaacttctgaagatcaagctgccatactaccaggaaaattagagctgtgttcagatgaccaagggagtttatcaccagcccgggagacttcaatagatgatggccttggatctcagtatcctttaaagaaagattcatgtggtgatcagtttctttcagttccttcaccctttacctggagcaaaccaaagcctggccacacccctatatttcgcacatcttcattacctccactagactggcctttaccagctcattttggacaatgtgaactgaaaatagaagtgcaacctaaaactcatcatcgagcccattatgaaactgaaggtagccgaggggcagtaaaagcatctactgggggacatcctgttgtgaagctcctgggctataacgaaaagccaataaatctacaaatgtttattgggacagcagatgatcgatatttacgacctcatgcattttaccaggtgcatcgaatcactgggaagacagtcgctactgcaagccaagagataataattgccagtacaaaagttctggaaattccacttcttcctgaaaataatatgtcagccagtattgattgtgcaggtattttgaaactccgcaattcagatatagaacttcgaaaaggagaaactgatattggcagaaagaatactagagtacgacttgtgtttcgtgtacacatcccacagcccagtggaaaagtcctttctctgcagatagcctctatacccgttgagtgctcccagcggtctgctcaagaacttcctcatattgagaagtacagtatcaacagttgttctgtaaatggaggtcatgaaatggttgtgactggatctaattttcttccagaatccaaaatcatttttcttgaaaaaggacaagatggacgacctcagtgggaggtagaagggaagataatcagggaaaaatgtcaaggggctcacattgtccttgaagttcctccatatcataacccagcagttacagctgcagtgcaggtgcacttttatctttgcaatggcaagaggaaaaaaagccagtctcaacgttttacttatacaccagttttgatgaagcaagaacacagagaagagattgatttgtcttcagttccatctttgcctgtgcctcatcctgctcagacccagaggccttcctctgattcagggtgttcacatgacagtgtactgtcaggacagagaagtttgatttgctccatcccacaaacatatgcatccatggtgacctcatcccatctgccacagttgcagtgtagagatgagagtgttagtaaagaacagcatatgattccttctccaattgtacaccagccttttcaagtcacaccaacacctcctgtggggtcttcctatcagcctatgcaaactaatgttgtgtacaatggaccaacttgtcttcctattaatgctgcctctagtcaagaatttgattcagttttgtttcagcaggatgcaactctttctggtttagtgaatcttggctgtcaaccactgtcatccataccatttcattcttcaaattcaggctcaacaggacatctcttagcccatacacctcattctgtgcataccctgcctcatctgcaatcaatgggatatcattgttcaaatacaggacaaagatctctttcttctccagtggctgaccagattacaggtcagccttcgtctcagttacaacctattacatatggtccttcacattcagggtctgctacaacagcttccccagcagcttctcatcccttggctagttcaccgctttctgggccaccatctcctcagcttcagcctatgccttaccaatctcctagctcaggaactgcctcatcaccgtctccagccaccagaatgcattctggacagcactcaactcaagcacaaagtacgggccaggggggtctttctgcaccttcatccttaatatgtcacagtttgtgtgatccagcgtcatttccacctgatggggcaactgtgagcattaaacctgaaccagaagatcgagagcctaactttgcaaccattggtctgcaggacatcactttagatgatgaccaatttatatctgacttggaacaccagccatcaggttcagcagagaaatggcctaaccacagtgtgctctcatgtccagctcctttctggagaatctagaggtgaacgagataattgggagagacatgtcccagatttctgtttcccaaggagcaggggtgagcaggcaggctcccctcccgagtcctgagtccctggatttaggaagatctgatgggctctaacagtgcttactgcagccttgtgtccaccaccaacttctcagcatgtttctctccttggaccttgggtttccaactctgcagccttcaggtctggggccaggagtgggacccaccatttgtggggaaagtagcattcctccacctcaggccttgggtagatttggcaaaagaacaggagcagcataggctgtttgagctttggggaaatgaactttgctttttatatttaactaggatacttttatatgatgggtgctttgagtgtgaatgcagcaggctctcttgtttccgaggtgctgcttttgcaggtgacctggttacttagctaggattggtgatttgtactgctttatggtcatttgaagggccctttagtttttatgataatttttaaaataggaacttttgataagaccttctagaagcaaaaaaaaaaaaaaaaaaaaaaaaaagaaaaaaaaag

SEQ ID NO: 160431 - DNA, 707 bp, Homo sapiens
  Payload ID: 11368
  Gene Symbol: NFATC3
  Gene Name: nuclear factor of activated T-cells, cytoplasmic, calcineurin-dependent 3
  ENST ID: ENST00000562171
  CDS Start-End: 237-362
gtggaggcttaggcaccggtggcgggcggctgcggttcctggtgctgctcggcgcgcggccagctttcggaacggaacgctcggcgtcgcgggccccgcccggaaagtttgccgtggagtcgcgacctcttggcccgcgcggcccggcatgaagcggcgttgaggagctgctgccgccgcttgccgctgccgccgccgccgcctgaggaggagctgcagcaccctgggccacgccgatgactactgcaaactgtggcgcccacgacgagctcgacttcaaactcgtctttggcgaggacggggcgccggcgccgccgcccccgggctcgcggcctgcagcacatcttcattacctccactagactggcctttaccagctcattttggacaatgtgaactgaaaatagaagtgcaacctaaaactcatcatcgagcccattatgaaactgaaggtagccgaggggcagtaaaagcatctactgggggacatcctgttgtgaagctcctgggctataacgaaaagccaataaatctacaaatgtttattgggacagcagatgatcgatatttacgacctcatgcattttaccaggtgcatcgaatcactgggaagacagtcgctactgcaagccaagagataataattgccagtacaaaagttctggaaattccacttcttcctgaaaataatatgtcagccaggtatt

SEQ ID NO: 160432 - DNA, 3181 bp, Homo sapiens
  Payload ID: 11368
  Gene Symbol: NFATC3
  Gene Name: nuclear factor of activated T-cells, cytoplasmic, calcineurin-dependent 3
  ENST ID: ENST00000570212
  CDS Start-End: 1-3181
cttggatgaccggagaccgataaccctgtgtgtgtgtgtgcgcgcgcgtgtgtgtgatcttgagccagatgattgtgcatccatttacatctttaatgtagatccacctccatctactttaaccacaccactttgcttaccacatcatggattaccgtctcactcttctgttttgtcaccatcgtttcagctccaaagtcacaaaaactatgaaggaacttgtgagattcctgaatctaaatatagcccattaggtggtcccaaaccctttgagtgcccaagtattcaaattacatctatctctcctaactgtcatcaagaattagatgcacatgaagatgacctacagataaatgacccagaacgggaatttttggaaaggccttctagagatcatctctatcttcctcttgagccatcctaccgggagtcttctcttagtcctagtcctgccagcagcatctcttctaggagttggttctctgatgcatcttcttgtgaatcgctttcacatatttatgatgatgtggactcagagttgaatgaagctgcagcccgatttacccttggatcccctctgacttctcctggtggctctccagggggctgccctggagaagaaacttggcatcaacagtatggacttggacactcattatcacccaggcaatctccttgccactctcctagatccagtgtcactgatgagaattggctgagccccaggccagcctcaggaccctcatcaaggcccacatccccctgtgggaaacggaggcactccagtgctgaagtttgttatgctgggtccctttcaccccatcactcacctgttccttcacctggtcactcccccaggggaagtgtgacagaagatacgtggctcaatgcttctgtccatggtgggtcaggccttggccctgcagtttttccatttcagtactgtgtagagactgacatccctctcaaaacaaggaaaacttctgaagatcaagctgccatactaccaggaaaattagagctgtgttcagatgaccaagggagtttatcaccagcccgggagacttcaatagatgatggccttggatctcagtatcctttaaagaaagattcatgtggtgatcagtttctttcagttccttcaccctttacctggagcaaaccaaagcctggccacacccctatatttcgcacatcttcattacctccactagactggcctttaccagctcattttggacaatgtgaactgaaaatagaagtgcaacctaaaactcatcatcgagcccattatgaaactgaaggtagccgaggggcagtaaaagcatctactgggggacatcctgttgtgaagctcctgggctataacgaaaagccaataaatctacaaatgtttattgggacagcagatgatcgatatttacgacctcatgcattttaccaggtgcatcgaatcactgggaagacagtcgctactgcaagccaagagataataattgccagtacaaaagttctggaaattccacttcttcctgaaaataatatgtcagccagtattgattgtgcaggtattttgaaactccgcaattcagatatagaacttcgaaaaggagaaactgatattggcagaaagaatactagagtacgacttgtgtttcgtgtacacatcccacagcccagtggaaaagtcctttctctgcagatagcctctatacccgttgagtgctcccagcggtctgctcaagaacttcctcatattgagaagtacagtatcaacagttgttctgtaaatggaggtcatgaaatggttgtgactggatctaattttcttccagaatccaaaatcatttttcttgaaaaaggacaagatggacgacctcagtgggaggtagaagggaagataatcagggaaaaatgtcaaggggctcacattgtccttgaagttcctccatatcataacccagcagttacagctgcagtgcaggtgcacttttatctttgcaatggcaagaggaaaaaaagccagtctcaacgttttacttatacaccagttttgatgaagcaagaacacagagaagagattgatttgtcttcagttccatctttgcctgtgcctcatcctgctcagacccagaggccttcctctgattcagggtgttcacatgacagtgtactgtcaggacagagaagtttgatttgctccatcccacaaacatatgcatccatggtgacctcatcccatctgccacagttgcagtgtagagatgagagtgttagtaaagaacagcatatgattccttctccaattgtacaccagccttttcaagtcacaccaacacctcctgtggggtcttcctatcagcctatgcaaactaatgttgtgtacaatggaccaacttgtcttcctattaatgctgcctctagtcaagaatttgattcagttttgtttcagcaggatgcaactctttctggtttagtgaatcttggctgtcaaccactgtcatccataccatttcattcttcaaattcaggctcaacaggacatctcttagcccatacacctcattctgtgcataccctgcctcatctgcaatcaatgggatatcattgttcaaatacaggacaaagatctctttcttctccagtggctgaccagattacaggtcagccttcgtctcagttacaacctattacatatggtccttcacattcagggtctgctacaacagcttccccagcagcttctcatcccttggctagttcaccgctttctgggccaccatctcctcagcttcagcctatgccttaccaatctcctagctcaggaactgcctcatcaccgtctccagccaccagaatgcattctggacagcactcaactcaagcacaaagtacgggccaggggggtctttctgcaccttcatccttaatatgtcacagtttgtgtgatccagcgtcatttccacctgatggggcaactgtgagcattaaacctgaaccagaagatcgagagcctaactttgcaaccattggtctgcaggacatcactttagatgatgtgaacgagataattgggagagacatgtcccagatttctgtttcccaaggagcaggggtgagcaggcaggctcccctcccgagtcctgagtccctggatttaggaagatctgatgggctctaa

SEQ ID NO: 160433 - DNA, 529 bp, Homo sapiens
  Payload ID: 11368
  Gene Symbol: NFATC3
  Gene Name: nuclear factor of activated T-cells, cytoplasmic, calcineurin-dependent 3
  ENST ID: ENST00000565750
  CDS Start-End: 1-504
ttaaagaaagattcatgtggtgatcagtttctttcagttccttcaccctttacctggagcaaaccaaagcctggccacacccctatatttcgcacatcttcattacctccactagactggcctttaccagctcattttggacaatgtgaactgaaaatagaagtgcaacctaaaactcatcatcgagcccattatgaaactgaaggtagccgaggggcagtaaaagcatctactgggggacatcctgttgtgaaggaatccaagatacgttcatcttttgatgtcgtctttgatgcacagcttctactgtccatgggaaagaagaaggtgtatggaaagcactcaagatacttaactacattaacctggaaattactatcaatcatcaccacttacaattttttggctacaagtagtcacatggccctacttacatgcagaagtactgggaaaagtagtccctggctgggcagcctttcctcatcaaaactctgtattctgtagtataatatagaactctatacttaaa

SEQ ID NO: 160434 - DNA, 3824 bp, Homo sapiens
  Payload ID: 11368
  Gene Symbol: NFATC3
  Gene Name: nuclear factor of activated T-cells, cytoplasmic, calcineurin-dependent 3
  ENST ID: ENST00000575270
  CDS Start-End: 339-3482
gtagggggcggggccgggcgcgcggcagggcgcgagagcgcacccgcggcggcggtggcggcgactgtgggggggcggcggggaacattggctaagccgacagtggaggcttaggcaccggtggcgggcggctgcggttcctggtgctgctcggcgcgcggccagctttcggaacggaacgctcggcgtcgcgggccccgcccggaaagtttgccgtggagtcgcgacctcttggcccgcgcggcccggcatgaagcggcgttgaggagctgctgccgccgcttgccgctgccgccgccgccgcctgaggaggagctgcagcaccctgggccacgccgatgactactgcaaactgtggcgcccacgacgagctcgacttcaaactcgtctttggcgaggacggggcgccggcgccgccgcccccgggctcgcggcctgcagatcttgagccagatgattgtgcatccatttacatctttaatgtagatccacctccatctactttaaccacaccactttgcttaccacatcatggattaccgtctcactcttctgttttgtcaccatcgtttcagctccaaagtcacaaaaactatgaaggaacttgtgagattcctgaatctaaatatagcccattaggtggtcccaaaccctttgagtgcccaagtattcaaattacatctatctctcctaactgtcatcaagaattagatgcacatgaagatgacctacagataaatgacccagaacgggaatttttggaaaggccttctagagatcatctctatcttcctcttgagccatcctaccgggagtcttctcttagtcctagtcctgccagcagcatctcttctaggagttggttctctgatgcatcttcttgtgaatcgctttcacatatttatgatgatgtggactcagagttgaatgaagctgcagcccgatttacccttggatcccctctgacttctcctggtggctctccagggggctgccctggagaagaaacttggcatcaacagtatggacttggacactcattatcacccaggcaatctccttgccactctcctagatccagtgtcactgatgagaattggctgagccccaggccagcctcaggaccctcatcaaggcccacatccccctgtgggaaacggaggcactccagtgctgaagtttgttatgctgggtccctttcaccccatcactcacctgttccttcacctggtcactcccccaggggaagtgtgacagaagatacgtggctcaatgcttctgtccatggtgggtcaggccttggccctgcagtttttccatttcagtactgtgtagagactgacatccctctcaaaacaaggaaaacttctgaagatcaagctgccatactaccaggaaaattagagctgtgttcagatgaccaagggagtttatcaccagcccgggagacttcaatagatgatggccttggatctcagtatcctttaaagaaagattcatgtggtgatcagtttctttcagttccttcaccctttacctggagcaaaccaaagcctggccacacccctatatttcgcacatcttcattacctccactagactggcctttaccagctcattttggacaatgtgaactgaaaatagaagtgcaacctaaaactcatcatcgagcccattatgaaactgaaggtagccgaggggcagtaaaagcatctactgggggacatcctgttgtgaagctcctgggctataacgaaaagccaataaatctacaaatgtttattgggacagcagatgatcgatatttacgacctcatgcattttaccaggtgcatcgaatcactgggaagacagtcgctactgcaagccaagagataataattgccagtacaaaagttctggaaattccacttcttcctgaaaataatatgtcagccagtattgattgtgcaggtattttgaaactccgcaattcagatatagaacttcgaaaaggagaaactgatattggcagaaagaatactagagtacgacttgtgtttcgtgtacacatcccacagcccagtggaaaagtcctttctctgcagatagcctctatacccgttgagtgctcccagcggtctgctcaagaacttcctcatattgagaagtacagtatcaacagttgttctgtaaatggaggtcatgaaatggttgtgactggatctaattttcttccagaatccaaaatcatttttcttgaaaaaggacaagatggacgacctcagtgggaggtagaagggaagataatcagggaaaaatgtcaaggggctcacattgtccttgaagttcctccatatcataacccagcagttacagctgcagtgcaggtgcacttttatctttgcaatggcaagaggaaaaaaagccagtctcaacgttttacttatacaccagttttgatgaagcaagaacacagagaagagattgatttgtcttcagttccatctttgcctgtgcctcatcctgctcagacccagaggccttcctctgattcagggtgttcacatgacagtgtactgtcaggacagagaagtttgatttgctccatcccacaaacatatgcatccatggtgacctcatcccatctgccacagttgcagtgtagagatgagagtgttagtaaagaacagcatatgattccttctccaattgtacaccagccttttcaagtcacaccaacacctcctgtggggtcttcctatcagcctatgcaaactaatgttgtgtacaatggaccaacttgtcttcctattaatgctgcctctagtcaagaatttgattcagttttgtttcagcaggatgcaactctttctggtttagtgaatcttggctgtcaaccactgtcatccataccatttcattcttcaaattcaggctcaacaggacatctcttagcccatacacctcattctgtgcataccctgcctcatctgcaatcaatgggatatcattgttcaaatacaggacaaagatctctttcttctccagtggctgaccagattacaggtcagccttcgtctcagttacaacctattacatatggtccttcacattcagggtctgctacaacagcttccccagcagcttctcatcccttggctagttcaccgctttctgggccaccatctcctcagcttcagcctatgccttaccaatctcctagctcaggaactgcctcatcaccgtctccagccaccagaatgcattctggacagcactcaactcaagcacaaagtacgggccaggggggtctttctgcaccttcatccttaatatgtcacagtttgtgtgatccagcgtcatttccacctgatggggcaactgtgagcattaaacctgaaccagaagatcgagagcctaactttgcaaccattggtctgcaggacatcactttagatgatggttttgtcaaagcagagaaaccacttagtcatgactgagtcttagcccgaggaagggatgggaaaaagggaggaagaaggaggccaagcaagtgatgaggaagatacgtacatcgcttttgctcacatttcattgaagaaaacgaattgcatgggccatacctagctacactggggaagccaggaaatatactctgtagctgggtgtcagtgtgactaactaaacctcgattactgtggaagaatgaattaagataattagcagcctaccatagataccttctaaattttcaggaacttatttctgtctgtagcttgaaaaatcaaatgaatattttttggtttttcccttttttttgttttatttggagacagggtctc

SEQ ID NO: 160435 - DNA, 4749 bp, Homo sapiens
  Payload ID: 11369
  Gene Symbol: NFATC4
  Gene Name: nuclear factor of activated T-cells, cytoplasmic, calcineurin-dependent 4
  Uniprot ID: Q14934
  ENST ID: ENST00000250373
  CDS Start-End: 142-2850
gcttctggagggaggcggcagcgacggaggagggggcttctcagagaaagggagggagggagccacccgggtgaagatacagcagcctcctgaactcccccctcccacccaggccgggacctgggggctcctgccggatccatgggggcggccagctgcgaggatgaggagctggaatttaagctggtgttcggggaggaaaaggaggcccccccgctgggcgcggggggattgggggaagaactggactcagaggatgccccgccatgctgccgtctggccttgggagagccccctccctatggcgctgcacctatcggtattccccgacctccaccccctcggcctggcatgcattcgccaccgccgcgaccagccccctcacctggcacctgggagagccagcccgccaggtcggtgaggctgggaggaccaggagggggtgctgggggtgctgggggtggccgtgttctcgagtgtcccagcatccgcatcacctccatctctcccacgccggagccgccagcagcgctggaggacaaccctgatgcctggggggacggctctcctagagattaccccccaccagaaggctttgggggctacagagaagcagggggccagggtgggggggccttcttcagcccaagccctggcagcagcagcctgtcctcgtggagcttcttctccgatgcctctgacgaggcagccctgtatgcagcctgcgacgaggtggagtctgagctaaatgaggcggcctcccgctttggcctgggctccccgctgccctcgccccgggcctcccctcggccatggacccccgaagatccctggagcctgtatggtccaagccccggaggccgagggccagaggatagctggctactcctcagtgctcctgggcccaccccagcctccccgcggcctgcctctccatgtggcaagcggcgctattccagctcgggaaccccatcttcagcctccccagctctgtcccgccgtggcagcctgggggaagaggggtctgagccacctccaccacccccattgcctctggcccgggacccgggctcccctggtccctttgactatgtgggggccccaccagctgagagcatccctcagaagacacggcggacttccagcgagcaggcagtggctctgcctcggtctgaggagcctgcctcatgcaatgggaagctgcccttgggagcagaggagtctgtggctcctccaggaggttcccggaaggaggtggctggcatggactacctggcagtgccctccccactcgcttggtccaaggcccggattgggggacacagccctatcttcaggacctctgccctacccccactggactggcctctgcccagccaatatgagcagctggagctgaggatcgaggtacagcctagagcccaccaccgggcccactatgagacagaaggcagccgtggagctgtcaaagctgcccctggcggtcaccccgtagtcaagctcctaggctacagtgagaagccactgaccctacagatgttcatcggcactgcagatgaaaggaacctgcggcctcatgccttctatcaggtgcaccgtatcacaggcaagatggtggccacggccagctatgaagccgtagtcagtggcaccaaggtgttggagatgactctgctgcctgagaacaacatggcggccaacattgactgcgcgggaatcctgaagcttcggaattcagacattgagcttcggaagggtgagacggacatcgggcgcaaaaacacacgtgtacggctggtgttccgggtacacgtgccccagggcggcgggaaggtcgtctcagtacaggcagcatcggtgcccatcgagtgctcccagcgctcagcccaggagctgccccaggtggaggcctacagccccagtgcctgctctgtgagaggaggcgaggaactggtactgactggctccaacttcctgccagactccaaggtggtgttcattgagaggggtcctgatgggaagctgcaatgggaggaggaggccacagtgaaccgactgcagagcaacgaggtgacgctgaccctgactgtccccgagtacagcaacaagagggtttcccggccagtccaggtctacttttatgtctccaatgggcggaggaaacgcagtcctacccagagtttcaggtttctgcctgtgatctgcaaagaggagcccctaccggactcatctctgcggggtttcccttcagcatcggcaaccccctttggcactgacatggacttctcaccacccaggcccccctacccctcctatccccatgaagaccctgcttgcgaaactccttacctatcagaaggcttcggctatggcatgccccctctgtacccccagacggggcccccaccatcctacagaccgggcctgcggatgttccctgagactaggggtaccacaggttgtgcccaaccacctgcagtttccttccttccccgccccttccctagtgacccgtatggagggcggggctcctctttctccctggggctgccattctctccgccagccccctttcggccgcctcctcttcctgcatccccaccgcttgaaggccccttcccttcccagagtgatgtgcatcccctacctgctgagggatacaataaggtagggccaggctatggccctggggagggggctccggagcaggagaaatccaggggtggctacagcagcggcttccgagacagtgtccctatccagggtatcacgctggaggaagtgagtgagatcattggccgagacctgagtggcttccctgcacctcctggagaagagcctcctgcctgaaccacgtgaactgtcatcacctggcaaccccagccccagcctcagccctgccccctttccctccttcctggagtggtggctacagaagcttggggccaaccctggctcctctttccccagcttctgtctgtctcactgtcttccctcccctcccccagctgaggtgtggccctcaggcctggtgctgccttggagggctgggggaaggagtgtgtggaggagggaggagggtgaagactgaggctaggtgccagaatggactggagtgaaggcgtgtctagagtgtgggctggctgttgtgctggaaagctggggacaggttgatggtaataaactgctcaatgaccagtgcttcaggctccagagctctttggagagatgggttggggcagcttactccagccctggcccaaggaggcccagaagttggaaagagatggaatgtggctgggaacattgcatcccaaagagcttctcagtggaggaggctggggaaggcatgagggggctcagaggctccttgactgggaccaggattgggggccagggcttgagtaggcctctccactctcctccttgggggtccagattccttaggagctttgggatgaggcccaggaggctgcatttttccaggtccttagtcttgccaccacacagatgattctgattcatagccaagatgaggacacactgatgtagctgatctctcatttacagaggaggattctaaagttcagagagggaaaggggcttgcctgaggtcacgtagataatcagcagcacattgaacgctgcactcctgggctcctgtccccagcccccattcagacacgctgactcaggaggtccaggcctctaaggcttctctccctggagtgagggtggaggtgagggagagctggcacaagccctccctctggatcctccactcctggggattatgaagatattctggaaagatttgtgcttcagaggtagactgcagaaagcaaacagtctacccagcagctctgaatgtcacctgccctggggcttacagcactatatgagttcctggcctatcctgcaaatatgcccatgctggccttctaaatagctggtacatccatcaccactgacgggcctggcctggaaacctggtttgtcccctgtcttgatggcctacgagaggccaagttccactgggctgggaaaagtcactttgtctgtcttgttcacctggagcctgacacaccgtaggtactgagtacaaatagcttgatttggctaggcttggctgcagggggacgtgcctaaaagacattccgggcatttgcacttgggaaacttgcctcaccttcaggcttgtggggcctctctatgcccaatgagtccaggcagtcctagcaagtactcaggagagcaggggtgggtgtgacagaggctggctctggattgggggacaacagaaccagagtaactcctcgcctgttgctgctttgcaatgaatttcctttacctttctggaacacaagctgctgtgaaccaaactgatatcaagtgattagctcaccgggccttggttgcttttcaaagatccccttcagccccctgccagagtcactgccccataatcaccatgtcagaagggaccctagggcattcgtgtcctatttatcaatcttcagcaccacctctaagatctctgagagagggtggatcagcctctgtgtaaacaaaaagctgttaggacttgttgcctctcaaggtggactattctgttttctgccaggacactgccattcatgcattgtcagatatttattaaacagcagcaaagtgccagccaatttgtcctggaggaattcatagcctcatggggcaaaagtaaataaacagcttattacaattcaacaa

SEQ ID NO: 160436 - DNA, 5488 bp, Homo sapiens
  Payload ID: 11369
  Gene Symbol: NFATC4
  Gene Name: nuclear factor of activated T-cells, cytoplasmic, calcineurin-dependent 4
  Uniprot ID: Q14934
  ENST ID: ENST00000424781
  CDS Start-End: 83-2827
gaagaggaggggaacccacagggtccggaggtttcaggcccctagtaaacctggcaaggatttttagaagagccggagtgggatgctatcgggccgggacctgggggctcctgccggatccatgggggcggccagctgcgaggatgaggagctggaatttaagctggtgttcggggaggaaaaggaggcccccccgctgggcgcggggggattgggggaagaactggactcagaggatgccccgccatgctgccgtctggccttgggagagccccctccctatggcgctgcacctatcggtattccccgacctccaccccctcggcctggcatgcattcgccaccgccgcgaccagccccctcacctggcacctgggagagccagcccgccaggtcggtgaggctgggaggaccaggagggggtgctgggggtgctgggggtggccgtgttctcgagtgtcccagcatccgcatcacctccatctctcccacgccggagccgccagcagcgctggaggacaaccctgatgcctggggggacggctctcctagagattaccccccaccagaaggctttgggggctacagagaagcagggggccagggtgggggggccttcttcagcccaagccctggcagcagcagcctgtcctcgtggagcttcttctccgatgcctctgacgaggcagccctgtatgcagcctgcgacgaggtggagtctgagctaaatgaggcggcctcccgctttggcctgggctccccgctgccctcgccccgggcctcccctcggccatggacccccgaagatccctggagcctgtatggtccaagccccggaggccgagggccagaggatagctggctactcctcagtgctcctgggcccaccccagcctccccgcggcctgcctctccatgtggcaagcggcgctattccagctcgggaaccccatcttcagcctccccagctctgtcccgccgtggcagcctgggggaagaggggtctgagccacctccaccacccccattgcctctggcccgggacccgggctcccctggtccctttgactatgtgggggccccaccagctgagagcatccctcagaagacacggcggacttccagcgagcaggcagtggctctgcctcggtctgaggagcctgcctcatgcaatgggaagctgcccttgggagcagaggagtctgtggctcctccaggaggttcccggaaggaggtggctggcatggactacctggcagtgccctccccactcgcttggtccaaggcccggattgggggacacagccctatcttcaggacctctgccctacccccactggactggcctctgcccagccaatatgagcagctggagctgaggatcgaggtacagcctagagcccaccaccgggcccactatgagacagaaggcagccgtggagctgtcaaagctgcccctggcggtcaccccgtagtcaagctcctaggctacagtgagaagccactgaccctacagatgttcatcggcactgcagatgaaaggaacctgcggcctcatgccttctatcaggtgcaccgtatcacaggcaagatggtggccacggccagctatgaagccgtagtcagtggcaccaaggtgttggagatgactctgctgcctgagaacaacatggcggccaacattgactgcgcgggaatcctgaagcttcggaattcagacattgagcttcggaagggtgagacggacatcgggcgcaaaaacacacgtgtacggctggtgttccgggtacacgtgccccagggcggcgggaaggtcgtctcagtacaggcagcatcggtgcccatcgagtgctcccagcgctcagcccaggagctgccccaggtggaggcctacagccccagtgcctgctctgtgagaggaggcgaggaactggtactgactggctccaacttcctgccagactccaaggtggtgttcattgagaggggtcctgatgggaagctgcaatgggaggaggaggccacagtgaaccgactgcagagcaacgaggtgacgctgaccctgactgtccccgagtacagcaacaagagggtttcccggccagtccaggtctacttttatgtctccaatgggcggaggaaacgcagtcctacccagagtttcaggtttctgcctgtgatctgcaaagaggagcccctaccggactcatctctgcggggtttcccttcagcatcggcaaccccctttggcactgacatggacttctcaccacccaggcccccctacccctcctatccccatgaagaccctgcttgcgaaactccttacctatcagaaggcttcggctatggcatgccccctctgtacccccagacggggcccccaccatcctacagaccgggcctgcggatgttccctgagactaggggtaccacaggttgtgcccaaccacctgcagtttccttccttccccgccccttccctagtgacccgtatggagggcggggctcctctttctccctggggctgccattctctccgccagccccctttcggccgcctcctcttcctgcatccccaccgcttgaaggccccttcccttcccagagtgatgtgcatcccctacctgctgagggatacaataaggtagggccaggctatggccctggggagggggctccggagcaggagaaatccaggggtggctacagcagcggcttccgagacagtgtccctatccagggtatcacgctggaggaaggtgggtgtgggactgggggctgtgagtgtgagtgtgtgcaagagattgctctgcatgtttgctgagggctggagctgggcttttcagagatcgggcatccctggtctctcagggccagttggaggttcccaggaggcatgttcttgatgcctgtggctgcctgaatccaattaactgaattctgaagagtgcatggggtaactgtctcagcctttctcctgtctctgcctctgtcctctgctccaaatcataaaatctcagagctagaagcactttcaagatcattccatccagcgcattcaatttgcaagtttaggcgttgagttccagagagggatggtagcttgctgaggtcccagtcaagcacacttgccattgcctcagctttcccctaaacacggtgtctgtggtcagggttggtgaggaggagctttcctgttttgcctctccttcttcccattggctacacccatctctggccctgctgataccgattcccctgacatttcaggctaagccagcaggaaagggctaggacgggtgcctgggagcccacatggagggagttgggcaagatttgattcggagcaggtgtcaagacgtgttggggaaactgaggcccagtggaatagaagccagtagaggaggaatctagaggcctcctagattaagacctgcctggaatggattgggggtgggtctttggaaaaggaggggacccacctctagcccagtctctcaactgcccctcctttacagtgagtgagatcattggccgagacctgagtggcttccctgcacctcctggagaagagcctcctgcctgaaccacgtgaactgtcatcacctggcaaccccagccccagcctcagccctgccccctttccctccttcctggagtggtggctacagaagcttggggccaaccctggctcctctttccccagcttctgtctgtctcactgtcttccctcccctcccccagctgaggtgtggccctcaggcctggtgctgccttggagggctgggggaaggagtgtgtggaggagggaggagggtgaagactgaggctaggtgccagaatggactggagtgaaggcgtgtctagagtgtgggctggctgttgtgctggaaagctggggacaggttgatggtaataaactgctcaatgaccagtgcttcaggctccagagctctttggagagatgggttggggcagcttactccagccctggcccaaggaggcccagaagttggaaagagatggaatgtggctgggaacattgcatcccaaagagcttctcagtggaggaggctggggaaggcatgagggggctcagaggctccttgactgggaccaggattgggggccagggcttgagtaggcctctccactctcctccttgggggtccagattccttaggagctttgggatgaggcccaggaggctgcatttttccaggtccttagtcttgccaccacacagatgattctgattcatagccaagatgaggacacactgatgtagctgatctctcatttacagaggaggattctaaagttcagagagggaaaggggcttgcctgaggtcacgtagataatcagcagcacattgaacgctgcactcctgggctcctgtccccagcccccattcagacacgctgactcaggaggtccaggcctctaaggcttctctccctggagtgagggtggaggtgagggagagctggcacaagccctccctctggatcctccactcctggggattatgaagatattctggaaagatttgtgcttcagaggtagactgcagaaagcaaacagtctacccagcagctctgaatgtcacctgccctggggcttacagcactatatgagttcctggcctatcctgcaaatatgcccatgctggccttctaaatagctggtacatccatcaccactgacgggcctggcctggaaacctggtttgtcccctgtcttgatggcctacgagaggccaagttccactgggctgggaaaagtcactttgtctgtcttgttcacctggagcctgacacaccgtaggtactgagtacaaatagcttgatttggctaggcttggctgcagggggacgtgcctaaaagacattccgggcatttgcacttgggaaacttgcctcaccttcaggcttgtggggcctctctatgcccaatgagtccaggcagtcctagcaagtactcaggagagcaggggtgggtgtgacagaggctggctctggattgggggacaacagaaccagagtaactcctcgcctgttgctgctttgcaatgaatttcctttacctttctggaacacaagctgctgtgaaccaaactgatatcaagtgattagctcaccgggccttggttgcttttcaaagatccccttcagccccctgccagagtcactgccccataatcaccatgtcagaagggaccctagggcattcgtgtcctatttatcaatcttcagcaccacctctaagatctctgagagagggtggatcagcctctgtgtaaacaaaaagctgttaggacttgttgcctctcaaggtggactattctgttttctgccaggacactgccattcatgcattgtcagatatttattaaacagcagcaaagtgccagccaatttgtcctggaggaattcatagcctcatggggcaaaagtaaataaacagcttattacaattcaacaa

SEQ ID NO: 160437 - DNA, 5700 bp, Homo sapiens
  Payload ID: 11369
  Gene Symbol: NFATC4
  Gene Name: nuclear factor of activated T-cells, cytoplasmic, calcineurin-dependent 4
  Uniprot ID: Q14934
  ENST ID: ENST00000413692
  CDS Start-End: 145-3039
gtaaacgtctgacctggggccgtcgcttaaccgtttagttgctgggatggggcggcgttgggggtgcggccctgaaccggagggatttagagactggagacgcggcctctaagagaggttgaaactgtgtgtgtgtgggagaaaatgataaccaccctcccatctctcctacccgccagcctcgccagtatctcccaccgagtcacgaatctcccatctaactccctctcacacaacccaggcctctccaagcctgactttcccggaaactccagtccaggtcttccttcctcctccagcccaggccgggacctgggggctcctgccggatccatgggggcggccagctgcgaggatgaggagctggaatttaagctggtgttcggggaggaaaaggaggcccccccgctgggcgcggggggattgggggaagaactggactcagaggatgccccgccatgctgccgtctggccttgggagagccccctccctatggcgctgcacctatcggtattccccgacctccaccccctcggcctggcatgcattcgccaccgccgcgaccagccccctcacctggcacctgggagagccagcccgccaggtcggtgaggctgggaggaccaggagggggtgctgggggtgctgggggtggccgtgttctcgagtgtcccagcatccgcatcacctccatctctcccacgccggagccgccagcagcgctggaggacaaccctgatgcctggggggacggctctcctagagattaccccccaccagaaggctttgggggctacagagaagcagggggccagggtgggggggccttcttcagcccaagccctggcagcagcagcctgtcctcgtggagcttcttctccgatgcctctgacgaggcagccctgtatgcagcctgcgacgaggtggagtctgagctaaatgaggcggcctcccgctttggcctgggctccccgctgccctcgccccgggcctcccctcggccatggacccccgaagatccctggagcctgtatggtccaagccccggaggccgagggccagaggatagctggctactcctcagtgctcctgggcccaccccagcctccccgcggcctgcctctccatgtggcaagcggcgctattccagctcgggaaccccatcttcagcctccccagctctgtcccgccgtggcagcctgggggaagaggggtctgagccacctccaccacccccattgcctctggcccgggacccgggctcccctggtccctttgactatgtgggggccccaccagctgagagcatccctcagaagacacggcggacttccagcgagcaggcagtggctctgcctcggtctgaggagcctgcctcatgcaatgggaagctgcccttgggagcagaggagtctgtggctcctccaggaggttcccggaaggaggtggctggcatggactacctggcagtgccctccccactcgcttggtccaaggcccggattgggggacacagccctatcttcaggacctctgccctacccccactggactggcctctgcccagccaatatgagcagctggagctgaggatcgaggtacagcctagagcccaccaccgggcccactatgagacagaaggcagccgtggagctgtcaaagctgcccctggcggtcaccccgtagtcaagctcctaggctacagtgagaagccactgaccctacagatgttcatcggcactgcagatgaaaggaacctgcggcctcatgccttctatcaggtgcaccgtatcacaggcaagatggtggccacggccagctatgaagccgtagtcagtggcaccaaggtgttggagatgactctgctgcctgagaacaacatggcggccaacattgactgcgcgggaatcctgaagcttcggaattcagacattgagcttcggaagggtgagacggacatcgggcgcaaaaacacacgtgtacggctggtgttccgggtacacgtgccccagggcggcgggaaggtcgtctcagtacaggcagcatcggtgcccatcgagtgctcccagcgctcagcccaggagctgccccaggtggaggcctacagccccagtgcctgctctgtgagaggaggcgaggaactggtactgactggctccaacttcctgccagactccaaggtggtgttcattgagaggggtcctgatgggaagctgcaatgggaggaggaggccacagtgaaccgactgcagagcaacgaggtgacgctgaccctgactgtccccgagtacagcaacaagagggtttcccggccagtccaggtctacttttatgtctccaatgggcggaggaaacgcagtcctacccagagtttcaggtttctgcctgtgatctgcaaagaggagcccctaccggactcatctctgcggggtttcccttcagcatcggcaaccccctttggcactgacatggacttctcaccacccaggcccccctacccctcctatccccatgaagaccctgcttgcgaaactccttacctatcagaaggcttcggctatggcatgccccctctgtacccccagacggggcccccaccatcctacagaccgggcctgcggatgttccctgagactaggggtaccacaggttgtgcccaaccacctgcagtttccttccttccccgccccttccctagtgacccgtatggagggcggggctcctctttctccctggggctgccattctctccgccagccccctttcggccgcctcctcttcctgcatccccaccgcttgaaggccccttcccttcccagagtgatgtgcatcccctacctgctgagggatacaataaggtagggccaggctatggccctggggagggggctccggagcaggagaaatccaggggtggctacagcagcggcttccgagacagtgtccctatccagggtatcacgctggaggaaggtgggtgtgggactgggggctgtgagtgtgagtgtgtgcaagagattgctctgcatgtttgctgagggctggagctgggcttttcagagatcgggcatccctggtctctcagggccagttggaggttcccaggaggcatgttcttgatgcctgtggctgcctgaatccaattaactgaattctgaagagtgcatggggtaactgtctcagcctttctcctgtctctgcctctgtcctctgctccaaatcataaaatctcagagctagaagcactttcaagatcattccatccagcgcattcaatttgcaagtttaggcgttgagttccagagagggatggtagcttgctgaggtcccagtcaagcacacttgccattgcctcagctttcccctaaacacggtgtctgtggtcagggttggtgaggaggagctttcctgttttgcctctccttcttcccattggctacacccatctctggccctgctgataccgattcccctgacatttcaggctaagccagcaggaaagggctaggacgggtgcctgggagcccacatggagggagttgggcaagatttgattcggagcaggtgtcaagacgtgttggggaaactgaggcccagtggaatagaagccagtagaggaggaatctagaggcctcctagattaagacctgcctggaatggattgggggtgggtctttggaaaaggaggggacccacctctagcccagtctctcaactgcccctcctttacagtgagtgagatcattggccgagacctgagtggcttccctgcacctcctggagaagagcctcctgcctgaaccacgtgaactgtcatcacctggcaaccccagccccagcctcagccctgccccctttccctccttcctggagtggtggctacagaagcttggggccaaccctggctcctctttccccagcttctgtctgtctcactgtcttccctcccctcccccagctgaggtgtggccctcaggcctggtgctgccttggagggctgggggaaggagtgtgtggaggagggaggagggtgaagactgaggctaggtgccagaatggactggagtgaaggcgtgtctagagtgtgggctggctgttgtgctggaaagctggggacaggttgatggtaataaactgctcaatgaccagtgcttcaggctccagagctctttggagagatgggttggggcagcttactccagccctggcccaaggaggcccagaagttggaaagagatggaatgtggctgggaacattgcatcccaaagagcttctcagtggaggaggctggggaaggcatgagggggctcagaggctccttgactgggaccaggattgggggccagggcttgagtaggcctctccactctcctccttgggggtccagattccttaggagctttgggatgaggcccaggaggctgcatttttccaggtccttagtcttgccaccacacagatgattctgattcatagccaagatgaggacacactgatgtagctgatctctcatttacagaggaggattctaaagttcagagagggaaaggggcttgcctgaggtcacgtagataatcagcagcacattgaacgctgcactcctgggctcctgtccccagcccccattcagacacgctgactcaggaggtccaggcctctaaggcttctctccctggagtgagggtggaggtgagggagagctggcacaagccctccctctggatcctccactcctggggattatgaagatattctggaaagatttgtgcttcagaggtagactgcagaaagcaaacagtctacccagcagctctgaatgtcacctgccctggggcttacagcactatatgagttcctggcctatcctgcaaatatgcccatgctggccttctaaatagctggtacatccatcaccactgacgggcctggcctggaaacctggtttgtcccctgtcttgatggcctacgagaggccaagttccactgggctgggaaaagtcactttgtctgtcttgttcacctggagcctgacacaccgtaggtactgagtacaaatagcttgatttggctaggcttggctgcagggggacgtgcctaaaagacattccgggcatttgcacttgggaaacttgcctcaccttcaggcttgtggggcctctctatgcccaatgagtccaggcagtcctagcaagtactcaggagagcaggggtgggtgtgacagaggctggctctggattgggggacaacagaaccagagtaactcctcgcctgttgctgctttgcaatgaatttcctttacctttctggaacacaagctgctgtgaaccaaactgatatcaagtgattagctcaccgggccttggttgcttttcaaagatccccttcagccccctgccagagtcactgccccataatcaccatgtcagaagggaccctagggcattcgtgtcctatttatcaatcttcagcaccacctctaagatctctgagagagggtggatcagcctctgtgtaaacaaaaagctgttaggacttgttgcctctcaaggtggactattctgttttctgccaggacactgccattcatgcattgtcagatatttattaaacagcagcaaagtgccagccaatttgtcctggaggaattcatagcctcatggggcaaaagtaaataaacagcttattacaattcaacaa

SEQ ID NO: 160438 - DNA, 5491 bp, Homo sapiens
  Payload ID: 11369
  Gene Symbol: NFATC4
  Gene Name: nuclear factor of activated T-cells, cytoplasmic, calcineurin-dependent 4
  Uniprot ID: Q14934
  ENST ID: ENST00000422617
  CDS Start-End: 161-2830
atgtgtgagtcgcccccagtccagcccagtgcctcaagaaacacgcctccaggcccagccccagctccagcccctctggacccacctctctcaccttaagacccactggatcgggtaccctcggtcctaggatccaggggccagtgggcaaaggcctggcatgcctgcttcaatctcctccatcttcccaggtccaactctgcttttgtcttgtggctcagaagaactggactcagaggatgccccgccatgctgccgtctggccttgggagagccccctccctatggcgctgcacctatcggtattccccgacctccaccccctcggcctggcatgcattcgccaccgccgcgaccagccccctcacctggcacctgggagagccagcccgccaggtcggtgaggctgggaggaccaggagggggtgctgggggtgctgggggtggccgtgttctcgagtgtcccagcatccgcatcacctccatctctcccacgccggagccgccagcagcgctggaggacaaccctgatgcctggggggacggctctcctagagattaccccccaccagaaggctttgggggctacagagaagcagggggccagggtgggggggccttcttcagcccaagccctggcagcagcagcctgtcctcgtggagcttcttctccgatgcctctgacgaggcagccctgtatgcagcctgcgacgaggtggagtctgagctaaatgaggcggcctcccgctttggcctgggctccccgctgccctcgccccgggcctcccctcggccatggacccccgaagatccctggagcctgtatggtccaagccccggaggccgagggccagaggatagctggctactcctcagtgctcctgggcccaccccagcctccccgcggcctgcctctccatgtggcaagcggcgctattccagctcgggaaccccatcttcagcctccccagctctgtcccgccgtggcagcctgggggaagaggggtctgagccacctccaccacccccattgcctctggcccgggacccgggctcccctggtccctttgactatgtgggggccccaccagctgagagcatccctcagaagacacggcggacttccagcgagcaggcagtggctctgcctcggtctgaggagcctgcctcatgcaatgggaagctgcccttgggagcagaggagtctgtggctcctccaggaggttcccggaaggaggtggctggcatggactacctggcagtgccctccccactcgcttggtccaaggcccggattgggggacacagccctatcttcaggacctctgccctacccccactggactggcctctgcccagccaatatgagcagctggagctgaggatcgaggtacagcctagagcccaccaccgggcccactatgagacagaaggcagccgtggagctgtcaaagctgcccctggcggtcaccccgtagtcaagctcctaggctacagtgagaagccactgaccctacagatgttcatcggcactgcagatgaaaggaacctgcggcctcatgccttctatcaggtgcaccgtatcacaggcaagatggtggccacggccagctatgaagccgtagtcagtggcaccaaggtgttggagatgactctgctgcctgagaacaacatggcggccaacattgactgcgcgggaatcctgaagcttcggaattcagacattgagcttcggaagggtgagacggacatcgggcgcaaaaacacacgtgtacggctggtgttccgggtacacgtgccccagggcggcgggaaggtcgtctcagtacaggcagcatcggtgcccatcgagtgctcccagcgctcagcccaggagctgccccaggtggaggcctacagccccagtgcctgctctgtgagaggaggcgaggaactggtactgactggctccaacttcctgccagactccaaggtggtgttcattgagaggggtcctgatgggaagctgcaatgggaggaggaggccacagtgaaccgactgcagagcaacgaggtgacgctgaccctgactgtccccgagtacagcaacaagagggtttcccggccagtccaggtctacttttatgtctccaatgggcggaggaaacgcagtcctacccagagtttcaggtttctgcctgtgatctgcaaagaggagcccctaccggactcatctctgcggggtttcccttcagcatcggcaaccccctttggcactgacatggacttctcaccacccaggcccccctacccctcctatccccatgaagaccctgcttgcgaaactccttacctatcagaaggcttcggctatggcatgccccctctgtacccccagacggggcccccaccatcctacagaccgggcctgcggatgttccctgagactaggggtaccacaggttgtgcccaaccacctgcagtttccttccttccccgccccttccctagtgacccgtatggagggcggggctcctctttctccctggggctgccattctctccgccagccccctttcggccgcctcctcttcctgcatccccaccgcttgaaggccccttcccttcccagagtgatgtgcatcccctacctgctgagggatacaataaggtagggccaggctatggccctggggagggggctccggagcaggagaaatccaggggtggctacagcagcggcttccgagacagtgtccctatccagggtatcacgctggaggaaggtgggtgtgggactgggggctgtgagtgtgagtgtgtgcaagagattgctctgcatgtttgctgagggctggagctgggcttttcagagatcgggcatccctggtctctcagggccagttggaggttcccaggaggcatgttcttgatgcctgtggctgcctgaatccaattaactgaattctgaagagtgcatggggtaactgtctcagcctttctcctgtctctgcctctgtcctctgctccaaatcataaaatctcagagctagaagcactttcaagatcattccatccagcgcattcaatttgcaagtttaggcgttgagttccagagagggatggtagcttgctgaggtcccagtcaagcacacttgccattgcctcagctttcccctaaacacggtgtctgtggtcagggttggtgaggaggagctttcctgttttgcctctccttcttcccattggctacacccatctctggccctgctgataccgattcccctgacatttcaggctaagccagcaggaaagggctaggacgggtgcctgggagcccacatggagggagttgggcaagatttgattcggagcaggtgtcaagacgtgttggggaaactgaggcccagtggaatagaagccagtagaggaggaatctagaggcctcctagattaagacctgcctggaatggattgggggtgggtctttggaaaaggaggggacccacctctagcccagtctctcaactgcccctcctttacagtgagtgagatcattggccgagacctgagtggcttccctgcacctcctggagaagagcctcctgcctgaaccacgtgaactgtcatcacctggcaaccccagccccagcctcagccctgccccctttccctccttcctggagtggtggctacagaagcttggggccaaccctggctcctctttccccagcttctgtctgtctcactgtcttccctcccctcccccagctgaggtgtggccctcaggcctggtgctgccttggagggctgggggaaggagtgtgtggaggagggaggagggtgaagactgaggctaggtgccagaatggactggagtgaaggcgtgtctagagtgtgggctggctgttgtgctggaaagctggggacaggttgatggtaataaactgctcaatgaccagtgcttcaggctccagagctctttggagagatgggttggggcagcttactccagccctggcccaaggaggcccagaagttggaaagagatggaatgtggctgggaacattgcatcccaaagagcttctcagtggaggaggctggggaaggcatgagggggctcagaggctccttgactgggaccaggattgggggccagggcttgagtaggcctctccactctcctccttgggggtccagattccttaggagctttgggatgaggcccaggaggctgcatttttccaggtccttagtcttgccaccacacagatgattctgattcatagccaagatgaggacacactgatgtagctgatctctcatttacagaggaggattctaaagttcagagagggaaaggggcttgcctgaggtcacgtagataatcagcagcacattgaacgctgcactcctgggctcctgtccccagcccccattcagacacgctgactcaggaggtccaggcctctaaggcttctctccctggagtgagggtggaggtgagggagagctggcacaagccctccctctggatcctccactcctggggattatgaagatattctggaaagatttgtgcttcagaggtagactgcagaaagcaaacagtctacccagcagctctgaatgtcacctgccctggggcttacagcactatatgagttcctggcctatcctgcaaatatgcccatgctggccttctaaatagctggtacatccatcaccactgacgggcctggcctggaaacctggtttgtcccctgtcttgatggcctacgagaggccaagttccactgggctgggaaaagtcactttgtctgtcttgttcacctggagcctgacacaccgtaggtactgagtacaaatagcttgatttggctaggcttggctgcagggggacgtgcctaaaagacattccgggcatttgcacttgggaaacttgcctcaccttcaggcttgtggggcctctctatgcccaatgagtccaggcagtcctagcaagtactcaggagagcaggggtgggtgtgacagaggctggctctggattgggggacaacagaaccagagtaactcctcgcctgttgctgctttgcaatgaatttcctttacctttctggaacacaagctgctgtgaaccaaactgatatcaagtgattagctcaccgggccttggttgcttttcaaagatccccttcagccccctgccagagtcactgccccataatcaccatgtcagaagggaccctagggcattcgtgtcctatttatcaatcttcagcaccacctctaagatctctgagagagggtggatcagcctctgtgtaaacaaaaagctgttaggacttgttgcctctcaaggtggactattctgttttctgccaggacactgccattcatgcattgtcagatatttattaaacagcagcaaagtgccagccaatttgtcctggaggaattcatagcctcatggggcaaaagtaaataaacagcttattacaattcaacaa

SEQ ID NO: 160439 - DNA, 5686 bp, Homo sapiens
  Payload ID: 11369
  Gene Symbol: NFATC4
  Gene Name: nuclear factor of activated T-cells, cytoplasmic, calcineurin-dependent 4
  Uniprot ID: Q14934
  ENST ID: ENST00000539237
  CDS Start-End: 224-3025
ttccagactacagttctagggaggaggctgccaacttcccgtggaggctaattcacggcccctctgggtggctgggacaagggcagcggcaaagcctggcctggatctacgcccatcaagggctgtgggcctagggacagttctcaaagcctctttggctcggactgctcccagaggcatccaggctggctaagcgttcttcatctttgggggtcctggaggaatggctgatggaggcgctgattcggcagcgcaaagacttccagaaggcccgggcagagtagccccaggccgggacctgggggctcctgccggatccatgggggcggccagctgcgaggatgaggagctggaatttaagctggtgttcggggaggaaaaggaggcccccccgctgggcgcggggggattgggggaagaactggactcagaggatgccccgccatgctgccgtctggccttgggagagccccctccctatggcgctgcacctatcggtattccccgacctccaccccctcggcctggcatgcattcgccaccgccgcgaccagccccctcacctggcacctgggagagccagcccgccaggtcggtgaggctgggaggaccaggagggggtgctgggggtgctgggggtggccgtgttctcgagtgtcccagcatccgcatcacctccatctctcccacgccggagccgccagcagcgctggaggacaaccctgatgcctggggggacggctctcctagagattaccccccaccagaaggctttgggggctacagagaagcagggggccagggtgggggggccttcttcagcccaagccctggcagcagcagcctgtcctcgtggagcttcttctccgatgcctctgacgaggcagccctgtatgcagcctgcgacgaggtggagtctgagctaaatgaggcggcctcccgctttggcctgggctccccgctgccctcgccccgggcctcccctcggccatggacccccgaagatccctggagcctgtatggtccaagccccggaggccgagggccagaggatagctggctactcctcagtgctcctgggcccaccccagcctccccgcggcctgcctctccatgtggcaagcggcgctattccagctcgggaaccccatcttcagcctccccagctctgtcccgccgtggcagcctgggggaagaggggtctgagccacctccaccacccccattgcctctggcccgggacccgggctcccctggtccctttgactatgtgggggccccaccagctgagagcatccctcagaagacacggcggacttccagcgagcaggcagtggctctgcctcggtctgaggagcctgcctcatgcaatgggaagctgcccttgggagcagaggagtctgtggctcctccaggaggttcccggaaggaggtggctggcatggactacctggcagtgccctccccactcgcttggtccaaggcccggattgggggacacagccctatcttcaggacctctgccctacccccactggactggcctctgcccagccaatatgagcagctggagctgaggatcgaggtacagcctagagcccaccaccgggcccactatgagacagaaggcagccgtggagctgtcaaagctgcccctggcggtcaccccgtagtcaagctcctaggctacagtgagaagccactgaccctacagatgttcatcggcactgcagatgaaaggaacctgcggcctcatgccttctatcaggtgcaccgtatcacaggcaagatggtggccacggccagctatgaagccgtagtcagtggcaccaaggtgttggagatgactctgctgcctgagaacaacatggcggccaacattgactgcgcgggaatcctgaagcttcggaattcagacattgagcttcggaagggtgagacggacatcgggcgcaaaaacacacgtgtacggctggtgttccgggtacacgtgccccagggcggcgggaaggtcgtctcagtacaggcagcatcggtgcccatcgagtgctcccagcgctcagcccaggagctgccccaggtggaggcctacagccccagtgcctgctctgtgagaggaggcgaggaactggtactgactggctccaacttcctgccagactccaaggtggtgttcattgagaggggtcctgatgggaagctgcaatgggaggaggaggccacagtgaaccgactgcagagcaacgaggtgacgctgaccctgactgtccccgagtacagcaacaagagggtttcccggccagtccaggtctacttttatgtctccaatgggcggaggaaacgcagtcctacccagagtttcaggtttctgcctgtgatctgcaaagaggagcccctaccggactcatctctgcggggtttcccttcagcatcggcaaccccctttggcactgacatggacttctcaccacccaggcccccctacccctcctatccccatgaagaccctgcttgcgaaactccttacctatcagaaggcttcggctatggcatgccccctctgtacccccagacggggcccccaccatcctacagaccgggcctgcggatgttccctgagactaggggtaccacaggttgtgcccaaccacctgcagtttccttccttccccgccccttccctagtgacccgtatggagggcggggctcctctttctccctggggctgccattctctccgccagccccctttcggccgcctcctcttcctgcatccccaccgcttgaaggccccttcccttcccagagtgatgtgcatcccctacctgctgagggatacaataaggtagggccaggctatggccctggggagggggctccggagcaggagaaatccaggggtggctacagcagcggcttccgagacagtgtccctatccagggtatcacgctggaggaaggtgggtgtgggactgggggctgtgagtgtgagtgtgtgcaagagattgctctgcatgtttgctgagggctggagctgggcttttcagagatcgggcatccctggtctctcagggccagttggaggttcccaggaggcatgttcttgatgcctgtggctgcctgaatccaattaactgaattctgaagagtgcatggggtaactgtctcagcctttctcctgtctctgcctctgtcctctgctccaaatcataaaatctcagagctagaagcactttcaagatcattccatccagcgcattcaatttgcaagtttaggcgttgagttccagagagggatggtagcttgctgaggtcccagtcaagcacacttgccattgcctcagctttcccctaaacacggtgtctgtggtcagggttggtgaggaggagctttcctgttttgcctctccttcttcccattggctacacccatctctggccctgctgataccgattcccctgacatttcaggctaagccagcaggaaagggctaggacgggtgcctgggagcccacatggagggagttgggcaagatttgattcggagcaggtgtcaagacgtgttggggaaactgaggcccagtggaatagaagccagtagaggaggaatctagaggcctcctagattaagacctgcctggaatggattgggggtgggtctttggaaaaggaggggacccacctctagcccagtctctcaactgcccctcctttacagtgagtgagatcattggccgagacctgagtggcttccctgcacctcctggagaagagcctcctgcctgaaccacgtgaactgtcatcacctggcaaccccagccccagcctcagccctgccccctttccctccttcctggagtggtggctacagaagcttggggccaaccctggctcctctttccccagcttctgtctgtctcactgtcttccctcccctcccccagctgaggtgtggccctcaggcctggtgctgccttggagggctgggggaaggagtgtgtggaggagggaggagggtgaagactgaggctaggtgccagaatggactggagtgaaggcgtgtctagagtgtgggctggctgttgtgctggaaagctggggacaggttgatggtaataaactgctcaatgaccagtgcttcaggctccagagctctttggagagatgggttggggcagcttactccagccctggcccaaggaggcccagaagttggaaagagatggaatgtggctgggaacattgcatcccaaagagcttctcagtggaggaggctggggaaggcatgagggggctcagaggctccttgactgggaccaggattgggggccagggcttgagtaggcctctccactctcctccttgggggtccagattccttaggagctttgggatgaggcccaggaggctgcatttttccaggtccttagtcttgccaccacacagatgattctgattcatagccaagatgaggacacactgatgtagctgatctctcatttacagaggaggattctaaagttcagagagggaaaggggcttgcctgaggtcacgtagataatcagcagcacattgaacgctgcactcctgggctcctgtccccagcccccattcagacacgctgactcaggaggtccaggcctctaaggcttctctccctggagtgagggtggaggtgagggagagctggcacaagccctccctctggatcctccactcctggggattatgaagatattctggaaagatttgtgcttcagaggtagactgcagaaagcaaacagtctacccagcagctctgaatgtcacctgccctggggcttacagcactatatgagttcctggcctatcctgcaaatatgcccatgctggccttctaaatagctggtacatccatcaccactgacgggcctggcctggaaacctggtttgtcccctgtcttgatggcctacgagaggccaagttccactgggctgggaaaagtcactttgtctgtcttgttcacctggagcctgacacaccgtaggtactgagtacaaatagcttgatttggctaggcttggctgcagggggacgtgcctaaaagacattccgggcatttgcacttgggaaacttgcctcaccttcaggcttgtggggcctctctatgcccaatgagtccaggcagtcctagcaagtactcaggagagcaggggtgggtgtgacagaggctggctctggattgggggacaacagaaccagagtaactcctcgcctgttgctgctttgcaatgaatttcctttacctttctggaacacaagctgctgtgaaccaaactgatatcaagtgattagctcaccgggccttggttgcttttcaaagatccccttcagccccctgccagagtcactgccccataatcaccatgtcagaagggaccctagggcattcgtgtcctatttatcaatcttcagcaccacctctaagatctctgagagagggtggatcagcctctgtgtaaacaaaaagctgttaggacttgttgcctctcaaggtggactattctgttttctgccaggacactgccattcatgcattgtcagatatttattaaacagcagcaaagtgccagccaatttgtcctggaggaattcatagcctcatggggcaaaagtaaataaacagcttattacaattcaacaa

SEQ ID NO: 160440 - DNA, 2955 bp, Homo sapiens
  Payload ID: 11369
  Gene Symbol: NFATC4
  Gene Name: nuclear factor of activated T-cells, cytoplasmic, calcineurin-dependent 4
  Uniprot ID: Q14934
  ENST ID: ENST00000554344
  CDS Start-End: 457-2955
atgtgtgagtcgcccccagtccagcccagtgcctcaagaaacacgcctccaggcccagccccagctccagcccctctggacccacctctctcaccttaagacccactggatcgggtaccctcggtcctaggatccaggggccagtgggcaaaggcctggcatgcctgcttcaatctcctccatcttcccaggtccaactctgcttttgtcttgtggctcagaaggtctctttgctgaggggcagggagcatagaaggacttgcggcctggccactcaaggaacatagccatctcacctgcttctctctttccccctctccctctgctcctcttcccattttgacagaactggactcagaggatgccccgccatgctgccgtctggccttgggagagccccctccctatggcgctgcacctatcggtattccccgacctccaccccctcggcctggcatgcattcgccaccgccgcgaccagccccctcacctggcacctgggagagccagcccgccaggtcggtgaggctgggaggaccaggagggggtgctgggggtgctgggggtggccgtgttctcgagtgtcccagcatccgcatcacctccatctctcccacgccggagccgccagcagcgctggaggacaaccctgatgcctggggggacggctctcctagagattaccccccaccagaaggctttgggggctacagagaagcagggggccagggtgggggggccttcttcagcccaagccctggcagcagcagcctgtcctcgtggagcttcttctccgatgcctctgacgaggcagccctgtatgcagcctgcgacgaggtggagtctgagctaaatgaggcggcctcccgctttggcctgggctccccgctgccctcgccccgggcctcccctcggccatggacccccgaagatccctggagcctgtatggtccaagccccggaggccgagggccagaggatagctggctactcctcagtgctcctgggcccaccccagcctccccgcggcctgcctctccatgtggcaagcggcgctattccagctcgggaaccccatcttcagcctccccagctctgtcccgccgtggcagcctgggggaagaggggtctgagccacctccaccacccccattgcctctggcccgggacccgggctcccctggtccctttgactatgtgggggccccaccagctgagagcatccctcagaagacacggcggacttccagcgagcaggcagtggctctgcctcggtctgaggagcctgcctcatgcaatgggaagctgcccttgggagcagaggagtctgtggctcctccaggaggttcccggaaggaggtggctggcatggactacctggcagtgccctccccactcgcttggtccaaggcccggattgggggacacagccctatcttcaggacctctgccctacccccactggactggcctctgcccagccaatatgagcagctggagctgaggatcgaggtacagcctagagcccaccaccgggcccactatgagacagaaggcagccgtggagctgtcaaagctgcccctggcggtcaccccgtagtcaagctcctaggctacagtgagaagccactgaccctacagatgttcatcggcactgcagatgaaaggaacctgcggcctcatgccttctatcaggtgcaccgtatcacaggcaagatggtggccacggccagctatgaagccgtagtcagtggcaccaaggtgttggagatgactctgctgcctgagaacaacatggcggccaacattgactgcgcgggaatcctgaagcttcggaattcagacattgagcttcggaagggtgagacggacatcgggcgcaaaaacacacgtgtacggctggtgttccgggtacacgtgccccagggcggcgggaaggtcgtctcagtacaggcagcatcggtgcccatcgagtgctcccagcgctcagcccaggagctgccccaggtggaggcctacagccccagtgcctgctctgtgagaggaggcgaggaactggtactgactggctccaacttcctgccagactccaaggtggtgttcattgagaggggtcctgatgggaagctgcaatgggaggaggaggccacagtgaaccgactgcagagcaacgaggtgacgctgaccctgactgtccccgagtacagcaacaagagggtttcccggccagtccaggtctacttttatgtctccaatgggcggaggaaacgcagtcctacccagagtttcaggtttctgcctgtgatctgcaaagaggagcccctaccggactcatctctgcggggtttcccttcagcatcggcaaccccctttggcactgacatggacttctcaccacccaggcccccctacccctcctatccccatgaagaccctgcttgcgaaactccttacctatcagaaggcttcggctatggcatgccccctctgtacccccagacggggcccccaccatcctacagaccgggcctgcggatgttccctgagactaggggtaccacaggttgtgcccaaccacctgcagtttccttccttccccgccccttccctagtgacccgtatggagggcggggctcctctttctccctggggctgccattctctccgccagccccctttcggccgcctcctcttcctgcatccccaccgcttgaaggccccttcccttcccagagtgatgtgcatcccctacctgctgagggatacaataaggtagggccaggctatggccctggggagggggctccggagcaggagaaatccaggggtggctacagcagcggcttccgagacagtgtccctatccagggtatcacgctggaggaagtgagtgagatcattggccgagacctgagtggcttccctgcacctcctggagaagagcctcctgcctga

SEQ ID NO: 160441 - DNA, 5367 bp, Homo sapiens
  Payload ID: 11369
  Gene Symbol: NFATC4
  Gene Name: nuclear factor of activated T-cells, cytoplasmic, calcineurin-dependent 4
  Uniprot ID: Q14934
  ENST ID: ENST00000553708
  CDS Start-End: 1-2706
atgggggcggccagctgcgaggatgaggagctggaatttaagctggtgttcggggaggaaaaggaggcccccccgctgggcgcggggggattgggggaagaactggactcagaggatgccccgccatgctgccgtctggccttgggagagccccctccctatggcgctgcacctatcggtattccccgacctccaccccctcggcctggcatgcattcgccaccgccgcgaccagccccctcacctggcacctgggagagccagcccgccaggtcggtgaggctgggaggaccaggagggggtgctgggggtgctgggggtggccgtgttctcgagtgtcccagcatccgcatcacctccatctctcccacgccggagccgccagcagcgctggaggacaaccctgatgcctggggggacggctctcctagagattaccccccaccagaaggctttgggggctacagagaagcagggggccagggtgggggggccttcttcagcccaagccctggcagcagcagcctgtcctcgtggagcttcttctccgatgcctctgacgaggcagccctgtatgcagcctgcgacgaggtggagtctgagctaaatgaggcggcctcccgctttggcctgggctccccgctgccctcgccccgggcctcccctcggccatggacccccgaagatccctggagcctgtatggtccaagccccggaggccgagggccagaggatagctggctactcctcagtgctcctgggcccaccccagcctccccgcggcctgcctctccatgtggcaagcggcgctattccagctcgggaaccccatcttcagcctccccagctctgtcccgccgtggcagcctgggggaagaggggtctgagccacctccaccacccccattgcctctggcccgggacccgggctcccctggtccctttgactatgtgggggccccaccagctgagagcatccctcagaagacacggcggacttccagcgagcaggcagtggctctgcctcggtctgaggagcctgcctcatgcaatgggaagctgcccttgggagcagaggagtctgtggctcctccaggaggttcccggaaggaggtggctggcatggactacctggcagtgccctccccactcgcttggtccaaggcccggattgggggacacagccctatcttcaggacctctgccctacccccactggactggcctctgcccagccaatatgagcagctggagctgaggatcgaggtacagcctagagcccaccaccgggcccactatgagacagaaggcagccgtggagctgtcaaagctgcccctggcggtcaccccgtagtcaagctcctaggctacagtgagaagccactgaccctacagatgttcatcggcactgcagatgaaaggaacctgcggcctcatgccttctatcaggtgcaccgtatcacaggcaagatggtggccacggccagctatgaagccgtagtcagtggcaccaaggtgttggagatgactctgctgcctgagaacaacatggcggccaacattgactgcgcgggaatcctgaagcttcggaattcagacattgagcttcggaagggtgagacggacatcgggcgcaaaaacacacgtgtacggctggtgttccgggtacacgtgccccagggcggcgggaaggtcgtctcagtacaggcagcatcggtgcccatcgagtgctcccagcgctcagcccaggagctgccccaggtggaggcctacagccccagtgcctgctctgtgagaggaggcgaggaactggtactgactggctccaacttcctgccagactccaaggtggtgttcattgagaggggtcctgatgggaagctgcaatgggaggaggaggccacagtgaaccgactgcagagcaacgaggtgacgctgaccctgactgtccccgagtacagcaacaagagggtttcccggccagtccaggtctacttttatgtctccaatgggcggaggaaacgcagtcctacccagagtttcaggtttctgcctgtgatctgcaaagaggagcccctaccggactcatctctgcggggtttcccttcagcatcggcaaccccctttggcactgacatggacttctcaccacccaggcccccctacccctcctatccccatgaagaccctgcttgcgaaactccttacctatcagaaggcttcggctatggcatgccccctctgtacccccagacggggcccccaccatcctacagaccgggcctgcggatgttccctgagactaggggtaccacaggttgtgcccaaccacctgcagtttccttccttccccgccccttccctagtgacccgtatggagggcggggctcctctttctccctggggctgccattctctccgccagccccctttcggccgcctcctcttcctgcatccccaccgcttgaaggccccttcccttcccagagtgatgtgcatcccctacctgctgagggatacaataaggtagggccaggctatggccctggggagggggctccggagcaggagaaatccaggggtggctacagcagcggcttccgagacagtgtccctatccagggtatcacgctggaggaaggtgggtgtgggactgggggctgtgagtgtgagtgtgtgcaagagattgctctgcatgtttgctgagggctggagctgggcttttcagagatcgggcatccctggtctctcagggccagttggaggttcccaggaggcatgttcttgatgcctgtggctgcctgaatccaattaactgaattctgaagagtgcatggggtaactgtctcagcctttctcctgtctctgcctctgtcctctgctccaaatcataaaatctcagagctagaagcactttcaagatcattccatccagcgcattcaatttgcaagtttaggcgttgagttccagagagggatggtagcttgctgaggtcccagtcaagcacacttgccattgcctcagctttcccctaaacacggtgtctgtggtcagggttggtgaggaggagctttcctgttttgcctctccttcttcccattggctacacccatctctggccctgctgataccgattcccctgacatttcaggctaagccagcaggaaagggctaggacgggtgcctgggagcccacatggagggagttgggcaagatttgattcggagcaggtgtcaagacgtgttggggaaactgaggcccagtggaatagaagccagtagaggaggaatctagaggcctcctagattaagacctgcctggaatggattgggggtgggtctttggaaaaggaggggacccacctctagcccagtctctcaactgcccctcctttacagtgagtgagatcattggccgagacctgagtggcttccctgcacctcctggagaagagcctcctgcctgaaccacgtgaactgtcatcacctggcaaccccagccccagcctcagccctgccccctttccctccttcctggagtggtggctacagaagcttggggccaaccctggctcctctttccccagcttctgtctgtctcactgtcttccctcccctcccccagctgaggtgtggccctcaggcctggtgctgccttggagggctgggggaaggagtgtgtggaggagggaggagggtgaagactgaggctaggtgccagaatggactggagtgaaggcgtgtctagagtgtgggctggctgttgtgctggaaagctggggacaggttgatggtaataaactgctcaatgaccagtgcttcaggctccagagctctttggagagatgggttggggcagcttactccagccctggcccaaggaggcccagaagttggaaagagatggaatgtggctgggaacattgcatcccaaagagcttctcagtggaggaggctggggaaggcatgagggggctcagaggctccttgactgggaccaggattgggggccagggcttgagtaggcctctccactctcctccttgggggtccagattccttaggagctttgggatgaggcccaggaggctgcatttttccaggtccttagtcttgccaccacacagatgattctgattcatagccaagatgaggacacactgatgtagctgatctctcatttacagaggaggattctaaagttcagagagggaaaggggcttgcctgaggtcacgtagataatcagcagcacattgaacgctgcactcctgggctcctgtccccagcccccattcagacacgctgactcaggaggtccaggcctctaaggcttctctccctggagtgagggtggaggtgagggagagctggcacaagccctccctctggatcctccactcctggggattatgaagatattctggaaagatttgtgcttcagaggtagactgcagaaagcaaacagtctacccagcagctctgaatgtcacctgccctggggcttacagcactatatgagttcctggcctatcctgcaaatatgcccatgctggccttctaaatagctggtacatccatcaccactgacgggcctggcctggaaacctggtttgtcccctgtcttgatggcctacgagaggccaagttccactgggctgggaaaagtcactttgtctgtcttgttcacctggagcctgacacaccgtaggtactgagtacaaatagcttgatttggctaggcttggctgcagggggacgtgcctaaaagacattccgggcatttgcacttgggaaacttgcctcaccttcaggcttgtggggcctctctatgcccaatgagtccaggcagtcctagcaagtactcaggagagcaggggtgggtgtgacagaggctggctctggattgggggacaacagaaccagagtaactcctcgcctgttgctgctttgcaatgaatttcctttacctttctggaacacaagctgctgtgaaccaaactgatatcaagtgattagctcaccgggccttggttgcttttcaaagatccccttcagccccctgccagagtcactgccccataatcaccatgtcagaagggaccctagggcattcgtgtcctatttatcaatcttcagcaccacctctaagatctctgagagagggtggatcagcctctgtgtaaacaaaaagctgttaggacttgttgcctctcaaggtggactattctgttttctgccaggacactgccattcatgcattgtcagatatttattaaacagcagcaaagtgccagccaatttgtcctggaggaattcatagcctcatggggcaaaagtaaataaacagcttattacaattcaacaa

SEQ ID NO: 160442 - DNA, 2506 bp, Homo sapiens
  Payload ID: 11369
  Gene Symbol: NFATC4
  Gene Name: nuclear factor of activated T-cells, cytoplasmic, calcineurin-dependent 4
  Uniprot ID: Q14934
  ENST ID: ENST00000554966
  CDS Start-End: 83-2506
gaagaggaggggaacccacagggtccggaggtttcaggcccctagtaaacctggcaaggatttttagaagagccggagtgggatgctatcgggccgggacctgggggctcctgccggatccatgggggcggccagctgcgaggatgaggagctggaatttaagctggtgttcggggaggaaaaggaggcccccccgctgggcgcggggggattgggggaagaactggactcagaggatgccccgccatgctgccgtctggccttgggagagccccctccctatggcgctgcacctatcggtattccccgacctccaccccctcggcctggcatgcattcgccaccgccgcgaccagccccctcacctggcacctgggagagccagcccgccaggtcggtgaggctgggaggaccaggagggggtgctgggggtgctgggggtggccgtgttctcgagtgtcccagcatccgcatcacctccatctctcccacgccggagccgccagcagcgctggaggacaaccctgatgcctggggggacggctctcctagagattaccccccaccagaaggctttgggggctacagagaagcagggggccagggtgggggggccttcttcagcccaagccctggcagcagcagcctgtcctcgtggagcttcttctccgatgcctctgacgaggcagccctgtatgcagcctgcgacgaggtggagtctgagctaaatgaggcggcctcccgctttggcctgggctccccgctgccctcgccccgggcctcccctcggccatggacccccgaagatccctggagcctgtatggtccaagccccggaggccgagggccagaggatagctggctactcctcagtgctcctgggcccaccccagcctccccgcggcctgcctctccatgtggcaagcggcgctattccagctcgggaaccccatcttcagcctccccagctctgtcccgccgtggcagcctgggggaagaggggtctgagccacctccaccacccccattgcctctggcccgggacccgggctcccctggtccctttgactatgtgggggccccaccagctgagagcatccctcagaagacacggcggacttccagcgagcaggcagtggctctgcctcggtctgaggagcctgcctcatgcaatgggaagctgcccttgggagcagaggagtctgtggctcctccaggaggttcccggaaggaggtggctggcatggactacctggcagtgccctccccactcgcttggtccaaggcccggattgggggacacagccctatcttcaggacctctgccctacccccactggactggcctctgcccagccaatatgagcagctggagctgaggatcgaggtacagcctagagcccaccaccgggcccactatgagacagaaggcagccgtggagctgtcaaagctgcccctggcggtcaccccgtagtcaagctcctaggctacagtgagaagccactgaccctacagatgttcatcggcactgcagatgaaaggaacctgcggcctcatgccttctatcaggtgcaccgtatcacaggcaagatggtggccacggccagctatgaagccgtagtcagtggcaccaaggtgttggagatgactctgctgcctgagaacaacatggcggccaacattgactgcgcgggaatcctgaagcttcggaattcagacattgagcttcggaagggtgagacggacatcgggcgcaaaaacacacgtgtacggctggtgttccgggtacacgtgccccagggcggcgggaaggtcgtctcagtacaggcagcatcggtgcccatcgagtgctcccagcgctcagcccaggagctgccccaggtggaggcctacagccccagtgcctgctctgtgagaggaggcgaggaactggtactgactggctccaacttcctgccagactccaaggtggtgttcattgagaggggtcctgatgggaagctgcaatgggaggaggaggccacagtgaaccgactgcagagcaacgaggtgacgctgaccctgactgtccccgagtacagcaacaagagggtttcccggccagtccaggtctacttttatgtctccaatgggcggaggaaacgcagtcctacccagagtttcaggtttctgcctgtgatctgcaaagaggagcccctaccggactcatctctgcggggtttcccttcagcatcggcaaccccctttggcactgacatggacttctcaccacccaggcccccctacccctcctatccccatgaagaccctgcttgcgaaactccttacctatcagaaggcttcggctatggcatgccccctctgtacccccagacggggcccccaccatcctacagaccgggcctgcggatgttccctgagactaggggtaccacagtgagtgagatcattggccgagacctgagtggcttccctgcacctcctggagaagagcctcctgcctga

SEQ ID NO: 160443 - DNA, 3169 bp, Homo sapiens
  Payload ID: 11369
  Gene Symbol: NFATC4
  Gene Name: nuclear factor of activated T-cells, cytoplasmic, calcineurin-dependent 4
  Uniprot ID: Q14934
  ENST ID: ENST00000555453
  CDS Start-End: 147-2819
cccagtccagcccagtgcctcaagaaacacgcctccaggcccagccccagctccagcccctctggacccacctctctcaccttaagacccactggatcgggtaccctcggtcctaggatccaggggccagtgggcaaaggcctggcatgcctgcttcaatctcctccatcttcccaggtccaactctgcttttgtcttgtggctcagaagaactggactcagaggatgccccgccatgctgccgtctggccttgggagagccccctccctatggcgctgcacctatcggtattccccgacctccaccccctcggcctggcatgcattcgccaccgccgcgaccagccccctcacctggcacctgggagagccagcccgccaggtcggtgaggctgggaggaccaggagggggtgctgggggtgctgggggtggccgtgttctcgagtgtcccagcatccgcatcacctccatctctcccacgccggagccgccagcagcgctggaggacaaccctgatgcctggggggacggctctcctagagattaccccccaccagaaggctttgggggctacagagaagcagggggccagggtgggggggccttcttcagcccaagccctggcagcagcagcctgtcctcgtggagcttcttctccgatgcctctgacgaggcagccctgtatgcagcctgcgacgaggtggagtctgagctaaatgaggcggcctcccgctttggcctgggctccccgctgccctcgccccgggcctcccctcggccatggacccccgaagatccctggagcctgtatggtccaagccccggaggccgagggccagaggatagctggctactcctcagtgctcctgggcccaccccagcctccccgcggcctgcctctccatgtggcaagcggcgctattccagctcgggaaccccatcttcagcctccccagctctgtcccgccgtggcagcctgggggaagaggggtctgagccacctccaccacccccattgcctctggcccgggacccgggctcccctggtccctttgactatgtgggggccccaccagctgagagcatccctcagaagacacggcggacttccagcgagcaggcagtggctctgcctcggtctgaggagcctgcctcatgcaatgggaagctgcccttgggagcagaggagtctgtggctcctccaggaggttcccggaaggaggtggctggcatggactacctggcagtgccctccccactcgcttggtccaaggcccggattgggggacacagccctatcttcaggacctctgccctacccccactggactggcctctgcccagccaatatgagcagctggagctgaggatcgaggtacagcctagagcccaccaccgggcccactatgagacagaaggcagccgtggagctgtcaaagctgcccctggcggtcaccccgtagtcaagctcctaggctacagtgagaagccactgaccctacagatgttcatcggcactgcagatgaaaggaacctgcggcctcatgccttctatcaggtgcaccgtatcacaggcaagatggtggccacggccagctatgaagccgtagtcagtggcaccaaggtgttggagatgactctgctgcctgagaacaacatggcggccaacattgactgcgcgggaatcctgaagcttcggaattcagacattgagcttcggaagggtgagacggacatcgggcgcaaaaacacacgtgtacggctggtgttccgggtacacgtgccccagggcggcgggaaggtcgtctcagtacaggcagcatcggtgcccatcgagtgctcccagcgctcagcccaggagctgccccaggtggaggcctacagccccagtgcctgctctgtgagaggaggcgaggaactggtactgactggctccaacttcctgccagactccaaggtggtgttcattgagaggggtcctgatgggaagctgcaatgggaggaggaggccacagtgaaccgactgcagagcaacgaggtgacgctgaccctgactgtccccgagtacagcaacaagagggtttcccggccagtccaggtctacttttatgtctccaatgggcggaggaaacgcagtcctacccagagtttcaggtttctgcctgtgatctgcaaagaggagcccctaccggactcatctctgcggggtttcccttcagcatcggcaaccccctttggcactgacatggacttctcaccacccaggcccccctacccctcctatccccatgaagaccctgcttgcgaaactccttacctatcagaaggcttcggctatggcatgccccctctgtacccccagacggggcccccaccatcctacagaccgggcctgcggatgttccctgagactaggggtaccacaggttgtgcccaaccacctgcagtttccttccttccccgccccttccctagtgacccgtatggagggcggggctcctctttctccctggggctgccattctctccgccagccccctttcggccgcctcctcttcctgcatccccaccgcttgaaggccccttcccttcccagagtgatgtgcatcccctacctgctgagggatacaataaggtagggccaggctatggccctggggagggggctccggagcaggagaaatccaggggtggctacagcagcggcttccgagacagtgtccctatccagggtatcacgctggaggaagtgagtgagatcattggccgagacctgagtggcttccctgcacctcctggagaagagcctcctgcctgaaccacgtgaactgtcatcacctggcaaccccagccccagcctcagccctgccccctttccctccttcctggagtggtggctacagaagcttggggccaaccctggctcctctttccccagcttctgtctgtctcactgtcttccctcccctcccccagctgaggtgtggccctcaggcctggtgctgccttggagggctgggggaaggagtgtgtggaggagggaggagggtgaagactgaggctaggtgccagaatggactggagtgaaggcgtgtctagagtgtgggctggctgttgtgctggaaagctggggacaggttgatggtaataaactgctcaatgaccagt

SEQ ID NO: 160444 - DNA, 2631 bp, Homo sapiens
  Payload ID: 11369
  Gene Symbol: NFATC4
  Gene Name: nuclear factor of activated T-cells, cytoplasmic, calcineurin-dependent 4
  Uniprot ID: Q14934
  ENST ID: ENST00000554661
  CDS Start-End: 457-2631
atgtgtgagtcgcccccagtccagcccagtgcctcaagaaacacgcctccaggcccagccccagctccagcccctctggacccacctctctcaccttaagacccactggatcgggtaccctcggtcctaggatccaggggccagtgggcaaaggcctggcatgcctgcttcaatctcctccatcttcccaggtccaactctgcttttgtcttgtggctcagaaggtctctttgctgaggggcagggagcatagaaggacttgcggcctggccactcaaggaacatagccatctcacctgcttctctctttccccctctccctctgctcctcttcccattttgacagaactggactcagaggatgccccgccatgctgccgtctggccttgggagagccccctccctatggcgctgcacctatcggtattccccgacctccaccccctcggcctggcatgcattcgccaccgccgcgaccagccccctcacctggcacctgggagagccagcccgccaggtcggtgaggctgggaggaccaggagggggtgctgggggtgctgggggtggccgtgttctcgagtgtcccagcatccgcatcacctccatctctcccacgccggagccgccagcagcgctggaggacaaccctgatgcctggggggacggctctcctagagattaccccccaccagaaggctttgggggctacagagaagcagggggccagggtgggggggccttcttcagcccaagccctggcagcagcagcctgtcctcgtggagcttcttctccgatgcctctgacgaggcagccctgtatgcagcctgcgacgaggtggagtctgagctaaatgaggcggcctcccgctttggcctgggctccccgctgccctcgccccgggcctcccctcggccatggacccccgaagatccctggagcctgtatggtccaagccccggaggccgagggccagaggatagctggctactcctcagtgctcctgggcccaccccagcctccccgcggcctgcctctccatgtggcaagcggcgctattccagctcgggaaccccatcttcagcctccccagctctgtcccgccgtggcagcctgggggaagaggggtctgagccacctccaccacccccattgcctctggcccgggacccgggctcccctggtccctttgactatgtgggggccccaccagctgagagcatccctcagaagacacggcggacttccagcgagcaggcagtggctctgcctcggtctgaggagcctgcctcatgcaatgggaagctgcccttgggagcagaggagtctgtggctcctccaggaggttcccggaaggaggtggctggcatggactacctggcagtgccctccccactcgcttggtccaaggcccggattgggggacacagccctatcttcaggacctctgccctacccccactggactggcctctgcccagccaatatgagcagctggagctgaggatcgaggtacagcctagagcccaccaccgggcccactatgagacagaaggcagccgtggagctgtcaaagctgcccctggcggtcaccccgtagtcaagctcctaggctacagtgagaagccactgaccctacagatgttcatcggcactgcagatgaaaggaacctgcggcctcatgccttctatcaggtgcaccgtatcacaggcaagatggtggccacggccagctatgaagccgtagtcagtggcaccaaggtgttggagatgactctgctgcctgagaacaacatggcggccaacattgactgcgcgggaatcctgaagcttcggaattcagacattgagcttcggaagggtgagacggacatcgggcgcaaaaacacacgtgtacggctggtgttccgggtacacgtgccccagggcggcgggaaggtcgtctcagtacaggcagcatcggtgcccatcgagtgctcccagcgctcagcccaggagctgccccaggtggaggcctacagccccagtgcctgctctgtgagaggaggcgaggaactggtactgactggctccaacttcctgccagactccaaggtggtgttcattgagaggggtcctgatgggaagctgcaatgggaggaggaggccacagtgaaccgactgcagagcaacgaggtgacgctgaccctgactgtccccgagtacagcaacaagagggtttcccggccagtccaggtctacttttatgtctccaatgggcggaggaaacgcagtcctacccagagtttcaggtttctgcctgtgatctgcaaagaggagcccctaccggactcatctctgcggggtttcccttcagcatcggcaaccccctttggcactgacatggacttctcaccacccaggcccccctacccctcctatccccatgaagaccctgcttgcgaaactccttacctatcagaaggcttcggctatggcatgccccctctgtacccccagacggggcccccaccatcctacagaccgggcctgcggatgttccctgagactaggggtaccacagtgagtgagatcattggccgagacctgagtggcttccctgcacctcctggagaagagcctcctgcctga

SEQ ID NO: 160445 - DNA, 1382 bp, Homo sapiens
  Payload ID: 11369
  Gene Symbol: NFATC4
  Gene Name: nuclear factor of activated T-cells, cytoplasmic, calcineurin-dependent 4
  Uniprot ID: Q14934
  ENST ID: ENST00000554473
  CDS Start-End: 393-1382
gggacaccagcctcatgtctactctggaaaatggtggcccgccagatatgggggagggtttaggctgaggacaaaagtcactgggagttaagttttctctgtattgagttgggccagtctctttggaggctcttctgcctttgcccagcccactttgggctttattccaagaaaaacactgtgaactccaggccatgttttctccacaacgggtgcccagttccccaagggattcccttgcaggatatcctttatctttcaccattcccatcccatggtagactgaaaatctagggatgaataaaggatgagacggtggggatttcaatgaggtggccgctctctccctctgccagctcctaggctacagtgagaagccactgaccctacagatgttcatcggcactgcagatgaaaggaacctgcggcctcatgccttctatcaggtgcaccgtatcacaggcaagatggtggccacggccagctatgaagccgtagtcagtggcaccaaggtgttggagatgactctgctgcctgagaacaacatggcggccaacattgactgcgcgggaatcctgaagcttcggaattcagacattgagcttcggaagggtgagacggacatcgggcgcaaaaacacacgtgtacggctggtgttccgggtacacgtgccccagggcggcgggaaggtcgtctcagtacaggcagcatcggtgcccatcgagtgctcccagcgctcagcccaggagctgccccaggtggaggcctacagccccagtgcctgctctgtgagaggaggcgaggaactggtactgactggctccaacttcctgccagactccaaggtggtgttcattgagaggggtcctgatgggaagctgcaatgggaggaggaggccacagtgaaccgactgcagagcaacgaggtgacgctgaccctgactgtccccgagtacagcaacaagagggtttcccggccagtccaggtctacttttatgtctccaatgggcggaggaaacgcagtcctacccagagtttcaggtttctgcctgtgatctgcaaagaggagcccctaccggactcatctctgcggggtttcccttcagcatcggcaaccccctttggcactgacatggacttctcaccacccaggcccccctacccctcctatccccatgaagaccctgcttgcgaaactccttacctatcagaaggcttcggctatggcatgccccctctgtacccccagacggggcccccaccatcctacagaccgggcctgcggatgttccctgagactaggggtaccacagtgagtgagatcattggccgagacctgagtggcttccctgcacctcctggagaagagcctcctgcctga

SEQ ID NO: 160446 - DNA, 3057 bp, Homo sapiens
  Payload ID: 11369
  Gene Symbol: NFATC4
  Gene Name: nuclear factor of activated T-cells, cytoplasmic, calcineurin-dependent 4
  Uniprot ID: Q14934
  ENST ID: ENST00000554050
  CDS Start-End: 322-2706
gaagagaggacagagggagggagggtgggggaggacgaggggcgcgtggttttcccatctcatccctggaggaggggctggagcatccccggcagccaatcagggacaggctgggggggggaccgctttgaagaagtttgggggaaaaaagtttggaaaagtttctataataacgagggggcttctggagggaggcggcagcgacggaggagggggcttctcagagaaagggagggagggagccacccgggtgaagatacagcagcctcctgaactcccccctcccacccaggccgggacctgggggctcctgccggatccatgggggcggccagctgcgaggatgaggagctggaatttaagctggtgttcggggaggaaaaggaggcccccccgctgggcgcggggggattgggggaagaactggactcagaggatgccccgccatgctgccgtctggccttgggagagccccctccctatggcgctgcacctatcggtattccccgacctccaccccctcggcctggcatgcattcgccaccgccgcgaccagccccctcacctggcacctgggagagccagcccgccaggtcggtgaggctgggaggaccaggagggggtgctgggggtgctgggggtggccgtgttctcgagtgtcccagcatccgcatcacctccatctctcccacgccggagccgccagcagcgctggaggacaaccctgatgcctggggggacggctctcctagagattaccccccaccagaaggctttgggggctacagagaagcagggggccagggtgggggggccttcttcagcccaagccctggcagcagcagcctgtcctcgtggagcttcttctccgatgcctctgacgaggcagccctgtatgcagcctgcgacgaggtggagtctgagctaaatgaggcggcctcccgctttggcctgggctccccgctgccctcgccccgggcctcccctcggccatggacccccgaagatccctggagcctgtatggtccaagccccggaggccgagggccagaggatagctggctactcctcagtgctcctgggcccaccccagcctccccgcggcctgcctctccatgtggcaagcggcgctattccagctcgggaaccccatcttcagcctccccagctctgtcccgccgtggcagcctgggggaagaggggtctgagccacctccaccacccccattgcctctggcccgggacccgggctcccctggtccctttgactatgtgggggccccaccagctgagagcatccctcagaagacacggcggacttccagcgagcaggcagtggctctgcctcggtctgaggagcctgcctcatgcaatgggaagctgcccttgggagcagaggagtctgtggctcctccaggaggttcccggaaggaggtggctggcatggactacctggcagtgccctccccactcgcttggtccaaggcccggattgggggacacagccctatcttcaggacctctgccctacccccactggactggcctctgcccagccaatatgagcagctggagctgaggatcgaggtacagcctagagcccaccaccgggcccactatgagacagaaggcagccgtggagctgtcaaagctgcccctggcggtcaccccgtagtcaagctcctaggctacagtgagaagccactgaccctacagatgttcatcggcactgcagatgaaaggaacctgcggcctcatgccttctatcaggtgcaccgtatcacaggcaagatggtggccacggccagctatgaagccgtagtcagtggcaccaaggtgttggagatgactctgctgcctgagaacaacatggcggccaacattgactgcgcgggaatcctgaagcttcggaattcagacattgagcttcggaagggtgagacggacatcgggcgcaaaaacacacgtgtacggctggtgttccgggtacacgtgccccagggcggcgggaaggtcgtctcagtacaggcagcatcggtgcccatcgagtgctcccagcgctcagcccaggagctgccccaggtggaggcctacagccccagtgcctgctctgtgagaggaggcgaggaactggtactgactggctccaacttcctgccagactccaaggtggtgttcattgagaggggtcctgatgggaagctgcaatgggaggaggaggccacagtgaaccgactgcagagcaacgaggtgacgctgaccctgactgtccccgagtacagcaacaagagggtttcccggccagtccaggtctacttttatgtctccaatgggcggaggaaacgcagtcctacccagagtttcaggtttctgcctgtgatctgcaaagaggagcccctaccggactcatctctgcggggtttcccttcagcatcggcaaccccctttggcactgacatggacttctcaccacccaggcccccctacccctcctatccccatgaagaccctgcttgcgaaactccttacctatcagaaggcttcggctatggcatgccccctctgtacccccagacggggcccccaccatcctacagaccgggcctgcggatgttccctgagactaggggtaccacagtgagtgagatcattggccgagacctgagtggcttccctgcacctcctggagaagagcctcctgcctgaaccacgtgaactgtcatcacctggcaaccccagccccagcctcagccctgccccctttccctccttcctggagtggtggctacagaagcttggggccaaccctggctcctctttccccagcttctgtctgtctcactgtcttccctcccctcccccagctgaggtgtggccctcaggcctggtgctgccttggagggctgggggaaggagtgtgtggaggagggaggagggtgaagactgaggctaggtgccagaatggactggagtgaaggcgtgtctagagtgtgggctggctgttgtgctggaaagctggggacaggttgatggtaataaactgctcaatgaccagtg

SEQ ID NO: 160447 - DNA, 2025 bp, Homo sapiens
  Payload ID: 11369
  Gene Symbol: NFATC4
  Gene Name: nuclear factor of activated T-cells, cytoplasmic, calcineurin-dependent 4
  Uniprot ID: Q14934
  ENST ID: ENST00000556759
  CDS Start-End: 393-1706
gggacaccagcctcatgtctactctggaaaatggtggcccgccagatatgggggagggtttaggctgaggacaaaagtcactgggagttaagttttctctgtattgagttgggccagtctctttggaggctcttctgcctttgcccagcccactttgggctttattccaagaaaaacactgtgaactccaggccatgttttctccacaacgggtgcccagttccccaagggattcccttgcaggatatcctttatctttcaccattcccatcccatggtagactgaaaatctagggatgaataaaggatgagacggtggggatttcaatgaggtggccgctctctccctctgccagctcctaggctacagtgagaagccactgaccctacagatgttcatcggcactgcagatgaaaggaacctgcggcctcatgccttctatcaggtgcaccgtatcacaggcaagatggtggccacggccagctatgaagccgtagtcagtggcaccaaggtgttggagatgactctgctgcctgagaacaacatggcggccaacattgactgcgcgggaatcctgaagcttcggaattcagacattgagcttcggaagggtgagacggacatcgggcgcaaaaacacacgtgtacggctggtgttccgggtacacgtgccccagggcggcgggaaggtcgtctcagtacaggcagcatcggtgcccatcgagtgctcccagcgctcagcccaggagctgccccaggtggaggcctacagccccagtgcctgctctgtgagaggaggcgaggaactggtactgactggctccaacttcctgccagactccaaggtggtgttcattgagaggggtcctgatgggaagctgcaatgggaggaggaggccacagtgaaccgactgcagagcaacgaggtgacgctgaccctgactgtccccgagtacagcaacaagagggtttcccggccagtccaggtctacttttatgtctccaatgggcggaggaaacgcagtcctacccagagtttcaggtttctgcctgtgatctgcaaagaggagcccctaccggactcatctctgcggggtttcccttcagcatcggcaaccccctttggcactgacatggacttctcaccacccaggcccccctacccctcctatccccatgaagaccctgcttgcgaaactccttacctatcagaaggcttcggctatggcatgccccctctgtacccccagacggggcccccaccatcctacagaccgggcctgcggatgttccctgagactaggggtaccacaggttgtgcccaaccacctgcagtttccttccttccccgccccttccctagtgacccgtatggagggcggggctcctctttctccctggggctgccattctctccgccagccccctttcggccgcctcctcttcctgcatccccaccgcttgaaggccccttcccttcccagagtgatgtgcatcccctacctgctgagggatacaataaggtagggccaggctatggccctggggagggggctccggagcaggagaaatccaggggtggctacagcagcggcttccgagacagtgtccctatccagggtatcacgctggaggaagtgagtgagatcattggccgagacctgagtggcttccctgcacctcctggagaagagcctcctgcctgaaccacgtgaactgtcatcacctggcaaccccagccccagcctcagccctgccccctttccctccttcctggagtggtggctacagaagcttggggccaaccctggctcctctttccccagcttctgtctgtctcactgtcttccctcccctcccccagctgaggtgtggccctcaggcctggtgctgccttggagggctgggggaaggagtgtgtggaggagggaggagggtgaagactgaggctaggtgccagaatggactggagtgaaggcgtgtctagagtgtgggctggctgttgtgctggaaagctggggacag

SEQ ID NO: 160448 - DNA, 2830 bp, Homo sapiens
  Payload ID: 11369
  Gene Symbol: NFATC4
  Gene Name: nuclear factor of activated T-cells, cytoplasmic, calcineurin-dependent 4
  Uniprot ID: Q14934
  ENST ID: ENST00000555590
  CDS Start-End: 83-2830
gaagaggaggggaacccacagggtccggaggtttcaggcccctagtaaacctggcaaggatttttagaagagccggagtgggatgctatcgggccgggacctgggggctcctgccggatccatgggggcggccagctgcgaggatgaggagctggaatttaagctggtgttcggggaggaaaaggaggcccccccgctgggcgcggggggattgggggaagaactggactcagaggatgccccgccatgctgccgtctggccttgggagagccccctccctatggcgctgcacctatcggtattccccgacctccaccccctcggcctggcatgcattcgccaccgccgcgaccagccccctcacctggcacctgggagagccagcccgccaggtcggtgaggctgggaggaccaggagggggtgctgggggtgctgggggtggccgtgttctcgagtgtcccagcatccgcatcacctccatctctcccacgccggagccgccagcagcgctggaggacaaccctgatgcctggggggacggctctcctagagattaccccccaccagaaggctttgggggctacagagaagcagggggccagggtgggggggccttcttcagcccaagccctggcagcagcagcctgtcctcgtggagcttcttctccgatgcctctgacgaggcagccctgtatgcagcctgcgacgaggtggagtctgagctaaatgaggcggcctcccgctttggcctgggctccccgctgccctcgccccgggcctcccctcggccatggacccccgaagatccctggagcctgtatggtccaagccccggaggccgagggccagaggatagctggctactcctcagtgctcctgggcccaccccagcctccccgcggcctgcctctccatgtggcaagcggcgctattccagctcgggaaccccatcttcagcctccccagctctgtcccgccgtggcagcctgggggaagaggggtctgagccacctccaccacccccattgcctctggcccgggacccgggctcccctggtccctttgactatgtgggggccccaccagctgagagcatccctcagaagacacggcggacttccagcgagcaggcagtggctctgcctcggtctgaggagcctgcctcatgcaatgggaagctgcccttgggagcagaggagtctgtggctcctccaggaggttcccggaaggaggtggctggcatggactacctggcagtgccctccccactcgcttggtccaaggcccggattgggggacacagccctatcttcaggacctctgccctacccccactggactggcctctgcccagccaatatgagcagctggagctgaggatcgaggtacagcctagagcccaccaccgggcccactatgagacagaaggcagccgtggagctgtcaaagctgcccctggcggtcaccccgtagtcaagctcctaggctacagtgagaagccactgaccctacagatgttcatcggcactgcagatgaaaggaacctgcggcctcatgccttctatcaggtgcaccgtatcacaggcaagatggtggccacggccagctatgaagccgtagtcagtggcaccaaggtgttggagatgactctgctgcctgagaacaacatggcggccaacattgactgcgcgggaatcctgaagcttcggaattcagacattgagcttcggaagggtgagacggacatcgggcgcaaaaacacacgtgtacggctggtgttccgggtacacgtgccccagggcggcgggaaggtcgtctcagtacaggcagcatcggtgcccatcgagtgctcccagcgctcagcccaggagctgccccaggtggaggcctacagccccagtgcctgctctgtgagaggaggcgaggaactggtactgactggctccaacttcctgccagactccaaggtggtgttcattgagaggggtcctgatgggaagctgcaatgggaggaggaggccacagtgaaccgactgcagagcaacgaggtgacgctgaccctgactgtccccgagtacagcaacaagagggtttcccggccagtccaggtctacttttatgtctccaatgggcggaggaaacgcagtcctacccagagtttcaggtttctgcctgtgatctgcaaagaggagcccctaccggactcatctctgcggggtttcccttcagcatcggcaaccccctttggcactgacatggacttctcaccacccaggcccccctacccctcctatccccatgaagaccctgcttgcgaaactccttacctatcagaaggcttcggctatggcatgccccctctgtacccccagacggggcccccaccatcctacagaccgggcctgcggatgttccctgagactaggggtaccacaggttgtgcccaaccacctgcagtttccttccttccccgccccttccctagtgacccgtatggagggcggggctcctctttctccctggggctgccattctctccgccagccccctttcggccgcctcctcttcctgcatccccaccgcttgaaggccccttcccttcccagagtgatgtgcatcccctacctgctgagggatacaataaggtagggccaggctatggccctggggagggggctccggagcaggagaaatccaggggtggctacagcagcggcttccgagacagtgtccctatccagggtatcacgctggaggaagtgagtgagatcattggccgagacctgagtggcttccctgcacctcctggagaagagcctcctgcctga

SEQ ID NO: 160449 - DNA, 5613 bp, Homo sapiens
  Payload ID: 11369
  Gene Symbol: NFATC4
  Gene Name: nuclear factor of activated T-cells, cytoplasmic, calcineurin-dependent 4
  Uniprot ID: Q14934
  ENST ID: ENST00000557451
  CDS Start-End: 457-2952
atgtgtgagtcgcccccagtccagcccagtgcctcaagaaacacgcctccaggcccagccccagctccagcccctctggacccacctctctcaccttaagacccactggatcgggtaccctcggtcctaggatccaggggccagtgggcaaaggcctggcatgcctgcttcaatctcctccatcttcccaggtccaactctgcttttgtcttgtggctcagaaggtctctttgctgaggggcagggagcatagaaggacttgcggcctggccactcaaggaacatagccatctcacctgcttctctctttccccctctccctctgctcctcttcccattttgacagaactggactcagaggatgccccgccatgctgccgtctggccttgggagagccccctccctatggcgctgcacctatcggtattccccgacctccaccccctcggcctggcatgcattcgccaccgccgcgaccagccccctcacctggcacctgggagagccagcccgccaggtcggtgaggctgggaggaccaggagggggtgctgggggtgctgggggtggccgtgttctcgagtgtcccagcatccgcatcacctccatctctcccacgccggagccgccagcagcgctggaggacaaccctgatgcctggggggacggctctcctagagattaccccccaccagaaggctttgggggctacagagaagcagggggccagggtgggggggccttcttcagcccaagccctggcagcagcagcctgtcctcgtggagcttcttctccgatgcctctgacgaggcagccctgtatgcagcctgcgacgaggtggagtctgagctaaatgaggcggcctcccgctttggcctgggctccccgctgccctcgccccgggcctcccctcggccatggacccccgaagatccctggagcctgtatggtccaagccccggaggccgagggccagaggatagctggctactcctcagtgctcctgggcccaccccagcctccccgcggcctgcctctccatgtggcaagcggcgctattccagctcgggaaccccatcttcagcctccccagctctgtcccgccgtggcagcctgggggaagaggggtctgagccacctccaccacccccattgcctctggcccgggacccgggctcccctggtccctttgactatgtgggggccccaccagctgagagcatccctcagaagacacggcggacttccagcgagcaggcagtggctctgcctcggtctgaggagcctgcctcatgcaatgggaagctgcccttgggagcagaggagtctgtggctcctccaggaggttcccggaaggaggtggctggcatggactacctggcagtgccctccccactcgcttggtccaaggcccggattgggggacacagccctatcttcaggacctctgccctacccccactggactggcctctgcccagccaatatgagcagctggagctgaggatcgaggtacagcctagagcccaccaccgggcccactatgagacagaaggcagccgtggagctgtcaaagctgcccctggcggtcaccccgtagtcaagctcctaggctacagtgagaagccactgaccctacagatgttcatcggcactgcagatgaaaggaacctgcggcctcatgccttctatcaggtgcaccgtatcacaggcaagatggtggccacggccagctatgaagccgtagtcagtggcaccaaggtgttggagatgactctgctgcctgagaacaacatggcggccaacattgactgcgcgggaatcctgaagcttcggaattcagacattgagcttcggaagggtgagacggacatcgggcgcaaaaacacacgtgtacggctggtgttccgggtacacgtgccccagggcggcgggaaggtcgtctcagtacaggcagcatcggtgcccatcgagtgctcccagcgctcagcccaggagctgccccaggtggaggcctacagccccagtgcctgctctgtgagaggaggcgaggaactggtactgactggctccaacttcctgccagactccaaggtggtgttcattgagaggggtcctgatgggaagctgcaatgggaggaggaggccacagtgaaccgactgcagagcaacgaggtgacgctgaccctgactgtccccgagtacagcaacaagagggtttcccggccagtccaggtctacttttatgtctccaatgggcggaggaaacgcagtcctacccagagtttcaggtttctgcctgtgatctgcaaagaggagcccctaccggactcatctctgcggggtttcccttcagcatcggcaaccccctttggcactgacatggacttctcaccacccaggcccccctacccctcctatccccatgaagaccctgcttgcgaaactccttacctatcagaaggcttcggctatggcatgccccctctgtacccccagacggggcccccaccatcctacagaccgggcctgcggatgttccctgagactaggggtaccacaggttgtgcccaaccacctgcagtttccttccttccccgccccttccctagtgacccgtatggagggcggggctcctctttctccctggggctgccattctctccgccagccccctttcggccgcctcctcttcctgcatccccaccgcttgaaggccccttcccttcccagagtgatgtgcatcccctacctgctgagggatacaataaggtagggccaggctatggccctggggagggggctccggagcaggagaaatccaggggtggctacagcagcggcttccgagacagtgtccctatccagggtatcacgctggaggaaggtgggtgtgggactgggggctgtgagtgtgagtgtgtgcaagagattgctctgcatgtttgctgagggctggagctgggcttttcagagatcgggcatccctggtctctcagggccagttggaggttcccaggaggcatgttcttgatgcctgtggctgcctgaatccaattaactgaattctgaagagtgcatggggtaactgtctcagcctttctcctgtctctgcctctgtcctctgctccaaatcataaaatctcagagctagaagcactttcaagatcattccatccagcgcattcaatttgcaagtttaggcgttgagttccagagagggatggtagcttgctgaggtcccagtcaagcacacttgccattgcctcagctttcccctaaacacggtgtctgtggtcagggttggtgaggaggagctttcctgttttgcctctccttcttcccattggctacacccatctctggccctgctgataccgattcccctgacatttcaggctaagccagcaggaaagggctaggacgggtgcctgggagcccacatggagggagttgggcaagatttgattcggagcaggtgtcaagacgtgttggggaaactgaggcccagtggaatagaagccagtagaggaggaatctagaggcctcctagattaagacctgcctggaatggattgggggtgggtctttggaaaaggaggggacccacctctagcccagtctctcaactgcccctcctttacagtgagtgagatcattggccgagacctgagtggcttccctgcacctcctggagaagagcctcctgcctgaaccacgtgaactgtcatcacctggcaaccccagccccagcctcagccctgccccctttccctccttcctggagtggtggctacagaagcttggggccaaccctggctcctctttccccagcttctgtctgtctcactgtcttccctcccctcccccagctgaggtgtggccctcaggcctggtgctgccttggagggctgggggaaggagtgtgtggaggagggaggagggtgaagactgaggctaggtgccagaatggactggagtgaaggcgtgtctagagtgtgggctggctgttgtgctggaaagctggggacaggttgatggtaataaactgctcaatgaccagtgcttcaggctccagagctctttggagagatgggttggggcagcttactccagccctggcccaaggaggcccagaagttggaaagagatggaatgtggctgggaacattgcatcccaaagagcttctcagtggaggaggctggggaaggcatgagggggctcagaggctccttgactgggaccaggattgggggccagggcttgagtaggcctctccactctcctccttgggggtccagattccttaggagctttgggatgaggcccaggaggctgcatttttccaggtccttagtcttgccaccacacagatgattctgattcatagccaagatgaggacacactgatgtagctgatctctcatttacagaggaggattctaaagttcagagagggaaaggggcttgcctgaggtcacgtagataatcagcagcacattgaacgctgcactcctgggctcctgtccccagcccccattcagacacgctgactcaggaggtccaggcctctaaggcttctctccctggagtgagggtggaggtgagggagagctggcacaagccctccctctggatcctccactcctggggattatgaagatattctggaaagatttgtgcttcagaggtagactgcagaaagcaaacagtctacccagcagctctgaatgtcacctgccctggggcttacagcactatatgagttcctggcctatcctgcaaatatgcccatgctggccttctaaatagctggtacatccatcaccactgacgggcctggcctggaaacctggtttgtcccctgtcttgatggcctacgagaggccaagttccactgggctgggaaaagtcactttgtctgtcttgttcacctggagcctgacacaccgtaggtactgagtacaaatagcttgatttggctaggcttggctgcagggggacgtgcctaaaagacattccgggcatttgcacttgggaaacttgcctcaccttcaggcttgtggggcctctctatgcccaatgagtccaggcagtcctagcaagtactcaggagagcaggggtgggtgtgacagaggctggctctggattgggggacaacagaaccagagtaactcctcgcctgttgctgctttgcaatgaatttcctttacctttctggaacacaagctgctgtgaaccaaactgatatcaagtgattagctcaccgggccttggttgcttttcaaagatccccttcagccccctgccagagtcactgccccataatcaccatgtcagaagggaccctagggcattcgtgtcctatttatcaatcttcagcaccacctctaagatctctgagagagggtggatcagcctctgtgtaaacaaaaagctgttaggacttgttgcctctcaaggtggactattctgttttctgccaggacactgccattcatgcattgtcagatatttattaaacagcagcaaagtgccagccaatttgtcctggaggaattcatagcctcatggggcaaaagtaaataaacagcttattacaattcaacaa

SEQ ID NO: 160450 - DNA, 4364 bp, Homo sapiens
  Payload ID: 11369
  Gene Symbol: NFATC4
  Gene Name: nuclear factor of activated T-cells, cytoplasmic, calcineurin-dependent 4
  Uniprot ID: Q14934
  ENST ID: ENST00000555167
  CDS Start-End: 393-1703
gggacaccagcctcatgtctactctggaaaatggtggcccgccagatatgggggagggtttaggctgaggacaaaagtcactgggagttaagttttctctgtattgagttgggccagtctctttggaggctcttctgcctttgcccagcccactttgggctttattccaagaaaaacactgtgaactccaggccatgttttctccacaacgggtgcccagttccccaagggattcccttgcaggatatcctttatctttcaccattcccatcccatggtagactgaaaatctagggatgaataaaggatgagacggtggggatttcaatgaggtggccgctctctccctctgccagctcctaggctacagtgagaagccactgaccctacagatgttcatcggcactgcagatgaaaggaacctgcggcctcatgccttctatcaggtgcaccgtatcacaggcaagatggtggccacggccagctatgaagccgtagtcagtggcaccaaggtgttggagatgactctgctgcctgagaacaacatggcggccaacattgactgcgcgggaatcctgaagcttcggaattcagacattgagcttcggaagggtgagacggacatcgggcgcaaaaacacacgtgtacggctggtgttccgggtacacgtgccccagggcggcgggaaggtcgtctcagtacaggcagcatcggtgcccatcgagtgctcccagcgctcagcccaggagctgccccaggtggaggcctacagccccagtgcctgctctgtgagaggaggcgaggaactggtactgactggctccaacttcctgccagactccaaggtggtgttcattgagaggggtcctgatgggaagctgcaatgggaggaggaggccacagtgaaccgactgcagagcaacgaggtgacgctgaccctgactgtccccgagtacagcaacaagagggtttcccggccagtccaggtctacttttatgtctccaatgggcggaggaaacgcagtcctacccagagtttcaggtttctgcctgtgatctgcaaagaggagcccctaccggactcatctctgcggggtttcccttcagcatcggcaaccccctttggcactgacatggacttctcaccacccaggcccccctacccctcctatccccatgaagaccctgcttgcgaaactccttacctatcagaaggcttcggctatggcatgccccctctgtacccccagacggggcccccaccatcctacagaccgggcctgcggatgttccctgagactaggggtaccacaggttgtgcccaaccacctgcagtttccttccttccccgccccttccctagtgacccgtatggagggcggggctcctctttctccctggggctgccattctctccgccagccccctttcggccgcctcctcttcctgcatccccaccgcttgaaggccccttcccttcccagagtgatgtgcatcccctacctgctgagggatacaataaggtagggccaggctatggccctggggagggggctccggagcaggagaaatccaggggtggctacagcagcggcttccgagacagtgtccctatccagggtatcacgctggaggaaggtgggtgtgggactgggggctgtgagtgtgagtgtgtgcaagagattgctctgcatgtttgctgagggctggagctgggcttttcagagatcgggcatccctggtctctcagggccagttggaggttcccaggaggcatgttcttgatgcctgtggctgcctgaatccaattaactgaattctgaagagtgcatggggtaactgtctcagcctttctcctgtctctgcctctgtcctctgctccaaatcataaaatctcagagctagaagcactttcaagatcattccatccagcgcattcaatttgcaagtttaggcgttgagttccagagagggatggtagcttgctgaggtcccagtcaagcacacttgccattgcctcagctttcccctaaacacggtgtctgtggtcagggttggtgaggaggagctttcctgttttgcctctccttcttcccattggctacacccatctctggccctgctgataccgattcccctgacatttcaggctaagccagcaggaaagggctaggacgggtgcctgggagcccacatggagggagttgggcaagatttgattcggagcaggtgtcaagacgtgttggggaaactgaggcccagtggaatagaagccagtagaggaggaatctagaggcctcctagattaagacctgcctggaatggattgggggtgggtctttggaaaaggaggggacccacctctagcccagtctctcaactgcccctcctttacagtgagtgagatcattggccgagacctgagtggcttccctgcacctcctggagaagagcctcctgcctgaaccacgtgaactgtcatcacctggcaaccccagccccagcctcagccctgccccctttccctccttcctggagtggtggctacagaagcttggggccaaccctggctcctctttccccagcttctgtctgtctcactgtcttccctcccctcccccagctgaggtgtggccctcaggcctggtgctgccttggagggctgggggaaggagtgtgtggaggagggaggagggtgaagactgaggctaggtgccagaatggactggagtgaaggcgtgtctagagtgtgggctggctgttgtgctggaaagctggggacaggttgatggtaataaactgctcaatgaccagtgcttcaggctccagagctctttggagagatgggttggggcagcttactccagccctggcccaaggaggcccagaagttggaaagagatggaatgtggctgggaacattgcatcccaaagagcttctcagtggaggaggctggggaaggcatgagggggctcagaggctccttgactgggaccaggattgggggccagggcttgagtaggcctctccactctcctccttgggggtccagattccttaggagctttgggatgaggcccaggaggctgcatttttccaggtccttagtcttgccaccacacagatgattctgattcatagccaagatgaggacacactgatgtagctgatctctcatttacagaggaggattctaaagttcagagagggaaaggggcttgcctgaggtcacgtagataatcagcagcacattgaacgctgcactcctgggctcctgtccccagcccccattcagacacgctgactcaggaggtccaggcctctaaggcttctctccctggagtgagggtggaggtgagggagagctggcacaagccctccctctggatcctccactcctggggattatgaagatattctggaaagatttgtgcttcagaggtagactgcagaaagcaaacagtctacccagcagctctgaatgtcacctgccctggggcttacagcactatatgagttcctggcctatcctgcaaatatgcccatgctggccttctaaatagctggtacatccatcaccactgacgggcctggcctggaaacctggtttgtcccctgtcttgatggcctacgagaggccaagttccactgggctgggaaaagtcactttgtctgtcttgttcacctggagcctgacacaccgtaggtactgagtacaaatagcttgatttggctaggcttggctgcagggggacgtgcctaaaagacattccgggcatttgcacttgggaaacttgcctcaccttcaggcttgtggggcctctctatgcccaatgagtccaggcagtcctagcaagtactcaggagagcaggggtgggtgtgacagaggctggctctggattgggggacaacagaaccagagtaactcctcgcctgttgctgctttgcaatgaatttcctttacctttctggaacacaagctgctgtgaaccaaactgatatcaagtgattagctcaccgggccttggttgcttttcaaagatccccttcagccccctgccagagtcactgccccataatcaccatgtcagaagggaccctagggcattcgtgtcctatttatcaatcttcagcaccacctctaagatctctgagagagggtggatcagcctctgtgtaaacaaaaagctgttaggacttgttgcctctcaaggtggactattctgttttctgccaggacactgccattcatgcattgtcagatatttattaaacagcagcaaagtgccagccaatttgtcctggaggaattcatagcctcatggggcaaaagtaaataaacagcttattacaattcaacaa

SEQ ID NO: 160451 - DNA, 2509 bp, Homo sapiens
  Payload ID: 11369
  Gene Symbol: NFATC4
  Gene Name: nuclear factor of activated T-cells, cytoplasmic, calcineurin-dependent 4
  Uniprot ID: Q14934
  ENST ID: ENST00000556169
  CDS Start-End: 161-2509
atgtgtgagtcgcccccagtccagcccagtgcctcaagaaacacgcctccaggcccagccccagctccagcccctctggacccacctctctcaccttaagacccactggatcgggtaccctcggtcctaggatccaggggccagtgggcaaaggcctggcatgcctgcttcaatctcctccatcttcccaggtccaactctgcttttgtcttgtggctcagaagaactggactcagaggatgccccgccatgctgccgtctggccttgggagagccccctccctatggcgctgcacctatcggtattccccgacctccaccccctcggcctggcatgcattcgccaccgccgcgaccagccccctcacctggcacctgggagagccagcccgccaggtcggtgaggctgggaggaccaggagggggtgctgggggtgctgggggtggccgtgttctcgagtgtcccagcatccgcatcacctccatctctcccacgccggagccgccagcagcgctggaggacaaccctgatgcctggggggacggctctcctagagattaccccccaccagaaggctttgggggctacagagaagcagggggccagggtgggggggccttcttcagcccaagccctggcagcagcagcctgtcctcgtggagcttcttctccgatgcctctgacgaggcagccctgtatgcagcctgcgacgaggtggagtctgagctaaatgaggcggcctcccgctttggcctgggctccccgctgccctcgccccgggcctcccctcggccatggacccccgaagatccctggagcctgtatggtccaagccccggaggccgagggccagaggatagctggctactcctcagtgctcctgggcccaccccagcctccccgcggcctgcctctccatgtggcaagcggcgctattccagctcgggaaccccatcttcagcctccccagctctgtcccgccgtggcagcctgggggaagaggggtctgagccacctccaccacccccattgcctctggcccgggacccgggctcccctggtccctttgactatgtgggggccccaccagctgagagcatccctcagaagacacggcggacttccagcgagcaggcagtggctctgcctcggtctgaggagcctgcctcatgcaatgggaagctgcccttgggagcagaggagtctgtggctcctccaggaggttcccggaaggaggtggctggcatggactacctggcagtgccctccccactcgcttggtccaaggcccggattgggggacacagccctatcttcaggacctctgccctacccccactggactggcctctgcccagccaatatgagcagctggagctgaggatcgaggtacagcctagagcccaccaccgggcccactatgagacagaaggcagccgtggagctgtcaaagctgcccctggcggtcaccccgtagtcaagctcctaggctacagtgagaagccactgaccctacagatgttcatcggcactgcagatgaaaggaacctgcggcctcatgccttctatcaggtgcaccgtatcacaggcaagatggtggccacggccagctatgaagccgtagtcagtggcaccaaggtgttggagatgactctgctgcctgagaacaacatggcggccaacattgactgcgcgggaatcctgaagcttcggaattcagacattgagcttcggaagggtgagacggacatcgggcgcaaaaacacacgtgtacggctggtgttccgggtacacgtgccccagggcggcgggaaggtcgtctcagtacaggcagcatcggtgcccatcgagtgctcccagcgctcagcccaggagctgccccaggtggaggcctacagccccagtgcctgctctgtgagaggaggcgaggaactggtactgactggctccaacttcctgccagactccaaggtggtgttcattgagaggggtcctgatgggaagctgcaatgggaggaggaggccacagtgaaccgactgcagagcaacgaggtgacgctgaccctgactgtccccgagtacagcaacaagagggtttcccggccagtccaggtctacttttatgtctccaatgggcggaggaaacgcagtcctacccagagtttcaggtttctgcctgtgatctgcaaagaggagcccctaccggactcatctctgcggggtttcccttcagcatcggcaaccccctttggcactgacatggacttctcaccacccaggcccccctacccctcctatccccatgaagaccctgcttgcgaaactccttacctatcagaaggcttcggctatggcatgccccctctgtacccccagacggggcccccaccatcctacagaccgggcctgcggatgttccctgagactaggggtaccacagtgagtgagatcattggccgagacctgagtggcttccctgcacctcctggagaagagcctcctgcctga

SEQ ID NO: 160452 - DNA, 856 bp, Homo sapiens
  Payload ID: 11369
  Gene Symbol: NFATC4
  Gene Name: nuclear factor of activated T-cells, cytoplasmic, calcineurin-dependent 4
  Uniprot ID: Q14934
  ENST ID: ENST00000557767
  CDS Start-End: 608-856
ctgtttaaccctctctctgctctgggagcggccccttacatggtgtatgtgactccatggatattactggtttatttgtgtgtctactgctgaggagggctccctcagagccctgtggcagttttcccaaagagggtggggacagaggaggccacccctccatgcccagcccagccagtcctcttccttgcactgctctgcagcccagcgctcagcccaggagctgccccaggtggaggcctacagccccagtgcctgctctgtgagaggaggcgaggaactggtactgactggctccaacttcctgccagactccaaggtggtgttcattgagaggggtcctgatgggaagctgcaatgggaggaggaggccacagtgaaccgactgcagagcaacgaggtgacgctgaccctgactgtccccgagtacagcaacaagagggtttcccggccagtccaggtctacttttatgtctccaatgggcggaggaaacgcagtcctacccagagtttcaggtttctgcctgtgatctgcaaagaggagcccctaccggactcatctctgcggggtttcccttcagcatcggcaaccccctttggcactgacatggacttctcaccacccaggcccccctacccctcctatccccatgaagaccctgcttgcgaaactccttacctatcagaaggcttcggctatggcatgccccctctgtacccccagacggggcccccaccatcctacagaccgggcctgcggatgttccctgagactaggggtaccacagtgagtgagatcattggccgagacctgagtggcttccctgcacctcctggagaagagcctcctgcctga

SEQ ID NO: 160453 - DNA, 2566 bp, Homo sapiens
  Payload ID: 11369
  Gene Symbol: NFATC4
  Gene Name: nuclear factor of activated T-cells, cytoplasmic, calcineurin-dependent 4
  Uniprot ID: Q14934
  ENST ID: ENST00000553469
  CDS Start-End: 86-2566
agttctcaaagcctctttggctcggactgctcccagaggcatccaggctggctaagcgttcttcatctttgggggtcctggaggaatggctgatggaggcgctgattcggcagcgcaaagacttccagaaggcccgggcagagtagccccaggccgggacctgggggctcctgccggatccatgggggcggccagctgcgaggatgaggagctggaatttaagctggtgttcggggaggaaaaggaggcccccccgctgggcgcggggggattgggggaagaactggactcagaggatgccccgccatgctgccgtctggccttgggagagccccctccctatggcgctgcacctatcggtattccccgacctccaccccctcggcctggcatgcattcgccaccgccgcgaccagccccctcacctggcacctgggagagccagcccgccaggtcggtgaggctgggaggaccaggagggggtgctgggggtgctgggggtggccgtgttctcgagtgtcccagcatccgcatcacctccatctctcccacgccggagccgccagcagcgctggaggacaaccctgatgcctggggggacggctctcctagagattaccccccaccagaaggctttgggggctacagagaagcagggggccagggtgggggggccttcttcagcccaagccctggcagcagcagcctgtcctcgtggagcttcttctccgatgcctctgacgaggcagccctgtatgcagcctgcgacgaggtggagtctgagctaaatgaggcggcctcccgctttggcctgggctccccgctgccctcgccccgggcctcccctcggccatggacccccgaagatccctggagcctgtatggtccaagccccggaggccgagggccagaggatagctggctactcctcagtgctcctgggcccaccccagcctccccgcggcctgcctctccatgtggcaagcggcgctattccagctcgggaaccccatcttcagcctccccagctctgtcccgccgtggcagcctgggggaagaggggtctgagccacctccaccacccccattgcctctggcccgggacccgggctcccctggtccctttgactatgtgggggccccaccagctgagagcatccctcagaagacacggcggacttccagcgagcaggcagtggctctgcctcggtctgaggagcctgcctcatgcaatgggaagctgcccttgggagcagaggagtctgtggctcctccaggaggttcccggaaggaggtggctggcatggactacctggcagtgccctccccactcgcttggtccaaggcccggattgggggacacagccctatcttcaggacctctgccctacccccactggactggcctctgcccagccaatatgagcagctggagctgaggatcgaggtacagcctagagcccaccaccgggcccactatgagacagaaggcagccgtggagctgtcaaagctgcccctggcggtcaccccgtagtcaagctcctaggctacagtgagaagccactgaccctacagatgttcatcggcactgcagatgaaaggaacctgcggcctcatgccttctatcaggtgcaccgtatcacaggcaagatggtggccacggccagctatgaagccgtagtcagtggcaccaaggtgttggagatgactctgctgcctgagaacaacatggcggccaacattgactgcgcgggaatcctgaagcttcggaattcagacattgagcttcggaagggtgagacggacatcgggcgcaaaaacacacgtgtacggctggtgttccgggtacacgtgccccagggcggcgggaaggtcgtctcagtacaggcagcatcggtgcccatcgagtgctcccagcgctcagcccaggagctgccccaggtggaggcctacagccccagtgcctgctctgtgagaggaggcgaggaactggtactgactggctccaacttcctgccagactccaaggtggtgttcattgagaggggtcctgatgggaagctgcaatgggaggaggaggccacagtgaaccgactgcagagcaacgaggtgacgctgaccctgactgtccccgagtacagcaacaagagggtttcccggccagtccaggtctacttttatgtctccaatgggcggaggaaacgcagtcctacccagagtttcaggtttctgcctgtgatctgcaaagaggagcccctaccggactcatctctgcggggtttcccttcagcatcggcaaccccctttggcactgacatggacttctcaccacccaggcccccctacccctcctatccccatgaagaccctgcttgcgaaactccttacctatcagaaggcttcggctatggcatgccccctctgtacccccagacggggcccccaccatcctacagaccgggcctgcggatgttccctgagactaggggtaccacagtgagtgagatcattggccgagacctgagtggcttccctgcacctcctggagaagagcctcctgcctga

SEQ ID NO: 160454 - DNA, 1476 bp, Homo sapiens
  Payload ID: 11369
  Gene Symbol: NFATC4
  Gene Name: nuclear factor of activated T-cells, cytoplasmic, calcineurin-dependent 4
  Uniprot ID: Q14934
  ENST ID: ENST00000555802
  CDS Start-End: 608-1180
ctgtttaaccctctctctgctctgggagcggccccttacatggtgtatgtgactccatggatattactggtttatttgtgtgtctactgctgaggagggctccctcagagccctgtggcagttttcccaaagagggtggggacagaggaggccacccctccatgcccagcccagccagtcctcttccttgcactgctctgcagcccagcgctcagcccaggagctgccccaggtggaggcctacagccccagtgcctgctctgtgagaggaggcgaggaactggtactgactggctccaacttcctgccagactccaaggtggtgttcattgagaggggtcctgatgggaagctgcaatgggaggaggaggccacagtgaaccgactgcagagcaacgaggtgacgctgaccctgactgtccccgagtacagcaacaagagggtttcccggccagtccaggtctacttttatgtctccaatgggcggaggaaacgcagtcctacccagagtttcaggtttctgcctgtgatctgcaaagaggagcccctaccggactcatctctgcggggtttcccttcagcatcggcaaccccctttggcactgacatggacttctcaccacccaggcccccctacccctcctatccccatgaagaccctgcttgcgaaactccttacctatcagaaggcttcggctatggcatgccccctctgtacccccagacggggcccccaccatcctacagaccgggcctgcggatgttccctgagactaggggtaccacaggttgtgcccaaccacctgcagtttccttccttccccgccccttccctagtgacccgtatggagggcggggctcctctttctccctggggctgccattctctccgccagccccctttcggccgcctcctcttcctgcatccccaccgcttgaaggccccttcccttcccagagtgatgtgcatcccctacctgctgagggatacaataaggtagggccaggctatggccctggggagggggctccggagcaggagaaatccaggggtggctacagcagcggcttccgagacagtgtccctatccagggtatcacgctggaggaagtgagtgagatcattggccgagacctgagtggcttccctgcacctcctggagaagagcctcctgcctgaaccacgtgaactgtcatcacctggcaaccccagccccagcctcagccctgccccctttccctccttcctggagtggtggctacagaagcttggggccaaccctggctcctctttccccagcttctgtctgtctcactgtcttccctcccctcccccagctgaggtgtggccctcaggcctggtgctgccttggagggctgggggaaggagtgtgtggaggagggaggagggtgaagactgaggctaggtgccagaatggactggagtgaaggcgtgtctagagtgtgggctggctg

SEQ ID NO: 160455 - DNA, 2235 bp, Homo sapiens
  Payload ID: 11369
  Gene Symbol: NFATC4
  Gene Name: nuclear factor of activated T-cells, cytoplasmic, calcineurin-dependent 4
  Uniprot ID: Q14934
  ENST ID: ENST00000555393
  CDS Start-End: 608-1177
ctgtttaaccctctctctgctctgggagcggccccttacatggtgtatgtgactccatggatattactggtttatttgtgtgtctactgctgaggagggctccctcagagccctgtggcagttttcccaaagagggtggggacagaggaggccacccctccatgcccagcccagccagtcctcttccttgcactgctctgcagcccagcgctcagcccaggagctgccccaggtggaggcctacagccccagtgcctgctctgtgagaggaggcgaggaactggtactgactggctccaacttcctgccagactccaaggtggtgttcattgagaggggtcctgatgggaagctgcaatgggaggaggaggccacagtgaaccgactgcagagcaacgaggtgacgctgaccctgactgtccccgagtacagcaacaagagggtttcccggccagtccaggtctacttttatgtctccaatgggcggaggaaacgcagtcctacccagagtttcaggtttctgcctgtgatctgcaaagaggagcccctaccggactcatctctgcggggtttcccttcagcatcggcaaccccctttggcactgacatggacttctcaccacccaggcccccctacccctcctatccccatgaagaccctgcttgcgaaactccttacctatcagaaggcttcggctatggcatgccccctctgtacccccagacggggcccccaccatcctacagaccgggcctgcggatgttccctgagactaggggtaccacaggttgtgcccaaccacctgcagtttccttccttccccgccccttccctagtgacccgtatggagggcggggctcctctttctccctggggctgccattctctccgccagccccctttcggccgcctcctcttcctgcatccccaccgcttgaaggccccttcccttcccagagtgatgtgcatcccctacctgctgagggatacaataaggtagggccaggctatggccctggggagggggctccggagcaggagaaatccaggggtggctacagcagcggcttccgagacagtgtccctatccagggtatcacgctggaggaaggtgggtgtgggactgggggctgtgagtgtgagtgtgtgcaagagattgctctgcatgtttgctgagggctggagctgggcttttcagagatcgggcatccctggtctctcagggccagttggaggttcccaggaggcatgttcttgatgcctgtggctgcctgaatccaattaactgaattctgaagagtgcatggggtaactgtctcagcctttctcctgtctctgcctctgtcctctgctccaaatcataaaatctcagagctagaagcactttcaagatcattccatccagcgcattcaatttgcaagtttaggcgttgagttccagagagggatggtagcttgctgaggtcccagtcaagcacacttgccattgcctcagctttcccctaaacacggtgtctgtggtcagggttggtgaggaggagctttcctgttttgcctctccttcttcccattggctacacccatctctggccctgctgataccgattcccctgacatttcaggctaagccagcaggaaagggctaggacgggtgcctgggagcccacatggagggagttgggcaagatttgattcggagcaggtgtcaagacgtgttggggaaactgaggcccagtggaatagaagccagtagaggaggaatctagaggcctcctagattaagacctgcctggaatggattgggggtgggtctttggaaaaggaggggacccacctctagcccagtctctcaactgcccctcctttacagtgagtgagatcattggccgagacctgagtggcttccctgcacctcctggagaagagcctcctgcctgaaccacgtgaactgtcatcacctggcaaccccagccccagcctcagccctgccccctttccctccttcctggagtggtggctacagaagcttggggccaaccctggctcctctttccccagcttctgtctgtctcactgtcttccctcccctcccccagctgaggtgtggccctcaggcctggtgctgccttggagggctgggggaaggagtgtgtggaggagggaggagggtgaagactgaggctaggtgccagaatggactggagtgaaggcgtgtctagagtgtgggctggctg

SEQ ID NO: 160456 - DNA, 559 bp, Homo sapiens
  Payload ID: 11369
  Gene Symbol: NFATC4
  Gene Name: nuclear factor of activated T-cells, cytoplasmic, calcineurin-dependent 4
  ENST ID: ENST00000554903
  CDS Start-End: 130-559
tttcccatctcatccctggaggaggggctggagcatccccggcagccaatcagggacaggctgggggggggaccgctttgaagaagtttgggggaaaaaagccgggacctgggggctcctgccggatccatgggggcggccagctgcgaggatgaggagctggaatttaagctggtgttcggggaggaaaaggaggcccccccgctgggcgcggggggattgggggaagaactggactcagaggatgccccgccatgctgccgtctggccttgggagagccccctccctatggcgctgcacctatcggtattccccgacctccaccccctcggcctggcatgcattcgccaccgccgcgaccagccccctcacctggcacctgggagagccagcccgccaggtcggtgaggctgggaggaccaggagggggtgctgggggtgctgggggtggccgtgttctcgagtgtcccagcatccgcatcacctccatctctcccacgccggagccgccagcagcgctggaggacaaccctgatgcctggggggacggctctccta

SEQ ID NO: 160457 - DNA, 573 bp, Homo sapiens
  Payload ID: 11369
  Gene Symbol: NFATC4
  Gene Name: nuclear factor of activated T-cells, cytoplasmic, calcineurin-dependent 4
  ENST ID: ENST00000554779
  CDS Start-End: 156-573
ataataacgagggggcttctggagggaggcggcagcgacggaggagggggcttctcagagaaagggagggagggagccacccgggtgaagatacagcagcctcctgaactcccccctcccacccaggccgggacctgggggctcctgccggatccatgggggcggccagctgcgaggatgaggagctggaatttaagctggtgttcggggaggaaaaggaggcccccccgctgggcgcggggggattgggggaagaactggactcagaggatgccccgccatgctgccgtctggccttgggagagccccctccctatggcgctgcacctatcggtattccccgacctccaccccctcggcctggcatgcattcgccaccgccgcgaccagccccctcacctggcacctgggagagccagcccgccaggacctctgccctacccccactggactggcctctgcccagccaatatgagcagctggagctgaggatcgaggtacagcctagagcccaccaccgggcccactatgagacagaaggcagccgtggagctgtcaaagctgcccctggcg

SEQ ID NO: 160458 - DNA, 2893 bp, Homo sapiens
  Payload ID: 11369
  Gene Symbol: NFATC4
  Gene Name: nuclear factor of activated T-cells, cytoplasmic, calcineurin-dependent 4
  Uniprot ID: Q14934
  ENST ID: ENST00000554591
  CDS Start-End: 117-2690
aaccgtttagttgctgggatggggcggcgttgggggtgcggccctgaaccggagggatttagagactggagacgcggcctctaagagaggttgaaactgtgtgtgtgtgggagaaaatgataaccaccctcccatctctcctacccgccagcctcgccagtatctcccaccgagtcacgaatctcccatctaactccctctcacacaacccaggcctctccaagcctgactttcccggaaactccagtccaggtcttccttcctcctccagcccaggccgggacctgggggctcctgccggatccatgggggcggccagctgcgaggatgaggagctggaatttaagctggtgttcggggaggaaaaggaggcccccccgctgggcgcggggggattgggggaagaactggactcagaggatgccccgccatgctgccgtctggccttgggagagccccctccctatggcgctgcacctatcggtattccccgacctccaccccctcggcctggcatgcattcgccaccgccgcgaccagccccctcacctggcacctgggagagccagcccgccaggtcggtgaggctgggaggaccaggagggggtgctgggggtgctgggggtggccgtgttctcgagtgtcccagcatccgcatcacctccatctctcccacgccggagccgccagcagcgctggaggacaaccctgatgcctggggggacggctctcctagagattaccccccaccagaaggctttgggggctacagagaagcagggggccagggtgggggggccttcttcagcccaagccctggcagcagcagcctgtcctcgtggagcttcttctccgatgcctctgacgaggcagccctgtatgcagcctgcgacgaggtggagtctgagctaaatgaggcggcctcccgctttggcctgggctccccgctgccctcgccccgggcctcccctcggccatggacccccgaagatccctggagcctgtatggtccaagccccggaggccgagggccagaggatagctggctactcctcagtgctcctgggcccaccccagcctccccgcggcctgcctctccatgtggcaagcggcgctattccagctcgggaaccccatcttcagcctccccagctctgtcccgccgtggcagcctgggggaagaggggtctgagccacctccaccacccccattgcctctggcccgggacccgggctcccctggtccctttgactatgtgggggccccaccagctgagagcatccctcagaagacacggcggacttccagcgagcaggcagtggctctgcctcggtctgaggagcctgcctcatgcaatgggaagctgcccttgggagcagaggagtctgtggctcctccaggaggttcccggaaggaggtggctggcatggactacctggcagtgccctccccactcgcttggtccaaggcccggattgggggacacagccctatcttcaggacctctgccctacccccactggactggcctctgcccagccaatatgagcagctggagctgaggatcgaggtacagcctagagcccaccaccgggcccactatgagacagaaggcagccgtggagctgtcaaagctgcccctggcggtcaccccgtagtcaagctcctaggctacagtgagaagccactgaccctacagatgttcatcggcactgcagatgaaaggaacctgcggcctcatgccttctatcaggtgcaccgtatcacaggcaagatggtggccacggccagctatgaagccgtagtcagtggcaccaaggtgttggagatgactctgctgcctgagaacaacatggcggccaacattgactgcgcgggaatcctgaagcttcggaattcagacattgagcttcggaagggtgagacggacatcgggcgcaaaaacacacgtgtacggctggtgttccgggtacacgtgccccagggcggcgggaaggtcgtctcagtacaggcagcatcggtgcccatcgagtgctcccagcgctcagcccaggagctgccccaggtggaggcctacagccccagtgcctgctctgtgagaggaggcgaggaactggtactgactggctccaacttcctgccagactccaaggtggtgttcattgagaggggtcctgatgggaagctgcaatgggaggaggaggccacagtgaaccgactgcagagcaacgaggtgacgctgaccctgactgtccccgagtacagcaacaagagggtttcccggccagtccaggtctacttttatgtctccaatgggcggaggaaacgcagtcctacccagagtttcaggtttctgcctgtgatctgcaaagaggagcccctaccggactcatctctgcggggtttcccttcagcatcggcaaccccctttggcactgacatggacttctcaccacccaggcccccctacccctcctatccccatgaagaccctgcttgcgaaactccttacctatcagaaggcttcggctatggcatgccccctctgtacccccagacggggcccccaccatcctacagaccgggcctgcggatgttccctgagactaggggtaccacagtgagtgagatcattggccgagacctgagtggcttccctgcacctcctggagaagagcctcctgcctgaaccacgtgaactgtcatcacctggcaaccccagccccagcctcagccctgccccctttccctccttcctggagtggtggctacagaagcttggggccaaccctggctcctctttccccagcttctgtctgtctcactgtcttccctcccctcccccagctgaggtgtggccctcaggcctggtgctgccttggagggctgggg

SEQ ID NO: 160459 - DNA, 2924 bp, Homo sapiens
  Payload ID: 11369
  Gene Symbol: NFATC4
  Gene Name: nuclear factor of activated T-cells, cytoplasmic, calcineurin-dependent 4
  Uniprot ID: Q14934
  ENST ID: ENST00000556279
  CDS Start-End: 120-2924
atctacgcccatcaagggctgtgggcctagggacagttctcaaagcctctttggctcggactgctcccagaggcatccaggctggctaagcgttcttcatctttgggggtcctggaggaatggctgatggaggcgctgattcggcagcgcaaagacttccagaaggcccgggcagagtagccccaggccgggacctgggggctcctgccggatccatgggggcggccagctgcgaggatgaggagctggaatttaagctggtgttcggggaggaaaaggaggcccccccgctgggcgcggggggattgggggaagaactggactcagaggatgccccgccatgctgccgtctggccttgggagagccccctccctatggcgctgcacctatcggtattccccgacctccaccccctcggcctggcatgcattcgccaccgccgcgaccagccccctcacctggcacctgggagagccagcccgccaggtcggtgaggctgggaggaccaggagggggtgctgggggtgctgggggtggccgtgttctcgagtgtcccagcatccgcatcacctccatctctcccacgccggagccgccagcagcgctggaggacaaccctgatgcctggggggacggctctcctagagattaccccccaccagaaggctttgggggctacagagaagcagggggccagggtgggggggccttcttcagcccaagccctggcagcagcagcctgtcctcgtggagcttcttctccgatgcctctgacgaggcagccctgtatgcagcctgcgacgaggtggagtctgagctaaatgaggcggcctcccgctttggcctgggctccccgctgccctcgccccgggcctcccctcggccatggacccccgaagatccctggagcctgtatggtccaagccccggaggccgagggccagaggatagctggctactcctcagtgctcctgggcccaccccagcctccccgcggcctgcctctccatgtggcaagcggcgctattccagctcgggaaccccatcttcagcctccccagctctgtcccgccgtggcagcctgggggaagaggggtctgagccacctccaccacccccattgcctctggcccgggacccgggctcccctggtccctttgactatgtgggggccccaccagctgagagcatccctcagaagacacggcggacttccagcgagcaggcagtggctctgcctcggtctgaggagcctgcctcatgcaatgggaagctgcccttgggagcagaggagtctgtggctcctccaggaggttcccggaaggaggtggctggcatggactacctggcagtgccctccccactcgcttggtccaaggcccggattgggggacacagccctatcttcaggacctctgccctacccccactggactggcctctgcccagccaatatgagcagctggagctgaggatcgaggtacagcctagagcccaccaccgggcccactatgagacagaaggcagccgtggagctgtcaaagctgcccctggcggtcaccccgtagtcaagctcctaggctacagtgagaagccactgaccctacagatgttcatcggcactgcagatgaaaggaacctgcggcctcatgccttctatcaggtgcaccgtatcacaggcaagatggtggccacggccagctatgaagccgtagtcagtggcaccaaggtgttggagatgactctgctgcctgagaacaacatggcggccaacattgactgcgcgggaatcctgaagcttcggaattcagacattgagcttcggaagggtgagacggacatcgggcgcaaaaacacacgtgtacggctggtgttccgggtacacgtgccccagggcggcgggaaggtcgtctcagtacaggcagcatcggtgcccatcgagtgctcccagcgctcagcccaggagctgccccaggtggaggcctacagccccagtgcctgctctgtgagaggaggcgaggaactggtactgactggctccaacttcctgccagactccaaggtggtgttcattgagaggggtcctgatgggaagctgcaatgggaggaggaggccacagtgaaccgactgcagagcaacgaggtgacgctgaccctgactgtccccgagtacagcaacaagagggtttcccggccagtccaggtctacttttatgtctccaatgggcggaggaaacgcagtcctacccagagtttcaggtttctgcctgtgatctgcaaagaggagcccctaccggactcatctctgcggggtttcccttcagcatcggcaaccccctttggcactgacatggacttctcaccacccaggcccccctacccctcctatccccatgaagaccctgcttgcgaaactccttacctatcagaaggcttcggctatggcatgccccctctgtacccccagacggggcccccaccatcctacagaccgggcctgcggatgttccctgagactaggggtaccacaggttgtgcccaaccacctgcagtttccttccttccccgccccttccctagtgacccgtatggagggcggggctcctctttctccctggggctgccattctctccgccagccccctttcggccgcctcctcttcctgcatccccaccgcttgaaggccccttcccttcccagagtgatgtgcatcccctacctgctgagggatacaataaggtagggccaggctatggccctggggagggggctccggagcaggagaaatccaggggtggctacagcagcggcttccgagacagtgtccctatccagggtatcacgctggaggaagtgagtgagatcattggccgagacctgagtggcttccctgcacctcctggagaagagcctcctgcctga

SEQ ID NO: 160460 - DNA, 2707 bp, Homo sapiens
  Payload ID: 11369
  Gene Symbol: NFATC4
  Gene Name: nuclear factor of activated T-cells, cytoplasmic, calcineurin-dependent 4
  Uniprot ID: Q14934
  ENST ID: ENST00000553879
  CDS Start-End: 186-2684
acggttgcgatggcaactggggctcctgccagcgccgtttgggggtttgggaaccgctgctaattgggttcatgtaactggactcagaggatgccccgccatgctgccgtctggccttgggagagccccctccctatggcgctgcacctatcggtattccccgacctccaccccctcggcctggcatgcattcgccaccgccgcgaccagccccctcacctggcacctgggagagccagcccgccaggtcggtgaggctgggaggaccaggagggggtgctgggggtgctgggggtggccgtgttctcgagtgtcccagcatccgcatcacctccatctctcccacgccggagccgccagcagcgctggaggacaaccctgatgcctggggggacggctctcctagagattaccccccaccagaaggctttgggggctacagagaagcagggggccagggtgggggggccttcttcagcccaagccctggcagcagcagcctgtcctcgtggagcttcttctccgatgcctctgacgaggcagccctgtatgcagcctgcgacgaggtggagtctgagctaaatgaggcggcctcccgctttggcctgggctccccgctgccctcgccccgggcctcccctcggccatggacccccgaagatccctggagcctgtatggtccaagccccggaggccgagggccagaggatagctggctactcctcagtgctcctgggcccaccccagcctccccgcggcctgcctctccatgtggcaagcggcgctattccagctcgggaaccccatcttcagcctccccagctctgtcccgccgtggcagcctgggggaagaggggtctgagccacctccaccacccccattgcctctggcccgggacccgggctcccctggtccctttgactatgtgggggccccaccagctgagagcatccctcagaagacacggcggacttccagcgagcaggcagtggctctgcctcggtctgaggagcctgcctcatgcaatgggaagctgcccttgggagcagaggagtctgtggctcctccaggaggttcccggaaggaggtggctggcatggactacctggcagtgccctccccactcgcttggtccaaggcccggattgggggacacagccctatcttcaggacctctgccctacccccactggactggcctctgcccagccaatatgagcagctggagctgaggatcgaggtacagcctagagcccaccaccgggcccactatgagacagaaggcagccgtggagctgtcaaagctgcccctggcggtcaccccgtagtcaagctcctaggctacagtgagaagccactgaccctacagatgttcatcggcactgcagatgaaaggaacctgcggcctcatgccttctatcaggtgcaccgtatcacaggcaagatggtggccacggccagctatgaagccgtagtcagtggcaccaaggtgttggagatgactctgctgcctgagaacaacatggcggccaacattgactgcgcgggaatcctgaagcttcggaattcagacattgagcttcggaagggtgagacggacatcgggcgcaaaaacacacgtgtacggctggtgttccgggtacacgtgccccagggcggcgggaaggtcgtctcagtacaggcagcatcggtgcccatcgagtgctcccagcgctcagcccaggagctgccccaggtggaggcctacagccccagtgcctgctctgtgagaggaggcgaggaactggtactgactggctccaacttcctgccagactccaaggtggtgttcattgagaggggtcctgatgggaagctgcaatgggaggaggaggccacagtgaaccgactgcagagcaacgaggtgacgctgaccctgactgtccccgagtacagcaacaagagggtttcccggccagtccaggtctacttttatgtctccaatgggcggaggaaacgcagtcctacccagagtttcaggtttctgcctgtgatctgcaaagaggagcccctaccggactcatctctgcggggtttcccttcagcatcggcaaccccctttggcactgacatggacttctcaccacccaggcccccctacccctcctatccccatgaagaccctgcttgcgaaactccttacctatcagaaggcttcggctatggcatgccccctctgtacccccagacggggcccccaccatcctacagaccgggcctgcggatgttccctgagactaggggtaccacaggttgtgcccaaccacctgcagtttccttccttccccgccccttccctagtgacccgtatggagggcggggctcctctttctccctggggctgccattctctccgccagccccctttcggccgcctcctcttcctgcatccccaccgcttgaaggccccttcccttcccagagtgatgtgcatcccctacctgctgagggatacaataaggtagggccaggctatggccctggggagggggctccggagcaggagaaatccaggggtggctacagcagcggcttccgagacagtgtccctatccagggtatcacgctggaggaagtgagtgagatcattggccgagacctgagtggcttccctgcacctcctggagaagagcctcctgcctgaaccacgtgaactgtcatcacctg

SEQ ID NO: 160461 - DNA, 904 bp, Homo sapiens
  Payload ID: 11369
  Gene Symbol: NFATC4
  Gene Name: nuclear factor of activated T-cells, cytoplasmic, calcineurin-dependent 4
  ENST ID: ENST00000557674
  CDS Start-End: 315-904
cctccgcccctagatggcgaggagagagggaggagccacctcccctcgtcaccacagccctgacgcccccctcccctctggccacggttgcgatggcaactggggctcctgccagcgccgtttgggggtttgggaaccgctgctaattgggttcatgtgtgagtcgcccccagtccagcccagtgcctcaagaaacacgcctccaggcccagccccagctccagcccctctggacccacctctctcaccttaagacccactggatcgggtaccctcggtcctaggatccaggggccagtgggcaaaggcctggcatgcctgcttcaatctcctccatcttcccagaactggactcagaggatgccccgccatgctgccgtctggccttgggagagccccctccctatggcgctgcacctatcggtattccccgacctccaccccctcggcctggcatgcattcgccaccgccgcgaccagccccctcacctggcacctgggagagccagcccgccaggtcggtgaggctgggaggaccaggagggggtgctgggggtgctgggggtggccgtgttctcgagtgtcccagcatccgcatcacctccatctctcccacgccggagccgccagcagcgctggaggacaaccctgatgcctggggggacggctctcctagagattaccccccaccagaaggctttgggggctacagagaagcagggggccagggtgggggggccttcttcagcccaagccctggcagcagcagcctgtcctcgtggagcttcttctccgatgcctctgacgaggcagccctgtatgcagcctgcgacgaggtggagtctgagctaaatgaggcggcctcccgctttggcctgggctccccgctgccctcgccccgggc

SEQ ID NO: 160462 - DNA, 4085 bp, Homo sapiens
  Payload ID: 11370
  Gene Symbol: NFKB1
  Gene Name: nuclear factor of kappa light polypeptide gene enhancer in B-cells 1
  Uniprot ID: P19838
  ENST ID: ENST00000226574
  CDS Start-End: 468-3377
gtgagagagtgagcgagacagaaagagagagaagtgcaccagcgagccggggcaggaagaggaggtttcgccaccggagcggcccggcgacgcgctgacagcttcccctgcccttcccgtcggtcgggccgccagccgccgcagccctcggcctgcacgcagccaccggccccgctcccggagcccagcgccgccgaggccgcagccgcccggccagtaaggcggcgccgccgcccggccaccgcgcgccctgcgcttccctccgcccgcgctgcggccatggcgcggcgctgactggcctggcccggccccgccgcgctcccgctcgccccgacccgcactcgggcccgcccgggctccggcctgccgccgcctcttccttctccagccggcaggcccgcgccgcttaggagggagagcccacccgcgccaggaggccgaacgcggactcgccacccggcttcagaatggcagaagatgatccatatttgggaaggcctgaacaaatgtttcatttggatccttctttgactcatacaatatttaatccagaagtatttcaaccacagatggcactgccaacagcagatggcccataccttcaaatattagagcaacctaaacagagaggatttcgtttccgttatgtatgtgaaggcccatcccatggtggactacctggtgcctctagtgaaaagaacaagaagtcttaccctcaggtcaaaatctgcaactatgtgggaccagcaaaggttattgttcagttggtcacaaatggaaaaaatatccacctgcatgcccacagcctggtgggaaaacactgtgaggatgggatctgcactgtaactgctggacccaaggacatggtggtcggcttcgcaaacctgggtatacttcatgtgacaaagaaaaaagtatttgaaacactggaagcacgaatgacagaggcgtgtataaggggctataatcctggactcttggtgcaccctgaccttgcctatttgcaagcagaaggtggaggggaccggcagctgggagatcgggaaaaagagctaatccgccaagcagctctgcagcagaccaaggagatggacctcagcgtggtgcggctcatgtttacagcttttcttccggatagcactggcagcttcacaaggcgcctggaacccgtggtatcagacgccatctatgacagtaaagcccccaatgcatccaacttgaaaattgtaagaatggacaggacagctggatgtgtgactggaggggaggaaatttatcttctttgtgacaaagttcagaaagatgacatccagattcgattttatgaagaggaagaaaatggtggagtctgggaaggatttggagatttttcccccacagatgttcatagacaatttgccattgtcttcaaaactccaaagtataaagatattaatattacaaaaccagcctctgtgtttgtccagcttcggaggaaatctgacttggaaactagtgaaccaaaacctttcctctactatcctgaaatcaaagataaagaagaagtgcagaggaaacgtcagaagctcatgcccaatttttcggatagtttcggcggtggtagtggtgctggagctggaggcggaggcatgtttggtagtggcggtggaggagggggcactggaagtacaggtccagggtatagcttcccacactatggatttcctacttatggtgggattactttccatcctggaactactaaatctaatgctgggatgaagcatggaaccatggacactgaatctaaaaaggaccctgaaggttgtgacaaaagtgatgacaaaaacactgtaaacctctttgggaaagttattgaaaccacagagcaagatcaggagcccagcgaggccaccgttgggaatggtgaggtcactctaacgtatgcaacaggaacaaaagaagagagtgctggagttcaggataacctctttctagagaaggctatgcagcttgcaaagaggcatgccaatgcccttttcgactacgcggtgacaggagacgtgaagatgctgctggccgtccagcgccatctcactgctgtgcaggatgagaatggggacagtgtcttacacttagcaatcatccaccttcattctcaacttgtgagggatctactagaagtcacatctggtttgatttctgatgacattatcaacatgagaaatgatctgtaccagacgcccttgcacttggcagtgatcactaagcaggaagatgtggtggaggatttgctgagggctggggccgacctgagccttctggaccgcttgggtaactctgttttgcacctagctgccaaagaaggacatgataaagttctcagtatcttactcaagcacaaaaaggcagcactacttcttgaccaccccaacggggacggtctgaatgccattcatctagccatgatgagcaatagcctgccatgtttgctgctgctggtggccgctggggctgacgtcaatgctcaggagcagaagtccgggcgcacagcactgcacctggctgtggagcacgacaacatctcattggcaggctgcctgctcctggagggtgatgcccatgtggacagtactacctacgatggaaccacacccctgcatatagcagctgggagagggtccaccaggctggcagctcttctcaaagcagcaggagcagatcccctggtggagaactttgagcctctctatgacctggatgactcttgggaaaatgcaggagaggatgaaggagttgtgcctggaaccacgcctctagatatggccaccagctggcaggtatttgacatattaaatgggaaaccatatgagccagagtttacatctgatgatttactagcacaaggagacatgaaacagctggctgaagatgtgaagctgcagctgtataagttactagaaattcctgatccagacaaaaactgggctactctggcgcagaaattaggtctggggatacttaataatgccttccggctgagtcctgctccttccaaaacacttatggacaactatgaggtctctgggggtacagtcagagagctggtggaggccctgagacaaatgggctacaccgaagcaattgaagtgatccaggcagcctccagcccagtgaagaccacctctcaggcccactcgctgcctctctcgcctgcctccacaaggcagcaaatagacgagctccgagacagtgacagtgtctgcgacagcggcgtggagacatccttccgcaaactcagctttaccgagtctctgaccagtggtgcctcactgctaactctcaacaaaatgccccatgattatgggcaggaaggacctctagaaggcaaaatttagcctgctgacaatttcccacaccgtgtaaaccaaagccctaaaattccactgcgttgtccacaagacagaagctgaagtgcatccaaaggtgctcagagagccggcccgcctgaatcattctcgatttaactcgagaccttttcaacttggcttcctttcttggttcataaatgaattttagtttggttcacttacagatagtatctagcaatcacaacactggctgagcggatgcatctggggatgaggttgcttactaagctttgccagctgctgctggatcacagctgctttctgttgtcattgctgttgtccctctgctacgttcctattgtcattaaaggtatcacggtcgccacctggcattccttctgaccacagcatcattttgcattcaaattaagggttaagaaaagagatattttaaaatgagagtcacttgatgtgccattttaaaaaaaaaggcatattgctttttctaatgtggttatttctctgatttgcaaaaaaaaaaaaaaaaaaaatacttgtcaatatttaaacatggttacaatcattgctgaaaatggtattttcccccttttctgcattttgctattgtaaatatgttttttagatcaaatactttaaaggaaaaaatgttggatttataaatgctattttttattttacttttataataaaaggaaaagcaaattgatgacctca

SEQ ID NO: 160463 - DNA, 3693 bp, Homo sapiens
  Payload ID: 11370
  Gene Symbol: NFKB1
  Gene Name: nuclear factor of kappa light polypeptide gene enhancer in B-cells 1
  Uniprot ID: P19838
  ENST ID: ENST00000394820
  CDS Start-End: 466-3372
gagagagtgagcgagacagaaagagagagaagtgcaccagcgagccggggcaggaagaggaggtttcgccaccggagcggcccggcgacgcgctgacagcttcccctgcccttcccgtcggtcgggccgccagccgccgcagccctcggcctgcacgcagccaccggccccgctcccggagcccagcgccgccgaggccgcagccgcccggccagtaaggcggcgccgccgcccggccaccgcgcgccctgcgcttccctccgcccgcgctgcggccatggcgcggcgctgactggcctggcccggccccgccgcgctcccgctcgccccgacccgcactcgggcccgcccgggctccggcctgccgccgcctcttccttctccagccggcaggcccgcgccgcttaggagggagagcccacccgcgccaggaggccgaacgcggactcgccacccggcttcagaatggcagaagatgatccatatttgggaaggcctgaacaaatgtttcatttggatccttctttgactcatacaatatttaatccagaagtatttcaaccacagatggcactgccaacagatggcccataccttcaaatattagagcaacctaaacagagaggatttcgtttccgttatgtatgtgaaggcccatcccatggtggactacctggtgcctctagtgaaaagaacaagaagtcttaccctcaggtcaaaatctgcaactatgtgggaccagcaaaggttattgttcagttggtcacaaatggaaaaaatatccacctgcatgcccacagcctggtgggaaaacactgtgaggatgggatctgcactgtaactgctggacccaaggacatggtggtcggcttcgcaaacctgggtatacttcatgtgacaaagaaaaaagtatttgaaacactggaagcacgaatgacagaggcgtgtataaggggctataatcctggactcttggtgcaccctgaccttgcctatttgcaagcagaaggtggaggggaccggcagctgggagatcgggaaaaagagctaatccgccaagcagctctgcagcagaccaaggagatggacctcagcgtggtgcggctcatgtttacagcttttcttccggatagcactggcagcttcacaaggcgcctggaacccgtggtatcagacgccatctatgacagtaaagcccccaatgcatccaacttgaaaattgtaagaatggacaggacagctggatgtgtgactggaggggaggaaatttatcttctttgtgacaaagttcagaaagatgacatccagattcgattttatgaagaggaagaaaatggtggagtctgggaaggatttggagatttttcccccacagatgttcatagacaatttgccattgtcttcaaaactccaaagtataaagatattaatattacaaaaccagcctctgtgtttgtccagcttcggaggaaatctgacttggaaactagtgaaccaaaacctttcctctactatcctgaaatcaaagataaagaagaagtgcagaggaaacgtcagaagctcatgcccaatttttcggatagtttcggcggtggtagtggtgctggagctggaggcggaggcatgtttggtagtggcggtggaggagggggcactggaagtacaggtccagggtatagcttcccacactatggatttcctacttatggtgggattactttccatcctggaactactaaatctaatgctgggatgaagcatggaaccatggacactgaatctaaaaaggaccctgaaggttgtgacaaaagtgatgacaaaaacactgtaaacctctttgggaaagttattgaaaccacagagcaagatcaggagcccagcgaggccaccgttgggaatggtgaggtcactctaacgtatgcaacaggaacaaaagaagagagtgctggagttcaggataacctctttctagagaaggctatgcagcttgcaaagaggcatgccaatgcccttttcgactacgcggtgacaggagacgtgaagatgctgctggccgtccagcgccatctcactgctgtgcaggatgagaatggggacagtgtcttacacttagcaatcatccaccttcattctcaacttgtgagggatctactagaagtcacatctggtttgatttctgatgacattatcaacatgagaaatgatctgtaccagacgcccttgcacttggcagtgatcactaagcaggaagatgtggtggaggatttgctgagggctggggccgacctgagccttctggaccgcttgggtaactctgttttgcacctagctgccaaagaaggacatgataaagttctcagtatcttactcaagcacaaaaaggcagcactacttcttgaccaccccaacggggacggtctgaatgccattcatctagccatgatgagcaatagcctgccatgtttgctgctgctggtggccgctggggctgacgtcaatgctcaggagcagaagtccgggcgcacagcactgcacctggctgtggagcacgacaacatctcattggcaggctgcctgctcctggagggtgatgcccatgtggacagtactacctacgatggaaccacacccctgcatatagcagctgggagagggtccaccaggctggcagctcttctcaaagcagcaggagcagatcccctggtggagaactttgagcctctctatgacctggatgactcttgggaaaatgcaggagaggatgaaggagttgtgcctggaaccacgcctctagatatggccaccagctggcaggtatttgacatattaaatgggaaaccatatgagccagagtttacatctgatgatttactagcacaaggagacatgaaacagctggctgaagatgtgaagctgcagctgtataagttactagaaattcctgatccagacaaaaactgggctactctggcgcagaaattaggtctggggatacttaataatgccttccggctgagtcctgctccttccaaaacacttatggacaactatgaggtctctgggggtacagtcagagagctggtggaggccctgagacaaatgggctacaccgaagcaattgaagtgatccaggcagcctccagcccagtgaagaccacctctcaggcccactcgctgcctctctcgcctgcctccacaaggcagcaaatagacgagctccgagacagtgacagtgtctgcgacagcggcgtggagacatccttccgcaaactcagctttaccgagtctctgaccagtggtgcctcactgctaactctcaacaaaatgccccatgattatgggcaggaaggacctctagaaggcaaaatttagcctgctgacaatttcccacaccgtgtaaaccaaagccctaaaattccactgcgttgtccacaagacagaagctgaagtgcatccaaaggtgctcagagagccggcccgcctgaatcattctcgatttaactcgagaccttttcaacttggcttcctttcttggttcataaatgaattttagtttggttcacttacagatagtatctagcaatcacaacactggctgagcggatgcatctggggatgaggttgcttactaagctttgccagctgctgctggatcacagctgctttctgttgtcattgctgttgtccctctgc

SEQ ID NO: 160464 - DNA, 609 bp, Homo sapiens
  Payload ID: 11370
  Gene Symbol: NFKB1
  Gene Name: nuclear factor of kappa light polypeptide gene enhancer in B-cells 1
  ENST ID: ENST00000511926
  CDS Start-End: 388-609
ggccgccagccgccgcagccctcggcctgcacgcagccaccggccccgctcccggagcccagcgccgccgaggccgcagccgcccggccagtaaggcggcgccgccgcccggccaccgcgcgccctgcgcttccctccgcccgcgctgcggccatggcgcggcgctgactggcctggcccggccccgccgcgctcccgctcgccccgacccgcactcgggcccgcccgggctccggcctgccgccgcctcttccttctccagccggcaggcccgcgccgcttaggagggagagcccacccgcgccaggaggccgaacgcggactcgccacccggaaggaacacaacgtcctacatcaagaaaaaagacagaagcatatcttggagatatgaaaagaaccaccagcttcagaatggcagaagatgatccatatttgggaaggcctgaacaaatgtttcatttggatccttctttgactcatacaatatttaatccagaagtatttcaaccacagatggcactgccaacagatggcccataccttcaaatattagagcaacctaaacagagaggatttcgtttccgttatgtatgtgaaggcccatcccat

SEQ ID NO: 160465 - DNA, 557 bp, Homo sapiens
  Payload ID: 11370
  Gene Symbol: NFKB1
  Gene Name: nuclear factor of kappa light polypeptide gene enhancer in B-cells 1
  ENST ID: ENST00000509165
  CDS Start-End: 124-557
ggacaaacttgaacacaaaggaacacacgttatatgtacatttaatactggaaccgaaaagctgcttgcagtgaaaagcaaaccacttctaaactctttgagactttttaaagaagcttcagaatggcagaagatgatccatatttgggaaggcctgaacaaatgtttcatttggatccttctttgactcatacaatatttaatccagaagtatttcaaccacagatggcactgccaacagcagatggcccataccttcaaatattagagcaacctaaacagagaggatttcgtttccgttatgtatgtgaaggcccatcccatggtggactacctggtgcctctagtgaaaagaacaagaagtcttaccctcaggtcaaaatctgcaactatgtgggaccagcaaaggttattgttcagttggtcacaaatggaaaaaatatccacctgcatgcccacagcctggtgggaaaacactgtgaggatgggatctgcactgtaactgctggacccaaggacatggtggtcggcttcgcaaacctgggtatacttcatgt

SEQ ID NO: 160466 - DNA, 3707 bp, Homo sapiens
  Payload ID: 11370
  Gene Symbol: NFKB1
  Gene Name: nuclear factor of kappa light polypeptide gene enhancer in B-cells 1
  Uniprot ID: P19838
  ENST ID: ENST00000505458
  CDS Start-End: 278-3184
gctaaccgctgggctagaccgtgggaggaggttgacagtagctgagaggcacatgggattagcgacagcggggaaagacacatccggacctcgcaggggctagtcggccgaagggccgcggccgcccggcggtcatttctcttcacgtccctccgcggggcgggaacgcgaaccggaggggaactcttacaaacttttaaaatccccaaccccagccccacctgggggatggtgagaaggttggagtgcgctgcggcgcggaggagagagcttcagaatggcagaagatgatccatatttgggaaggcctgaacaaatgtttcatttggatccttctttgactcatacaatatttaatccagaagtatttcaaccacagatggcactgccaacagatggcccataccttcaaatattagagcaacctaaacagagaggatttcgtttccgttatgtatgtgaaggcccatcccatggtggactacctggtgcctctagtgaaaagaacaagaagtcttaccctcaggtcaaaatctgcaactatgtgggaccagcaaaggttattgttcagttggtcacaaatggaaaaaatatccacctgcatgcccacagcctggtgggaaaacactgtgaggatgggatctgcactgtaactgctggacccaaggacatggtggtcggcttcgcaaacctgggtatacttcatgtgacaaagaaaaaagtatttgaaacactggaagcacgaatgacagaggcgtgtataaggggctataatcctggactcttggtgcaccctgaccttgcctatttgcaagcagaaggtggaggggaccggcagctgggagatcgggaaaaagagctaatccgccaagcagctctgcagcagaccaaggagatggacctcagcgtggtgcggctcatgtttacagcttttcttccggatagcactggcagcttcacaaggcgcctggaacccgtggtatcagacgccatctatgacagtaaagcccccaatgcatccaacttgaaaattgtaagaatggacaggacagctggatgtgtgactggaggggaggaaatttatcttctttgtgacaaagttcagaaagatgacatccagattcgattttatgaagaggaagaaaatggtggagtctgggaaggatttggagatttttcccccacagatgttcatagacaatttgccattgtcttcaaaactccaaagtataaagatattaatattacaaaaccagcctctgtgtttgtccagcttcggaggaaatctgacttggaaactagtgaaccaaaacctttcctctactatcctgaaatcaaagataaagaagaagtgcagaggaaacgtcagaagctcatgcccaatttttcggatagtttcggcggtggtagtggtgctggagctggaggcggaggcatgtttggtagtggcggtggaggagggggcactggaagtacaggtccagggtatagcttcccacactatggatttcctacttatggtgggattactttccatcctggaactactaaatctaatgctgggatgaagcatggaaccatggacactgaatctaaaaaggaccctgaaggttgtgacaaaagtgatgacaaaaacactgtaaacctctttgggaaagttattgaaaccacagagcaagatcaggagcccagcgaggccaccgttgggaatggtgaggtcactctaacgtatgcaacaggaacaaaagaagagagtgctggagttcaggataacctctttctagagaaggctatgcagcttgcaaagaggcatgccaatgcccttttcgactacgcggtgacaggagacgtgaagatgctgctggccgtccagcgccatctcactgctgtgcaggatgagaatggggacagtgtcttacacttagcaatcatccaccttcattctcaacttgtgagggatctactagaagtcacatctggtttgatttctgatgacattatcaacatgagaaatgatctgtaccagacgcccttgcacttggcagtgatcactaagcaggaagatgtggtggaggatttgctgagggctggggccgacctgagccttctggaccgcttgggtaactctgttttgcacctagctgccaaagaaggacatgataaagttctcagtatcttactcaagcacaaaaaggcagcactacttcttgaccaccccaacggggacggtctgaatgccattcatctagccatgatgagcaatagcctgccatgtttgctgctgctggtggccgctggggctgacgtcaatgctcaggagcagaagtccgggcgcacagcactgcacctggctgtggagcacgacaacatctcattggcaggctgcctgctcctggagggtgatgcccatgtggacagtactacctacgatggaaccacacccctgcatatagcagctgggagagggtccaccaggctggcagctcttctcaaagcagcaggagcagatcccctggtggagaactttgagcctctctatgacctggatgactcttgggaaaatgcaggagaggatgaaggagttgtgcctggaaccacgcctctagatatggccaccagctggcaggtatttgacatattaaatgggaaaccatatgagccagagtttacatctgatgatttactagcacaaggagacatgaaacagctggctgaagatgtgaagctgcagctgtataagttactagaaattcctgatccagacaaaaactgggctactctggcgcagaaattaggtctggggatacttaataatgccttccggctgagtcctgctccttccaaaacacttatggacaactatgaggtctctgggggtacagtcagagagctggtggaggccctgagacaaatgggctacaccgaagcaattgaagtgatccaggcagcctccagcccagtgaagaccacctctcaggcccactcgctgcctctctcgcctgcctccacaaggcagcaaatagacgagctccgagacagtgacagtgtctgcgacagcggcgtggagacatccttccgcaaactcagctttaccgagtctctgaccagtggtgcctcactgctaactctcaacaaaatgccccatgattatgggcaggaaggacctctagaaggcaaaatttagcctgctgacaatttcccacaccgtgtaaaccaaagccctaaaattccactgcgttgtccacaagacagaagctgaagtgcatccaaaggtgctcagagagccggcccgcctgaatcattctcgatttaactcgagaccttttcaacttggcttcctttcttggttcataaatgaattttagtttggttcacttacagatagtatctagcaatcacaacactggctgagcggatgcatctggggatgaggttgcttactaagctttgccagctgctgctggatcacagctgctttctgttgtcattgctgttgtccctctgctacgttcctattgtcattaaaggtatcacggtcgccacctggcattccttctgaccacagcatcattttgcattcaaattaagggttaagaaaagagatattttaaaatgagagtcacttgatgtgccattttaaaaaaaaaggcatattgctttttctaatgtggttatttctctgatttgcaaaaaaaaaaaaaaaaaaa

SEQ ID NO: 160467 - DNA, 751 bp, Homo sapiens
  Payload ID: 11370
  Gene Symbol: NFKB1
  Gene Name: nuclear factor of kappa light polypeptide gene enhancer in B-cells 1
  ENST ID: ENST00000508584
  CDS Start-End: 163-751
gtccctccccacttctaatcaagtttacatcttgtagccagatagatattactgaagttctgtatcttgttgctgctccgtgtctccgttttgcctacaaaatccaaattctatcgggaaaaagagctaatccgccaagcagctctgcagcagaccaaggagatggacctcagcgtggtgcggctcatgtttacagcttttcttccggatagcactggcagcttcacaaggcgcctggaacccgtggtatcagacgccatctatgacagtaaagcccccaatgcatccaacttgaaaattgtaagaatggacaggacagctggatgtgtgactggaggggaggaaatttatcttctttgtgacaaagttcagaaagatgacatccagattcgattttatgaagaggaagaaaatggtggagtctgggaaggatttggagatttttcccccacagatgttcatagacaatttgccattgtcttcaaaactccaaagtataaagatattaatattacaaaaccagcctctgtgtttgtccagcttcggaggaaatctgacttggaaactagtgaaccaaaacctttcctctactatcctgaaatcaaagataaagaagaagtgcagaggaaacgtcagaagctcatgcccaatttttcggatagtttcggcggtggtagtggtgctggagctggaggcggaggcatgtttggtagtggcggtggaggagggggcactggaagtacaggtccag

SEQ ID NO: 160468 - DNA, 965 bp, Homo sapiens
  Payload ID: 11370
  Gene Symbol: NFKB1
  Gene Name: nuclear factor of kappa light polypeptide gene enhancer in B-cells 1
  ENST ID: ENST00000507079
  CDS Start-End: 371-965
gccctcggcctgcacgcagccaccggccccgctcccggagcccagcgccgccgaggccgcagccgcccggccagtaaggcggcgccgccgcccggccaccgcgcgccctgcgcttccctccgcccgcgctgcggccatggcgcggcgctgactggcctggcccggccccgccgcgctcccgctcgccccgacccgcactcgggcccgcccgggctccggcctgccgccgcctcttccttctccagccggcaggcccgcgccgcttaggagggagagcccacccgcgccaggaggccgaacgcggactcgccacccggaaggaacacaacgtcctacatcaagaaaaaagacagaagcatatcttggagatatgaaaagaaccaccagcttcagaatggcagaagatgatccatatttgggaaggcctgaacaaatgtttcatttggatccttctttgactcatacaatatttaatccagaagtatttcaaccacagatggcactgccaacagcagatggcccataccttcaaatattagagcaacctaaacagagaggatttcgtttccgttatgtatgtgaaggcccatcccatggtggactacctggtgcctctagtgaaaagaacaagaagtcttaccctcaggtcaaaatctgcaactatgtgggaccagcaaaggttattgttcagttggtcacaaatggaaaaaatatccacctgcatgcccacagcctggtgggaaaacactgtgaggatgggatctgcactgtaactgctggacccaaggacatggtggtcggcttcgcaaacctgggtatacttcatgtgacaaagaaaaaagtatttgaaacactggaagcacgaatgacagaggcgtgtataaggggctataatcctggactcttggtgcaccctgaccttgcctatttgcaagcagaaggtggaggggaccggcagctgggag

SEQ ID NO: 160469 - DNA, 4010 bp, Homo sapiens
  Payload ID: 11370
  Gene Symbol: NFKB1
  Gene Name: nuclear factor of kappa light polypeptide gene enhancer in B-cells 1
  Uniprot ID: P19838
  ENST ID: ENST00000600343
  CDS Start-End: 1140-3506
atacccagactcaaaaccttcccatcctcactgactccccctcctcgcctgtgctgcgaggctgtggtccagccattccgtgctctctggcattccacactacattccattttcattgttccacttatagtagtcttctccctggtctctgtccctccccacttctaatcaagtttacatcttgtagccagatagatattactgaagttctgtatcttgttgctgctccgtgtctccgttttgcctacaaaatccaaattctgtaagttggctttttggatctcccaagagctggcctcaggctgcatttccaatctatttcccgttttgccccttcaggtcaaagtctactacttggtaggagcaccatgatttctcactttcctgccttggcacattctttctatttttgctctctcctcttcctggaatgcctttatccactctcttatatgaatgtgttcaaattctgccaccttttcaatattcagagcaaatacctcttctgctccaaagccctctgaactctctccttctttgaaatcccacatcacttcatttgtagctctcttgtagtacttgtctcttgaatcactaccttttatgatattatagcttaattatgactatatccatcagcgtgaaaactccagcaggagggaaggaaacagatgtccctgagtcattcagttccttcagaagttgtttttgagtacctactatgtgccaggctgtctgcttggcactgtggaatgagctcactccctgtgcccaagcagctcttggaataatttgcacacttctcaatacagctggtgcctagtagggttattcaattccattccatcacatcctgtgtgcctttaactcttactgtagagaggaaagggaaaggtgggggaaggacaggagaggagggaggcgatctgatacacggaagagagtttttactgtaatccggagaaaatgcaggtcttctttgatgcctttcatattggatgacataaatgagactgtttttaacactttattagcaatatgaagagtttcaaaagaggaaaaatgggtttttattgtaagtttacattatttgggctttataaaagcatggtcttttaaatgttcacacttccctgggcatgaatggactgtgctgtatggccctagatcgggaaaaagagctaatccgccaagcagctctgcagcagaccaaggagatggacctcagcgtggtgcggctcatgtttacagcttttcttccggatagcactggcagcttcacaaggcgcctggaacccgtggtatcagacgccatctatgacagtaaagcccccaatgcatccaacttgaaaattgtaagaatggacaggacagctggatgtgtgactggaggggaggaaatttatcttctttgtgacaaagttcagaaagatgacatccagattcgattttatgaagaggaagaaaatggtggagtctgggaaggatttggagatttttcccccacagatgttcatagacaatttgccattgtcttcaaaactccaaagtataaagatattaatattacaaaaccagcctctgtgtttgtccagcttcggaggaaatctgacttggaaactagtgaaccaaaacctttcctctactatcctgaaatcaaagataaagaagaagtgcagaggaaacgtcagaagctcatgcccaatttttcggatagtttcggcggtggtagtggtgctggagctggaggcggaggcatgtttggtagtggcggtggaggagggggcactggaagtacaggtccagggtatagcttcccacactatggatttcctacttatggtgggattactttccatcctggaactactaaatctaatgctgggatgaagcatggaaccatggacactgaatctaaaaaggaccctgaaggttgtgacaaaagtgatgacaaaaacactgtaaacctctttgggaaagttattgaaaccacagagcaagatcaggagcccagcgaggccaccgttgggaatggtgaggtcactctaacgtatgcaacaggaacaaaagaagagagtgctggagttcaggataacctctttctagagaaggctatgcagcttgcaaagaggcatgccaatgcccttttcgactacgcggtgacaggagacgtgaagatgctgctggccgtccagcgccatctcactgctgtgcaggatgagaatggggacagtgtcttacacttagcaatcatccaccttcattctcaacttgtgagggatctactagaagtcacatctggtttgatttctgatgacattatcaacatgagaaatgatctgtaccagacgcccttgcacttggcagtgatcactaagcaggaagatgtggtggaggatttgctgagggctggggccgacctgagccttctggaccgcttgggtaactctgttttgcacctagctgccaaagaaggacatgataaagttctcagtatcttactcaagcacaaaaaggcagcactacttcttgaccaccccaacggggacggtctgaatgccattcatctagccatgatgagcaatagcctgccatgtttgctgctgctggtggccgctggggctgacgtcaatgctcaggagcagaagtccgggcgcacagcactgcacctggctgtggagcacgacaacatctcattggcaggctgcctgctcctggagggtgatgcccatgtggacagtactacctacgatggaaccacacccctgcatatagcagctgggagagggtccaccaggctggcagctcttctcaaagcagcaggagcagatcccctggtggagaactttgagcctctctatgacctggatgactcttgggaaaatgcaggagaggatgaaggagttgtgcctggaaccacgcctctagatatggccaccagctggcaggtatttgacatattaaatgggaaaccatatgagccagagtttacatctgatgatttactagcacaaggagacatgaaacagctggctgaagatgtgaagctgcagctgtataagttactagaaattcctgatccagacaaaaactgggctactctggcgcagaaattaggtctggggatacttaataatgccttccggctgagtcctgctccttccaaaacacttatggacaactatgaggtctctgggggtacagtcagagagctggtggaggccctgagacaaatgggctacaccgaagcaattgaagtgatccaggcagcctccagcccagtgaagaccacctctcaggcccactcgctgcctctctcgcctgcctccacaaggcagcaaatagacgagctccgagacagtgacagtgtctgcgacagcggcgtggagacatccttccgcaaactcagctttaccgagtctctgaccagtggtgcctcactgctaactctcaacaaaatgccccatgattatgggcaggaaggacctctagaaggcaaaatttagcctgctgacaatttcccacaccgtgtaaaccaaagccctaaaattccactgcgttgtccacaagacagaagctgaagtgcatccaaaggtgctcagagagccggcccgcctgaatcattctcgatttaactcgagaccttttcaacttggcttcctttcttggttcataaatgaattttagtttggttcacttacagatagtatctagcaatcacaacactggctgagcggatgcatctggggatgaggttgcttactaagctttgccagctgctgctggatcacagctgctttctgttgtcattgctgttgtccctctgctacgttcctattgtcattaaaggtatcacggtcgccacctggcattccttctgaccacagcatcattttgcattcaaattaagggttaagaaaagagatattttaaaatgagagtcacttgatgtgccattttaaaaaaaaaggcatattgctttttctaatgtggttatttctctgatttgc

SEQ ID NO: 160470 - DNA, 3011 bp, Homo sapiens
  Payload ID: 11371
  Gene Symbol: NFKB2
  Gene Name: nuclear factor of kappa light polypeptide gene enhancer in B-cells 2 (p49/p100)
  Uniprot ID: Q00653
  ENST ID: ENST00000189444
  CDS Start-End: 164-2863
actttcctgccccttccccggccaagcccaactccggatctcgctctccaccggatctcacccgccacacccggacaggcggctggaggaggcgggcgtctaaaattctgggaagcagaacctggccggagccactagacagagccgggcctagcccagagacatggagagttgctacaacccaggtctggatggtattattgaatatgatgatttcaaattgaactcctccattgtggaacccaaggagccagccccagaaacagctgatggcccctacctggtgatcgtggaacagcctaagcagagaggcttccgatttcgatatggctgtgaaggcccctcccatggaggactgcccggtgcctccagtgagaagggccgaaagacctatcccactgtcaagatctgtaactacgagggaccagccaagatcgaggtggacctggtaacacacagtgacccacctcgtgctcatgcccacagtctggtgggcaagcaatgctcggagctggggatctgcgccgtttctgtggggcccaaggacatgactgcccaatttaacaacctgggtgtcctgcatgtgactaagaagaacatgatggggactatgatacaaaaacttcagaggcagcggctccgctctaggccccagggccttacggaggccgagcagcgggagctggagcaagaggccaaagaactgaagaaggtgatggatctgagtatagtgcggctgcgcttctctgccttccttagagccagtgatggctccttctccctgcccctgaagccagtcatctcccagcccatccatgacagcaaatctccgggggcatcaaacctgaagatttctcgaatggacaagacagcaggctctgtgcggggtggagatgaagtttatctgctttgtgacaaggtgcagaaagatgacattgaggttcggttctatgaggatgatgagaatggatggcaggcctttggggacttctctcccacagatgtgcataaacagtatgccattgtgttccggacacccccctatcacaagatgaagattgagcggcctgtaacagtgtttctgcaactgaaacgcaagcgaggaggggacgtgtctgattccaaacagttcacctattaccctctggtggaagacaaggaagaggtgcagcggaagcggaggaaggccttgcccaccttctcccagcccttcgggggtggctcccacatgggtggaggctctgggggtgcagccgggggctacggaggagctggaggaggtggcagcctcggtttcttcccctcctccctggcctacagcccctaccagtccggcgcgggccccatgggctgctacccgggaggcgggggcggggcgcagatggccgccacggtgcccagcagggactccggggaggaagccgcggagccaagcgccccctccaggaccccccagtgcgagccgcaggccccggagatgctgcagcgagctcgagagtacaacgcgcgcctgttcggcctggcgcagcgcagcgcccgagccctactcgactacggcgtcaccgcggacgcgcgcgcgctgctggcgggacagcgccacctgctgacggcgcaggacgagaacggagacacaccactgcacctagccatcatccacgggcagaccagtgtcattgagcagatagtctatgtcatccaccacgcccaggacctcggcgttgtcaacctcaccaaccacctgcaccagacgcccctgcacctggcggtgatcacggggcagacgagtgtggtgagctttctgctgcgggtaggtgcagacccagctctgctggatcggcatggagactcagccatgcatctggcgctgcgggcaggcgctggtgctcctgagctgctgcgtgcactgcttcagagtggagctcctgctgtgccccagctgttgcatatgcctgactttgagggactgtatccagtacacctggcagtccgagcccgaagccctgagtgcctggatctgctggtggacagtggggctgaagtggaggccacagagcggcaggggggacgaacagccttgcatctagccacagagatggaggagctggggttggtcacccatctggtcaccaagctccgggccaacgtgaacgctcgcacctttgcgggaaacacacccctgcacctggcagctggactggggtacccgaccctcacccgcctccttctgaaggctggtgctgacatccatgctgaaaacgaggagcccctgtgcccactgccttcaccccctacctctgatagcgactcggactctgaagggcctgagaaggacacccgaagcagcttccggggccacacgcctcttgacctcacttgcagcaccaaggtgaagaccttgctgctaaatgctgctcagaacaccatggagccacccctgaccccgcccagcccagcagggccgggactgtcacttggtgatacagctctgcagaacctggagcagctgctagacgggccagaagcccagggcagctgggcagagctggcagagcgtctggggctgcgcagcctggtagacacgtaccgacagacaacctcacccagtggcagcctcctgcgcagctacgagctggctggcggggacctggcaggtctactggaggccctgtctgacatgggcctagaggagggagtgaggctgctgaggggtccagaaacccgagacaagctgcccagcacagaggtgaaggaagacagtgcgtacgggagccagtcagtggagcaggaggcagagaagctgggcccaccccctgagccaccaggagggctctgccacgggcacccccagcctcaggtgcactgacctgctgcctgcccccagcccccttcccggaccccctgtacagcgtccccacctatttcaaatcttatttaacaccccacacccacccctcagttgggacaaataaaggattctcatgggaaggggaggacccctccttcccaactta

SEQ ID NO: 160471 - DNA, 3101 bp, Homo sapiens
  Payload ID: 11371
  Gene Symbol: NFKB2
  Gene Name: nuclear factor of kappa light polypeptide gene enhancer in B-cells 2 (p49/p100)
  Uniprot ID: Q00653
  ENST ID: ENST00000369966
  CDS Start-End: 251-2953
cacggtgagtggctggattcagacccctgggtggccgggacaagagaaaagagggaggagggcctttagcggacagcgcctggggctggagagcagcagctgcacacagccggaaagggcgcgcaggcgacgacactcggatccacgtcgacaccgttgtacaaagatacgcggacccgcgggcgtctaaaattctgggaagcagaacctggccggagccactagacagagccgggcctagcccagagacatggagagttgctacaacccaggtctggatggtattattgaatatgatgatttcaaattgaactcctccattgtggaacccaaggagccagccccagaaacagctgatggcccctacctggtgatcgtggaacagcctaagcagagaggcttccgatttcgatatggctgtgaaggcccctcccatggaggactgcccggtgcctccagtgagaagggccgaaagacctatcccactgtcaagatctgtaactacgagggaccagccaagatcgaggtggacctggtaacacacagtgacccacctcgtgctcatgcccacagtctggtgggcaagcaatgctcggagctggggatctgcgccgtttctgtggggcccaaggacatgactgcccaatttaacaacctgggtgtcctgcatgtgactaagaagaacatgatggggactatgatacaaaaacttcagaggcagcggctccgctctaggccccagggccttacggaggccgagcagcgggagctggagcaagaggccaaagaactgaagaaggtgatggatctgagtatagtgcggctgcgcttctctgccttccttagagccagtgatggctccttctccctgcccctgaagccagtcatctcccagcccatccatgacagcaaatctccgggggcatcaaacctgaagatttctcgaatggacaagacagcaggctctgtgcggggtggagatgaagtttatctgctttgtgacaaggtgcagaaagatgacattgaggttcggttctatgaggatgatgagaatggatggcaggcctttggggacttctctcccacagatgtgcataaacagtatgccattgtgttccggacacccccctatcacaagatgaagattgagcggcctgtaacagtgtttctgcaactgaaacgcaagcgaggaggggacgtgtctgattccaaacagttcacctattaccctctggtggaagacaaggaagaggtgcagcggaagcggaggaaggccttgcccaccttctcccagcccttcgggggtggctcccacatgggtggaggctctgggggtgcagccgggggctacggaggagctggaggaggtggcagcctcggtttcttcccctcctccctggcctacagcccctaccagtccggcgcgggccccatgggctgctacccgggaggcgggggcggggcgcagatggccgccacggtgcccagcagggactccggggaggaagccgcggagccaagcgccccctccaggaccccccagtgcgagccgcaggccccggagatgctgcagcgagctcgagagtacaacgcgcgcctgttcggcctggcgcagcgcagcgcccgagccctactcgactacggcgtcaccgcggacgcgcgcgcgctgctggcgggacagcgccacctgctgacggcgcaggacgagaacggagacacaccactgcacctagccatcatccacgggcagaccagtgtcattgagcagatagtctatgtcatccaccacgcccaggacctcggcgttgtcaacctcaccaaccacctgcaccagacgcccctgcacctggcggtgatcacggggcagacgagtgtggtgagctttctgctgcgggtaggtgcagacccagctctgctggatcggcatggagactcagccatgcatctggcgctgcgggcaggcgctggtgctcctgagctgctgcgtgcactgcttcagagtggagctcctgctgtgccccagctgttgcatatgcctgactttgagggactgtatccagtacacctggcagtccgagcccgaagccctgagtgcctggatctgctggtggacagtggggctgaagtggaggccacagagcggcaggggggacgaacagccttgcatctagccacagagatggaggagctggggttggtcacccatctggtcaccaagctccgggccaacgtgaacgctcgcacctttgcgggaaacacacccctgcacctggcagctggactggggtacccgaccctcacccgcctccttctgaaggctggtgctgacatccatgctgaaaacgaggagcccctgtgcccactgccttcaccccctacctctgatagcgactcggactctgaagggcctgagaaggacacccgaagcagcttccggggccacacgcctcttgacctcacttgcagcaccaaggtgaagaccttgctgctaaatgctgctcagaacaccatggagccacccctgaccccgcccagcccagcagggccgggactgtcacttggtgatacagctctgcagaacctggagcagctgctagacgggccagaagcccagggcagctgggcagagctggcagagcgtctggggctgcgcagcctggtagacacgtaccgacagacaacctcacccagtggcagcctcctgcgcagctacgagctggctggcggggacctggcaggtctactggaggccctgtctgacatgggcctagaggagggagtgaggctgctgaggggtccagaaacccgagacaagctgcccagcacagcagaggtgaaggaagacagtgcgtacgggagccagtcagtggagcaggaggcagagaagctgggcccaccccctgagccaccaggagggctctgccacgggcacccccagcctcaggtgcactgacctgctgcctgcccccagcccccttcccggaccccctgtacagcgtccccacctatttcaaatcttatttaacaccccacacccacccctcagttgggacaaataaaggattctcatgggaaggggaggacccctccttcccaactta

SEQ ID NO: 160472 - DNA, 3416 bp, Homo sapiens
  Payload ID: 11371
  Gene Symbol: NFKB2
  Gene Name: nuclear factor of kappa light polypeptide gene enhancer in B-cells 2 (p49/p100)
  Uniprot ID: Q00653
  ENST ID: ENST00000428099
  CDS Start-End: 564-3263
cttcctcttccgctaacttcccggcagcgcgccgctcagggtgggggccccgagggctggggccgtcggcttccccctggggatcccccgcttcagagaaagccaagcgttaggcgcagccaaagccgagaggcagcggaagctcccggcccggggtggcgctgggtcagcgggtaccttctcggcggtcccctggccggccgaactcgcgcctggtgtcctgtcaccccgctccccgccctgagtgagcctgtcccctctcaggggcgcgcccgagtcgctccgggttggctgcgccagtccagagttaaactttcagccaatgaaaaagggcgcgaggcgtgacgcacggaaacgtcatgggaattcccccctccggggggccgagaaggggctttcccggccctgagccctgctggcaggcgaggtgtcgcgaccggtcccaggtgggtcgggcgcggagagaagccgcaaccagagccgccgccacggcgggcgtctaaaattctgggaagcagaacctggccggagccactagacagagccgggcctagcccagagacatggagagttgctacaacccaggtctggatggtattattgaatatgatgatttcaaattgaactcctccattgtggaacccaaggagccagccccagaaacagctgatggcccctacctggtgatcgtggaacagcctaagcagagaggcttccgatttcgatatggctgtgaaggcccctcccatggaggactgcccggtgcctccagtgagaagggccgaaagacctatcccactgtcaagatctgtaactacgagggaccagccaagatcgaggtggacctggtaacacacagtgacccacctcgtgctcatgcccacagtctggtgggcaagcaatgctcggagctggggatctgcgccgtttctgtggggcccaaggacatgactgcccaatttaacaacctgggtgtcctgcatgtgactaagaagaacatgatggggactatgatacaaaaacttcagaggcagcggctccgctctaggccccagggccttacggaggccgagcagcgggagctggagcaagaggccaaagaactgaagaaggtgatggatctgagtatagtgcggctgcgcttctctgccttccttagagccagtgatggctccttctccctgcccctgaagccagtcatctcccagcccatccatgacagcaaatctccgggggcatcaaacctgaagatttctcgaatggacaagacagcaggctctgtgcggggtggagatgaagtttatctgctttgtgacaaggtgcagaaagatgacattgaggttcggttctatgaggatgatgagaatggatggcaggcctttggggacttctctcccacagatgtgcataaacagtatgccattgtgttccggacacccccctatcacaagatgaagattgagcggcctgtaacagtgtttctgcaactgaaacgcaagcgaggaggggacgtgtctgattccaaacagttcacctattaccctctggtggaagacaaggaagaggtgcagcggaagcggaggaaggccttgcccaccttctcccagcccttcgggggtggctcccacatgggtggaggctctgggggtgcagccgggggctacggaggagctggaggaggtggcagcctcggtttcttcccctcctccctggcctacagcccctaccagtccggcgcgggccccatgggctgctacccgggaggcgggggcggggcgcagatggccgccacggtgcccagcagggactccggggaggaagccgcggagccaagcgccccctccaggaccccccagtgcgagccgcaggccccggagatgctgcagcgagctcgagagtacaacgcgcgcctgttcggcctggcgcagcgcagcgcccgagccctactcgactacggcgtcaccgcggacgcgcgcgcgctgctggcgggacagcgccacctgctgacggcgcaggacgagaacggagacacaccactgcacctagccatcatccacgggcagaccagtgtcattgagcagatagtctatgtcatccaccacgcccaggacctcggcgttgtcaacctcaccaaccacctgcaccagacgcccctgcacctggcggtgatcacggggcagacgagtgtggtgagctttctgctgcgggtaggtgcagacccagctctgctggatcggcatggagactcagccatgcatctggcgctgcgggcaggcgctggtgctcctgagctgctgcgtgcactgcttcagagtggagctcctgctgtgccccagctgttgcatatgcctgactttgagggactgtatccagtacacctggcagtccgagcccgaagccctgagtgcctggatctgctggtggacagtggggctgaagtggaggccacagagcggcaggggggacgaacagccttgcatctagccacagagatggaggagctggggttggtcacccatctggtcaccaagctccgggccaacgtgaacgctcgcacctttgcgggaaacacacccctgcacctggcagctggactggggtacccgaccctcacccgcctccttctgaaggctggtgctgacatccatgctgaaaacgaggagcccctgtgcccactgccttcaccccctacctctgatagcgactcggactctgaagggcctgagaaggacacccgaagcagcttccggggccacacgcctcttgacctcacttgcagcaccaaggtgaagaccttgctgctaaatgctgctcagaacaccatggagccacccctgaccccgcccagcccagcagggccgggactgtcacttggtgatacagctctgcagaacctggagcagctgctagacgggccagaagcccagggcagctgggcagagctggcagagcgtctggggctgcgcagcctggtagacacgtaccgacagacaacctcacccagtggcagcctcctgcgcagctacgagctggctggcggggacctggcaggtctactggaggccctgtctgacatgggcctagaggagggagtgaggctgctgaggggtccagaaacccgagacaagctgcccagcacagaggtgaaggaagacagtgcgtacgggagccagtcagtggagcaggaggcagagaagctgggcccaccccctgagccaccaggagggctctgccacgggcacccccagcctcaggtgcactgacctgctgcctgcccccagcccccttcccggaccccctgtacagcgtccccacctatttcaaatcttatttaacaccccacacccacccctcagttgggacaaataaaggattctcatgggaaggggaggacccctccttcccaacttatggca

SEQ ID NO: 160473 - DNA, 585 bp, Homo sapiens
  Payload ID: 11371
  Gene Symbol: NFKB2
  Gene Name: nuclear factor of kappa light polypeptide gene enhancer in B-cells 2 (p49/p100)
  ENST ID: ENST00000601386
  CDS Start-End: 519-585
cttcctcttccgctaacttcccggcagcgcgccgctcagggtgggggccccgagggctggggccgtcggcttccccctggggatcccccgcttcagagaaagccaagcgttaggcgcagccaaagccgagaggcagcggaagctcccggcccggggtggcgctgggtcagcgggtaccttctcggcggtcccctggccggccgaactcgcgcctggtgtcctgtcaccccgctccccgccctgagtgagcctgtcccctctcaggggcgcgcccgagtcgctccgggttggctgcgccagtccagagttaaactttcagccaatgaaaaagggcgcgaggcgtgacgcacggaaacgtcatgggaattcccccctccggggggccgagaaggggctttcccggccctgagccctgctggcaggcgaggtgtcgcgaccggtcccaggcgggcgtctaaaattctgggaagcagaacctggccggagccactagacagagccgggcctagcccagagacatggagagttgctacaacccaggtctggatggtattattgaatatgatgatttcaaattgaactcct

SEQ ID NO: 160474 - DNA, 472 bp, Homo sapiens
  Payload ID: 11371
  Gene Symbol: NFKB2
  Gene Name: nuclear factor of kappa light polypeptide gene enhancer in B-cells 2 (p49/p100)
  ENST ID: ENST00000471698
  CDS Start-End: 268-472
ctaagctgctctaactttcctgccccttccccggccaagcccaactccggatctcgctctccaccggatctcacccgccacacccggacaggcggctggaggaggtcggaccctcccccaaatctgggcccccatctcccgcccacccccatttagatctgaccccctcccccacgccactcctcccaactttaggcgggcgtctaaaattctgggaagcagaacctggccggagccactagacagagccgggcctagcccagagacatggagagttgctacaacccaggtctggatggtattattgaatatgatgatttcaaattgaactcctccattgtggaacccaaggagccagccccagaaacagctgatggcccctacctggtgatcgtggaacagcctaagcagagaggcttccgatttcgatatggctgtgaaggcccctcccatggaggactgcccggtgcct

SEQ ID NO: 160475 - DNA, 1628 bp, Homo sapiens
  Payload ID: 11371
  Gene Symbol: NFKB2
  Gene Name: nuclear factor of kappa light polypeptide gene enhancer in B-cells 2 (p49/p100)
  ENST ID: ENST00000610498
  CDS Start-End: 164-1411
actttcctgccccttccccggccaagcccaactccggatctcgctctccaccggatctcacccgccacacccggacaggcggctggaggaggcgggcgtctaaaattctgggaagcagaacctggccggagccactagacagagccgggcctagcccagagacatggagagttgctacaacccaggtctggatggtattattgaatatgatgatttcaaattgaactcctccattgtggaacccaaggagccagccccagaaacagctgatggcccctacctggtgatcgtggaacagcctaagcagagaggcttccgatttcgatatggctgtgaaggcccctcccatggaggactgcccggtgcctccagtgagaagggccgaaagacctatcccactgtcaagatctgtaactacgagggaccagccaagatcgaggtggacctggtaacacacagtgacccacctcgtgctcatgcccacagtctggtgggcaagcaatgctcggagctggggatctgcgccgtttctgtggggcccaaggacatgactgcccaatttaacaacctgggtgtcctgcatgtgactaagaagaacatgatggggactatgatacaaaaacttcagaggcagcggctccgctctaggccccagggccttacggaggccgagcagcgggagctggagcaagaggccaaagaactgaagaaggtgatggatctgagtatagtgcggctgcgcttctctgccttccttagagccagtgatggctccttctccctgcccctgaagccagtcatctcccagcccatccatgacagcaaatctccgggggcatcaaacctgaagatttctcgaatggacaagacagcaggctctgtgcggggtggagatgaagtttatctgctttgtgacaaggtgcagaaagatgacattgaggttcggttctatgaggatgatgagaatggatggcaggcctttggggacttctctcccacagatgtgcataaacagtatgccattgtgttccggacacccccctatcacaagatgaagattgagcggcctgtaacagtgtttctgcaactgaaacgcaagcgaggaggggacgtgtctgattccaaacagttcacctattaccctctggtggaagacaaggaagaggtgcagcggaagcggaggaaggccttgcccaccttctcccagcccttcgggggtggctcccacatgggtggaggctctgggggtgcagccgggggctacggaggagctggaggaggtgagggggtactgatggagggaggggtaaaggtaagagaagctgtggaggaaaaaaatctggggaggccgggcgtggtggctcacgcctgtaatccagcctttgggaggccaaggcaggcaattacctgagatcaggagttcaagaccagcttggccaacagcgtgaaacctcgtctctactaaaaatacaaacattagctgggcatggtggcaggcgcctgtaatcccagctactcgggaggctgaggcaggagaatcgcttgaaccctgggagacaagaggttgcagtaagctgagatcacaccactgcactccaggctgggcaataagagcgaaactccgtctc

SEQ ID NO: 160476 - DNA, 1558 bp, Homo sapiens
  Payload ID: 11372
  Gene Symbol: NFKBIA
  Gene Name: nuclear factor of kappa light polypeptide gene enhancer in B-cells inhibitor, alpha
  Uniprot ID: P25963
  ENST ID: ENST00000216797
  CDS Start-End: 103-1056
gcagtccgtgccgccgtcccgcccgccagcgccccagcgaggaagcagcgcgcagcccgcggcccagcgcacccgcagcagcgcccgcagctcgtccgcgccatgttccaggcggccgagcgcccccaggagtgggccatggagggcccccgcgacgggctgaagaaggagcggctactggacgaccgccacgacagcggcctggactccatgaaagacgaggagtacgagcagatggtcaaggagctgcaggagatccgcctcgagccgcaggaggtgccgcgcggctcggagccctggaagcagcagctcaccgaggacggggactcgttcctgcacttggccatcatccatgaagaaaaggcactgaccatggaagtgatccgccaggtgaagggagacctggccttcctcaacttccagaacaacctgcagcagactccactccacttggctgtgatcaccaaccagccagaaattgctgaggcacttctgggagctggctgtgatcctgagctccgagactttcgaggaaatacccccctacaccttgcctgtgagcagggctgcctggccagcgtgggagtcctgactcagtcctgcaccaccccgcacctccactccatcctgaaggctaccaactacaatggccacacgtgtctacacttagcctctatccatggctacctgggcatcgtggagcttttggtgtccttgggtgctgatgtcaatgctcaggagccctgtaatggccggactgcccttcacctcgcagtggacctgcaaaatcctgacctggtgtcactcctgttgaagtgtggggctgatgtcaacagagttacctaccagggctattctccctaccagctcacctggggccgcccaagcacccggatacagcagcagctgggccagctgacactagaaaaccttcagatgctgccagagagtgaggatgaggagagctatgacacagagtcagagttcacggagttcacagaggacgagctgccctatgatgactgtgtgtttggaggccagcgtctgacgttatgagcgcaaaggggctgaaagaacatggacttgtatatttgtacaaaaaaaaagttttatttttctaaaaaaagaaaaaagaagaaaaaatttaaagggtgtacttatatccacactgcacactgcctggcccaaaacgtcttattgtggtaggatcagccctcattttgttgcttttgtgaactttttgtaggggacgagaaagatcattgaaattctgagaaaacttcttttaaacctcacctttgtggggtttttggagaaggttatcaaaaatttcatggaaggaccacattttatatttattgtgcttcgagtgactgaccccagtggtatcctgtgacatgtaacagccaggagtgttaagcgttcagtgatgtggggtgaaaagttactacctgtcaaggtttgtgttaccctcctgtaaatggtgtacataatgtattgttggtaattattttggtacttttatgatgtatatttattaaacagatttttacaaatg

SEQ ID NO: 160477 - DNA, 1537 bp, Homo sapiens
  Payload ID: 11372
  Gene Symbol: NFKBIA
  Gene Name: nuclear factor of kappa light polypeptide gene enhancer in B-cells inhibitor, alpha
  ENST ID: ENST00000557389
  CDS Start-End: 386-1069
cggggcggcagcggggacgcgaagtccccggttgcataaggcggggcgggagtttctggccgctggcgggcgccgagcagccgggaggggaagtacagggcgttccgagctggcgggagggcggggcggtctggccggcgcccgccggggccgcggggggaggggggcggaaagtccctgggcgcctgccaggaacactcagctcataataacctcgcggaaaacaccgcggcctcggcctccagaaaccccggccttgcgcaatcccccgcagcccgcgcctccctgggccccacgcggtgcactcaccacccctggggtttttccctctcttccccacaggttcctgcacttggccatcatccatgaagaaaaggcactgaccatggaagtgatccgccaggtgaagggagacctggccttcctcaacttccagaacaacctgcagcagactccactccacttggctgtgatcaccaaccagccagaaattgctgaggcacttctgggagctggctgtgatcctgagctccgagactttcgaggaaatacccccctacaccttgcctgtgagcagggctgcctggccagcgtgggagtcctgactcagtcctgcaccaccccgcacctccactccatcctgaaggctaccaactacaatggccacacgtgtctacacttagcctctatccatggctacctgggcatcgtggagcttttggtgtccttgggtgctgatgtcaatgctcaggagccctgtaatggccggactgcccttcacctcgcagtggacctgcaaaatcctgacctggtgtcactcctgttgaagtgtggggctgatgtcaacagagttacctaccagggctattctccctaccagctcacctggggccgcccaagcacccggatacagcagcagctgggccagctgacactagaaaaccttcagatgctgccagagagtgaggatgaggagagctatgacacagagtcagagttcacggagttcacagaggacgagctgccctatgatgactgtgtgtttggaggccagcgtctgacgttatgagcgcaaaggggctgaaagaacatggacttgtatatttgtacaaaaaaaaagttttatttttctaaaaaaagaaaaaagaagaaaaaatttaaagggtgtacttatatccacactgcacactgcctggcccaaaacgtcttattgtggtaggatcagccctcattttgttgcttttgtgaactttttgtaggggacgagaaagatcattgaaattctgagaaaacttcttttaaacctcacctttgtggggtttttggagaaggttatcaaaaatttcatggaaggaccacattttatatttattgtgcttcgagtgactgaccccagtggtatcctgtgacatgtaacagccaggagtgttaagcgttcagtgatgtggggtgaaaagttactacctgtcaaggtttgtgttaccctcctgtaaatggtgtacataatgtattgttggtaattattttggtactttta

SEQ ID NO: 160478 - DNA, 1396 bp, Homo sapiens
  Payload ID: 11372
  Gene Symbol: NFKBIA
  Gene Name: nuclear factor of kappa light polypeptide gene enhancer in B-cells inhibitor, alpha
  ENST ID: ENST00000554001
  CDS Start-End: 73-321
gccccagcgaggaagcagcgcgcagcccgcggcccagcgcacccgcagcagcgcccgcagctcgtccgcgccatgttccaggcggccgagcgcccccaggagtgggccatggagggcccccgcgacgggctgaagaaggagcggctactggacgaccgccacgacagcggcctggactccatgaaagacgaggagtacgagcagatggtcaaggagctgcaggagatccgcctcgagccgcaggaggtgccgcgcggctcggagccctggaagcagcagctcaccgaggacggggactcactccactccacttggctgtgatcaccaaccagccagaaattgctgaggcacttctgggagctggctgtgatcctgagctccgagactttcgaggaaatacccccctacaccttgcctgtgagcagggctgcctggccagcgtgggagtcctgactcagtcctgcaccaccccgcacctccactccatcctgaaggctaccaactacaatggccacacgtgtctacacttagcctctatccatggctacctgggcatcgtggagcttttggtgtccttgggtgctgatgtcaatgctcaggagccctgtaatggccggactgcccttcacctcgcagtggacctgcaaaatcctgacctggtgtcactcctgttgaagtgtggggctgatgtcaacagagttacctaccagggctattctccctaccagctcacctggggccgcccaagcacccggatacagcagcagctgggccagctgacactagaaaaccttcagatgctgccagagagtgaggatgaggagagctatgacacagagtcagagttcacggagttcacagaggacgagctgccctatgatgactgtgtgtttggaggccagcgtctgacgttatgagcgcaaaggggctgaaagaacatggacttgtatatttgtacaaaaaaaaagttttatttttctaaaaaaagaaaaaagaagaaaaaatttaaagggtgtacttatatccacactgcacactgcctggcccaaaacgtcttattgtggtaggatcagccctcattttgttgcttttgtgaactttttgtaggggacgagaaagatcattgaaattctgagaaaacttcttttaaacctcacctttgtggggtttttggagaaggttatcaaaaatttcatggaaggaccacattttatatttattgtgcttcgagtgactgaccccagtggtatcctgtgacatgtaacagccaggagtgttaagcgttcagtgatgtggggtgaaaagttactacctgtcaaggtttgtgttaccctcctgtaaatggtgtacataatgtattgttggtaattattttggtacttttatgatgtatatt

SEQ ID NO: 160479 - DNA, 1400 bp, Homo sapiens
  Payload ID: 11372
  Gene Symbol: NFKBIA
  Gene Name: nuclear factor of kappa light polypeptide gene enhancer in B-cells inhibitor, alpha
  ENST ID: ENST00000557140
  CDS Start-End: 103-927
gcagtccgtgccgccgtcccgcccgccagcgccccagcgaggaagcagcgcgcagcccgcggcccagcgcacccgcagcagcgcccgcagctcgtccgcgccatgttccaggcggccgagcgcccccaggagtgggccatggagggcccccgcgacgggctgaagaaggagcggctactggacgaccgccacgacagcggcctggactccatgaaagacgaggagtacgagcagatggtcaaggagctgcaggagatccgcctcgagccgcaggaggtgccgcgcggctcggagccctggaagcagcagctcaccgaggacggggactcgttcctgcacttggccatcatccatgaagaaaaggcactgaccatggaagtgatccgccaggtgaagggagacctggccttcctcaacttccagaacaacctgcagcagactccactccacttggctgtgatcaccaaccagccagaaattgctgaggcacttctgggagctggctgtgatcctgagctccgagactttcgaggaaatacccccctacaccttgcctgtgagcagggctgcctggccagcgtgggagtcctgactcagtcctgcaccaccccgcacctccactccatcctgaaggctaccaactacaatggccacacgtgtctacacttagcctctatccatggctacctgggcatcgtggagcttttggtgtccttgggtgctgatgtcaatgctcagctcacctggggccgcccaagcacccggatacagcagcagctgggccagctgacactagaaaaccttcagatgctgccagagagtgaggatgaggagagctatgacacagagtcagagttcacggagttcacagaggacgagctgccctatgatgactgtgtgtttggaggccagcgtctgacgttatgagcgcaaaggggctgaaagaacatggacttgtatatttgtacaaaaaaaaagttttatttttctaaaaaaagaaaaaagaagaaaaaatttaaagggtgtacttatatccacactgcacactgcctggcccaaaacgtcttattgtggtaggatcagccctcattttgttgcttttgtgaactttttgtaggggacgagaaagatcattgaaattctgagaaaacttcttttaaacctcacctttgtggggtttttggagaaggttatcaaaaatttcatggaaggaccacattttatatttattgtgcttcgagtgactgaccccagtggtatcctgtgacatgtaacagccaggagtgttaagcgttcagtgatgtggggtgaaaagttactacctgtcaaggtttgtgttaccctcctgtaaatggtgtacataatgtattgttggtaattattttggtacttttatgatg

SEQ ID NO: 160480 - DNA, 212 bp, Homo sapiens
  Payload ID: 11372
  Gene Symbol: NFKBIA
  Gene Name: nuclear factor of kappa light polypeptide gene enhancer in B-cells inhibitor, alpha
  ENST ID: ENST00000553342
  CDS Start-End: 7-212
cgcgccatgttccaggcggccgagcgcccccaggagtgggccatggagggcccccgcgacgggctgaagaaggagcggctactggacgaccgccacgacagcggcctggactccatgaaagacgaggagtacgagcagatgctcaccgaggacggggactcgttcctgcacttggccatcatccatgaagaaaaggcactgaccatggaagt

SEQ ID NO: 160481 - DNA, 1159 bp, Homo sapiens
  Payload ID: 11373
  Gene Symbol: NFKBIB
  Gene Name: nuclear factor of kappa light polypeptide gene enhancer in B-cells inhibitor, beta
  Uniprot ID: Q15653
  ENST ID: ENST00000313582
  CDS Start-End: 35-1105
gcgactgcggggggcccctgaggcggcgggggccatggctggggtcgcgtgcttgggaaaagctgccgacgcagatgaatggtgcgacagcggcctgggctccctgggtccggacgcagcggcccccggaggacctgggttgggcgcggagttgggcccggggctgtcgtgggctcccctcgtcttcggctacgtcactgaggatggggacacggcactgcacttggctgtgattcatcagcatgaacccttcctggattttcttctaggcttctcggccggcactgagtacatggacctgcagaatgacctaggccagacagccctgcacctggcagccatcctgggggagacatccacggtggagaagctgtacgcagcaggcgccgggctgtgtgtggcggagcgtaggggccacacggcgctgcacctggcctgccgtgtgggggcacacgcctgtgcccgtgccctgcttcagccccgcccccggcgccccagggaagcccccgacacctacctcgctcagggccctgaccgtactcccgacaccaaccatacccctgtcgccttgtaccccgattccgacttggagaaggaagaagaggagagtgaggaggactggaagctgcagctggaggctgaaaactacgagggccacaccccactccacgtggccgttatccacaaagatgtggagatggtccggctgctccgagatgctggagctgaccttgacaaaccggagcccacgtgcggccggagcccccttcatttggcagtggaggcccaggcagccgatgtgctggagcttctcctgagggcaggcgcgaaccctgctgcccgcatgtacggtggccgcaccccactcggcagtgccatgctccggcccaaccccatcctcgcccgcctcctccgtgcacacggagcccctgagcccgagggcgaggacgagaaatccggcccctgcagcagcagtagcgacagcgacagcggagacgagggcgatgaatacgacgacattgtggttcacagcagccgcagccaaacccggctgcctcccaccccagcctcaaaacctcttcctgacgacccccgccccgtgtgatttgtttcattgttaatataatttccagtttaataaacaaaaccctagttctga

SEQ ID NO: 160482 - DNA, 991 bp, Homo sapiens
  Payload ID: 11373
  Gene Symbol: NFKBIB
  Gene Name: nuclear factor of kappa light polypeptide gene enhancer in B-cells inhibitor, beta
  ENST ID: ENST00000392079
  CDS Start-End: 120-932
cagacgcgctttcgtacaacacccagagcgccccagttagggcactgcacttggctgtgattcatcagcatgaacccttcctggattttcttctaggcttctcggccggcactgagtacatggacctgcagaatgacctaggccagacagccctgcacctggcagccatcctgggggagacatccacggtggagaagctgtacgcagcaggcgccgggctgtgtgtggcggagcgtaggggccacacggcgctgcacctggcctgccgtgtgggggcacacgcctgtgcccgtgccctgcttcagccccgcccccggcgccccagggaagcccccgacacctacctcgctcagggccctgaccgtactcccgacaccaaccatacccctgtcgccttgtaccccgattccgacttggagaaggaagaagaggagagtgaggaggactggaagctgcagctggaggctgaaaactacgagggccacaccccactccacgtggccgttatccacaaagatgtggagatggtccggctgctccgagatgctggagctgaccttgacaaaccggagcccacgtgcggccggagcccccttcatttggcagtggaggcccaggcagccgatgtgctggagcttctcctgagggcaggcgcgaaccctgctgcccgcatgtacggtggccgcaccccactcggcagtgccatgctccggcccaaccccatcctcgcccgcctcctccgtgcacacggagcccctgagcccgagggcgaggacgagaaatccggcccctgcagcagcagtagcgacagcgacagcggagacgagggcgatgaatacgacgacattgtggttcacagcagccgcagccaaacccggctgcctcccaccccagcctcaaaacctcttcctgacgacccccgccccgtgtgatttgtttcattgttaatataatttccagtttaataaacaaaaccctagttctgacaacc

SEQ ID NO: 160483 - DNA, 2200 bp, Homo sapiens
  Payload ID: 11373
  Gene Symbol: NFKBIB
  Gene Name: nuclear factor of kappa light polypeptide gene enhancer in B-cells inhibitor, beta
  ENST ID: ENST00000509705
  CDS Start-End: 54-251
aaagcccagctacaggcgggcgactgcggggggcccctgaggcggcgggggccatggctggggtcgcgtgcttgggaaaagctgccgacgcagatgaatggtgcgacagcggcctgggctccctgggtccggacgcagcggcccccggaggacctgggttgggcgcggagttgggcccggggctgtcgtgggctcccctcgtcttcggctacgtcactgaggatggggacacgcttctcggccggcactgagtacatggacctgcagaatgacctaggccagacagccctgcacctggcagccatcctgggggagacatccacggtggagaagctgtacgcagcaggcgccgggctgtgtgtggcggagcgtaggggccacacggcgctgcacctggcctgccgtgtgggggcacacgcctgtgcccgtgccctgcttcagccccgcccccggcgccccagggaagcccccgacacctacctcgctcagggccctgaccgtactcccgacaccaaccatacccctgtcgccttgtaccccgattccgacttggagaaggaagaagaggagagtgaggaggactggaagctgcagctggaggctgaaaactacgagggccacaccccactccacgtggccgttatccacaaagatgtggagatggtccggctgctccgagatgctggagctgaccttgacaaaccggagcccacgtgcggccggagcccccttcatttggcagtggaggcccaggcagccgatgtgctggagcttctcctgagggcaggcgcgaaccctgctgcccgcatgtacggtggccgcaccccactcggcagtgccatgctccggcccaaccccatcctcgcccgcctcctccgtgcacacggagcccctgagcccgagggcgaggacgagaaatccggcccctgcagcagcagtagcgacagcgacagcggagacgagggcgtgagtcaggaggagagacagggcagcccagctggggggtcaggatagaccggcaggcaagaagcccaagaagataattaggcaccgaccttgggctgctgttagagaactcaggcagcagcgccagtgacacggggcactagtcaggagagacctggacaggggtggtgggaagagcttgggcagaagtggctgaaaaactaaggcagtggcaaaggtagaactcaggcaggggtggagaaaaggcgttggtcgcagtgattggtgaacacagcgggggtgggtggtagcgctgggggtgattttaggcagcaagaattggagaactcacactgcgaaaagaaaaccttgggtggcagtgatttgaacaccggcagtgctggggcaggacccgagccagcggtggggagagatatagtcagagaacccagcaatacagatccgtccttgggcaaggcgcggtgctggatgatgggtgcggaggaatttgggtaaaggcagagggaaggggtggaggagggccagctcagttgccgaaactctggagtggcggctggctagaaattggtctgtagaaatgaccttgaaaatggagttctggccaggtgcggtggctcacgcctgtaatcccagcactttgggaggccgaggcaggcagatcacgaggtcaggagttcgagaccagcctggccaacatggcaagaccctgtctctactaaaaatacaaaaattagctgggcgtggtggcgcatgcctataatcccagctacttgggaggctgaggtaggagaattgcttgaacctgggaggtggaggttgcagtgaacctagatcacgccactgcattccagcctgggcaacagagcgagactccatcttaaaaaaaaaaaaaaaaaaaagaaagaaaagaaaatggagttctgagagctaggaaactgggaggttgagccaggagcaggggaacttgggctttgaggcgagacctaattcttagggtgctctatgaggacatgggtggtgggcaaagtgacagccgcctgagcccctctgcctggtcccctttgcccccaggatgaatacgacgacattgtggttcacagcagccgcagccaaacccggctgcctcccaccccagcctcaaaacctcttcctgacgacccccgccccgtgtgatttgtttcattgttaatataatttccagtttaataaacaaaaccctagttctgacaaccag

SEQ ID NO: 160484 - DNA, 543 bp, Homo sapiens
  Payload ID: 11373
  Gene Symbol: NFKBIB
  Gene Name: nuclear factor of kappa light polypeptide gene enhancer in B-cells inhibitor, beta
  ENST ID: ENST00000575359
  CDS Start-End: 96-543
gcaaagcccagctacaggcgggcgactgcggggggcccctgaggcggcgggggccatggctggggtcgcgtgcttgggaaaagctgccgacgcagatgaatggcttctcggccggcactgagtacatggacctgcagaatgacctaggccagacagccctgcacctggcagccatcctgggggagacatccacggtggagaagctgtacgcagcaggcgccgggctgtgtgtggcggagcgtaggggccacacggcgctgcacctggcctgccgtgtgggggcacacgcctgtgcccgtgccctgcttcagccccgcccccggcgccccagggaagcccccgacacctacctcgctcagggccctgaccgtactcccgacaccaaccatacccctgtcgccttgtaccccgattccgacttggagaaggaagaagaggagagtgaggaggactggaagctgcagctggaggctgaaaactacgagggccacaccccactccacgtggccgttatccacaaagatgtggagatggtccggctgc

SEQ ID NO: 160485 - DNA, 1929 bp, Homo sapiens
  Payload ID: 11373
  Gene Symbol: NFKBIB
  Gene Name: nuclear factor of kappa light polypeptide gene enhancer in B-cells inhibitor, beta
  Uniprot ID: Q15653
  ENST ID: ENST00000572515
  CDS Start-End: 82-1098
gcagggcggaagctccagaactcccggcaaagcccagctacaggcgggcgactgcggggggcccctgaggcggcgggggccatggctggggtcgcgtgcttgggaaaagctgccgacgcagatgaatggtgcgacagcggcctgggctccctgggtccggacgcagcggcccccggaggacctgggttgggcgcggagttgggcccggggctgtcgtgggctcccctcgtcttcggctacgtcactgaggatggggacacggcactgcacttggctgtgattcatcagcatgaacccttcctggattttcttctaggcttctcggccggcactgagtacatggacctgcagaatgacctaggccagacagccctgcacctggcagccatcctgggggagacatccacggtggagaagctgtacgcagcaggcgccgggctgtgtgtggcggagcgtaggggccacacggcgctgcacctggcctgccgtgtgggggcacacgcctgtgcccgtgccctgcttcagccccgcccccggcgccccagggaagcccccgacacctacctcgctcagggccctgaccgtactcccgacaccaaccatacccctgtcgccttgtaccccgattccgacttggagaaggaagaagaggagagtgaggaggactggaagctgcagctggaggctgaaaactacgagggccacaccccactccacgtggccgttatccacaaagatgtggagatggtccggctgctccgagatgctggagctgaccttgacaaaccggagcccacgtgcggccggagcccccttcatttggcagtggaggcccaggcagccgatgtgctggagcttctcctgagggcaggcgcgaaccctgctgcccgcatgtacggtggccgcaccccactcggcagtgccatgctccggcccaaccccatcctcgcccgcctcctccgtgcacacggagcccctgagcccgagggcgaggacgagaaatccggcccctgcagcagcagtagcgacagcgacagcggagacgagggcgtgagtcaggaggagagacagggcagcccagctggggggtcaggatagaccggcaggcaagaagcccaagaagataattaggcaccgaccttgggctgctgttagagaactcaggcagcagcgccagtgacacggggcactagtcaggagagacctggacaggggtggtgggaagagcttgggcagaagtggctgaaaaactaaggcagtggcaaaggtagaactcaggcaggggtggagaaaaggcgttggtcgcagtgattggtgaacacagcgggggtgggtggtagcgctgggggtgattttaggcagcaagaattggagaactcacactgcgaaaagaaaaccttgggtggcagtgatttgaacaccggcagtgctggggcaggacccgagccagcggtggggagagatatagtcagagaacccagcaatacagatccgtccttgggcaaggcgcggtgctggatgatgggtgcggaggaatttgggtaaaggcagagggaaggggtggaggagggccagctcagttgccgaaactctggagtggcggctggctagaaattggtctgtagaaatgaccttgaaaatggagttctggccaggtgcggtggctcacgcctgtaatcccagcactttgggaggccgaggcaggcagatcacgaggtcaggagttcgagaccagcctggccaacatggcaagaccctgtctctactaaaaatacaaaaattagctgggcgtggtggcgcatgcctataatcccagctacttgggaggctgaggtaggagaattgcttgaacctgggaggtggaggttgcagtgaacctagatcacgccactgcattccagcctgggcaacagagcgagactccatctt

SEQ ID NO: 160486 - DNA, 820 bp, Homo sapiens
  Payload ID: 11373
  Gene Symbol: NFKBIB
  Gene Name: nuclear factor of kappa light polypeptide gene enhancer in B-cells inhibitor, beta
  ENST ID: ENST00000576510
  CDS Start-End: 120-820
cagacgcgctttcgtacaacacccagagcgccccagttagggcactgcacttggctgtgattcatcagcatgaacccttcctggattttcttctaggcttctcggccggcactgagtacatggacctgcagaatgacctaggccagacagccctgcacctggcagccatcctgggggagacatccacggtggagaagctgtacgcagcaggcgccgggctgtgtgtggcggagcgtaggggccacacggcgctgcacctggcctgccgtgtgggggcacacgcctgtgcccgtgccctgcttcagccccgcccccggcgccccagggaagcccccgacacctacctcgctcagggccctgaccgtactcccgacaccaaccatacccctgtcgccttgtaccccgattccgacttggagaaggaagaagaggagagtgaggaggactggaagctgcagctggaggctgaaaactacgagggccacaccccactccacgtggccgttatccacaaagatgtggagatggtccggctgctccgagatgctggagctgaccttgacaaaccggagcccacgtgcggccggagcccccttcatttggcagtggaggcccaggcagccgatgtgctggagcttctcctgagggcaggcgcgaaccctgctgcccgcatgtacggtggccgcaccccactcggcagtgccatgctccggcccaaccccatcctcgcccgcctcctccgtgcacacggagcccctgagcccgagggcgaggacgagaaatccggcccctgcagcagcagtagcgacagcgacagcgg

SEQ ID NO: 160487 - DNA, 543 bp, Homo sapiens; identical to SEQ ID NO: 160484
  Payload ID: 11373
  Gene Symbol: NFKBIB
  Gene Name: Nuclear factor of kappa light polypeptide gene enhancer in B-cells inhibitor, beta
  ENST ID: ENST00000635399
  CDS Start-End: 96-543

SEQ ID NO: 160488 - DNA, 2200 bp, Homo sapiens; identical to SEQ ID NO: 160483
  Payload ID: 11373
  Gene Symbol: NFKBIB
  Gene Name: Nuclear factor of kappa light polypeptide gene enhancer in B-cells inhibitor, beta
  ENST ID: ENST00000635416
  CDS Start-End: 54-251

SEQ ID NO: 160489 - DNA, 1159 bp, Homo sapiens; identical to SEQ ID NO: 160481
  Payload ID: 11373
  Gene Symbol: NFKBIB
  Gene Name: Nuclear factor of kappa light polypeptide gene enhancer in B-cells inhibitor, beta
  ENST ID: ENST00000635517
  CDS Start-End: 35-1105

SEQ ID NO: 160490 - DNA, 1929 bp, Homo sapiens; identical to SEQ ID NO: 160485
  Payload ID: 11373
  Gene Symbol: NFKBIB
  Gene Name: Nuclear factor of kappa light polypeptide gene enhancer in B-cells inhibitor, beta
  ENST ID: ENST00000634647
  CDS Start-End: 82-1098

SEQ ID NO: 160491 - DNA, 991 bp, Homo sapiens; identical to SEQ ID NO: 160482
  Payload ID: 11373
  Gene Symbol: NFKBIB
  Gene Name: Nuclear factor of kappa light polypeptide gene enhancer in B-cells inhibitor, beta
  ENST ID: ENST00000634995
  CDS Start-End: 120-932

SEQ ID NO: 160492 - DNA, 820 bp, Homo sapiens; identical to SEQ ID NO: 160486
  Payload ID: 11373
  Gene Symbol: NFKBIB
  Gene Name: Nuclear factor of kappa light polypeptide gene enhancer in B-cells inhibitor, beta
  ENST ID: ENST00000635236
  CDS Start-End: 120-820

SEQ ID NO: 160493 - DNA, 1834 bp, Homo sapiens
  Payload ID: 11374
  Gene Symbol: NFKBID
  Gene Name: nuclear factor of kappa light polypeptide gene enhancer in B-cells inhibitor, delta
  Uniprot ID: Q8NI38
  ENST ID: ENST00000396901
  CDS Start-End: 575-1516
ttcgccggagcgcgacccggggactcccaggcctgtgggcgggccctgcccaggactgggcggtgccataacccctagtttaaaaactcgcgggtaccggacccaagatcggggacccggcggcggctccgcgggggaaacagcgaggctggcgcagcgccgaggccgcggccctgggggcccgcaatccacgccacggaatccccgagtgagcaggggtgagcgcagccactgcccaacgcaaaccgtgaagaagcttctggaagagcagaggcgccgccagcagcagcagcccgacgctggcggggtgcagggacaatttctccctcccccagagcagcccctgaccccatctgtgaatgaggctgtgactggccaccctcccttcccagcacactcggagactgtgggttctggacctagcagcctgggctttccagactgggaccccaacacgcatgctgcctacactgacagcccctactcttgccctgcttctgctgccgaaaatttcctgcctcctgacttctacccaccctcggacccagggcagccgtgcccatttccccagggcatggaggctggaccctggagagtttctgcacccccttcaggacccccacagttccccgctgtggtccctggaccatcgctggaggtggcccgagctcacatgctggctttggggccacagcagctgctggcccaggatgaggagggggacacgctccttcacctgtttgcggctcgggggctgcgctgggcggcatatgctgcggctgaggtgctccaggtgtaccggcgtcttgacattcgtgagcataagggcaagacccctctcctggtggcggctgctgccaaccagcccctgattgtggaggatctgttgaacctgggagcagagcccaatgccgctgaccatcagggacgttcggtcttgcacgtggccgctacctacgggctcccaggagttctcttggctgtgcttaactctggggtccaggttgacctggaagccagagacttcgagggcctcaccccgctccacacggccatcctggcccttaacgttgctatgcgcccttccgacctctgtccccgggtgctgagcacacaggcccgagacaggctggattgtgtccacatgttgctgcaaatgggtgctaatcacaccagccaggagatcaagagcaacaagacagttctgcacttggccgtgcaggctgccaaccccactctggttcagctgctgctggagctgccccggggagacctgcggacctttgtcaacatgaaggcccacgggaacacagccctccacatggcggctgccctgccccctgggccggcccaggaggccatcgtgcggcacctgttggcagctggggcggaccccacactgcgcaacctggagaatgagcagcccgttcacctgctgcggcccgggccgggccctgaggggctccggcagctgttgaagaggagccgtgtggcgccgccaggcctgtcctcttaggactcaaacccagaccctggactgattttccagtccccaccgtcctgcgggacagccagcgtatgctaatgttgcaaacccatgataatgtatgtggaatatcctgccattggggttttacattaaaaccccagaatggctgcagaggggtgaacaggccccaatatttggggtgctgtgatacccctcttctacccacaaggagccctcttgatgatttctgtgaaatcgaggccccttgattgtttctgtgaaacaccctgcacccctagtcctttccccactgagatctttcgggttctctcccctaactcagct

SEQ ID NO: 160494 - DNA, 1036 bp, Homo sapiens
  Payload ID: 11374
  Gene Symbol: NFKBID
  Gene Name: nuclear factor of kappa light polypeptide gene enhancer in B-cells inhibitor, delta
  ENST ID: ENST00000585925
  CDS Start-End: 587-1036
tcagggactgcgttcgccggagcgcgacccggggactcccaggcctgtgggcgggccctgcccaggactgggcggtgccataacccctagtttaaaaactcgcgggtaccggacccaagatcggggacccggcggcggctccgcgggggaaacagcgaggctggcgcagcgccgaggccgcggccctgggggcccgcaatccacgccacggaatccccgagtgagcaggggtgagcgcagccactgcccaacgcaaaccgtgaagaagcttctggaagagcagaggcgccgccagcagcagcagcccgacgctggcggggtgcagggacaatttctccctcccccagagcagcccctgaccccatctgtgaatgaggctgtgactggccaccctcccttcccagcacactcggagactgtgggttctggacctagcagcctgggctttccagactgggaccccaacacgcatgctgcctacactgacagcccctactcttgccctgcttctgctgccgaaaatttcctgcctcctgacttctacccaccctcggacccagggcagccgtgcccatttccccagggcatggaggaccccccagacacccagttctatgtaggatcttctctgccacaggctggaccctggagagtttctgcacccccttcaggacccccacagttccccgctgtggtccctggaccatcgctggaggtggcccgagctcacatgctggctttggggccacagcagctgctggcccaggatgaggagggggacacgctccttcacctgtttgcggctcgggggctgcgctgggcggcatatgctgcggctgaggtgctccaggtgtaccggcgtcttgacattcgtgagcataagggcaagacccctctcctggtggcggctgctgccaaccagcccctgattgtggaggatctgttgaacctgggagcagagcccaatgccgctgaccatcagggacgttcggtcttgcacgtggccgctacctacgggctcccaggagttctcttg

SEQ ID NO: 160495 - DNA, 1552 bp, Homo sapiens
  Payload ID: 11374
  Gene Symbol: NFKBID
  Gene Name: nuclear factor of kappa light polypeptide gene enhancer in B-cells inhibitor, delta
  ENST ID: ENST00000590828
  CDS Start-End: 1-197
actctggggtccaggttgacctggaagccagagacttcgagggcctcaccccgctccacacggccatcctggcccttaacgttgctatgcgcccttccgacctctgtccccgggtgctgagcacacaggcccgagacaggctggattgtgtccacatgttgctgcaaatgggtgctaatcacaccagccagagatgaggtcttgctgtgttgtccaggctggtctgcagctcctggcctcaagtgatcctccttcttcagcttcccaaagtgctaggattacaggcgtgaaccaccgcactccgccaagggagatcaagagcaacaagacagttctgcacttggccgtgcaggctgccaaccccactctggttcagctgctgctggagctgccccggggagacctgcggacctttgtcaacatgaaggcccacgggaacacagccctccacatggcggctgccctgccccctgggccggcccaggaggccatcgtgcggcacctgttggcagctggggcggaccccacactgcgcaacctggagaatgagcagcccgttcacctgctgcggcccgggccgggccctgaggggctccggcagctgttgaagaggagccgtgtggcgccgccaggcctgtcctcttaggactcaaacccagaccctggactgattttccagtccccaccgtcctgcgggacagccagcgtatgctaatgttgcaaacccatgataatgtatgtggaatatcctgccattggggttttacattaaaaccccagaatggctgcagaggggtgaacaggccccaatatttggggtgctgtgatacccctcttctacccacaaggagccctcttgatgatttctgtgaaatcgaggccccttgattgtttctgtgaaacaccctgcacccctagtcctttccccactgagatctttcgggttctctcccctaactcagctcttcgttcccagaaacccagatgtaatccccctacgtggtgcttggggcatcccgataccatctcagtaaatctcctacaatggcctcctcaccctccccgggacccacacccttcaggtcctcaccctgagacaggagggaccctctgagatcagggacccttaggtctcactgctctctgattcagagctcagctgggcccccagttccagaccccagcattcccggtcactccctccctaatctgagcatcactcaagctctttattaaactcaatttgggccagatttggtggctcatgcctgtaatcctaacactctgggaggccgaggcgggcggatcacttgaggtgaggagtttgagaccagcctggccaacatggtgaaaccctgtctccactaaaaatacaaaaacaattggctggacatggtggcatgcgcctgtagtcccagctacttgggaggctgaggcagaagaattgattgaacccaggaggcggaggttgcagtgagccgagattgtgccactgcactccagcctaggtgacaaagagagactctgtctcaaaaaaaaaaaaaaaaaaaaa

SEQ ID NO: 160496 - DNA, 1736 bp, Homo sapiens
  Payload ID: 11374
  Gene Symbol: NFKBID
  Gene Name: nuclear factor of kappa light polypeptide gene enhancer in B-cells inhibitor, delta
  Uniprot ID: Q8NI38
  ENST ID: ENST00000606253
  CDS Start-End: 477-1418
aaaatttgctgattaaatgaatgtgggtgtgtttgagagggatcctagacagccaagccttctggcatgaaacgctgagaagatgggagtgtctgctggcagagatgaaagtgagcaggggtgagcgcagccactgcccaacgcaaaccgtgaagaagcttctggaagagcagaggcgccgccagcagcagcagcccgacgctggcggggtgcagggacaatttctccctcccccagagcagcccctgaccccatctgtgaatgaggctgtgactggccaccctcccttcccagcacactcggagactgtgggttctggacctagcagcctgggctttccagactgggaccccaacacgcatgctgcctacactgacagcccctactcttgccctgcttctgctgccgaaaatttcctgcctcctgacttctacccaccctcggacccagggcagccgtgcccatttccccagggcatggaggctggaccctggagagtttctgcacccccttcaggacccccacagttccccgctgtggtccctggaccatcgctggaggtggcccgagctcacatgctggctttggggccacagcagctgctggcccaggatgaggagggggacacgctccttcacctgtttgcggctcgggggctgcgctgggcggcatatgctgcggctgaggtgctccaggtgtaccggcgtcttgacattcgtgagcataagggcaagacccctctcctggtggcggctgctgccaaccagcccctgattgtggaggatctgttgaacctgggagcagagcccaatgccgctgaccatcagggacgttcggtcttgcacgtggccgctacctacgggctcccaggagttctcttggctgtgcttaactctggggtccaggttgacctggaagccagagacttcgagggcctcaccccgctccacacggccatcctggcccttaacgttgctatgcgcccttccgacctctgtccccgggtgctgagcacacaggcccgagacaggctggattgtgtccacatgttgctgcaaatgggtgctaatcacaccagccaggagatcaagagcaacaagacagttctgcacttggccgtgcaggctgccaaccccactctggttcagctgctgctggagctgccccggggagacctgcggacctttgtcaacatgaaggcccacgggaacacagccctccacatggcggctgccctgccccctgggccggcccaggaggccatcgtgcggcacctgttggcagctggggcggaccccacactgcgcaacctggagaatgagcagcccgttcacctgctgcggcccgggccgggccctgaggggctccggcagctgttgaagaggagccgtgtggcgccgccaggcctgtcctcttaggactcaaacccagaccctggactgattttccagtccccaccgtcctgcgggacagccagcgtatgctaatgttgcaaacccatgataatgtatgtggaatatcctgccattggggttttacattaaaaccccagaatggctgcagaggggtgaacaggccccaatatttggggtgctgtgatacccctcttctacccacaaggagccctcttgatgatttctgtgaaatcgaggccccttgattgtttctgtgaaacaccctgcacccctagtcctttccccactgagatctttcgggttctctcccctaactcagct

SEQ ID NO: 160497 - DNA, 2581 bp, Homo sapiens
  Payload ID: 11375
  Gene Symbol: NFKBIE
  Gene Name: nuclear factor of kappa light polypeptide gene enhancer in B-cells inhibitor, epsilon
  Uniprot ID: O00221
  ENST ID: ENST00000275015
  CDS Start-End: 26-1528
aatgaatgaatgaatgaatgagtgaatgaatcaacgaaggagtgagtcaaggcccgggaaccacagactccaagcctacgcagagcccgggaagggggattccggaggggcggggcctctttccggaagcgcccgccgggggcggggagggggcggggccatccgcgtgaggcgaccctgttggtccggaggggcggggcgaggaggaggacccgcttgggcggttcggctgcccacagtaaccgctgggtggacctggccagcgctccgaaccttgtcctcgctgcgcgccggcccctcggagccccacagcccgggaaggaggccgccgcgggccgggcgcccgctctgccaagcggacccgcaacccggaaaggcggcgcggcggagcctggagccggatcctgctcagaccgggccccggccggccagagccgcgggcatgtcggaggcgcggaaggggccggacgaggcggaggagagccagtacgactctggcattgagtctctgcgctctctgcgctccctacccgagtccacctcggctccagcctccgggccctcggacggcagcccccagccctgcacccatcctccgggacccgtcaaggaaccacaggagaaggaagacgcggatggggagcgggctgattccacctatggctcctcctcgctcacctacaccctgtccttgctggggggccccgaggctgaggacccggccccacgcctgccactcccccacgtgggggcgctgagccctcagcagctggaagcactcacttacatctccgaggacggagacacgctggtccacctggcagtgattcatgaggccccagcggtgctgctctgttgcctggctttgctgccccaggaggtcctggacattcaaaataacctttaccagacagcactccatctggctgtacatctggaccaaccgggcgcagttcgggcactggtgctgaagggggccagccgggcactacaggaccggcatggtgacacagcccttcatgtggcctgccagcgccagcacttggcctgtgcccgctgcctgctggaagggcggccagagccaggcagaggaacatctcactctctggacctccagctgcaaaactggcaaggtctggcttgtctccacattgccacccttcagaagaaccaaccactcatggaattgctgcttcggaatggagctgacattgatgtgcaggagggcaccagtggtaagacagcgctgcacctggctgtggaaacccaagagcggggcctggtacagttcctgctccaggctggtgcccaggtagatgcccgcatgctgaacgggtgcacacccctgcacctggcagctggccggggtctcatgggcatctcatccactctgtgcaaggcgggtgctgactccctgctgcggaatgtggaggatgagacgccccaggacctgactgaggaatcccttgtccttttgccctttgatgacctgaagatctcagggaaactgctgctgtgtaccgactgaagccaggcagggtctgggatcctcagggctccacctctccatctggaagccggagccataactgctgcagtttgggcccaggctatgtgctcttctggtgccctagggactgctgtggccagagcctggggccagccagtacagtcctgagccgaggaggagggactgcaagtggaagagagccagtctggaaggaagagctttccaggtggacagggcttcttggaagacccccaaagccccaggtatcctgggtgaagcctgtttgcctctcttgaaaatggcaggtgctcttgttttacccatgttgggtcagcctgaaactgccaaccagtaggaagcatggactctcctgagtgagaagagactgaaataggagcaagcagaaccctgagaggtgtcccatcttattgctgttgaggaccctgaaacaccgttgtttaaagacttcacacagaaggctctgaactgagccactggggaagggaagtttcagtaacatgacactaaaatggcagagacgttaaaaaaagtttttcccttctagagctgttttgcgcgcatgcatgtctgtgtgcattggggctttttagacaggcctgccctgtgactttgtggtagaggcagagagaaggaaattgtcccctgagcacggtagggccttgctgggtggggtcagaggccagtagttccaggcctttctctgtgtccagcacagacccttgtccttgctgtggaaatgatgagggatggagggacaagaggaagaatgagaggacacacgccctggagccctcaccactgccctgggggttgccatctggaggagcctggggataagggtaacccagggaggctgggcacgagggagctgactccacgtttttccccccgttcctcaccttcgagggccctgctaggtcacccctatgctggcatgaagagcatggggcaataaaccagcacagtctctgaccacttggagcgtctcatccagtgagagagacagccgttaaaagcataaacatccaaataaagatgcctttccaagtt

SEQ ID NO: 160498 - DNA, 561 bp, Homo sapiens
  Payload ID: 11375
  Gene Symbol: NFKBIE
  Gene Name: nuclear factor of kappa light polypeptide gene enhancer in B-cells inhibitor, epsilon
  ENST ID: ENST00000443607
  CDS Start-End: 1-168
ggccggggtctcatgggcatctcatccactctgtgcaaggcgggtgctgactccctgctgcggaatgtggaggatgagacgccccaggacctgactgaggaatcccttgtccttttgccctttgatgacctgaagatctcagggaaactgctgctgtgtaccgactgaagccagtacagtcctgagccgaggaggagggactgcaagtggaagagagccagtctggaaggaagagctttccaggtggacagggcttcttggaagacccccaaagccccaggtatcctgggtgaagcctgtttgcctctcttgaaaatggcaggtgctcttgttttacccatgttgggtcagcctgaaactgccaaccagtaggaagcatggactctcctgagtgagaagagactgaaataggagcaagcagaaccctgagaggtgtcccatcttattgctgttgaggaccctgaaacaccgttgtttaaagacttcacacagaaggctctgaactgagccactggggaagggaagtttcagtaacatgacactaaaatggcagagacgtta

SEQ ID NO: 160499 - DNA, 901 bp, Homo sapiens
  Payload ID: 11375
  Gene Symbol: NFKBIE
  Gene Name: nuclear factor of kappa light polypeptide gene enhancer in B-cells inhibitor, epsilon
  ENST ID: ENST00000477930
  CDS Start-End: 248-673
ggggcgaggaggaggacccgcttgggcggttcggctgcccacagtaaccgctgggtggacctggccagcgctccgaaccttgtcctcgctgcgcgccggcccctcggagccccacagcccgggaaggaggccgccgcgggccgggcgcccgctctgccaagcggacccgcaacccggaaaggcggcgcggcggagcctggagccggatcctgctcagaccgggccccggccggccagagccgcgggcatgtcggaggcgcggaaggggccggacgaggcggaggagagccagtacgactctggcattgagtctctgcgctctctgcgctccctacccgagtccacctcggctccagcctccgggccctcggacggcagcccccagccctgcacccatcctccgggacccgtcaaggaaccacaggagaaggaagacgcggatggggagcgggctgattccacctatggctcctcctcgctcacctacaccctgtccttgctggggggccccgaggctgaggacccggccccacgcctgccactcccccacgtgggggcgctgagccctcagcagctggaagcactcacttacatctccgaggacggagacacacagcactccatctggctgtacatctggaccaaccgggcgcagttcgggcactggtgctgaagggggccagccgggcactacaggaccggcatggtgacacagcccttcatgtggcctgccagcgccagcacttggcctgtgcccgctgcctgctggaagggcggccagagccaggcagaggaacatctcactctctggacctccagctgcaaaactggcaaggtctggcttgtctccacattgccacccttcagaagaaccaaccactcatggaattgctgcttcgga

SEQ ID NO: 160500 - DNA, 2050 bp, Homo sapiens
  Payload ID: 11375
  Gene Symbol: NFKBIE
  Gene Name: nuclear factor of kappa light polypeptide gene enhancer in B-cells inhibitor, epsilon
  ENST ID: ENST00000616555
  CDS Start-End: 26-1525
aatgaatgaatgaatgaatgagtgaatgaatcaacgaaggagtgagtcaaggcccgggaaccacagactccaagcctacgcagagcccgggaagggggattccggaggggcggggcctctttccggaagcgcccgccgggggcggggagggggcggggccatccgcgtgaggcgaccctgttggtccggaggggcggggcgaggaggaggacccgcttgggcggttcggctgcccacagtaaccgctgggtggacctggccagcgctccgaaccttgtcctcgctgcgcgccggcccctcggagccccacagcccgggaaggaggccgccgcgggccgggcgcccgctctgccaagcggacccgcaacccggaaaggcggcgcggcggagcctggagccggatcctgctcagaccgggccccggccggccagagccgcgggcatgtcggaggcgcggaaggggccggacgaggcggaggagagccagtacgactctggcattgagtctctgcgctctctgcgctccctacccgagtccacctcggctccagcctccgggccctcggacggcagcccccagccctgcacccatcctccgggacccgtcaaggaaccacaggagaaggaagacgcggatggggagcgggctgattccacctatggctcctcctcgctcacctacaccctgtccttgctggggggccccgaggctgaggacccggccccacgcctgccactcccccacgtgggggcgctgagccctcagcagctggaagcactcacttacatctccgaggacggagacacgctggtccacctggcagtgattcatgaggccccagcggtgctgctctgttgcctggctttgctgccccaggaggtcctggacattcaaaataacctttaccagacagcactccatctggctgtacatctggaccaaccgggcgcagttcgggcactggtgctgaagggggccagccgggcactacaggaccggcatggtgacacagcccttcatgtggcctgccagcgccagacttggcctgtgcccgctgcctgctggaagggcggccagccaggcagaggaacatctcactctctggacctccagctgcaaaactggcaaggtctggcttgtctccacattgccacccttcagaagaaccaaccactcatggaattgctgcttcggaatggagctgacattgatgtgcaggagggcaccagtggtaagacagcgctgcacctggctgtggaaacccaagagcggggcctggtacagttcctgctccaggctggtgcccaggtagatgcccgcatgctgaacgggtgcacacccctgcacctggcagctggccggggtctcatgggcatctcatccactctgtgcaaggcgggtgctgactccctgctgcggaatgtggaggatgagacgccccaggacctgactgaggaatcccttgtccttttgccctttgatgacctgaagatctcagggaaactgctgctgtgtaccgactgaagccaggcagggtctgggatcctcagggctccacctctccatctggaagccggagccataactgctgcagtttgggcccaggctatgtgctcttctggtgccctagggactgctgtggccagagcctggggccagccagtacagtcctgagccgaggaggagggactgcaagtggaagagagccagtctggaaggaagagctttccaggtggacagggcttcttggaagacccccaaagccccaggtatcctgggtgaagcctgtttgcctctcttgaaaatggcaggtgctcttgttttacccatgttgggtcagcctgaaactgccaaccagtaggaagcatggactctcctgagtgagaagagactgaaataggagcaagcagaaccctgagaggtgtcccatcttattgctgttgaggaccctgaaacaccgttgtttaaagacttcacacagaaggctctgaactgagccactggggaagggaagtttcagtaacatgacactaaaatggcagagacgtt

SEQ ID NO: 160501 - DNA, 2327 bp, Homo sapiens
  Payload ID: 11375
  Gene Symbol: NFKBIE
  Gene Name: nuclear factor of kappa light polypeptide gene enhancer in B-cells inhibitor, epsilon
  ENST ID: ENST00000619360
  CDS Start-End: 189-1274
cctggccagcgctccgaaccttgtcctcgctgcgcgccggcccctcggagccccacagcccgggaaggaggccgccgcgggccgggcgcccgctctgccaagcggacccgcaacccggaaaggcggcgcggcggagcctggagccggatcctgctcagaccgggccccggccggccagagccgcgggcatgtcggaggcgcggaaggggccggacgaggcggaggagagccagtacgactctggcattgagtctctgcgctctctgcgctccctacccgagtccacctcggctccagcctccgggccctcggacggcagcccccagccctgcacccatcctccgggacccgtcaaggaaccacaggagaaggaagacgcggatggggagcgggctgattccacctatggctcctcctcgctcacctacaccctgtccttgctggggggccccgaggctgaggacccggccccacgcctgccactcccccacgtgggggcgctgagccctcagcagctggaagcactcacttacatctccgaggacggagacacgctggtccacctggcagtgattcatgaggccccagcggtgctgctctgttgcctggctttgctgccccaggaggtcctggacattcaaaataacctttaccagacagcactccatctggctgtacatctggaccaaccgggcgcagttcgggcactggtgctgaagggggccagccgggcactacaggaccggcatggtgacacagcccttcatgtggcctgccagcgccagcacttggcctgtgcccgctgcctgctggaagggcggccagagccaggcagaggaacatctcactctctggacctccagctgcaaaactggcaaggtctggcttgtctccacattgccacccttcagaagaaccaaccactcatggaattgctgcttcggaatggagctgacattgatgtgcaggagggcaccagtggtaagacagcgctgcacctggctgtggaaacccaagagcggggcctggtacagttcctgctccaggctggtgcccaggtagatgcccgcatgctgaacgggtgcacacccctgcacctggcagctggccggggtctcatgggcatctcatccactctgtgcaaggcgggtgctgactccctgctgcggaatgtggaggatgagacgccccaggacctgactgaggaatcccttgtccttttgccctttgatgacctgaagatctcagggaaactgctgctgtgtaccgactgaagccaggcagggtctgggatcctcagggctccacctctccatctggaagccggagccataactgctgcagtttgggcccaggctatgtgctcttctggtgccctagggactgctgtggccagagcctggggccagccagtacagtcctgagccgaggaggagggactgcaagtggaagagagccagtctggaaggaagagctttccaggtggacagggcttcttggaagacccccaaagccccaggtatcctgggtgaagcctgtttgcctctcttgaaaatggcaggtgctcttgttttacccatgttgggtcagcctgaaactgccaaccagtaggaagcatggactctcctgagtgagaagagactgaaataggagcaagcagaaccctgagaggtgtcccatcttattgctgttgaggaccctgaaacaccgttgtttaaagacttcacacagaaggctctgaactgagccactggggaagggaagtttcagtaacatgacactaaaatggcagagacgttaaaaaaagtttttcccttctagagctgttttgcgcgcatgcatgtctgtgtgcattggggctttttagacaggcctgccctgtgactttgtggtagaggcagagagaaggaaattgtcccctgagcacggtagggccttgctgggtggggtcagaggccagtagttccaggcctttctctgtgtccagcacagacccttgtccttgctgtggaaatgatgagggatggagggacaagaggaagaatgagaggacacacgccctggagccctcaccactgccctgggggttgccatctggaggagcctggggataagggtaacccagggaggctgggcacgagggagctgactccacgtttttccccccgttcctcaccttcgagggccctgctaggtcacccctatgctggcatgaagagcatggggcaataaaccagcacagtctctgaccacttggagcgtctcatccagtgagagagacagccgttaaaagcataaacatccaaataaagatgcctttccaagtt

SEQ ID NO: 160502 - DNA, 2058 bp, Homo sapiens
  Payload ID: 11376
  Gene Symbol: NFKBIZ
  Gene Name: nuclear factor of kappa light polypeptide gene enhancer in B-cells inhibitor, zeta
  Uniprot ID: Q9BYH8
  ENST ID: ENST00000326151
  CDS Start-End: 116-1906
gtactggcccgcgccgtccgcccgccgacagctccctgagccagcccgggaggcagccgcgcgcagcgagccggtggcgcaggtgtcggggtcctcgagcgcccagcctgggagcatgattgtggacaagctgctggacgacagccgcggcggagaggggctgcgggacgcggcgggcggctgcggcctcatgaccagcccgctcaacctgagctacttctacggcgcgtcgccgcccgccgccgccccgggcgcctgcgacgccagctgctcggtcttgggcccctcggcgcccggctcgcccggctccgactcctccgacttctcctctgcctcgtcggtgtcctcctgcggcgccgtggagtcccggtcgagaggcggcgcccgcgccgagcgccagccagttgagccccatatgggggttggcaggcagcagagaggcccctttcaaggtgttcgggtaaagaactcagtgaaggaactcctgttgcacatccgaagtcataaacagaaggcttctggccaagctgtggatgattttaagacacaaggtgtgaacatagaacagttcagagaattgaagaacacagtatcatacagtgggaaaaggaaagggcccgattcgttgtctgatggacctgcttgcaaaaggccagctctgttgcattcccaatttttgacaccacctcaaacaccaacgcccggggagagcatggaagatgttcatctcaatgaacccaaacaggagagcagtgctgatctgcttcagaacattatcaacattaagaatgaatgcagccccgtttccctgaacacagttcaaacttcctccagtgttcagcagcaaaatgatgctcacttgcacagcttcagcatgatgcccagcagcgcctgtgaggccatggtggggcacgagatggcctctgactcttcaaacacttcactgccattctcaaacatgggaaatccaatgaacaccacacagttagggaaatcactttttcagtggcaggtggagcaggaagaaagcaaattggcaaatatttcccaagaccagtttctttcaaaggatgcagatggtgacacgttccttcatattgctgttgcccaagggagaagggcactttcctatgttcttgcaagaaagatgaatgcacttcacatgctggatattaaagagcacaatggacagagtgcctttcaggtggcagtggctgccaatcagcatctcattgtgcaggatctggtgaacatcggggcacaggtgaacaccacagactgctggggaagaacacctctgcatgtgtgtgctgagaagggccactcccaggtgcttcaggcgattcagaagggagcagtgggaagtaatcagtttgtggatcttgaggcaactaactatgatggcctgactccccttcactgtgcagtcatagcccacaatgctgtggtccatgaactccagagaaatcaacagcctcattcacctgaagttcaggagcttttactgaagaataagagtctggttgataccattaagtgcctaattcaaatgggagcagcggtggaagcgaaggatcgcaaaagtggccgcacagccctgcatttggcagctgaagaagcaaatctggaactcattcgcctctttttggagctgcccagttgcctgtcttttgtgaatgcaaaggcttacaatggcaacactgccctccatgttgctgccagcttgcagtatcggttgacacaattagatgctgtccgcctgttgatgaggaagggagcagacccaagtactcggaacttggagaacgaacagccagtgcatttggttcccgatggccctgtgggagaacagatccgacgtatcctgaagggaaagtccattcagcagagagctccaccgtattagctccattagcttggagcctggctagcaacactcactgtcagttaggcagtcctgatgtatctgtacatagaccatttgccttatattggcaaatgtaagttgtttctatgaaacaaacatatttagttcactattatatagtgggttatatt

SEQ ID NO: 160503 - DNA, 3923 bp, Homo sapiens
  Payload ID: 11376
  Gene Symbol: NFKBIZ
  Gene Name: nuclear factor of kappa light polypeptide gene enhancer in B-cells inhibitor, zeta
  Uniprot ID: Q9BYH8
  ENST ID: ENST00000326172
  CDS Start-End: 116-2272
gtactggcccgcgccgtccgcccgccgacagctccctgagccagcccgggaggcagccgcgcgcagcgagccggtggcgcaggtgtcggggtcctcgagcgcccagcctgggagcatgattgtggacaagctgctggacgacagccgcggcggagaggggctgcgggacgcggcgggcggctgcggcctcatgaccagcccgctcaacctgagctacttctacggcgcgtcgccgcccgccgccgccccgggcgcctgcgacgccagctgctcggtcttgggcccctcggcgcccggctcgcccggctccgactcctccgacttctcctctgcctcgtcggtgtcctcctgcggcgccgtggagtcccggtcgagaggcggcgcccgcgccgagcgccagccagttgagccccatatgggggttggcaggcagcagagaggcccctttcaaggtgttcgggtaaagaactcagtgaaggaactcctgttgcacatccgaagtcataaacagaaggcttctggccaagctgtggatgattttaagacacaaggtgtgaacatagaacagttcagagaattgaagaacacagtatcatacagtgggaaaaggaaagggcccgattcgttgtctgatggacctgcttgcaaaaggccagctctgttgcattcccaatttttgacaccacctcaaacaccaacgcccggggagagcatggaagatgttcatctcaatgaacccaaacaggagagcagtgctgatctgcttcagaacattatcaacattaagaatgaatgcagccccgtttccctgaacacagttcaagttagctggctgaaccccgtggtggtccctcagagctcccccgcagagcagtgtcaggacttccatggagggcaggtcttttctccacctcagaaatgccaaccattccaagtcaggggctcccaacaaatgatagaccaggcttccctgtaccagtattctccacagaaccagcatgtagagcagcagccacactacacccacaaaccaactctggaatacagtccttttcccatacctccccagtcccccgcttatgaaccaaacctctttgatggtccagaatcacagttttgcccaaaccaaagcttagtttcccttcttggtgatcaaagggaatctgagaatattgctaatcccatgcagacttcctccagtgttcagcagcaaaatgatgctcacttgcacagcttcagcatgatgcccagcagcgcctgtgaggccatggtggggcacgagatggcctctgactcttcaaacacttcactgccattctcaaacatgggaaatccaatgaacaccacacagttagggaaatcactttttcagtggcaggtggagcaggaagaaagcaaattggcaaatatttcccaagaccagtttctttcaaaggatgcagatggtgacacgttccttcatattgctgttgcccaagggagaagggcactttcctatgttcttgcaagaaagatgaatgcacttcacatgctggatattaaagagcacaatggacagagtgcctttcaggtggcagtggctgccaatcagcatctcattgtgcaggatctggtgaacatcggggcacaggtgaacaccacagactgctggggaagaacacctctgcatgtgtgtgctgagaagggccactcccaggtgcttcaggcgattcagaagggagcagtgggaagtaatcagtttgtggatcttgaggcaactaactatgatggcctgactccccttcactgtgcagtcatagcccacaatgctgtggtccatgaactccagagaaatcaacagcctcattcacctgaagttcaggagcttttactgaagaataagagtctggttgataccattaagtgcctaattcaaatgggagcagcggtggaagcgaaggatcgcaaaagtggccgcacagccctgcatttggcagctgaagaagcaaatctggaactcattcgcctctttttggagctgcccagttgcctgtcttttgtgaatgcaaaggcttacaatggcaacactgccctccatgttgctgccagcttgcagtatcggttgacacaattagatgctgtccgcctgttgatgaggaagggagcagacccaagtactcggaacttggagaacgaacagccagtgcatttggttcccgatggccctgtgggagaacagatccgacgtatcctgaagggaaagtccattcagcagagagctccaccgtattagctccattagcttggagcctggctagcaacactcactgtcagttaggcagtcctgatgtatctgtacatagaccatttgccttatattggcaaatgtaagttgtttctatgaaacaaacatatttagttcactattatatagtgggttatattaaaagaaaagaagaaaaatatctaatttctcttggcagatttgcatatttcatacccaggtatctgggatctagacatctgaatttgatctcaatggtaacattgccttcaattaacagtagcttttgagtaggaaaggactttgatttgtggcacaaaacattattaatatagctattgacagtttcaaagcaggtaaattgtaaatgtttctttaagaaaaagcatgtgaaaggaaaaaggtaaatacagcattgaggcttcatttggccttagtccctgggagttactggcgttggacaggcttcagtcattggactagatgaaaggtgtccatggttagaatttgatctttgcaaactgtatataattgttatttttgtccttaaaaatattgtacatacttggttgttaacatggtcatatttgaaatgtataagtccataaaatagaaaagaacaagtgaattgttgctatttaaaaaaattttacaattcttactaaggagtttttattgtgtaatcactaagtctttgtagataaagcagatggggagttacggagttgttcctttactggctgaaagatatattcgaattgtaaagatgctttttctcatgcattgaaattatacattatttgtagggaattgcatgcttttttttttttttctcccgagacagggtcttgctctggcgcccaggctggagtacagtggcatgatcttggctcacttcagccttgacttgggctcaagtgatcctcctacctgagccttctgagtaactggaactacaggtgtgcactcctcgcctggctaattttttattttttgtacaggcaggatcttgccaccttgcccaggctggtcttgaactcctgagctcatgccatctgcctgccttagtctcccaaaatgctgggattacaggagtgagccaccatgcccggctggcagttgcatggaagagaacacctctttatggcttaccctctagaatttctaatttatgtgttctgttgaaatttttgtttttttacctttattgaaacaacaaaaagtcagtattgaaacatatcttcctgttttctgttgtcaaatgatgataatgtgccatgatgttttatatatatcattcagaaaaagttttattttttaataacattctattaacattattttgcttgccgctggcatgcctgaggaatgtatttggctttgattacacactaagtttttgtaataaatttgactcattaaaaaccttttttttttaaaaaaaaaaaaaaagaaaatctcattagtgaacttatctttgcagctgagtacttaaattctttttaaaaagataccctttggattgatcacattgtttgacccagtatgtcttgtagacacgttagttataatcaccttgtatctctaaatatggtgtgatatgaaccagtccattcacattggaaaaactgatggttttaaataaactaattcactaata

SEQ ID NO: 160504 - DNA, 3787 bp, Homo sapiens
  Payload ID: 11376
  Gene Symbol: NFKBIZ
  Gene Name: nuclear factor of kappa light polypeptide gene enhancer in B-cells inhibitor, zeta
  Uniprot ID: Q9BYH8
  ENST ID: ENST00000394054
  CDS Start-End: 280-2136
ctcttgccacgaggtcagacggcgagttcttagagaaaaaggctgcttagctgctgcttatcatgtaacctcaaaaggaaactgatcgtctttctcatgctgtcacgtacttgggttattatcgctgattacagctggaaacaattgatttgctcttacgtatttgtgtgacttgactcttcaaacacaaaggttaacaggaagatctcgagggccctggctgaacttcaccttttggctttcttggcctgatgctgaactctcgaggttgagccccatatgggggttggcaggcagcagagaggcccctttcaaggtgttcgggtaaagaactcagtgaaggaactcctgttgcacatccgaagtcataaacagaaggcttctggccaagctgtggatgattttaagacacaaggtgtgaacatagaacagttcagagaattgaagaacacagtatcatacagtgggaaaaggaaagggcccgattcgttgtctgatggacctgcttgcaaaaggccagctctgttgcattcccaatttttgacaccacctcaaacaccaacgcccggggagagcatggaagatgttcatctcaatgaacccaaacaggagagcagtgctgatctgcttcagaacattatcaacattaagaatgaatgcagccccgtttccctgaacacagttcaagttagctggctgaaccccgtggtggtccctcagagctcccccgcagagcagtgtcaggacttccatggagggcaggtcttttctccacctcagaaatgccaaccattccaagtcaggggctcccaacaaatgatagaccaggcttccctgtaccagtattctccacagaaccagcatgtagagcagcagccacactacacccacaaaccaactctggaatacagtccttttcccatacctccccagtcccccgcttatgaaccaaacctctttgatggtccagaatcacagttttgcccaaaccaaagcttagtttcccttcttggtgatcaaagggaatctgagaatattgctaatcccatgcagacttcctccagtgttcagcagcaaaatgatgctcacttgcacagcttcagcatgatgcccagcagcgcctgtgaggccatggtggggcacgagatggcctctgactcttcaaacacttcactgccattctcaaacatgggaaatccaatgaacaccacacagttagggaaatcactttttcagtggcaggtggagcaggaagaaagcaaattggcaaatatttcccaagaccagtttctttcaaaggatgcagatggtgacacgttccttcatattgctgttgcccaagggagaagggcactttcctatgttcttgcaagaaagatgaatgcacttcacatgctggatattaaagagcacaatggacagagtgcctttcaggtggcagtggctgccaatcagcatctcattgtgcaggatctggtgaacatcggggcacaggtgaacaccacagactgctggggaagaacacctctgcatgtgtgtgctgagaagggccactcccaggtgcttcaggcgattcagaagggagcagtgggaagtaatcagtttgtggatcttgaggcaactaactatgatggcctgactccccttcactgtgcagtcatagcccacaatgctgtggtccatgaactccagagaaatcaacagcctcattcacctgaagttcaggagcttttactgaagaataagagtctggttgataccattaagtgcctaattcaaatgggagcagcggtggaagcgaaggatcgcaaaagtggccgcacagccctgcatttggcagctgaagaagcaaatctggaactcattcgcctctttttggagctgcccagttgcctgtcttttgtgaatgcaaaggcttacaatggcaacactgccctccatgttgctgccagcttgcagtatcggttgacacaattagatgctgtccgcctgttgatgaggaagggagcagacccaagtactcggaacttggagaacgaacagccagtgcatttggttcccgatggccctgtgggagaacagatccgacgtatcctgaagggaaagtccattcagcagagagctccaccgtattagctccattagcttggagcctggctagcaacactcactgtcagttaggcagtcctgatgtatctgtacatagaccatttgccttatattggcaaatgtaagttgtttctatgaaacaaacatatttagttcactattatatagtgggttatattaaaagaaaagaagaaaaatatctaatttctcttggcagatttgcatatttcatacccaggtatctgggatctagacatctgaatttgatctcaatggtaacattgccttcaattaacagtagcttttgagtaggaaaggactttgatttgtggcacaaaacattattaatatagctattgacagtttcaaagcaggtaaattgtaaatgtttctttaagaaaaagcatgtgaaaggaaaaaggtaaatacagcattgaggcttcatttggccttagtccctgggagttactggcgttggacaggcttcagtcattggactagatgaaaggtgtccatggttagaatttgatctttgcaaactgtatataattgttatttttgtccttaaaaatattgtacatacttggttgttaacatggtcatatttgaaatgtataagtccataaaatagaaaagaacaagtgaattgttgctatttaaaaaaattttacaattcttactaaggagtttttattgtgtaatcactaagtctttgtagataaagcagatggggagttacggagttgttcctttactggctgaaagatatattcgaattgtaaagatgctttttctcatgcattgaaattatacattatttgtagggaattgcatgcttttttttttttttctcccgagacagggtcttgctctggcgcccaggctggagtacagtggcatgatcttggctcacttcagccttgacttgggctcaagtgatcctcctacctgagccttctgagtaactggaactacaggtgtgcactcctcgcctggctaattttttattttttgtacaggcaggatcttgccaccttgcccaggctggtcttgaactcctgagctcatgccatctgcctgccttagtctcccaaaatgctgggattacaggagtgagccaccatgcccggctggcagttgcatggaagagaacacctctttatggcttaccctctagaatttctaatttatgtgttctgttgaaatttttgtttttttacctttattgaaacaacaaaaagtcagtattgaaacatatcttcctgttttctgttgtcaaatgatgataatgtgccatgatgttttatatatatcattcagaaaaagttttattttttaataacattctattaacattattttgcttgccgctggcatgcctgaggaatgtatttggctttgattacacactaagtttttgtaataaatttgactcattaaaaaccttttttttttaaaaaaaaaaaaaaagaaaatctcattagtgaacttatctttgcagctgagtacttaaattctttttaaaaagataccctttggattgatcacattgtttgacccagtatgtcttgtagacacgttagttataatcaccttgtatctctaaatatggtgtgatatgaaccagtccattcacattggaaaaactgatggttttaaataaactaattcactaata

SEQ ID NO: 160505 - DNA, 564 bp, Homo sapiens
  Payload ID: 11376
  Gene Symbol: NFKBIZ
  Gene Name: nuclear factor of kappa light polypeptide gene enhancer in B-cells inhibitor, zeta
  ENST ID: ENST00000491281
  CDS Start-End: 176-564
gatgtaggtgtaattttcttcttgtgaatattttagtggaaagctgtagcagaggataagggtttgggaatagcgttaaaggtcatgacttatttctcagtttttatggaatttttcagtaaaaagacttgaccgtcaaagaaaaggaaactgctgttatcaagttgagccccatatgggggttggcaggcagcagagaggcccctttcaaggtgttcgggtaaagaactcagtgaaggaactcctgttgcacatccgaagtcataaacagaaggcttctggccaagctgtggatgattttaagacacaaggtgtgaacatagaacagttcagagaattgaagaacacagtatcatacagtgggaaaaggaaagggcccgattcgttgtctgatggacctgcttgcaaaaggccagctctgttgcattcccaatttttgacaccacctcaaacaccaacgcccggggagagcatggaagatgttcatctcaatgaacccaaacaggagagcagtgctgatctgcttcagaacattatcaacattaagaatgaatgcagccccgt

SEQ ID NO: 160506 - DNA, 1338 bp, Homo sapiens
  Payload ID: 11376
  Gene Symbol: NFKBIZ
  Gene Name: nuclear factor of kappa light polypeptide gene enhancer in B-cells inhibitor, zeta
  ENST ID: ENST00000461724
  CDS Start-End: 1008-1338
tcctcttgccacgaggtcagacggcgagttcttagagaaaaaggctgcttagctgctgcttatcatgtaacctcaaaaggaaactgatcgtctttctcatgctgtcacgtacttgggttattatcgctgattacagctggaaacaattgatttgctcttacgtatttgtgtgacttgactcttcaaacacaaaggttaacaggaagatctcgagggccctggctgaacttcaccttttggctttcttggcctgatgctgaactctcgaggttcgggatgttgcctaaaaccgtcgacaaacgctatgtttgagaagggaggctacgctggggcgccggaggagacaggcccttaagaaccttccagagatgccttaactgggctaacagctcgccgcgccggggcaggcagaggggtgcggggcgcgctccttccaggacttgccagtccccaagaaccaggccaaccggttccctccactgactcccgcctccctctgcaggcccagccctgcgccgcgcgccctctccccgggcgcccaggcccggcgggggcctagagggcagggatggcccgggcgagggacggggtcccggaggcgggaggcgggaggcgggaggcgggaagcgggaggctggaagccgcgcgctgtcggggtttcccggtgaagggcaggcaaacaaccggtcggtctgggcggagccgggcgggcggggcgagggcggagggcggagggcgcattgcctcatcctgtacattttactggaaatcggacgcatccggaggaggggctgggaggcggcccgggcaccgccaatggccgggccgggcgccggggaggtcggcgagcgctgcggcccgttaaataccctggcagtcccgcgccgcgcccgtactggcccgcgccgtccgcccgccgacagctccctgagccagcccgggaggcagccgcgcgcagcgagccggtggcgcaggtgtcggggtcctcgagcgcccagcctgggagcatgattgtggacaagctgctggacgacagccgcggcggagaggggctgcgggacgcggcgggcggctgcggcctcatgaccagcccgctcaacctgagctacttctacggcgcgtcgccgcccgccgccgccccgggcgcctgcgacgccagctgctcggtcttgggcccctcggcgcccggctcgcccggctccgactcctccgacttctcctctgcctcgtcggtgtcctcctgcggcgccgtggagtcccggtcgagaggcggcgcccgcgccgagcgccagccagttgagccccatatgggggttggcaggcagcagagaggcccct

SEQ ID NO: 160507 - DNA, 2006 bp, Homo sapiens
  Payload ID: 11376
  Gene Symbol: NFKBIZ
  Gene Name: nuclear factor of kappa light polypeptide gene enhancer in B-cells inhibitor, zeta
  ENST ID: ENST00000483180
  CDS Start-End: 204-2006
ctcttgccacgaggtcagacggcgagttcttagagaaaaaggctgcttagctgctgcttatcatgtaacctcaaaaggaaactgatcgtctttctcatgctgtcacgtacttgggttattatcgctgattacagctggaaacaattgatttgctcttacgtatttgtgtgacttgactcttcaaacacaaagttgagccccatatgggggttggcaggcagcagagaggcccctttcaaggtgttcgggtaaagaactcagtgaaggaactcctgttgcacatccgaagtcataaacagaaggcttctggccaagctgtggatgattttaagacacaaggtgtgaacatagaacagttcagagaattgaagaacacagtatcatacagtgggaaaaggaaagggcccgattcgttgtctgatggacctgcttgcaaaaggccagctctgttgcattcccaatttttgacaccacctcaaacaccaacgcccggggagagcatggaagatgttcatctcaatgaacccaaacaggagagcagtgctgatctgcttcagaacattatcaacattaagaatgaatgcagccccgtttccctgaacacagttcaagttagctggctgaaccccgtggtggtccctcagagctcccccgcagagcagtgtcaggacttccatggagggcaggtcttttctccacctcagaaatgccaaccattccaagtcaggggctcccaacaaatgatagaccaggcttccctgtaccagtattctccacagaaccagcatgtagagcagcagccacactacacccacaaaccaactctggaatacagtccttttcccatacctccccagtcccccgcttatgaaccaaacctctttgatggtccagaatcacagttttgcccaaaccaaagcttagtttcccttcttggtgatcaaagggaatctgagaatattgctaatcccatgcagacttcctccagtgttcagcagcaaaatgatgctcacttgcacagcttcagcatgatgcccagcagcgcctgtgaggccatggtggggcacgagatggcctctgactcttcaaacacttcactgccattctcaaacatgggaaatccaatgaacaccacacagttagggaaatcactttttcagtggcaggtggagcaggaagaaagcaaattggcaaatatttcccaagaccagtttctttcaaaggatgcagatggtgacacgttccttcatattgctgttgcccaagggagaagggcactttcctatgttcttgcaagaaagatgaatgcacttcacatgctggatattaaagagcacaatggacagagtgcctttcaggtggcagtggctgccaatcagcatctcattgtgcaggatctggtgaacatcggggcacaggtgaacaccacagactgctggggaagaacacctctgcatgtgtgtgctgagaagggccactcccaggtgcttcaggcgattcagaagggagcagtgggaagtaatcagtttgtggatcttgaggcaactaactatgatggcctgactccccttcactgtgcagtcatagcccacaatgctgtggtccatgaactccagagaaatcaacagcctcattcacctgaagttcaggagcttttactgaagaataagagtctggttgataccattaagtgcctaattcaaatgggagcagcggtggaagcgaaggatcgcaaaagtggccgcacagccctgcatttggcagctgaagaagcaaatctggaactcattcgcctctttttggagctgcccagttgcctgtcttttgtgaatgcaaaggcttacaatggcaacactgccctccatgttgctgccagcttgcagtatcggttgacacaattagatgctgtccgcctgttgatgaggaagggagcagacccaagtactcggaacttggagaacgaacagccagtgcatttggttcccgatggccctgtgggagaacag

SEQ ID NO: 160508 - DNA, 548 bp, Homo sapiens
  Payload ID: 11376
  Gene Symbol: NFKBIZ
  Gene Name: nuclear factor of kappa light polypeptide gene enhancer in B-cells inhibitor, zeta
  ENST ID: ENST00000477601
  CDS Start-End: 1-392
gcctgactccccttcactgtgcagtcatagcccacaatgctgtggtccatgaactccagagaaatcaacagcctcattcacctgaagttcaggagcttttactgaagaataagagtctggttgataccattaagtgcctaattcaaatgggagcagcggtggaagcgaaggcttacaatggcaacactgccctccatgttgctgccagcttgcagtatcggttgacacaattagatgctgtccgcctgttgatgaggaagggagcagacccaagtactcggaacttggagaacgaacagccagtgcatttggttcccgatggccctgtgggagaacagatccgacgtatcctgaagggaaagtccattcagcagagagctccaccgtattagctccattagcttggagcctggctagcaacactcactgtcagttaggcagtcctgatgtatctgtacatagaccatttgccttatattggcaaatgtaagttgtttctatgaaacaaacatatttagttcactattatatagtgggttatattaaaa
